United States Patent Application Publication US 2004/0253606 A1 - sequence listing, part 3

SEQ ID NO: 1962 - protein, 549 aa, Homo sapiens
MASASSGPSSSVGFSSFDPAVPSCTLSSASGIKRPMASEVPYASGMPIKKIGHRSVDSSGETTYKKTTSSALKGAIQLGITHTVGSLSTKPERDVLMQDFYVVESIFFPSEGSNLTPAHHYNDFRFKTYAPVAFRYFRELFGIRPDDYLYSLCSEPLIELCSSGASGSLFYVSSDDEFIIKTVQHKEAEFLQKLLPGYYMNLNQNPRTLLPKFYGLYCVQAGGKNIRIVVMNNLLPRSVKMHIKYDLKGSTYKRRASQKEREKPLPTFKDLDFLQDIPDGLFLDADMYNALCKTLQRDCLVLQSFKIMDYSLLMSIHNIDHAQREPLSSETQYSVDTRRPAPQKALYSTAMESIQGEARRGGTMETDDHMGGIPARNSKGERLLLYIGIIDILQSYRFVKKLEHSWKALVHDGDTVSVHRPGFYAERFQRFMCNTVFKKIPLKPSPSKKFRSGSSFSRRAGSSGNSCITYQPSVSGEHKAQVTTKAEVEPGVHLGRPDVLPQTPPLEEISEGSPIPDPSFSPLVGETLQMLTTSTTLEKLEVAESEFTH

SEQ ID NO: 1963 - DNA, 6127 bp, Homo sapiens
ggagagggctgcgcgcttctcgccaagcaagcgggaggcgcactggggccgccgccgttcccgcgctcctccctctcctctgcacccactgtcacgctacccgcccgcgggggagcctcgagagcctccaggtgaattgaaagtcgtttccgggggaggacggagagggtgctgcagtcctggcatgccctgaaactgcaagtcgggcagaaacgacccggcggaggagcagggcgcgcagcgccctgcgcagcatccccgggctgccagaagaggccaccactcggctggcagccgcgagcggcggccgaacctcggccccagactcgggcccccggcacgctcgcccgggagataccccttccccctcttgcgcatttcgcagctgcgctggtgtggggcatgagagcgaggtggctccaggtctccgcggagcagctgccagtgggagagcgaggagaggcgagggggcggcagcctcggcccgaaacggagatcctggggtcctaaatttgtggccgattgcactgtgtcctggagacggagtggaaccacagcccagagcccctgggaatcatccctgaaagactgcattacttctccatggagtcttcctcctcctgcttattttctttttggaacaaggcaaaggcaatctgcatgtaacatcaccagaagatgcagaatgccgcagaaccaaggaacgcctttctaatggaaacagtcgtggttcagtttccaagtcttcccgcaatatcccaaggagacacaccctaggggggccccgaagttccaaggaaatactgggaatgcaaacatctgagatggatcggaagagagaagcgttcctagaacatctgaagcagaagtacccccaccacgcctctgcaatcatgggtcaccaagagaggctgagagaccagacaaggagccccaaactgtctcacagtcctcaaccacccagtctgggtgacccggtcgagcatttatcagagacgtccgctgattctttggaagccatgtctgagggggatgctccaacccctttttccagaggcagccggactcgtgcgagccttcctgtggtgaggtcaaccaaccagacgaaagaaagatctctgggggttctctatctccagtatggcgatgaaaccaagcagctcaggatgccgaatgaaatcacaagtgcagacacaatccgtgctctcttcgtaagtgcctttccacagcagctcaccatgaaaatgctggaatcgcccagtgtcgccatttacatcaaagatgaaagcagaaatgtctattatgaattaaatgatgtaaggaacattcaagacagatcactcctcaaagtgtacaacaaggatcctgcacatgcgtttaatcacacaccaaaaactatgaatggagacatgaggatgcagagagaacttgtttatgcaagaggagatggccctggggcccctcgccccggatctactgctcatccaccccatgcgattccaaattccccaccgtctactccagtgccccattccatgcccccctccccgtccagaattccttatgggggcacccgctccatggttgttcctggcaatgccaccatccccagggacagaatctccagcctgccagtctccagacccatctctccaagcccaagcgccattttagaaagaagagatgtcaagcctgatgaagacatgagtggcaaaaacattgcaatgtacagaaatgagggtttctatgctgatccttacctttatcacgagggacggatgagcatagcctcatcccatggtggacacccactggatgtccccgaccacatcattgcatatcaccgcaccgccatccggtcagcgagtgcttattgtaacccctcaatgcaagcggaaatgcatatggaacaatcactgtacagacagaaatcaaggaaatatccggatagccatttgcctacactgggctccaaaacaccccctgcctctcctcacagagtcagtgacctgaggatgatagacatgcacgctcactataatgcccacggcccccctcacaccatgcagccagaccgggcctctccgagccgccaggcctttaaaaaggagccaggcaccttggtgtatatagaaaagccacggagcgctgcaggattatccagccttgtagacctcggccctcctctaatggagaagcaagtttttgcctacagcacggcgacaatacccaaagacagagagaccagagagaggatgcaagccatggagaaacagattgccagtttaactggccttgttcagtctgcgctttttaaagggcccattacaagttatagcaaagatgcgtctagcgagaaaatgatgaaaaccacagccaacaggaaccacacagatagtgcaggaacgccccatgtgtctggtgggaagatgctcagtgctctggagtccacggtgcctcccagccagcctccacctgtgggcacctcagccatccacatgagcctgcttgagatgaggcggagcgtggcggaactcaggctccagctccagcagatgcggcagctccagctgcagaaccaggagttgctgagggcaatgatgaagaaggccgagctggaaatcagtggcaaagtgatggaaacaatgaagagactggaggatcccgtgcagcgacagcgcgtcctagtggagcaagagagacaaaaatatcttcatgaggaagagaagatcgtcaagaagttgtgcgagttggaagactttgttgaagacttgaagaaggactccacggcagccagccgattggttactctgaaagacgtggaagacggggctttcctcctgcgtcaagtgggagaggctgtagctaccctgaaaggagaatttccaaccttacaaaacaagatgcgagccatcctgcgcatagaagtggaggccgtgcggtttctgaaggaggagccacacaagctggacagtctcctgaagcgtgtgcgcagcatgacagacgtcctgaccatgctgcggagacatgtcactgatgggctcctgaaaggcacggacgcagcccaagccgcacagtacatggctatggaaaaggccacagccgcagaagtcctgaagagtcaggaggaggcagcccacacctccggccagcccttccacagcacaggtgcccctggcgatgcgaagtcggaagtggtgcctttgtccggcatgatggttcgccacgcgcagagctcccctgtggtcatccagccctcccagcactccgtggccctgctgaaccctgctcagaacttgcctcacgtggccagctccccagccgtcccccaggaagcaacctccactctgcagatgtcgcaggctccgcagtccccacagatacccatgaatgggtctgccatgcagagcttgttcattgaagaaatccacagtgtgagtgccaagaacagggcagtgtctatcgagaaagcagaaaagaaatgggaggaaaaaaggcaaaatctggatcactataatgggaaagagtttgagaagctcctagaagaagctcaggccaatatcatgaagtcaataccaaatctggagatgccgccagccacaggcccactgccaaggggagatgccccagtggacaaggtggaactttcagaagattctccaaattcggaacaggacttggaaaagctggggggaaagtcgccccctcctcctccgccacctcctcgtcgaagctacctgccaggatcgggactcaccaccacgaggtcaggcgatgtggtctacaccggcagaaaggagaacatcaccgctaaggcaagcagtgaagatgctggaccaagcccacagaccagagctacaaaatatccagcagaggagcctgcttcagcctggaccccatccccaccgcctgtcaccacctcctcctcaaaggatgaggaggaagaagaagaagaaggagacaaaataatggcagaactccagggctccagcggggccccacagacgagcaggatgcctgtccccatgagtgccaagaacagacccggaaccctggacaaacccggcaagcagtccaaactgcaggatccccgccaatatcgtcaggctaatggaagtgctaagaaatctggtggggactttaagcctacttccccctccttacctgcttctaagattccagccctttctcccagctctgggaaaagcagttctctgccctcttctagtggtgacagctctaacctccctaatccacctgctactaaaccatcgattgcttctaaccctctcagcccccaaacaggaccacctgctcactctgcctccctcatcccttctgtctctaatggctctttgaagtttcagagcctcactcatacaggtaaaggtcaccatctttcattctcaccgcagagtcaaaatggccgagcaccccctcctttgtcattttcctcctcccctccttctcctgcctcctccgtctcactgaatcaaggtgccaagggcaccaggaccatccatactcccagcctcaccagctacaaggcacagaatggaagttcaagcaaagccaccccatccacagcaaaagaaacctcttaaaggtcaaatcctattaggcacaagtcggagttacatttaaaaaaaattaacagtctacaacaactgttttcacaagagaatgtaacatattgctgtatcgtttgaggcttaatgctaaatatgtgctaaatactggattaatagatttcagtaaagctcgttcgttttgtttggttttctttttacctagttgctatagtgtctacagtctatactcaatacctataaaatgcagtaagcatgtgttacagaaagaggttctggtgggagagaaaggtgcgtgtgagacaggagaattgtcttaagcatataaaacatgtatgattccagaattttagtatgttttgtataaaactatttttcattacggagactagaagtgaacagagaattacacaagtgtgactatacaaattgtaaaacagatactataatatttccttttattttagtgttatttagctttattacagatttctatttttgtcaaaacttcatggttcctttcaagatcttttttgccaaaacattttgatactatagcattgtacatttgaaagtagtgttctagactataaaaccaatgaacttctacatgagccctacagacaggcatgtgtagaaggcaatttatcaaacctattgcactgccatgaaaagtgtgtataataatttgctagcccaagcaagctagttttctttgcttgcttcttttctttcttttttccttcctttttttttttttttttcttttttaacatgttgagattctctagttgttttctttggcgtatctaaccccttcttttgttttctgagacctggtaacccacgctcttgcattgtggattttaaaatgtatactctgtacggttctgtaaaccgaaaaacttttgtaaatataaatatacatagacataaaaatactgtatgtgacagcacatagagtagttttcccacaccaaagttaatttttatgcatgctttaaaagtatatatcgggaccggcagaaatggaagtatccatacatttttaaaaagcaacaagtttgcacagctagagtgtttttgtaaataaatgtatttgtataacacagtcatgtaatatacagaactataagcagagactttgcaaaactaaataaagggctgcatgcttattattttttgtaccttgtcactataactacttcctagtcaaagaacgaaatgtaactgttaccgagttaaatgtttttccgctttgagggatgtaaccacatccactcagaggacactacttttctgaaagctctggggtgactaatgatgagttcctaataaattaattgcaagtgtggtgccttggatgtggcctgttggctcgctttcttctctgtggcttatcaaggtgtagatgacagaaagcaaacctggatacagagtttccaccctcagttcctggaggggctcttattattttctctctttttaaaaaacttccagtagaagtaaagtggaaataaaatgtctttatcacttgg

SEQ ID NO: 1964 - protein, 1339 aa, Homo sapiens
KTALLLHGVFLLLLIFFLEQGKGNLHVTSPEDAECRRTKERLSNGNSRGSVSKSSRNIPRRHTLGGPRSSKEILGMQTSEMDRKREAFLEHLKQKYPHHASAIMGHQERLRDQTRSPKLSHSPQPPSLGDPVEHLSETSADSLEAMSEGDAPTPFSRGSRTRASLPVVRSTNQTKERSLGVLYLQYGDETKQLRMPNEITSADTIRALFVSAFPQQLTMKMLESPSVAIYIKDESRNVYYELNDVRNIQDRSLLKVYNKDPAHAFNHTPKTMNGDMRMQRELVYARGDGPGAPRPGSTAHPPHAIPNSPPSTPVPHSMPPSPSRIPYGGTRSMVVPGNATIPRDRISSLPVSRPISPSPSAILERRDVKPDEDMSGKNIAMYRNEGFYADPYLYHEGRMSIASSHGGHPLDVPDHIIAYHRTAIRSASAYCNPSMQAEMHMEQSLYRQKSRKYPDSHLPTLGSKTPPASPHRVSDLRMIDMHAHYNAHGPPHTMQPDRASPSRQAFKKEPGTLVYIEKPRSAAGLSSLVDLGPPLMEKQVFAYSTATIPKDRETRERMQAMEKQIASLTGLVQSALFKGPITSYSKDASSEKMMKTTANRNHTDSAGTPHVSGGKMLSALESTVPPSQPPPVGTSAIHMSLLEMRRSVAELRLQLQQMRQLQLQNQELLRAMMKKAELEISGKVMETMKRLEDPVQRQRVLVEQERQKYLHEEEKIVKKLCELEDFVEDLKKDSTAASRLVTLKDVEDGAFLLRQVGEAVATLKGEFPTLQNKMRAILRIEVEAVRFLKEEPHKLDSLLKRVRSMTDVLTMLRRHVTDGLLKGTDAAQAAQYMAMEKATAAEVLKSQEEAAHTSGQPFHSTGAPGDAKSEVVPLSGMMVRHAQSSPVVIQPSQHSVALLNPAQNLPHVASSPAVPQEATSTLQMSQAPQSPQIPMNGSAMQSLFIEEIHSVSAKNRAVSIEKAEKKWEEKRQNLDHYNGKEFEKLLEEAQANIMKSIPNLEMPPATGPLPRGDAPVDKVELSEDSPNSEQDLEKLGGKSPPPPPPPPRRSYLPGSGLTTTRSGDVVYTGRKENITAKASSEDAGPSPQTRATKYPAEEPASAWTPSPPPVTTSSSKDEEEEEEEGDKIMAELQGSSGAPQTSRMPVPMSAKNRPGTLDKPGKQSKLQDPRQYRQANGSAKKSGGDFKPTSPSLPASKIPALSPSSGKSSSLPSSSGDSSNLPNPPATKPSIASNPLSPQTGPPAHSASLIPSVSNGSLKFQSLTHTGKGHHLSFSPQSQNGRAPPPLSFSSSPPSPASSVSLNQGAKGTRTIHTPSLTSYKAQNGSSSKATPSTAKETS

SEQ ID NO: 1965 - DNA, 4204 bp, Homo sapiens; identical to SEQ ID NO: 1

SEQ ID NO: 1966 - protein, 1049 aa, Homo sapiens; identical to SEQ ID NO: 2

SEQ ID NO: 1967 - DNA, 372 bp, Homo sapiens
ttttgtatttttagtagagacgggacttcaccatgccggccaggctggtcttgaacgcctgacctcaggtgatctgcctgcctcagcctcccaaagtgctggtttgattacaggtgtgagccaccacatctggccatttgccagatcttattctttgaaactatacaagcaatttttaaaaaattaaaataagatttcctaattacatatttctgagaggtttaaggcaatgattctctgacgaggattaactcttacatctgggttgcactcatagggtaggtaaagaaaagaaaaagtgtactgttgagagttgatccataaagcagatggggaaatatgaaaaggcagcagaggctgggtgtaatccca

SEQ ID NO: 1968 - DNA, 3416 bp, Homo sapiens
gccgccgagggcagccagcccctcccctacccggagcagcccgctggggccgtcccgagcggcgacacactaggagtcccggccggccagccagggcagccgcggtcccgggactcggccgtgagtgctgcgggacggatggtggcggcgggagcgcggagaccacggcgggcgccgtggagccgggcgccgtgcagccggagctgcgcgcggggcatgcggctgcgccccggcccctcggcccccggcctcggcccccgcgctccggccccagccccggccgccggcccccgcggagtgcagcgaccgcgccgccgctgagggaggcgccccaccatgccgcgggccccggcgccgctgtacgcctgcctcctggggctctgcgcgctcctgccccggctcgcaggtctcaacatatgcactagtggaagtgccacctcatgtgaagaatgtctgctaatccacccaaaatgtgcctggtgctccaaagaggacttcggaagcccacggtccatcacctctcggtgtgatctgagggcaaaccttgtcaaaaatggctgtggaggtgagatagagagcccagccagcagcttccatgtcctgaggagcctgcccctcagcagcaagggttcgggctctgcaggctgggacgtcattcagatgacaccacaggagattgccgtgaacctccggcccggtgacaagaccaccttccagctacaggttcgccaggtggaggactatcctgtggacctgtactacctgatggacctctccctgtccatgaaggatgacttggacaatatccggagcctgggcaccaaactcgcggaggagatgaggaagctcaccagcaacttccggttgggatttgggtcttttgttgataaggacatctctcctttctcctacacggcaccgaggtaccagaccaatccgtgcattggttacaagttgtttccaaattgcgtcccctcctttgggttccgccatctgctgcctctcacagacagagtggacagcttcaatgaggaagttcggaaacagagggtgtcccggaaccgagatgcccctgaggggggctttgatgcagtactccaggcagccgtctgcaaggagaagattggctggcgaaaggatgcactgcatttgctggtgttcacaacagatgatgtgccccacatcgcattggatggaaaattgggaggcctggtgcagccacacgatggccagtgccacctgaacgaggccaacgagtacacagcatccaaccagatggactatccatcccttgccttgcttggagagaaattggcagagaacaacatcaacctcatctttgcagtgacaaaaaaccattatatgctgtacaagaattttacagccctgatacctggaacaacggtggagattttagatggagactccaaaaatattattcaactgattattaatgcatacaatagtatccggtctaaagtggagttgtcagtctgggatcagcctgaggatcttaatctcttctttactgctacctgccaagatggggtatcctatcctggtcagaggaagtgtgagggtctgaagattggggacacggcatcttttgaagtatcattggaggcccgaagctgtcccagcagacacacggagcatgtgtttgccctgcggccggtgggattccgggacagcctggaggtgggggtcacctacaactgcacgtgcggctgcagcgtggggctggaacccaacagcgccaggtgcaacgggagcgggacctatgtctgcggcctgtgtgagtgcagccccggctacctgggcaccaggtgcgagtgccaggatggggagaaccagagcgtgtaccagaacctgtgccgggaggcagagggcaagccactgtgcagcgggcgtggggactgcagctgcaaccagtgctcctgcttcgagagcgagtttggcaagatctatgggcctttctgtgagtgcgacaacttctcctgtgccaggaacaagggagtcctctgctcaggccatggcgagtgtcactgcggggaatgcaagtgccatgcaggttacatcggggacaactgtaactgctcgacagacatcagcacatgccggggcagagatggccagatctgcagcgagcgtgggcactgtctctgtgggcagtgccaatgcacggagccgggggcctttggggagatgtgtgagaagtgccccacctgcccggatgcatgcagcaccaagagagattgcgtcgagtgcctgctgctccactctgggaaacctgacaaccagacctgccacagcctatgcagggatgaggtgatcacatgggtggacaccatcgtgaaagatgaccaggaggctgtgctatgtttctacaaaaccgccaaggactgcgtcatgatgttcacctatgtggagctccccagtgggaagtccaacctgaccgtcctcagggagccagagtgtggaaacacccccaacgccatgaccatcctcctggctgtggtcggtagcatcctccttgttgggcttgcactcctggctatctggaagctgcttgtcaccatccacgaccggagggagtttgcaaagtttcagagcgagcgatccagggcccgctatgaaatggcttcaaatccattatacagaaagcctatctccacgcacactgtggacttcaccttcaacaagttcaacaaatcctacaatggcactgtggactgatgtttccttctccgaggggctggagcggggatctgatgaaaaggtcagactgaaacgccttgcacggctgctcggcttgatcacagctccctaggtaggcaccacagagaagaccttctagtgagcctgggccaggagcccacagtgctgtacaacaagggaaaggtagcctggccatgtcacctggctgctagccagagccatgccaggttcgcgtccctaagagcttgggataaagcaaggggaccttggcgctctcagctttccctgccacatccagcttgttgtcccaatgaaatactgagatgctgggctgtctctcccttccaggaatcgtgggcccccagcctggccagacaagaagactgtcaggaagggtcggagtctgtaaaaccagcatacagtttggcttttttcacattgatcatttttatatgaaataaaaagatcctgcatttatggtgtagttctgagtcctgagacttttctgcgtgatgctatgccttgcacacaggtgttggtgatggggctgttgagatgcctgttgaaggtacatcgtttgcaaatgtcagtttcctctcctgtccgtgtttgtttagtacttttataatgaaaagaaacaagattgtttgggattggaagtaaagattaaaaccaaaagaatttgtgtttgtctgccc

SEQ ID NO: 1969 - protein, 799 aa, Homo sapiens
MPRAPAPLYACLLGLCALLPRLAGLNICTSGSATSCEECLLIHPKCAWCSKEDFGSPRSITSRCDLRANLVKNGCGGEIESPASSFHVLRSLPLSSKGSGSAGWDVIQMTPQEIAVNLRPGDKTTFQLQVRQVEDYPVDLYYLMDLSLSMKDDLDNIRSLGTKLAEEMRKLTSNFRLGFGSFVDKDISPFSYTAPRYQTNPCIGYKLFPNCVPSFGFRHLLPLTDRVDSFNEEVRKQRVSRNRDAPEGGFDAVLQAAVCKEKIGWRKDALHLLVFTTDDVPHIALDGKLGGLVQPHDGQCHLNEANEYTASNQMDYPSLALLGEKLAENNINLIFAVTKNHYMLYKNFTALIPGTTVEILDGDSKNIIQLIINAYNSIRSKVELSVWDQPEDLNLFFTATCQDGVSYPGQRKCEGLKIGDTASFEVSLEARSCPSRHTEHVFALRPVGFRDSLEVGVTYNCTCGCSVGLEPNSARCNGSGTYVCGLCECSPGYLGTRCECQDGENQSVYQNLCREAEGKPLCSGRGDCSCNQCSCFESEFGKIYGPFCECDNFSCARNKGVLCSGHGECHCGECKCHAGYIGDNCNCSTDISTCRGRDGQICSERGHCLCGQCQCTEPGAFGEMCEKCPTCPDACSTKRDCVECLLLHSGKPDNQTCHSLCRDEVITWVDTIVKDDQEAVLCFYKTAKDCVMMFTYVELPSGKSNLTVLREPECGNTPNAMTILLAVVGSILLVGLALLAIWKLLVTIHDRREFAKFQSERSRARYEMASNPLYRKPISTHTVDFTFNKFNKSYNGTVD

SEQ ID NO: 1970 - DNA, 6674 bp, Homo sapiens
ggacttgctcagagctgccaggaccctcgctggggcggtgtcagacttgctgaaagctgtgcagcctacttctggagagcctcgacagacagttttgactgctgctggcagcatcggacaagccagtggggatcttctgagacagattggagagaatgagactgatgagcgattccaggatgttttaatgagtttggccaaagctgttgccaatgcagctgccatgttggtactaaaggcaaagaatgttgcccaagtggccgaagacactgtcctacagaacagggtaattgctgctgccacccagtgtgccctctccacctcccagcttgtggcatgtgccaaggttgtgagccccactattagctcccctgtgtgccaggagcagctgattgaagcagggaagctggtggaccgctcggtggagaactgtgtccgtgcctgccaggcggccactaccgatagtgagctcctgaagcaggtcagcgcagcggccagcgtggtcagccaggccctccatgatctcctgcagcatgtgcggcagtttgccagccgaggcgagcccatcggccgctacgaccaggctactgacaccatcatgtgtgtcaccgagagcatcttcagctccatgggtgacgctggtgaaatggtgcgccaggcgcgggttctggcccaagccacatcagacctcgtcaatgccatgaggtcagatgcagaagccgaaatcgacatggagaattcaaagaagctcctggcagcagcaaaactcttagctgactccactgctcgcatggtggaagctgcaaagggggctgcagccaacccagagaatgaggaccagcagcaaaggctgagagaagctgcagaaggcctccgggtagcaaccaacgcagctgcccagaatgctattaagaaaaaaattgtcaaccgactggaggttgcagccaagcaggccgcagcggcagctacacagaccatcgccgcctcccagaatgcagctgtttccaacaagaaccctgcggcccagcagcagctggtccagagttgcaaggcagtggctgatcacatccctcagctggtccagggagtgagggggagccaagctcaagctgaagacctgagtgcccagctggctctcatcatctccagccagaacttcctccagcctggaagcaagatggtgtcctctgccaaagccgcagtgcccaccgtgagtgaccaggccgcagccatgcagctgagccagtgtgccaagaacctggccaccagcttggcggagctgcgtaccgcctcgcagaaggcccatgaagcttgtggtccgatggaaatcgattcagctctgaatacggtgcagacgcttaagaatgaactgcaggatgccaagatggcagccgtggagagccagctgaagccacttccaggggaaacgctggaaaaatgtgctcaggacctgggaagcacatccaaggcggtgggctcctccatggcacagctgctgacctgtgctgctcaaggcaacgaacactacacaggggtggctgctagagagacggcccaagctctgaaaacactggcccaggccgcccgtggagtggctgcatcgacaaccgaccccgcggccgcccatgccatgttagattctgctcgagacgtgatggagggctccgccatgctcattcaagaggccaagcaggccctgattgcacctggagatgcagagcgtcaacaaagactggctcaggtggctaaagccgtctcacactccttgaataactgcgtaaattgcctccctgggcagaaggatgtggacgtggccttgaagagcatcggggagtccagcaagaagctgcttgtggattcgctacctccaagcacgaagcctttccaggaagcccagagtgaactgaaccaggcagcagctgatctgaaccagtctgctggggaagtggtccatgccacccggggccagagtggagagttggctgcagcctctggaaagttcagtgatgattttgatgaattcctcgatgctggcattgagatggctggccaagctcagacaaaagaagaccagatccaagtgatagggaacctcaagaatatctcgatggcatccagcaagctgctgttagctgccaagtctctctctgtagatccaggagctcccaatgcgaaaaatctcctggctgcagctgcaagagctgtgacagagagcatcaatcaactcatcactctgtgtacccaacaagctccgggccagaaagagtgcgataatgccctgcgggagctcgagactgtgaaggggatgttggacaatcctaatgaacctgttagtgacctctcttactttgactgcattgagagtgtgatggaaaactccaaggttctgggtgaatcgatggcagggatttcacagaatgccaagaccggagacctccctgcctttggggaatgtgtggggattgcatccaaggctctctgtgggctgacagaggctgcagcccaggctgcatacttggttggcatctctgatccaaacagccaggcaggccaccagggcctggtggaccccatccagtttgccagggctaaccaggccatccagatggcatgccagaacttggtggaccctggcagcagcccatcacaggtcctgtcagccgccacaattgttgccaagcacacgtcagccttgtgtaatgcctgccgcatcgcctcatccaagacggccaacccagtagccaagaggcacttcgtccagtcagccaaggaagtcgccaacagcactgccaacctggtgaagaccatcaaggccctggatggggatttctctgaagacaaccgcaataagtgtcgcatcgccaccgcacccttgattgaagctgtggagaacctgacagcgttcgcctcaaaccctgagtttgtcagcattcctgcccagatcagctccgagggttcccaggcacaggaaccaatcctggtctcagccaagaccatgctggagagttcatcgtacctcattcgcactgcacgctctctggccatcaaccccaaagacccacccacctggtctgtactggctggacattcccatacagtgtccgactccatcaagagtctcatcacttctatcagggacaaggcccctggacagagggagtgtgattactccatcgatggcatcaaccggtgcatccgggacatcgagcaggcctcgctggccgccgtcagccagagcctggccacgagggacgacatctctgtggaggccctgcaggagcagctgacttcggtggtccaggaaatcggacaccttatcgatcccatcgccacagcggctcggggagaagcagctcagctgggacataaggtgacacaactggcaagctattttgagcccttgatcttagccgcagttggtgtggcctccaagattcttgatcatcagcagcagatgacggtgctggaccagaccaagactctcgcagagtctgccttgcagatgttgtatgcagccaaagaaggtggcggaaaccccaaggcacaacacacccatgacgccatcacagaggccgcccagttgatgaaggaagccgtggatgacatcatggtgacgctgaacgaagctgccagtgaagtggggctggttgggggcatggtggacgccattgcagaagccatgagcaagctggatgaaggcactcctccagaaccaaagggaacatttgtcgactatcagacgactgtggttaaatactccaaagccattgcggtgacagctcaggaaatgatgactaagtcggttactaacccggaggagttgggaggactggcttcacaaatgaccagtgactatgggcacctggctttccagggccagatggcagcagccacggcggaaccagaggagatcggattccagattcgcactcgtgtgcaggacctgggccacggctgtatcttcctggtgcagaaggcaggggccctccaggtctgccccacagacagctacaccaagagggagctgatcgaatgcgcccgtgccgtcacggaaaaggtctccttggtgctctcggctctccaggccgggaacaaaggaacccaggcatgcattacagccgccaccgctgtgtctgggatcattgccgacctggacaccaccattatgtttgcaacagcggggacgctgaatgcagagaacagtgagaccttcgcagaccacagggagaacattctcaagacggccaaggccttggtagaagacacgaaactacttgtgtcaggagctgcgtccactcctgacaagctggcccaggcggcccagtcctcagcagccaccatcacccagctcgcagaagtggtcaagctgggggcagccagcctgggctccgacgaccccgagacccaggtggttttgatcaatgccatcaaagatgtggccaaggccctttctgatctcatcagtgctaccaagggagctgccagcaagccagtggacgacccttccatgtaccagctcaagggggctgccaaggtgatggtgaccaatgtcacctcgctcctcaagactgtaaaggcagtggaggatgaggccacccggggcaccagggcgcttgaggccacaattgaatgcataaagcaggagcttacggtgttccagtcaaaagacgtacctgaaaagacatcatcacctgaagaatccataaggatgacgaaaggcatcaccatggcaacagccaaagccgtggcagctgggaactcatgtagacaggaggacgtgattgctactgccaacctgagccggaaagccgtgtcagatatgttgacggcttgcaagcaagcatccttccaccccgatgtcagtgacgaggtgagaaccagagccttgcgtttcgggacggagtgcacccttggctacttggacctcctggagcacgtcttggtgattcttcagaaaccaaccccagaattcaagcagcagctggccgctttctccaagcgagtcgccggcgctgtgacagagctcatccaggcggcggaagccatgaaaggaacagagtgggtggatccagaagacccaactgtcattgcagaaacagagttactgggggctgcagcatccatcgaagctgctgctaagaagttagagcaactgaagccaagagcaaaaccaaaacaagcggatgagaccctggactttgaggaacagatcttggaagctgctaaatccattgctgctgccacaagcgccctggtcaaatcggcctcagcagcccagagggagctggtggcccaaggaaaggtgggctccatccctgccaatgctgcagacgacggacagtggtcacaggggctgatttctgctgcccggatggtggcggctgcgaccagcagtctctgtgaggcggccaatgcctccgttcagggacacgccagcgaggagaagctcatctcatctgccaagcaggtcgccgcttccacggctcagctgctggtggcctgcaaggtgaaggccgaccaggattcagaggccatgaggcggctacaggcggcaggaaatgctgtgaaaagagcctcagacaatcttgtccgtgcagcccagaaggcagcttttggcaaagctgatgacgacgatgttgtagtgaaaaccaagtttgtggggggcattgctcagatcatcgccgcccaggaagaaatgctaaagaaagagcgagaactggaagaagcaaggaaaaaactggcccaaatccgccagcagcagtataagtttttacccaccgagctgagggaagatgagggctaaaggtgcgagcccagatggcgagccccaggggatggccctggctgaactggacagacagtgttcctgagaggctgggcacttagctggaaaccgcccacctccctcccgggtgagcctggagccctgcgtgcttgttctcacatctctgtcccgtcggcactggctgcatgatcgtgatgtcacacggtacaatgtcctacccacaactcctctgccgcctcccctcatgcctcaccgtgtctcaggagagaggggtgcacgtttcatggactgttaccaacaaagaaaagtcagtattatgttgttctcagacactttggcttttgttggtccttctcttaggcctgctcctggacctctttatgatattgtgatagggaaaaaaatcattgacgtcatagaatattcttcttcctctcaggagaagacggaagctggagttggacatggttcataaaagccagaaacacaaacccgtgtggactccgggagggtgactcaggtcctccttccatgtcttgagcactggctcacccagggggtgaaaaattcccgcccctgtttgcacgctttcttgcctccgtgtgtaagctccttgtacaacccagacccatcttgtattttgtggcccagaaaactgaacgattattttgttcctccgtagtccaaagggcagagttgcggaaggccgtcggggcttggtgagcaggggctgtaatacagtctgtgggctccttaccctgcagaggctgtttcagctcacacagagtcatccacacaaacccacggctcccagttgacagtcagtggaatgctcgtctccttagcgtccagggtggggattctgctggaataaagagcttcctcagtg

SEQ ID NO: 1971 - protein, 1933 aa, Homo sapiens
DLLRAARTLAGAVSDLLKAVQPTSGEPRQTVLTAAGSIGQASGDLLRQIGENETDERFQDVLMSLAKAVANAAAMLVLKAKNVAQVAEDTVLQNRVIAAATQCALSTSQLVACAKVVSPTISSPVCQEQLIEAGKLVDRSVENCVRACQAATTDSELLKQVSAAASVVSQALHDLLQHVRQFASRGEPIGRYDQATDTIMCVTESIFSSMGDAGEMVRQARVLAQATSDLVNAMRSDAEAEIDMENSKKLLAAAKLLADSTARMVEAAKGAAANPENEDQQQRLREAAEGLRVATNAAAQNAIKKKIVNRLEVAAKQAAAAATQTIAASQNAAVSNKNPAAQQQLVQSCKAVADHIPQLVQGVRGSQAQAEDLSAQLALIISSQNFLQPGSKMVSSAKAAVPTVSDQAAAMQLSQCAKNLATSLAELRTASQKAHEACGPMEIDSALNTVQTLKNELQDAKMAAVESQLKPLPGETLEKCAQDLGSTSKAVGSSMAQLLTCAAQGNEHYTGVAARETAQALKTLAQAARGVAASTTDPAAAHAMLDSARDVMEGSAMLIQEAKQALIAPGDAERQQRLAQVAKAVSHSLNNCVNCLPGQKDVDVALKSIGESSKKLLVDSLPPSTKPFQEAQSELNQAAADLNQSAGEVVHATRGQSGELAAASGKFSDDFDEFLDAGIEMAGQAQTKEDQIQVIGNLKNISMASSKLLLAAKSLSVDPGAPNAKNLLAAAARAVTESINQLITLCTQQAPGQKECDNALRELETVKGMLDNPNEPVSDLSYFDCIESVMENSKVLGESMAGISQNAKTGDLPAFGECVGIASKALCGLTEAAAQAAYLVGISDPNSQAGHQGLVDPIQFARANQAIQMACQNLVDPGSSPSQVLSAATIVAKHTSALCNACRIASSKTANPVAKRHFVQSAKEVANSTANLVKTIKALDGDFSEDNRNKCRIATAPLIEAVENLTAFASNPEFVSIPAQISSEGSQAQEPILVSAKTMLESSSYLIRTARSLAINPKDPPTWSVLAGHSHTVSDSIKSLITSIRDKAPGQRECDYSIDGINRCIRDIEQASLAAVSQSLATRDDISVEALQEQLTSVVQEIGHLIDPIATAARGEAAQLGHKVTQLASYFEPLILAAVGVASKILDHQQQMTVLDQTKTLAESALQMLYAAKEGGGNPKAQHTHDAITEAAQLMKEAVDDIMVTLNEAASEVGLVGGMVDAIAEAMSKLDEGTPPEPKGTFVDYQTTVVKYSKAIAVTAQEMMTKSVTNPEELGGLASQMTSDYGHLAFQGQMAAATAEPEEIGFQIRTRVQDLGHGCIFLVQKAGALQVCPTDSYTKRELIECARAVTEKVSLVLSALQAGNKGTQACITAATAVSGIIADLDTTIMFATAGTLNAENSETFADHRENILKTAKALVEDTKLLVSGAASTPDKLAQAAQSSAATITQLAEVVKLGAASLGSDDPETQVVLINAIKDVAKALSDLISATKGAASKPVDDPSMYQLKGAAKVMVTNVTSLLKTVKAVEDEATRGTRALEATIECIKQELTVFQSKDVPEKTSSPEESIRMTKGITMATAKAVAAGNSCRQEDVIATANLSRKAVSDMLTACKQASFHPDVSDEVRTRALRFGTECTLGYLDLLEHVLVILQKPTPEFKQQLAAFSKRVAGAVTELIQAAEAMKGTEWVDPEDPTVIAETELLGAAASIEAAAKKLEQLKPRAKPKQADETLDFEEQILEAAKSIAAATSALVKSASAAQRELVAQGKVGSIPANAADDGQWSQGLISAARMVAAATSSLCEAANASVQGHASEEKLISSAKQVAASTAQLLVACKVKADQDSEAMRRLQAAGNAVKRASDNLVRAAQKAAFGKADDDDVVVKTKFVGGIAQIIAAQEEMLKKERELEEARKKLAQIRQQQYKFLPTELREDEG

SEQ ID NO: 1972 - DNA, 264 bp, Homo sapiens
  misc_feature (177)..(177): n is a, c, g, or t
ggaaatcggccgttgggatgctgtctaagcttggatacctgagtaataacggacaacagataaagctccgcatccttgcgccacgtgcttcggtccgtggtttgcgtgcagacgtttgacctgtatggtgaccctcgcgatttgcaaatgtgctgaggatctggaaatactgaagtnggaaggcacctcttgttttggggaacatgtatatttcccccctgtgacgcactgcttccacagagagggtgcaaacgttgcaaacgc

SEQ ID NO: 1973 - DNA, 2898 bp, Homo sapiens
actttgttcgctcctcagtcgtccaggcggattcctttttcgccaggcaccaaggcacagcttagagtagacccgagtcctgctctgcggagttcgtcttcccagcgaaggtacagaggcggatgaactgctgagacttgattgacgtattttaagatttttttaacttctgaagtctagcaggcctgtaagaacaaaaatcattctgtaggaattaaaaacagaatccagtcttgacaacatatccacaatgtctgatgtatctactagtgtacaatcaaaatttgctagacttgcaaagaaaaaggaaaatatcacctatatgaaaagagagcagttaacagaaactgataaggacatagctccggtattagatttaaaatgcaaggacgtatcagcaattatgaataagtttaaggtcttaatggaaattcaagacctgatgtttgaggagatgagggaaactcttaaaaatgacctaaaagcagttttaggaggaaaagctacaatacctgaggtaaagaattcagagaactccagtagtaggacagagtttcagcaaataatcaatttagcattacaaaaaacagggatggtagggaaaatagaaggagaaaactctaaaataggtgatgataatgaaaatttaacctttaaattagaagtaaatgagctgagtggtaaattagacaacactaacgaatacaatagtaatgatggtaagaaattaccccagggtgaatcacgaagttacgaagtcatgggaagtatggaagaaaccttatgcaatatagatgacagagatggaaatcgcaatgtccatttagaatttacagaaagagagagtaggaaggatggagaggatgaatttgtcaaagaaatgagagaggaaagaaaatttcagaaattgaagaataaagaggaggttttaaaagcctccagagaagaaaaagtgttgatggatgaaggagcagtacttaccctggtagccgacctttcatcagcaacactggatattagtaagcaatggagtaatgtcttcaacattctgagagaaaatgattttgaacctaaatttctgtgtgaagttaaattagcatttaaatgtgatggtgaaataaagacattttcagatctgcaaagccttagaaaatttgccagccaaaaatcttctgtgaaagaattactgaaagatgtactcccacaaaaggaagaaataaatcaaggaggaagaaaatatggaattcaagaaaaaagggataaaaccctaatagactcaaagcatagagctggagaaataaccagtgatggcttgagcttcctatttcttaaagaagtaaaagttgctaagccagaggagatgaaaaacttagagactcaagaggaagagttttccgagctagaggagctggatgaagaggcctcagggatggaggatgatgaagatacctcagggctggaggaggaggaggaagagccctcagggctggaggaggaagaagaagaagaggcttcagggttggaggaggatgaggcctcagggctagaggaggaagaggaacagacttcagaacaggactcaacctttcagggtcatactttggtagatgcaaagcatgaagttgagataaccagtgatggcatggaaactactttcattgactctgtagaggattctgaatcagaggaggaagaagaaggaaagagctctgaaacaggaaaggtaaagactacctccctgactgagaaaaaagcctcacgtagacaaaaggaaattccctttagttatttggttggggactctgggaagaaaaagttggtgaaacaccaggtggtgcacaaaacccaggaggaagaggaaacagctgtgcccacaagtcaaggaactggcataccctgtctgaccttatgtttggcctctccctcaaagtcactagagatgagtcatgatgagcataaaaagcattcacatacaaatttgagtatttcaacaggagtcaccaaacttaagaaaacagaagaaaagaaacacagaactctgcacacagaagaactaacatccaaagaagcagacttaacagaggaaacagaagaaaacttgagaagtagtgtgattaatagcatcagagagataaaagaggagattggaaatttgaaaagttcccattcaggtgtcttggaaattgaaaattcagtagatgatctgagtagcagaatggacatacttgaagaaagaatagacagtctagaagatcaaattgaagaattctctaaggatacaatgcaaatgaccaaacagataattagtaaagaaaggcaaagagatatagaggagagatctagaagttgcaacattcgtttgataggaattccagaaaaggagagttatgagaatagggcagaggacataattaaagaaataattgatgaaaactttgcagaactaaagaaaggttcaagtcttgagattgtcagtgcttgtcgagtacctagtaaaattgatgaaaagagactgactcctagacacatcttggtgaaattttggaattctagtgataaagagaaaataataagggcttctagagagagaagagaaattacctaccaaggaacaagaatcaggttgacagcagacttatcactggacacactggatgctagaagtaaatggagcaatgtcttcaaagttctgctggaaaaaggctttaatcctagaatcctatatccagccaaaatggcatttgattttaggggcaaaacaaaggtatttcttagtattgaagaatttagagattatgttttgcatatgcccaccttgagagaattactggggaataatataccttagcacgccagggtgactacaaacaatatgctttcctcccccagcatgcatcc

SEQ ID NO: 1974 - protein, 865 aa, Homo sapiens
MSDVSTSVQSKFARLAKKKENITYMKREQLTETDKDIAPVLDLKCKDVSAIMNKFKVLMEIQDLMFEEMRETLKNDLKAVLGGKATIPEVKNSENSSSRTEFQQIINLALQKTGMVGKIEGENSKIGDDNENLTFKLEVNELSGKLDNTNEYNSNDGKKLPQGESRSYEVMGSMEETLCNIDDRDGNRNVHLEFTERESRKDGEDEFVKEMREERKFQKLKNKEEVLKASREEKVLMDEGAVLTLVADLSSATLDISKQWSNVFNILRENDFEPKFLCEVKLAFKCDGEIKTFSDLQSLRKFASQKSSVKELLKDVLPQKEEINQGGRKYGIQEKRDKTLIDSKHRAGEITSDGLSFLFLKEVKVAKPEEMKNLETQEEEFSELEELDEEASGMEDDEDTSGLEEEEEEPSGLEEEEEEEASGLEEDEASGLEEEEEQTSEQDSTFQGHTLVDAKHEVEITSDGMETTFIDSVEDSESEEEEEGKSSETGKVKTTSLTEKKASRRQKEIPFSYLVGDSGKKKLVKHQVVHKTQEEEETAVPTSQGTGIPCLTLCLASPSKSLEMSHDEHKKHSHTNLSISTGVTKLKKTEEKKHRTLHTEELTSKEADLTEETEENLRSSVINSIREIKEEIGNLKSSHSGVLEIENSVDDLSSRMDILEERIDSLEDQIEEFSKDTMQMTKQIISKERQRDIEERSRSCNIRLIGIPEKESYENRAEDIIKEIIDENFAELKKGSSLEIVSACRVPSKIDEKRLTPRHILVKFWNSSDKEKIIRASRERREITYQGTRIRLTADLSLDTLDARSKWSNVFKVLLEKGFNPRILYPAKMAFDFRGKTKVFLSIEEFRDYVLHMPTLRELLGNNIP

SEQ ID NO: 1975 - DNA, 3000 bp, Homo sapiens
ccgtcctctagcccagctcctcggctcgcgctctcctcgcctcctgtgctttccccgccgcggcgatgccagggccttcgccagggctgcgccgggcgctactcggcctctgggctgctctgggcctggggctcttcggcctctcagcggtctcgcaggagcccttctgggcggacctgcagcctcgcgtggcgttcgtggagcgcgggggctcgctgtggctgaattgcagcaccaactgccctcggccggagcgcggtggcctggagacctcgctgcgccgaaacgggacccagaggggtttgcgttggttggcgcggcagctggtggacattcgcgagccggagactcagcccgtctgcttcttccgctgcgcgcggcgcacactacaggcgcgtgggctcattcgcactttccagcgaccagatcgcgtagagctgatgccgctgcctccctggcagccggtgggcgagaacttcaccctgagctgtagggtccccggcgccgggccccgtgcgagcctcacgctgaccctgctgcggggcgcccaggagctgatccgccgcagcttcgccggtgaaccaccccgagcgcggggcgcggtgctcacagccacggtactggctcggagggaggaccatggagccaatttctcgtgtcgcgccgagctggacctgcggccgcacggactgggactgtttgaaaacagctcggcccccagagagctccgaaccttctccctgtctccggatgccccgcgcctcgctgctccccggctcttggaagttggctcggaaaggcccgtgagctgcactctggacggactgtttccagcctcagaggccagggtctacctcgcactgggggaccagaatctgagtcctgatgtcaccctcgaaggggacgcattcgtggccactgccacagccacagctagcgcagagcaggagggtgccaggcagctgatctgcaacgtcaccctggggggcgaaaaccgggagacccgggagaacgtgaccatctacagcttcccggcaccactcctgaccctgagcgaacccagcgtctccgaggggcagatggtgacagtaacctgcgcagctgggacccaagctctggtcacactggagggagttccagccgcggtcccggggcagcccgcccagcttcagctaaatgccaccgagaacgacgacagacgcagcttcttctgcgacgccaccctcgatgtggacggggagaccctgatcaagaacaggagcgcagagcttcgtgtcctatacgctccccggctagacgattcggactgccccaggagttggacgtggcccgagggcccagagcagacgctgcgctgcgaggcccgcgggaacccagaaccctcagtgcactgtgcgcgctccgacggcggggccgtgctggctctgggcctgctgggtccagtcactcgggcgctctcaggcacttaccgctgcaaggcggccaatgatcaaggcgaggcggtcaaggacgtaacgctaacggtggagtacgcaccagcgctggacagcgtgggctgcccagaacgcattacttggctggagggaacagaagcctcgctgagctgtgtggcgcacggggtaccgccgcctgatgtgatctgcgtgcgctctggagaactcggggccgtcatcgaggggctgttgcgtgtggcccgggagcatgcgggcacttaccgctgcgaagccaccaaccctcggggctctgcggccaaaaatgtggccgtcacggtggaatatggccccaggtttgaggagccgagctgccccagcaattggacatgggtggaaggatctgggcgcctgttttcctgtgaggtcgatgggaagccacagccaagcgtgaagtgcgtgggctccgggggcgccactgagggggtgctgctgccgctggcacccccagaccctagtcccagagctcccagaatccctagagtcctggcacccggtatctacgtctgcaacgccaccaaccgccacggctccgtggccaaaacagtcgtcgtgagcgcggagtcgccaccggagatggatgaatctacctgcccaagtcaccagacgtggctggaaggggctgaggcttccgcgctggcctgcgccgcccggggtcgcccttccccaggagtgcgctgctctcgggaaggcatcccatggcctgagcagcagcgcgtgtcccgagaggacgcgggcacttaccactgtgtggccaccaatgcgcatggcacggactcccggaccgtcactgtgggcgtggaataccggccagtggtggccgaacttgctgcctcgccccctggaggcgtgcgcccaggaggaaacttcacgttgacctgccgcgcggaggcctggcctccagcccagatcagctggcgcgcgcccccgggggccctcaacatcggcctgtcgagcaacaacagcacactgagcgtggcaggcgccatgggaagccacggcggcgagtacgagtgcgcacgcaccaacgcgcacgggcgccacgcgcggcgcatcacggtgcgcgtggccggtccgtggctatgggtcgccgtgggcggcgcggcggggggcgcggcgctgctggccgcgggggccggcctggccttctacgtgcagtccaccgcctgcaagaagggcgagtacaacgtgcaggaggccgagagctcaggcgaggccgtgtgtctcaacggagcgggcggcggcgctggcggggcggcaggcgcggagggcggacccgaggcggcggggggcgcggccgagtcgccggcggagggcgaggtcttcgccatacagctgacatcggcgtgagccgctcccctctccccgcgggccgggggacgccccccagactcacacgggggcttatttattgctttatttatttacttattcatttatttatgtattcaactccaagggcgtcacccccattttctacccatcccctcaataaagtttttataaagga

SEQ ID NO: 1976 - protein, 924 aa, Homo sapiens
MPGPSPGLRRALLGLWAALGLGLFGLSAVSQEPFWADLQPRVAFVERGGSLWLNCSTNCPRPERGGLETSLRRNGTQRGLRWLARQLVDIREPETQPVCFFRCARRTLQARGLIRTFQRPDRVELMPLPPWQPVGENFTLSCRVPGAGPRASLTLTLLRGAQELIRRSFAGEPPRARGAVLTATVLARREDHGANFSCRAELDLRPHGLGLFENSSAPRELRTFSLSPDAPRLAAPRLLEVGSERPVSCTLDGLFPASEARVYLALGDQNLSPDVTLEGDAFVATATATASAEQEGARQLICNVTLGGENRETRENVTIYSFPAPLLTLSEPSVSEGQMVTVTCAAGTQALVTLEGVPAAVPGQPAQLQLNATENDDRRSFFCDATLDVDGETLIKNRSAELRVLYAPRLDDSDCPRSWTWPEGPEQTLRCEARGNPEPSVHCARSDGGAVLALGLLGPVTRALSGTYRCKAANDQGEAVKDVTLTVEYAPALDSVGCPERITWLEGTEASLSCVAHGVPPPDVICVRSGELGAVIEGLLRVAREHAGTYRCEATNPRGSAAKNVAVTVEYGPRFEEPSCPSNWTWVEGSGRLFSCEVDGKPQPSVKCVGSGGATEGVLLPLAPPDPSPRAPRIPRVLAPGIYVCNATNRHGSVAKTVVVSAESPPEMDESTCPSHQTWLEGAEASALACAARGRPSPGVRCSREGIPWPEQQRVSREDAGTYHCVATNAHGTDSRTVTVGVEYRPVVAELAASPPGGVRPGGNFTLTCRAEAWPPAQISWRAPPGALNIGLSSNNSTLSVAGAMGSHGGEYECARTNAHGRHARRITVRVAGPWLWVAVGGAAGGAALLAAGAGLAFYVQSTACKKGEYNVQEAESSGEAVCLNGAGGGAGGAAGAEGGPEAAGGAAESPAEGEVFAIQLTSA

SEQ ID NO: 1977 - DNA, 763 bp, Homo sapiens
tcttttatggttatttcaagtatacaatttctatctgtaatgtaatatattacccacacatttttttcacaggagagagagaatatcctcatttgtttatgctcatgtgtattttctatagtgaatttcagaaacttttaatatcaggtaatttcaatttatgcctataaagcattgattgaaaaataactagaattgtgcatatataacacataatctccaacagaagttactgaatacattcatactaatgtaatgtaatttccctttatttcttgctcttctgtttcaaactgctgctattgtagtttacatatcccaacctttaaaaatattcctcttattagctttatattcactttatagaagttgagttttaattaaaattcttggcatcctgaagtatgtcacatagcatgtgctccttataaatatgttgatatctcagaagacagcatcccggttttcattttataaagtaccatacttaagaatgctgtaatacttatcttttataacatgtttccttcgctttgcttgtcttttatgtcatcagttttaactgtttacttcatttaacagtttacatcattcaacagtttactttattaaacagtaggtggaaaaatagatgccagtctatgaaaatcttcccatctatatcaaaaatacttttcagggatatacttttcaaaacaaacgaattaaaatttatggttaaaatataaactttagaattaaactttatttaaatatccggttc

SEQ ID NO: 1978 - DNA, 5471 bp, Homo sapiens
acagcttgcaacactcggcatcttttctggaggcgcctccttcagcagccgcagatggcatccggctgcgggctcggggctcgcaattgattctcccccttgcccacctcgagtccacggacgcacctctcccttcccctcctcccttcgcgcttctgggtctgagcccagctcgcgaccgccgggcagaggatcagtcgcggcggccgaggctgagcagcagcgctctcgctccctgacctggggagaagcgcccacccgggagagctgatccccggctgcctccagcgccccccaccttttgcactccaagccgggggctccagagaccccgctccccaggcgccactatgctggacccttcgtccagcgaagaagaatcggatgagatcgtggaggaggagagcggcaaggaggtgctcggctcggccccgtccggcgcgcgcctgtctcccagccgtaccagcgagggctcggccggcagcgccgggctggggggcggcggcgccggcgccggagccggggtgggtgcaggcggcggcgggggcagcggcgcgagcagcggcggcggggccggggggctgcaacccagcagccgcgctggcggcggccggccctccagccccagcccgtcggtggtgagcgagaaggagaaggaagagttggagcggctgcagaaagaggaggaggagaggaagaagaggctgcagctgtatgtgttcgtgatgcgctgcatcgcctacccctttaatgccaagcagcccaccgacatggctcgccggcagcagaagatcagcaaacagcagctgcagacagtcaaggaccggtttcaggctttcctcaatggggaaacccagatcatggctgacgaagccttcatgaacgctgtgcagagttactatgaggtgttcctgaagagcgaccgtgtggcccgcatggttcagagtggaggctgttccgccaacgactcccgggaggtcttcaagaagcacattgagaagagagtgcgcagcctgcctgagattgacggcctcagcaaggagactgtgctgagctcctggatggccaaatttgatgccatctaccgtggagaagaggacccgcggaagcagcaggcccggatgacagccagcgcagcctccgagctgattctgagcaaggagcaactctatgagatgttccagaacattcttgggatcaagaagttcgaacatcagctcctttacaatgcctgccagctggacaatccagatgagcaagcagcccagatcagacgagagctggatggacgtctacaaatggcagaccaaatagccagggaacgcaaatttcccaagtttgtatccaaagaaatggaaaacatgtacattgaggagctgaagtcatctgtcaacctgctcatggccaacttggagagcatgccggtatccaaaggcggggagttcaagctccagaaactcaaacgcagccacaatgcttccatcatcgacatgggcgaggagagtgagaaccagctctccaagtcagatgtcgtgctgtctttctcattggaggtggtaattatggaagtccaaggcctcaaatctttggctccaaatcgcatcgtatattgcacaatggaggtggaaggaggagagaaactacagactgatcaggccgaggcttctaaaccaacctggggcacccagggtgacttctccacaacccatgcactgccagctgtgaaggtgaagctgttcacagagagcacaggcgtcctggcgttggaggacaaggagcttgggcgggttattctccatcccaccccgaacagccccaaacagtcagagtggcacaaaatgacagtctccaaaaactgccccgaccaagatctcaaaatcaaacttgctgtccgaatggataagcctcaaaacatgaagcattctgggtatttatgggccatcggtaagaatgtctggaagagatggaagaaaaggttttttgtattggtgcaggtcagtcagtacacgtttgccatgtgcagttatcgggagaagaaagcggagcctcaggaacttctacaattggatggctacactgtggattacaccgacccccagccaggtttggagggtggccgagccttcttcaatgctgtcaaggagggagacaccgtgatatttgccagtgacgatgaacaagaccgcatcctgtgggtccaggccatgtatcgggccacggggcagtcacacaagcctgtgcccccgacccaagtccagaaactcaacgccaagggaggaaatgtacctcagctggatgcccctatctctcaattttacgcagatagagctcaaaaacatggcatggatgaatttatctcttccaacccctgtaactttgaccacgcttccctctttgagatggtacaacgccttactttggatcacagacttaatgattcctattcttgcctgggctggttcagtcctggccaggtgtttgtactagacgagtattgcgcccgaaatggagtccgggggtgtcaccgacatctctgctacctcagagacttgcttgaacgggcagaaaatggcgccatgatcgaccccacccttcttcactacagctttgccttctgtgcatcccatgtccatgggaacaggcctgatggaattggaactgtgactgttgaagaaaaggaacgttttgaagaaatcaaagagaggctccgagttctgctagaaaatcagattacacattttaggtattgctttccatttggtcgacctgaaggtgctttgaaagctactctctcactcttggaaagggttttgatgaaagatattgttaccccagtgccacaagaggaggtaaaaacagttatccgtaaatgtctggaacaggctgcgttagtcaactattctcggctctcagagtatgccaaaatcgaagagaatcaaaaggatgcagaaaatgtaggccggttaatcactcctgccaaaaagcttgaagatacaatacgtcttgctgaactagtcattgaagttcttcagcaaaatgaggagcaccacgcagagccacatgttgataaaggagaagcctttgcgtggtggtcagatttaatggtggagcatgcggagacgttcctgtcactctttgcagtagacatggatgcagccttagaggtgcaacctccagacacatgggacagttttccactatttcagctgctgaatgattttctccgtactgactataatttgtgcaatggaaaatttcacaaacacctgcaagacctgtttgccccacttgttgttagatatgtggatctgatggagtcctcaattgcacaatccattcacaggggctttgagcgggagtcatgggaaccagtcaagagtttaaccagtaacctacccaatgtgaacctacccaatgtgaaccttcccaaagtaccaaatctaccagttaacatccctctaggcatcccacaaatgcctactttttcggcaccgtcatggatggctgctatatatgatgcggataatgggtcaggcacctcagaagatctgttttggaaacttgacgcccttcagaccttcattcgggacctgcactggcctgaagaagagtttggaaagcacctggaacaacggctgaagttgatggcaagtgacatgatcgaatcttgtgtcaaaagaaccaggattgcatttgaagttaagctgcaaaaaaccagtcgatcaacagattttcgagtcccacagtcaatatgcaccatgtttaatgttatggttgatgccaaagctcaatcaacaaaactttgcagcatggaaatgggccaagagcatcaataccattcaaaaatagacgaactaattgaagaaactgttaaagaaatgataacactcttggttgcaaagttcgttactatcttggaaggagtgctggcaaaattatccagatatgacgaagggactttgttttcttcttttctgtcatttaccgtgaaggcagcttccaaatatgtggatgtacctaaacccgggatggacgtggccgacgcctacgtgactttcgtccgccattctcaggatgtcctgcgtgataaggtcaatgaggagatgtacatagaaaggttatttgatcaatggtacaacagctccatgaacgtgatctgcacctggttgacggaccggatggacttacagcttcatatttatcagttgaaaacactaattagggtggtaaagaaaacctacagagatttccgattgcaaggggtcctggactccaccttaaacagcaagacctatgaaacgatccggaaccgtctcactgtggaggaagccacagcatcagtgagtgaaggtgggggactgcagggcatcagcatgaaggacagcgatgaggaagacgaagaagacgattagaccatttggtcctagagtctgctgggacagagtcctgtaatcagtgcatgtccttagtctgttagttaaacccattaggaattttctgtcaactaccatgcccatgagatgtttatcaatacaactgccattttagctatgtggtaccaagattagcaaatgaccttcatatccactgatttcctgatgtccatgtctatatgtttacaagcaatatggagcaccattctttaaatactgttcatggagaatacatagtctaaccactaggcgtgtccctgttatcagcaaagatcaatgatgcttcattcatgtactatgtatgcattggtggtaaatggatgtgagggcaagtacatcaagtacattcactctgtttcacgtatgtggatgccagttaattaaatgagtacgtaaataaattaattaaaacacatagatctgctttgtgtttttatttttattttttgaaaaacaaaaggcaagtctccaacaattaacttttgatgctttctgttcccctaaaaccaaaaaatgaaccccttgtgtcgttgttaacccatcctttcatttactcatataattagccaaaaaaaaaaggatggctacataccaatggattgattctcttaattgccacggcaagggggcgatcctatcatgacttaacatcaagcgcgcagttcaaaactactgtcttctgtcaaagttttctcctcttaaatgttattttgcttttacgtctcaactgtgtatgtaaaaaaaacgaatatttaaattacaaccctagactaaaaatgtgtttataataagatgtggatatttccttcagtagattgtaaccataatttaaattattttgttccacactgttttttatatctgtcatgtacattgcattttgatctgtaactgcacaaccctggggtttgctgcagagctatttctttccatgtaaagtagtggatccatcttgcttttgccttatataaagcctacagttatggaagtgtggaaaactgtggcttctcaataaatattcagatgtcctaagaatat

SEQ ID NO: 1979 - protein, 1390 aa, Homo sapiens
PGEKRPPGRADPRLPPAPPTFCTPSRGLQRPRSPGATMLDPSSSEEESDEIVEEESGKEVLGSAPSGARLSPSRTSEGSAGSAGLGGGGAGAGAGVGAGGGGGSGASSGGGAGGLQPSSRAGGGRPSSPSPSVVSEKEKEELERLQKEEEERKKRLQLYVFVMRCIAYPFNAKQPTDMARRQQKISKQQLQTVKDRFQAFLNGETQIMADEAFMNAVQSYYEVFLKSDRVARMVQSGGCSANDSREVFKKHIEKRVRSLPEIDGLSKETVLSSWMAKFDAIYRGEEDPRKQQARMTASAASELILSKEQLYEMFQNILGIKKFEHQLLYNACQLDNPDEQAAQIRRELDGRLQMADQIARERKFPKFVSKEMENMYIEELKSSVNLLMANLESMPVSKGGEFKLQKLKRSHNASIIDMGEESENQLSKSDVVLSFSLEVVIMEVQGLKSLAPNRIVYCTMEVEGGEKLQTDQAEASKPTWGTQGDFSTTHALPAVKVKLFTESTGVLALEDKELGRVILHPTPNSPKQSEWHKMTVSKNCPDQDLKIKLAVRMDKPQNMKHSGYLWAIGKNVWKRWKKRFFVLVQVSQYTFAMCSYREKKAEPQELLQLDGYTVDYTDPQPGLEGGRAFFNAVKEGDTVIFASDDEQDRILWVQAMYRATGQSHKPVPPTQVQKLNAKGGNVPQLDAPISQFYADRAQKHGMDEFISSNPCNFDHASLFEMVQRLTLDHRLNDSYSCLGWFSPGQVFVLDEYCARNGVRGCHRHLCYLRDLLERAENGAMIDPTLLHYSFAFCASHVHGNRPDGIGTVTVEEKERFEEIKERLRVLLENQITHFRYCFPFGRPEGALKATLSLLERVLMKDIVTPVPQEEVKTVIRKCLEQAALVNYSRLSEYAKIEENQKDAENVGRLITPAKKLEDTIRLAELVIEVLQQNEEHHAEPHVDKGEAFAWWSDLMVEHAETFLSLFAVDMDAALEVQPPDTWDSFPLFQLLNDFLRTDYNLCNGKFHKHLQDLFAPLVVRYVDLMESSIAQSIHRGFERESWEPVKSLTSNLPNVNLPNVNLPKVPNLPVNIPLGIPQMPTFSAPSWMAAIYDADNGSGTSEDLFWKLDALQTFIRDLHWPEEEFGKHLEQRLKLMASDMIESCVKRTRIAFEVKLQKTSRSTDFRVPQSICTMFNVMVDAKAQSTKLCSMEMGQEHQYHSKIDELIEETVKEMITLLVAKFVTILEGVLAKLSRYDEGTLFSSFLSFTVKAASKYVDVPKPGMDVADAYVTFVRHSQDVLRDKVNEEMYIERLFDQWYNSSMNVICTWLTDRMDLQLHIYQLKTLIRVVKKTYRDFRLQGVLDSTLNSKTYETIRNRLTVEEATASVSEGGGLQGISMKDSDEEDEEDD

SEQ ID NO: 1980 - DNA, 454 bp, Homo sapiens
  misc_feature (308)..(308): n is a, c, g, or t
  misc_feature (426)..(426): n is a, c, g, or t
  misc_feature (445)..(445): n is a, c, g, or t
accgttagtccccccatccatctagaagtccattttgaaagatttttgtaaattcttttaacactgatgtttcagcctcgtctttgtttcagttaagctcaatggcgaacatgggaaccacctttcgccttccctgggggagaaaccctcttggctgatggcttttccccggaattatcaaacagccaccgggtgactttctggcttccagatccatctgcctgagacccccgaactcctctcctcccaagcagaggcgagtgagtggcattagctcccggacccattcccggtcctagctgggcatnggggctgacggagatgaccaagccttggtcttgttctctagcagctttccacagacttgggttcgtgggctttccttattatccattggggaacaaaacagccttggggttttattancaaaacagccttggggttntattcccag

SEQ ID NO: 1981 - DNA, 4175 bp, Homo sapiens
tgaggagtcctgctcaagacacggtcactggatctgagaaacttcccaggggaccgcattccagagtcagtgactctgtgaagcacccacatctacctcttgccacgttcccacgggcttgggggaaagatggtggggaccaaggcctgggtgttctccttcctggtcctggaagtcacatctgtgttggggagacagacgatgctcacccagtcagtaagaagagtccagcctgggaagaagaaccccagcatctttgccaagcctgccgacaccctggagagccctggtgagtggacaacattgttcaacatcgactacccaggcgggaagggcgactatgagcggctggacgccattcgcttctactatggggaccgtgtatgtgcccgtcccctgcggctagaggctcggaccactgactggacacctgcgggcagcactggccaggtggtccatggtagtccccgtgagggtttctggtgcctcaacagggagcagcggcctggccagaactgctctaattacaccgtacgcttcctctgcccaccaggatccctgcgccgagacacagagcgcatctggagcccatggtctccctggagcaagtgctcagctgcctgtggtcagactggggtccagactcgcacacgcatttgcttggcagagatggtgtcgctgtgcagtgaggccagcgaagagggtcagcactgcatgggccaggactgtacagcctgtgacctgacctgcccaatgggccaggtgaatgctgactgtgatgcctgcatgtgccaggacttcatgcttcatggggctgtctcccttcccggaggtgccccagcctcaggggctgctatctacctcctgaccaagacgccgaagctgctgacccagacagacagtgatgggagattccgaatccctggcttgtgccctgatggcaaaagcatcctgaagatcacaaaggtcaagtttgcccccattgtactcacaatgcccaagactagcctgaaggcagccaccatcaaggcagagtttgtgagggcagagactccatacatggtgatgaaccctgagacaaaagcacggagagctgggcagagcgtgtctctgtgctgtaaggccacagggaagcccaggccagacaagtatttttggtatcataatgacacattgctggatccttccctctacaagcatgagagcaagctggtgctgaggaaactgcagcagcaccaggctggggagtacttttgcaaggcccagagtgatgctggggctgtgaagtccaaggttgcccagctgattgtcacagcatctgatgagactccttgcaacccagttcctgagagctatcttatccggctgccccatgattgctttcagaatgccaccaactccttctactatgacgtgggacgctgccctgttaagacttgtgcagggcagcaggataatgggatcaggtgccgtgatgctgtgcagaactgctgtggcatctccaagacagaggaaagggagatccagtgcagtggctacacgctacccaccaaggtggccaaggagtgcagctgccagcggtgtacggaaactcggagcatcgtgcggggccgtgtcagtgctgctgacaatggggagcccatgcgctttggccatgtgtacatggggaacagccgtgtaagcatgactggctacaagggcactttcaccctccatgtcccccaggacactgagaggctggtgctcacatttgtggacaggctgcagaagtttgtcaacaccaccaaagtgctacctttcaacaagaaggggagtgccgtgttccatgaaatcaagatgcttcgtcggaaagagcccatcactttggaagccatggagaccaacatcatccccctgggggaagtggttggtgaagaccccatggctgaactggagattccatccaggagtttctacaggcagaatggggagccctacataggaaaagtgaaggccagtgtgaccttcctggatccccggaatatttccacagccacagctgcccagactgacctgaacttcatcaatgacgaaggagacactttcccccttcggacgtatggcatgttctctgtggacttcagagatgaggtcacctcagagccacttaatgctggcaaagtgaaggtccaccttgactcgacccaggtcaagatgccagagcacatatccacagtgaaactctggtcactcaatccagacacagggctgtgggaggaggaaggtgatttcaaatttgaaaatcaaaggaggaacaaaagagaagacagaaccttcctggtgggcaacctggagattcgtgagaggaggctctttaacctggatgttcctgaaagcaggcggtgctttgttaaggtgagggcctaccggagtgagaggttcttgcctagtgagcagatccagggggttgtgatctccgtgattaacctggagcctagaactggcttcttgtccaaccctagggcctggggccgctttgacagtgtcatcacaggccccaacggggcctgtgtgcctgccttctgtgatgaccagtcccctgatgcctactctgcctatgtcttggcaagcctggctggggaggaactgcaagcagtggagtcttctcctaaattcaacccaaatgcaattggcgtccctcagccctatctcaacaagctcaactaccgtcggacggaccatgaggatccacgggttaaaaagacagctttccagattagcatggccaagccaaggcccaactcagctgaggagagcaatgggcccatctatgcctttgagaacctccgggcatgtgaagaggcaccacccagtgcagcccacttccggttctaccagattgagggggatcgatatgactacaacacagtccccttcaacgaagatgaccctatgagctggactgaagactatctggcatggtggccaaagccgatggaattcagggcctgctatatcaaggtgaagattgtggggccactggaagtgaatgtgcgatcccgcaacatggggggcactcatcggcggacagtggggaagctgtatggaatccgagatgtgaggagcactcgggacagggaccagcccaatgtctcagctgcctgtctggagttcaagtgcagtgggatgctctatgatcaggaccgtgtggaccgcaccctggtgaaggtcatcccccagggcagctgccgtcgagccagtgtgaaccccatgctgcatgagtacctggtcaaccacttgccacttgcagtcaacaacgacaccagtgagtacaccatgctggcacccttggacccactgggccacaactatggcatctacactgtcactgaccaggaccctcgcacggccaaggagatcgcgctcggccggtgctttgatggcacatccgatggctcctccagaatcatgaagagcaatgtgggagtagccctcaccttcaactgtgtagagaggcaagtaggccgccagagtgccttccagtacctccaaagcaccccagcccagtcccctgctgcaggcactgtccaaggaagagtgccctcgaggaggcagcagcgagcgagcaggggtggccagcgccagagtggagtggtggcctctctgagatttcctagagttgctcaacagcccctgatcaactaagttttgtggtacttcaccctcttctgccctcatttcatgtgacagccattgtgagactgatgcacaaactgtcacttggttaatttaagcacttctgttttcgtgaatttgcttgtttgtttcttcatgcctttacttactttgtcccatgctactgattggcacgtggcccccacaatggcacaataaagcccctttgtgaaactgttctttaaatgaaacacaagaaattggccactggtaaaactctgcagcttcaactgtacttcatttaatgccattaatgcaaatatacttcctcttctttttgcatggttttgcccacctctgcaatagtgataatctgatgctgaagatcaaataaccaatataaagcatatttcttggccttgctccacaggacataggcaagccttgatcatagttcatacatataaatggtggtgaaataaagaaataaaacacaatacttttactggaaaaaaaaaaaa

SEQ ID NO: 1982 - protein, 1184 aa, Homo sapiens
MVGTKAWVFSFLVLEVTSVLGRQTMLTQSVRRVQPGKKNPSIFAKPADTLESPGEWTTLFNIDYPGGKGDYERLDAIRFYYGDRVCARPLRLEARTTDWTPAGSTGQVVHGSPREGFWCLNREQRPGQNCSNYTVRFLCPPGSLRRDTERIWSPWSPWSKCSAACGQTGVQTRTRICLAEMVSLCSEASEEGQHCMGQDCTACDLTCPMGQVNADCDACMCQDFMLHGAVSLPGGAPASGAAIYLLTKTPKLLTQTDSDGRFRIPGLCPDGKSILKITKVKFAPIVLTMPKTSLKAATIKAEFVRAETPYMVMNPETKARRAGQSVSLCCKATGKPRPDKYFWYHNDTLLDPSLYKHESKLVLRKLQQHQAGEYFCKAQSDAGAVKSKVAQLIVTASDETPCNPVPESYLIRLPHDCFQNATNSFYYDVGRCPVKTCAGQQDNGIRCRDAVQNCCGISKTEEREIQCSGYTLPTKVAKECSCQRCTETRSIVRGRVSAADNGEPMRFGHVYMGNSRVSMTGYKGTFTLHVPQDTERLVLTFVDRLQKFVNTTKVLPFNKKGSAVFHEIKMLRRKEPITLEAMETNIIPLGEVVGEDPMAELEIPSRSFYRQNGEPYIGKVKASVTFLDPRNISTATAAQTDLNFINDEGDTFPLRTYGMFSVDFRDEVTSEPLNAGKVKVHLDSTQVKMPEHISTVKLWSLNPDTGLWEEEGDFKFENQRRNKREDRTFLVGNLEIRERRLFNLDVPESRRCFVKVRAYRSERFLPSEQIQGVVISVINLEPRTGFLSNPRAWGRFDSVITGPNGACVPAFCDDQSPDAYSAYVLASLAGEELQAVESSPKFNPNAIGVPQPYLNKLNYRRTDHEDPRVKKTAFQISMAKPRPNSAEESNGPIYAFENLRACEEAPPSAAHFRFYQIEGDRYDYNTVPFNEDDPMSWTEDYLAWWPKPMEFRACYIKVKIVGPLEVNVRSRNMGGTHRRTVGKLYGIRDVRSTRDRDQPNVSAACLEFKCSGMLYDQDRVDRTLVKVIPQGSCRRASVNPMLHEYLVNHLPLAVNNDTSEYTMLAPLDPLGHNYGIYTVTDQDPRTAKEIALGRCFDGTSDGSSRIMKSNVGVALTFNCVERQVGRQSAFQYLQSTPAQSPAAGTVQGRVPSRRQQRASRGGQRQSGVVASLRFPRVAQQPLIN

SEQ ID NO: 1983 - DNA, 164 bp, Homo sapiens
aagaggcgaaactcaaagggatgctccctcacccccttcctccttccaaagacgtttcagccgcaattggcccgttccttcgatctccgacccgctgctagggtgctgatgtctgtggaatgggctacaccaccaatgtcccaggaaacggttgaagatacaag

SEQ ID NO: 1984 - DNA, 472 bp, Homo sapiens
gccatatattggaaaaaacttcttaacttacaaataatacaaaaatagacaatgacttttgggtggaaattaaaaaaactgaagcatggtttataacaatactaaaaataactataaatgaaatgtttaaaaatcacattgaaacagctaatacaagtgtaggtgaccaaacaaatacgcacttttcacgtagcaaacatacacaataaaataaattgggggtggaaggaagaggaagaagggaaaagcaatgtacaaattcgaaagataaatacattatttatatggatattttacaaaatcccctttaaaacaaaaagccttttaattaactttgcaagtatgtgcaagctaaaggtagtgagctttttttctttgcaaaatacgcagtaaaatctttttgtgatattgaaaaaatgtcttaagacattaaaatgtataaatagaacaacaactttggcaaaaaatcaca

SEQ ID NO: 1985 - DNA, 504 bp, Homo sapiens
cggctgatgcttaaggtaattgattatgcgttcccatcttaggatgctgcaatggcctagggcagttttgaaatgtctctttgcaactaccttcaaaaggatatgagcttcataatttaatcattcatttgatttggtccccaatattattccagttcaatcatcatttatattcaccagtcctggcgattttgaaaaatcttattaatcttatttgtcacttattagcctattcaaaggaatgtcaattgaggttctgatggtaattctgaaatttaagcatttacacacttttaagatgtgtaaattttagtaactactcacattatagacttgttttgggtatatgtctatcattttgaaataatgagattttccttttttcttttttccttttcctttttgagacagactcttgctctgttgccaggcgggagtgcagtggcttgatttgggctcactgcaacctctgcctcccaggttcaagcaattctcctgcatcag

SEQ ID NO: 1986 - DNA, 2334 bp, Homo sapiens
agacacctctgccctcaccatgagcctctggcagcccctggtcctggtgctcctggtgctgggctgctgctttgctgcccccagacagcgccagtccacccttgtgctcttccctggagacctgagaaccaatctcaccgacaggcagctggcagaggaatacctgtaccgctatggttacactcgggtggcagagatgcgtggagagtcgaaatctctggggcctgcgctgctgcttctccagaagcaactgtccctgcccgagaccggtgagctggatagcgccacgctgaaggccatgcgaaccccacggtgcggggtcccagacctgggcagattccaaacctttgagggcgacctcaagtggcaccaccacaacatcacctattggatccaaaactactcggaagacttgccgcgggcggtgattgacgacgcctttgcccgcgccttcgcactgtggagcgcggtgacgccgctcaccttcactcgcgtgtacagccgggacgcagacatcgtcatccagtttggtgtcgcggagcacggagacgggtatcccttcgacgggaaggacgggctcctggcacacgcctttcctcctggccccggcattcagggagacgcccatttcgacgatgacgagttgtggtccctgggcaagggcgtcgtggttccaactcggtttggaaacgcagatggcgcggcctgccacttccccttcatcttcgagggccgctcctactctgcctgcaccaccgacggtcgctccgacggcttgccctggtgcagtaccacggccaactacgacaccgacgaccggtttggcttctgccccagcgagagactctacacccgggacggcaatgctgatgggaaaccctgccagtttccattcatcttccaaggccaatcctactccgcctgcaccacggacggtcgctccgacggctaccgctggtgcgccaccaccgccaactacgaccgggacaagctcttcggcttctgcccgacccgagctgactcgacggtgatggggggcaactcggcgggggagctgtgcgtcttccccttcactttcctgggtaaggagtactcgacctgtaccagcgagggccgcggagatgggcgcctctggtgcgctaccacctcgaactttgacagcgacaagaagtggggcttctgcccggaccaaggatacagtttgttcctcgtggcggcgcatgagttcggccacgcgctgggcttagatcattcctcagtgccggaggcgctcatgtaccctatgtaccgcttcactgaggggccccccttgcataaggacgacgtgaatggcatccggcacctctatggtcctcgccctgaacctgagccacggcctccaaccaccaccacaccgcagcccacggctcccccgacggtctgccccaccggaccccccactgtccacccctcagagcgccccacagctggccccacaggtcccccctcagctggccccacaggtccccccactgctggcccttctacggccactactgtgcctttgagtccggtggacgatgcctgcaacgtgaacatcttcgacgccatcgcggagattgggaaccagctgtatttgttcaaggatgggaagtactggcgattctctgagggcagggggagccggccgcagggccccttccttatcgccgacaagtggcccgcgctgccccgcaagctggactcggtctttgaggagccgctctccaagaagcttttcttcttctctgggcgccaggtgtgggtgtacacaggcgcgtcggtgctgggcccgaggcgtctggacaagctgggcctgggagccgacgtggcccaggtgaccggggccctccggagtggcagggggaagatgctgctgttcagcgggcggcgcctctggaggttcgacgtgaaggcgcagatggtggatccccggagcgccagcgaggtggaccggatgttccccggggtgcctttggacacgcacgacgtcttccagtaccgagagaaagcctatttctgccaggaccgcttctactggcgcgtgagttcccggagtgagttgaaccaggtggaccaagtgggctacgtgacctatgacatcctgcagtgccctgaggactagggctcccgtcctgctttgcagtgccatgtaaatccccactgggaccaaccctggggaaggagccagtttgccggatacaaactggtattctgttctggaggaaagggaggagtggaggtgggctgggccctctcttctcacctttgttttttgttggagtgtttctaataaacttggattctctaaccttt

SEQ ID NO: 1987 - protein, 707 aa, Homo sapiens
MSLWQPLVLVLLVLGCCFAAPRQRQSTLVLFPGDLRTNLTDRQLAEEYLYRYGYTRVAEMRGESKSLGPALLLLQKQLSLPETGELDSATLKAMRTPRCGVPDLGRFQTFEGDLKWHHHNITYWIQNYSEDLPRAVIDDAFARAFALWSAVTPLTFTRVYSRDADIVIQFGVAEHGDGYPFDGKDGLLAHAFPPGPGIQGDAHFDDDELWSLGKGVVVPTRFGNADGAACHFPFIFEGRSYSACTTDGRSDGLPWCSTTANYDTDDRFGFCPSERLYTRDGNADGKPCQFPFIFQGQSYSACTTDGRSDGYRWCATTANYDRDKLFGFCPTRADSTVMGGNSAGELCVFPFTFLGKEYSTCTSEGRGDGRLWCATTSNFDSDKKWGFCPDQGYSLFLVAAHEFGHALGLDHSSVPEALMYPMYRFTEGPPLHKDDVNGIRHLYGPRPEPEPRPPTTTTPQPTAPPTVCPTGPPTVHPSERPTAGPTGPPSAGPTGPPTAGPSTATTVPLSPVDDACNVNIFDAIAEIGNQLYLFKDGKYWRFSEGRGSRPQGPFLIADKWPALPRKLDSVFEEPLSKKLFFFSGRQVWVYTGASVLGPRRLDKLGLGADVAQVTGALRSGRGKMLLFSGRRLWRFDVKAQMVDPRSASEVDRMFPGVPLDTHDVFQYREKAYFCQDRFYWRVSSRSELNQVDQVGYVTYDILQCPED

SEQ ID NO: 1988 - DNA, 280 bp, Homo sapiens
aggtcgacacggcggctcacctaccctgctttctgcattcttctctccacatccctctctgtacttacagcccccaatggcccccaaaaagccagagcccaagaaggatgatgccaaggcagcccccaaggcagctccagcttccgcacctccccctgagcctgagcgccctaagggggctggagtttgatgcttccaagatcaagattgagttcacacctcagcagattgagagttcaaggaggcctctatgctgtcgaccgaaacaagtgttagatga

SEQ ID NO: 1989 - DNA, 446 bp, Homo sapiens
  misc_feature (404)..(404): n is a, c, g, or t
  misc_feature (416)..(416): n is a, c, g, or t
  misc_feature (436)..(436): n is a, c, g, or t
gagatattcaaaactcagaaacattgctgatgcttctcttttcttagttcattctgcagaatggaaacccatgcctattagaaatgacagtacttattaattgagtccctaaggaatattcagcccactacatagatagcttttttttttttttttaataaggacacctctttccaaacagtgccatcaaatatgttcttatctcagacttacgttgttttaaaagtttggaaagatacacatctttcataccccccttaggcaggttggctttcatatcacctcagccaactgtggctcttaatttattgcataatgatattcacatcccctcagttgcagtgaattgtgaggcaaaagatcttggaaaggcaaaaaggcacttaatttagttttaaaatgtncacttttttggnttttattattacaaaaaccntggagtactt

SEQ ID NO: 1990 - DNA, 2730 bp, Homo sapiens
aaaattcactatgatcaagtgggattcatcctaggaatgtaagactggttccacatatgcaaattaataagcattatagatcacattagcagaaccaagaacaaagaccatatgatcttttcaatagacattgaaaaagtgtttgataaaattcaatattcctttattttaaaaaccctcaaaaactcagtatacatggagtataataataataaaggccataaatttacagcaaacttcatactgaatggagaaaaattgaaagcctttcccctaaaatctggaaaaaaccaagaatgctcactttcaccatttttatgcaacataatctgctccatctagctctttccagtgcagccactgccgccgcccaggagccctcgtcccctgccttgtccccctactcgttcccgctcccacggcatggagcaggacactgccgcagtggcagccaccgtggcagccgcggatgcgaccgccactatcgtggtcatagaggacgagcagcccgggccgtccacctctcaggaggagggagcggccgccgcggccaccgaagccaccgcggccacggagaagggcgagaagaagaaggagaaaaacgtttcttcatttcaactcaaacttgctgctaaagcgcctaaatctgaaaaggaaatggacccagaatatgaagagaaaatgaaagccgaccgagcaaagagatttgaatttttactgaagcagacagaactttttgcacatttcattcagccttcagcacagaaatctccaacatctccactgaacatgaaattgggacgtccccgaataaagaaagatgaaaagcagagcttaatttctgctggagactaccgccataggcgcacagagcaagaagaagatgaagagctactgtctgagagtcggaaaacatctaatgtgtgtattagatttgaggtgtcaccttcatatgtgaaaggggggccactgagagattatcagattcgaggactgaattggttgatctctttatatgaaaatggagtcaatggcattttggctgatgaaatgggccttgggaaaactttacaaacaattgctttgcttggttacctgaaacactaccgaaatattcctggacctcacatggttttagttccaaagtctactttacacaactggatgaatgaatttaaacgatgggtcccatctctccgtgtcatttgttttgtcggagacaaggatgccagagctgcttttattcgtgatgaaatgatgccaggagagtgggatgtttgcgttacttcttatgagatggtaattaaagaaaaatctgtattcaaaaagtttcactggcgatacctggtcattgatgaagctcacagaataaagaatgaaaaatctaagctttcagagattgttcgtgagttcaagtcgactaaccgcttgctcctaactggaacacctttgcagaataacctgcatgaactgtgggccttactcaactttttattgcctgatgtctttaattctgcagatgactttgattcttggtttgacactaaaaattgtcttggtgatcaaaaactcgtggaaagacttcatgcagttttaaaaccatttttgttacgccgtataaaaactgatgtagagaagagtctgccacctaaaaaggaaataaagatttacttggggctgagtaagatgcaacgagaatggtatacaaaaatcctgatgaaagatattgatgttttaaactcttctggcaagatggacaagatgcgactcttaaacattctgatgcagcttcgaaagtgttgtaatcatccatatctgtttgatggtgctgaacctggtccaccttataccactgatgagcatattgtcagcaacagtggtaaaatggtagttctggataaactattggccaaactcaaagaacagggttcaagggttctcattttcagccagatgactcgcttgctggatattttggaagattattgcatgtggcgtggttatgagtattgtcgactggatggacaaaccccgcatgaagaaagagaggataaattcctagaagtggaatttctgggtcaaagggaagcaatagaggcttttaatgctcctaatagtagcaaattcatctttatgctaagtaccagggctggaggtctcggaattaacctggcaagtgctgatgtggttatactatatgattcagactggaacccacaggttgatctacaagctatggatcgagcacatcgtattggtcagaagaaaccagtacgtgtattccgtctcatcactgacaacactgttgaagagaggattgtagaaagagctgagataaaactgagactcgattcaattgttatacaacaaggaagactcattgaccaacagtctaacaagctggcaaaagaggaaatgttacaaatgatacggcatggagccacccatgtttttgcttctaaagagagtgagttgacagatgaagacattacaactattctggaaagaggggaaaagaagactgcagagatgaatgaacgcctgcaaaaaatgggagagtcttctctaagaaattttagaatggacattgaacaaagtttatacaaatttgagggagaagattatagagaaaaacagaagcttggcatggtggaatggattgaacctcctaaacgagaacgcaaagcaaactacgcagtggatgcctactttagagaggctttgcgtgtc

SEQ ID NO: 1991 - protein, 769 aa, Homo sapiens
MEQDTAAVAATVAAADATATIVVIEDEQPGPSTSQEEGAAAAATEATAATEKGEKKKEKNVSSFQLKLAAKAPKSEKEMDPEYEEKMKADRAKRFEFLLKQTELFAHFIQPSAQKSPTSPLNMKLGRPRIKKDEKQSLISAGDYRHRRTEQEEDEELLSESRKTSNVCIRFEVSPSYVKGGPLRDYQIRGLNWLISLYENGVNGILADEMGLGKTLQTIALLGYLKHYRNIPGPHMVLVPKSTLHNWMNEFKRWVPSLRVICFVGDKDARAAFIRDEMMPGEWDVCVTSYEMVIKEKSVFKKFHWRYLVIDEAHRIKNEKSKLSEIVREFKSTNRLLLTGTPLQNNLHELWALLNFLLPDVFNSADDFDSWFDTKNCLGDQKLVERLHAVLKPFLLRRIKTDVEKSLPPKKEIKIYLGLSKMQREWYTKILMKDIDVLNSSGKMDKMRLLNILMQLRKCCNHPYLFDGAEPGPPYTTDEHIVSNSGKMVVLDKLLAKLKEQGSRVLIFSQMTRLLDILEDYCMWRGYEYCRLDGQTPHEEREDKFLEVEFLGQREAIEAFNAPNSSKFIFMLSTRAGGLGINLASADVVILYDSDWNPQVDLQAMDRAHRIGQKKPVRVFRLITDNTVEERIVERAEIKLRLDSIVIQQGRLIDQQSNKLAKEEMLQMIRHGATHVFASKESELTDEDITTILERGEKKTAEMNERLQKMGESSLRNFRMDIEQSLYKFEGEDYREKQKLGMVEWIEPPKRERKANYAVDAYFREALRV

SEQ ID NO: 1992 - DNA, 411 bp, Homo sapiens
tttttttttttttttaaagagagatcggaactttattgagactgatgaaatcagaaccaaaagaacactggaaaggttctgccactgtccaggcacagatccttccagacactcctcttgggggaatctctggatcattaagtttcccccagttcctaatcccccaccccaaagagtcagaattctgcttaaagccccctccacggagctggccagaaaccagacactgagtatctgtactgactgatgggcaggcctgtgagcagcagagacaagagaaatcagagaaggaacacgaaaaggaaaacatgacggaaagaaaagcccaaggcagggagagcatgctgataacgcagccccctgaaaatataaatattgcatgaatgtattagcctcatcccagccatttcc

SEQ ID NO: 1993 - DNA, 1442 bp, Homo sapiens
ggttcccttccacgctgtgaagctttgttcttttggtcttcatgataaatcttgctgctgctcactcgttgggtccgtgccacctttaagagctgtaacactcaccgcgaaggtctgcaacttcactcctggggccagcaagaccacgaatgcaccgagaggaatgaacaactctggacacaccatctttaagaaccgtaatactcaccgcaagggtctgcaacttcattcttgaagtcagtgaggccaagaacccatcaattccgtacacattttggtgactttgaagagactgtcacctatcaccaagtggtgagactattgccaagcagtgagactattgccaagtggtgagaccatcaccaagcggtgagactatcacctatcgccaagtggcctgattcagcaggaagcatctcagacaccaaccactatgctgtcagcagttgcccggggctaccagggctggtttcatccctgtgctaggctttctgtgaggatgagcagcaccgggatagacaggaagggcgtcctggctaaccgggtagccgtggtcacggggtccaccagtgggatcggctttgccatcgcccgacgtctggcccgggacggggcccacgtggtcatcagcagccggaagcagcagaacgtggaccgggccatggccaagctgcagggggaggggctgagtgtggcgggcattgtgtgccacgtggggaaggctgaggaccgggagcagctggtggccaaggccctggagcactgtgggggcgtcgacttcctggtgtgcagcgcaggggtcaaccctctggtagggagcactctggggaccagtgagcagatctgggacaagatcctaagtgtgaacgtgaagtccccagccctgctgctgagccagttgctgccctacatggagaacaggaggggtgctgtcatcctggtctcttccattgcagcttataatccagtagtggcgctgggtgtctacaatgtcagcaagacagcgctgctgggtctcactagaacactggcattggagctggcccccaaggacatccgggtaaactgcgtggttccaggaattataaaaactgacttcagcaaagtgtttcatgggaatgagtctctctggaagaacttcaaggaacatcatcagctgcagaggattggggagtcagaggactgtgcaggaatcgtgtccttcctgtgctctccagatgccagctacgtcaacggggagaacattgcggtggcaggctactccactcggctctgagaggagtgggggcggctgcgtagctgtggtcccagcccaggagcctgagggggtgtctaggtgatcatttggatctggagcagagtctgccattctgccagactagcaatttgggggcttactcatgctaggcttgaggaagaagaaaaacgcttcggcattctcc

SEQ ID NO: 1994 - protein, 280 aa, Homo sapiens
MLSAVARGYQGWFHPCARLSVRMSSTGIDRKGVLANRVAVVTGSTSGIGFAIARRLARDGAHVVISSRKQQNVDRAMAKLQGEGLSVAGIVCHVGKAEDREQLVAKALEHCGGVDFLVCSAGVNPLVGSTLGTSEQIWDKILSVNVKSPALLLSQLLPYMENRRGAVILVSSIAAYNPVVALGVYNVSKTALLGLTRTLALELAPKDIRVNCVVPGIIKTDFSKVFHGNESLWKNFKEHHQLQRIGESEDCAGIVSFLCSPDASYVNGENIAVAGYSTRL

SEQ ID NO: 1995 - DNA, 5231 bp, Homo sapiens
tataaattgctttttaacttcgttgaacaaaacatgaaaatagagagactggttgaagtaaagccttccttagttattgactatttaaagacagaaaagaagctattctggccaaagataaagaaggtaaatgtgcaggtaagtttcaatcctgagaacaaacaaaaaggcattttactaactggctcaaagaccgaagtactgaaggcagtggacattgtcaagcaagtctgggattcagtctgtgttaaaagtgtccatactgataagccaggagccaagcagttcttccaggataaagcacggttttatcaaagtgagatcaaacggttgtttggttgttacattgaactacaggagaatgaagtaatgaaggagggaggcagccccgctgggcagaagtgcttctctcggacagtcttggcccctggcgttgtgctgattgtgcagcagggtgacttggcacggcttcctgtcgatgtggtggtgaatgcatctaatgaggaccttaagcattatggtggcctggccgctgcgctctcaaaagcagctggccctgagctccaggccgactgtgaccagatagtgaagagagagggcagactcctaccgggcaatgccaccatctccaaggcaggaaagctgccctaccaccacgtgatccatgcagtggggccccgctggagcggatatgaggccccgaggtgtgtgtacctattaaggagagctgtgcaactcagtctctgtctagccgaaaaatacaagtaccgatccatagccatcccagctattagttctggagtctttggctttcccttaggccgatgcgtggagaccattgtttctgccatcaaggaaaacttccaattcaagaaggatggacactgcttgaaagaaatctaccttgtggatgtatctgagaagactgttgaggcctttgcagaagctgtgaaaactgtatttaaagccaccctgccagatacagctgccccgccaggtttaccaccagcagcagcggggcctgggaaaacatcatgggaaaaaggaagcctggtgtccccgggaggcctgcagatgctgttggtgaaagagggtgtgcagaatgctaagaccgatgttgttgtcaactccgttcccttggatctcgtgcttagtagagggcctctttctaagtccctcttggaaaaagctggaccagagctccaggaggaattggacacagttggacaaggggtggctgtcagcatgggcacagtgctcaaaaccagcagctggaatctggactgtcgctatgtgcttcacgtggtagctccggagtggagaaatggtagcacatcttcactcaagataatggaagacataatcagagaatgtatggagatcactgagagcttgtccttaaaatcaattgcatttccagcaataggaacaggaaacttgggatttcctaaaaacatattcgctgaattaatcatttcagaggtgttcaaatttagtagcaagaatcagctgaaaactttacaagaggttcactttctgctgcacccgagtgatcatgaaaatattcaggcattttcagatgaatttgccagaagggctaatggaaatctcgtcagtgacaaaattccgaaggctaaagatacacaaggtttttatgggactgtttctagccctgattcaggtgtgtatgaaatgaagattggctccatcatcttccaggtggcttctggagatatcacgaaagaagaggcagatgtgattgtaaattcaacatcaaactcattcaatctcaaagcaggggtctccaaagcaattttagaatgtgctggacaaaatgtagaaagggaatgttctcagcaagctcagcagcgcaaaaatgattatataatcaccggaggtggatttttgaggtgcaagaatatcattcatgtaattggtggaaatgatgtcaagagttcagtttcctctgttttgcaggagtgtgaaaaaaaaaattactcatccatttgcctcccagccattgggacaggaaatgccaaacaacacccagataaggttgctgaagccataattgatgccattgaagactttgtccagaaaggatcagcccagtctgtgaaaaaagttaaagttgttatctttctgcctcaagtactggatgtgttttatgccaacatgaagaaaagagaagggactcagctttcttcccaacagtctgtgatgtctaaacttgcatcatttttgggcttttcaaagcaatctccccaaaaaaagaatcatttggttttggaaaagaaaacagaatcagcaacttttcgggtgtgtggtgaaaatgtcacgtgtgtggaatacgctatctcctggctacaagacctgattgaaaaagaacagtgtccttacaccagtgaagatgagtgcatcaaagactttgatgaaaaggagtatcaggagttgaatgagctgcagaagaagttaaatattaacatttccctggaccataagagacctttgattaaggttttgggaattagcagagatgtgatgcaggctagagatgaaattgaggcgatgatcaagagagttcgattggccaaagaacaggaatcccgggcagattgtatcagtgagtttatagaatggcagtataatgacaataacacttctcattgttttaacaaaatgaccaatctgaaattagaggatgcaaggagagaaaagaaaaaaacagttgatgtcaaaattaatcatcggcactacacagtgaacttgaacacatacactgccacagacacaaagggccacagtttatctgttcagcgcctcacgaaatccaaagttgacatccctgcacactggagtgatatgaagcagcagaatttctgtgtggtggagctgctgcctagtgatcctgagtacaacacggtggcaagcaagtttaatcagacctgctcacacttcagaatagagaaggtaagccttctgctagaatgcagtttctggatggtggaaataagttctgtcatggtcctatataaaatccattttcattcacttcctatcacatttttttaaacccagaattagaatttgtatggtaattagtagttctagattctactcatgtgaccataattactgaggcattaagattcttgtgtcagtgattacaatatttgattgtaatatgatagaacactaaagacatatatttactttgtgaagcaagctaatacaaattcaaagatatggctttaaaattggatttgatagctagcaaattccacagagagccatgcagaggctccttagatcaggaccatgttactctgccccattattcacagatcaacagtgcttccttgataaagccagcaggccttttctcgtttatcataattattttgggcaggtgaatgtgatgattcgtgcctgtagtcccagctattgggaggctgaggtggaaggattgcatgagcccaggagtttgacgccagtctgggtaacatagtgagatcctgctctcaaataaaaacaaccaattattttggcatcttcttccatttttaaacatttttgatattgctgtttgaaattatattttccttgacttctctagcaaaattattatgattttttttttccttgactaattttcttttcatttttgcaggcacgctgtttctcttccaaacccctaattctagctttattcacgccatttatgcttaaacggtcttttgtctctgtacctcaccagggaatatatttacccttcttggattcaactattagttcaatgtcgatagctcccaaatcaacattaccaacctgggtctttgactcaagctctagaacatactcccagtggcctaaaaaaatctccacttgaggctgggcacagtggctcacgcctgtaatcccagcactttgggaggccgaggtgggtggatcacgaggtcaggggttcaagaccatcctggtgaagatggtgaaaccacgtctctactaaaactacaaaaattagccgggcatgttggcaggtgcctataatcccacctacttgggaggctgaggcaggataattgcttgaacatgggcggcagagattgcagtgagccaagatcacgccactgcactccagcctggtcgacagagtgagactccgtctcaaaaaaaaaaatctccacttgaatatctaactgcaaaatcaacttctctaaaatctaatgcatcatacgtaagtaattctctttccctttccttcctcatttctgtttttggttctaccactttctgagtaaagccggagatctttgatccaccataagtctgccagtaagacctacattttctttgcaaatttttcttactctctatttgaactgccaacactgtttattcatgttgttaagtacatcataatttaaaaagattcaaagtgccctacaaagatataaactataccttcagataaaataaatatacaaagaaaaatggttaaagagaaaagaatggcagggaaaataagataatacagacgaactgctagttctcaaaaatatataacatgaggttaccaatttgtccctgagcttcctagtagacaaagcaagaagtaaacattcaggtacaagactcataatgtccgtaaatcaaaaagcaaaccatttgataaggaggctcacagctcctcacaatactgagactgactcctgagagatttctcttgtggatcaagtactagagaatatcctcaacgtcatcctcacaataaattaaatatcaacttttatatcactgtttttttttaatgtaaaactggttgaacaaaaccgatgcctgattgaatgaaaacaattctatgaggcaccaagacaatatgattcaagtatgcagctctatgatggtctatttctgagataacaagtaagtctcactccaagtaccaattactactaactggtagtggctgattggcacattgtgatgagatgctaagtttagattgagcaggaatgaatgttctgcttgaccagcaatatctacagtgggccctgtggatgcctgctgtgtattggcagaccctggccagagaattgatttcaacacttttttgcagtgaaaccttttttttcaataaaatcttatgtgaaatcccagtgtatgaaccagataaaagcagaggtgtgggtagtacttaaggtgcctccatggaggtccctagaattgtg

SEQ ID NO: 1996 - protein, 1023 aa, Homo sapiens
YKLLFNFVEQNMKIERLVEVKPSLVIDYLKTEKKLFWPKIKKVNVQVSFNPENKQKGILLTGSKTEVLKAVDIVKQVWDSVCVKSVHTDKPGAKQFFQDKARFYQSEIKRLFGCYIELQENEVMKEGGSPAGQKCFSRTVLAPGVVLIVQQGDLARLPVDVVVNASNEDLKHYGGLAAALSKAAGPELQADCDQIVKREGRLLPGNATISKAGKLPYHHVIHAVGPRWSGYEAPRCVYLLRRAVQLSLCLAEKYKYRSIAIPAISSGVFGFPLGRCVETIVSAIKENFQFKKDGHCLKEIYLVDVSEKTVEAFAEAVKTVFKATLPDTAAPPGLPPAAAGPGKTSWEKGSLVSPGGLQMLLVKEGVQNAKTDVVVNSVPLDLVLSRGPLSKSLLEKAGPELQEELDTVGQGVAVSMGTVLKTSSWNLDCRYVLHVVAPEWRNGSTSSLKIMEDIIRECMEITESLSLKSIAFPAIGTGNLGFPKNIFAELIISEVFKFSSKNQLKTLQEVHFLLHPSDHENIQAFSDEFARRANGNLVSDKIPKAKDTQGFYGTVSSPDSGVYEMKIGSIIFQVASGDITKEEADVIVNSTSNSFNLKAGVSKAILECAGQNVERECSQQAQQRKNDYIITGGGFLRCKNIIHVIGGNDVKSSVSSVLQECEKKNYSSICLPAIGTGNAKQHPDKVAEAIIDAIEDFVQKGSAQSVKKVKVVIFLPQVLDVFYANMKKREGTQLSSQQSVMSKLASFLGFSKQSPQKKNHLVLEKKTESATFRVCGENVTCVEYAISWLQDLIEKEQCPYTSEDECIKDFDEKEYQELNELQKKLNINISLDHKRPLIKVLGISRDVMQARDEIEAMIKRVRLAKEQESRADCISEFIEWQYNDNNTSHCFNKMTNLKLEDARREKKKTVDVKINHRHYTVNLNTYTATDTKGHSLSVQRLTKSKVDIPAHWSDMKQQNFCVVELLPSDPEYNTVASKFNQTCSHFRIEKVSLLLECSFWMVEISSVMVLYKIHFHSLPITFF

SEQ ID NO: 1997 - DNA, 566 bp, Homo sapiens
cacgagggcgcccggcttgcgggactgcggggcgcgagagcgcggccgggtagcgtcgcgcgcgtggatctgccgccgggttgctgtgcgactattctccgggagccgtccgtgtcaccgccggaacctggcgcaggttaattatagaaaatgccaagtaggaaatttgccgatggtgaagtggtaagaggtcgatggcctgggagttcactttattatgaagtagaaattctgagccacgacagcacctcccagctttacactgtgaagtataaagatggaacagagcttgaattgaaagagaatgatattaagcctttaacttcctttaggcaaaggaaaggtggctcaacttccagttccccttccagacgccgagggagtcgatcaaggtcacgctcccgatcccctggtcgaccacctaaaagtgcccgccgatctgcttctgcttcccaccaggccgacattaatgaagcaaggagggaagtggaagttaaattgactccgctgattctgaagccattttggaatagcatcagcagatataatggggagcctgagcatat

SEQ ID NO: 1998 - DNA, 257 bp, Homo sapiens
tttaacaaaaaaaaggaaaaacaaaagcctaaaatctgagttctagaaccagagagatttgggaaccataagatctagaatcagaaggagttgagggtggtaagatctaaaaccagagaaatgtataaggcaaagtctaaaatcagaagatatttgaaggctgaattctagacccagggtaatttggagtcagatcttgagtgaggaggagctggaaatgatgaagtctagagccaagggaacttacggaatgaggt

SEQ ID NO: 1999 - DNA, 565 bp, Homo sapiens
  misc_feature (352)..(352): n is a, c, g, or t
  misc_feature (464)..(464): n is a, c, g, or t
  misc_feature (515)..(515): n is a, c, g, or t
tctttctctctcagcctctttctttctccctgtctcccccactgtcagcacctcttctgtgtggtgagtggaccgcttaccccactaggtgaagatgtcagcccaggagagctgcctcagcctcatcaagtacttcctcttcgttttcaacctcttcttcttcgtcctcggcagcctgatcttctgcttcggcatctggatcctcatcgacaagaccagcttcgtgtcctttgtgggcttggccttcgtgcctctgcagatctggtccaaagtcctggccatctcaggaatcttcaccatgggcatcgccctcctgggttgtgtgggggccctcaaggagctccgctgcctnctgggcctgtattttgggatgctgctgctcctgtttgccacacagatcaccctgggaatcctcatctccactcagcgggcccagctggagcgaagcttgcgggacgtcgtanagaaaaccatccaaaagtacggcaccaaccccgaggagaccgcggctcgangagagctgggactatgtgcagttccagctgcgctgctgcggctggcacta

SEQ ID NO: 2000 - DNA, 1901 bp, Homo sapiens
cgtgggccgccagactcgggagaggctccgtcttgtgcaagggtcctgtgggctggctgcactggcctctgcggtggtgcctgccagaatgccccacttggaaaacgtggtgctttgtcgcgagtctcaagtgtccatcttgcagtccttgtttggagagagacatcatttcagctttccatccatttttatttatggacatactgctagtggaaagacctatgtaacacaaacgttgttgaaaactttagagctcccacatgtgtttgtgaattgtgttgaatgctttacattgaggctgcttttggaacaaattttaaacaaattgaatcatcttagttcttcagaggatggatgttctactgaaataacctgtgaaacatttaatgactttgttcgcttgtttaaacaagtaaccacagctgaaaatcttaaagatcagactgtatatattgttctagataaagcagagtatctaagagatatggaagcaaatcttttgcctggatttcttagattacaagaattggctgacagaaatgtgactgttctctttctcagtgaaattgtttgggaaaagtttcgtccaaatactggatgctttgagccgtttgtcttatatttccctgattacagcataggcaaccttcaaaagatcctgtcccatgatcatcctccagagtattcagctgatttctatgctgcctacattaacattcttcttggagttttctacactgtttgtcgagatttgaaagagctcagacatctggcagtacttaattttcctaaatattgtgaacccgtggttaaaggagaagcaagtgaacgtgatactcgcaaactgtggagaaatattgaacctcatttgaagaaagctatgcagactgtttatctcagggaaatatcaagttcccagtgggaaaagctacagaaagatgacacagatccggggcaactgaaaggcctctcagcgcatactcatgtggaacttccatattactctaagttcattctaattgctgcataccttgcttcatacaatccagcaagaactgacaagaggttttttcttaagcatcatggaaaaatcaagaaaaccaactttctaaaaaaacacgaaaagacaagcaatcatctccttgggccaaaaccatttccactagacagattattagcaatattatatagtatcgtggacagcagagttgctccaacagcaaatattttttcccagattacctctctagtgacccttcagctgttaaccctggttggccatgacgatcagcttgatggaccaaaatacaaatgcacagtgtctctagacttcatcagagctattgcaaggacggtgaactttgacataataaaatacttgtatgatttcttgtgaaaacaagcttcaaagccatatggacactgtgacaatgactaagccaagctgtgttcatccagctacttagctggccaaggagaggagttctttggctctattggatttgtccaaacaggtgctggcccagcatggaatctgatgaaaatattctgattggtctgggtggatgtgagcagaagactatttaccagggaccctggagtatttggaagcaacgtgttaattataaacagcagggtttgagcacaatctgttctactcttaatgatgttatcttaacactgaaattgcctgaaacccatttacttaggactacattttgctctgtgaactatcccctgcgctttgaacgtgccagcagcccttgtttatatgcccattcttttcacttcctctccacaggagcctctgcagtcgcttgccaaagcagattttcctaaggccactgttttaaaagatcatagttgcaaaatataataaatacaagttctttttaaaatcg

SEQ ID NO: 2001 - protein, 435 aa, Homo sapiens
MPHLENVVLCRESQVSILQSLFGERHHFSFPSIFIYGHTASGKTYVTQTLLKTLELPHVFVNCVECFTLRLLLEQILNKLNHLSSSEDGCSTEITCETFNDFVRLFKQVTTAENLKDQTVYIVLDKAEYLRDMEANLLPGFLRLQELADRNVTVLFLSEIVWEKFRPNTGCFEPFVLYFPDYSIGNLQKILSHDHPPEYSADFYAAYINILLGVFYTVCRDLKELRHLAVLNFPKYCEPVVKGEASERDTRKLWRNIEPHLKKAMQTVYLREISSSQWEKLQKDDTDPGQLKGLSAHTHVELPYYSKFILIAAYLASYNPARTDKRFFLKHHGKIKKTNFLKKHEKTSNHLLGPKPFPLDRLLAILYSIVDSRVAPTANIFSQITSLVTLQLLTLVGHDDQLDGPKYKCTVSLDFIRAIARTVNFDIIKYLYDFL

SEQ ID NO: 2002 - DNA, 110665 bp, Homo sapiens
gatcattgggtgagaatgggacggcagtaaagtcataagagcactggaccaggagtcgagagaccccactgtgcctctcactggctgtgtggctgggcaggtctctgctttgttcagcctcagtttccatatctgtgaatctggatcatctgtgggattccctccaaagcgaaccttctacaaatctttgccaaaggcaccggggaggaagaaaaaggaagagaaagcaaggggtggtgggggtgggttgttaggggtgtttgggagatgctgcagtccgcagaattgagctttagctaaagactggtcctggtgaagcaaccaggaagtttttcttgggacagccatagccactatatattgagcactggaccagtgtcacctggtcagggggttgttgagaacgtgggctctggggccaggctatgtggcttgcacagctctgccacttaacactgtgtgagcctcggcaagctgcttaaccccactgtgcctcagtttccacacctaaaaagtgagggttcttgcagcacccacctactagtgctgtcgtgagggctgagtatgccgatattgatgcacatgtagtacttagaatagcgcctaatgaactgttatgactcagtgagttatttatttctcattcttaagtgaggaaatagaggcatggagagctctagggaaggaataaagacctatgggttgcaaacaggcctctccatgtgtctaatgttctctgatgtaatgctttacgtggggcttcccaccactctctgtcccaccacaccagcctcctctccttgttgaataagacggtgcagggggcttggcaatgcctgaggcatctctaccacccctgccctgccacttgggtttccctgggtagcatctggcctggccactgaccatgcactcctagctgtggctgtcccctgctctcctatcatctgtccctcctccacactgcaccagagatacagatccccttggctgtgatgtcattggggacagagataaaatcgcagtgatagggtaggatctgggacttatcatgcccacaggaaatgctttgctgtgaaatggcaaagccgtgggtgagagccaagaggagcagaggcaacaggcagggtcatcaccagctttccttcctggctcttaagtgtgggcttaaggaggaaaaatgaggtctggccacccatcttttgtccagctttcttatggggagagccacctggccccataagatccagcacctgcttgccaggccatgcaggccacctggttggctcttatgcattcagcagtggtcccagagtaagatgcggtgctgtagggattaatccagggattccaccagactctccatccagaaacccatggctcatattccctcctcgtagcccttcctcactccttccctataagcaaatctttccctccatcagggcacacatttcagagagaccggggcactgttccatcttactgcagcctggctgggtattatgatcacctgcggaactcttagacaacaccattgcatctgaatctcttggggaggggcctaggcatctttatttaatttttttttttctgggatgattccaatgccctttctctagggcagtggttctcaaatttgggcatgcatgagaactccctggaggaattgtttaaacacagatgctgggcccctcccggtgtttctgcaaattccatgtggtctagaatttgaatttctgacaagtcctctagtgatgctaatgctgctggtccccagagcacacctggaaaaccactgccttcgggtcctgccgctttgcagctacccaggtgagagccgtccttctcctgggttctgtgtctctgactttgggcctggtaggcctgtccccttttgaaggcaggtcgccaggggcatggaccacttctgagaaaatttggtgtcccctctacagtcagtccttcccatttctccacctgtccccacctcccctgaaactatccactgttcggccttgcagctcttggtcccactctctgggacaagtgcttaaaactgtgcactggttgatgaaggcaggatgaggcggacaaacaaggatggcactagctgaggggcctcagaacatgcgtcagggtctgaagctgctgtgaaggtgcttggagctaaagtagcattattgcaataattggggaggtgttcagagaggaccctcactttgttgaagggaggctcttaaaatacttcctgttatttcactttcccaccctatggagggcaagtatttgattccagcttgaatcgtagttgttgttaacaataaaaatgatacagacacacacagaaataagctgttcccttttcctttcctctcccagaccagagatgtagggagggtagggggagggtccctgctggaggtagtggagtctctgtcatcttctaggtggtcctgggccttgagagagtggatggttgggagagcctgggggctggcccctgggggcaggggtgtggagttgtttgtggaaactggagggagttggggtgaagcctggtaggaggtgagaagaggtggcaggtcccacagccctgctgcaggggaggcgaggcggggccgggagtgggggcgagattggtgtctgagcccgccagtcctcaggtgactgggcacaggggtttgctgtgttttggtccgtgccgtacccctagcacctagaagagagcctcatatatagtggctgctcaataaatctttgtggaatggatgagagaatgggattgagcccccattgtgtgcccagaaatgcagacaccaaaaaaatgctctgtctaccgtctctaccctgcaggtgcttcaccagctgacacccaggggcctcgcccacaggtccacaaggcgctgagccctctgcctctgccctgtctccctccccgcacagtgatccaggcccagcctcctcctggtgtagggctcacagtctgttcctccccacagagagtctgccagcacctcccccaaccccccctccccgagttctaccagtgggtctgtggggtggggctccggtttgttttctcctgtttgccaagggaagtcacagcctgtcctttgccttgtttataattgctttgaggacagcacctgccgcggccccccacagtccctgaggggtgcagagtggccaggaggtgacacactatactgtccaccccctgccgcctcttgtcccctcccagctctagccaggtgcactttctgctgccttgccaggacggtgctggctggccttgctttggggctaattggaaccgtagagctgggggtgtcagagggcagctggcgctgcccccatgttgtcaagaggaggggatcgaggcccagggattcagcagcacaaggccttcagtgtcaacaggcatgtactgagcacatcagaggtacctggcactgggctggccaagcagggcgggtgggaacaagatcacagcttctcccgcaaggtgccgatgtcctagccagggaatcttagtaaccacagagggcagagaggagcagaatgcgagaagctagtgtagactaatgtactaaacaacataagcgcggtgatacctgccctttgccctgaagagcattctccttgggcctcttgctggcacagagaccttgactcagcgtggtttaggccctcagccctttccaccttctgggccccaggaagggctactctactgctccctgggccttctcacctgggggtcacctctgcaggctacgttctggacaagtccttccttccaggaggactagaggctgctggagcctttgaaaggaggctctgagccacccacctgccacttggaagctctggggccaaggggagatgtggtgctggatcagggccgacagctcaggcctccttggacctgcctgtgactgagcctccatgcttgggcctggaacctgggggcagtgcctctgttcctcccacctccagaaccttcttttttgtttgtttgcagacagggtctctctgtgttgcccaggctggagtgcagtggcacaatcatggctcactatagcctcaaccttctgggctcaagcaatcctcttaccttagcttcccaagtagctgggaccagaggcacgtgccactacacctggctaatttttaaaattttctgtagagatgggatctcaccatgttgcccaggctggtctcaaactcctgggctcaagtgatccagccgcctcggcctcccaaagtgttaagattacaggcgtgagccaccttgcctggccacaagccttttttctcccctccaccctccgccaccctctgagcctccatctagttccacagcatctgcagccttggactatctctctctctcctgctctttgtctccccttctctccttcctctttatttccttctctgccaccttccttcttttgatgtgttcaaaggatgaccagggcccaccccaccagtacctttctcacagtcagcctccaagtcctgctgtcaggggcccagaggaatggtccacggtagggtgaggtggctgcgaaggtgcccagcctgacgcaaccccctacccatggccaggaaggggtgtgtggtggctgggacatcctgggcggggtggcgggtgaaagaggctatggtagtcggctcctgtgggttgaggggcagccagcagcctgggccaactgggggaagggaccctccctagacagccccaagcattatcactactccagacctgtgcctaactataggttgtcatccacttctttggatctaattatagtgttttgcgaaactaggtatgggaagaaaatactgtatctatttacttatatctcattcttttctttcttttaaaattgtgaaatatagcatagttgcttaaaaagcataaacatacacatataatgtagtaaataattataaaagtgaacccctggctgggtgcggtggctcacgcctgtaatcccagcactttgtgaggctaaggcaggcagatcacgaggtcaggggtttgagaccagcctggccaacatggtgaaaccccatctctactaaaaatacaaaaattatccaggtgttgtggcacgcacctgtaattccagcttgggaggctaaggcaggagaatcgcttgaacctgggaggtggaggttgcagtgagccaagatcgtatcaatgcactccagcctgggtgacagagcaagactccatctaaagaaaaaaaaaagtgaacccctaggcaaccatcacccaggtgaataaacaacagaatgtagcttgtacgccaaaatcaactcatgtgccctccacccccagaggtaatcactatcctgactgtacgataatcagctccttgcctcttttattatgtaaccacctatgtctgcatcccttagctgagtttagttttgcctgactctgaatttaatacagatggaatggcgctggacatgttcttttacgtcaggcttttcccacccaacagtgtatttgtgagagtcacttatgttgtgtatagccgtagtctgttaattttctttcttttctttttattatttatttatttttgagatggagtctgctctgttgcccaggctggagtgcagtggcgcgatctcagctcactgcaacctccacctccccagctcaagcgattctcctacctcggcctcccaaagtgccaggattgcaggcgtgagccgccgggcctggcctttaatgtatatttcaacttcagtaaatattttattaagtggttgtactactttactccttgctagtggcccacagagttcctgttgctccttagccttatcaacacttggtcttgttagtttaatttctgccatgatggtgagtgtgtaacatgtctcatcctggtgtattgcattttcattctcattttaaaaatatataattttggggtatgtttgctgacatctataatatattcatgcatcggggtatatataagcaatttacaaggaaagaagcatatattgagagtgctcaaaagtttttactgataggaatatatgatcaaaacggttgaaagatcagggtaatattgaatgccaggaagggggttggcatgtagcttgggagttggaaggtgatattggtcttgtggggagaccccctaagtggcagtgcctgctggggctaagaagcctcttcccagagggtactgaaccacagagtacccatcacccttcaggccctcttgcctagcacatctggtgggggagagggggagactctcaggctagagccctcagcaggtgtaccgttcaatttggaattggcaggtgcccatcttttaggtgcttctagggcagtagttctccactaggggtgattttgtccccctaggggacatttgccaatgtctgatgatattggccagggataccactaaacatcttaaaatgcacaggacagcccctgtaactaattacctggccctgagtgtctggtgttgaggttgagaaactctgatctaggaaaagagccaggaaacagatttgccataaacttgctgcatggcctcgaggaagtcacttaagtgatttgagcctcagcctccttggaatctgaaaaacggatagcaagcgttgctgcccttccccttcatggggctcttgtcaggatgggggagatggtgaatgtgcaggcattttgggggaggcgtccctgcaaaggggccttgtggctgttgcgttccagtagagccaggccttttcagcactggcccttcttccttgactgtgttccctgtccaccaagctggaggcatcaggtgaccgctgtgaacctcagtcctggttcgtgctgctgcaggggctgtgaggcgcttcccccacagtccctgcgggccccagccttttgatgagggctgcagaaatgaggggttctctgggagccttggggcccaggacaaaaacatttccaactttgtccttagctggatgggagtccaaggttgtgggggtgataagaggtatttatcatgttccttatctgaggccccattgcaggtctcgggcggcaaggggcgggagccagaggtcctccctgggggctctgcacacccaggcctggctcctactcatcctttgtgtccttccagaatttgccagcccagggaggcccagggttggaccagagtctgggtccatcctccctgggcctctctggcctcactgttctgggcttccctcacattgctggcatctcctgccttctccaggagccacggcctgcctcatctcctctctgctgcccgcttccttcctgaaacctgcactcacgaaagggcccagtaaactcatccaccctgagacgcagacgaccgataatagcttaacctttcttaatacagggtatttgcttatcaacgatgggaatcccttggccaccagaaagaagcactaagtgaaatctctgcccagtctctttggcaggctgctaaaaaagtgctggggggctgaggaaccactgaacttgcatgtgtatcaagaacagtttctgcacaagtgaaaagtgtgcggtggtgtggatcttcccggagctgcccagggctctgcttgatctcaggctccatttcaaggtgggctgtagtacggcctcgacctgggtgtctggaggccctgggaaggcccaaggccaagactgcaggtgtatggccagtcaggaagatggtgagctgtggggcttctggctagaaggacacatgtctctaggaagcggggctggggttagggttaggcccaccctggacctggtgggattgggactctggcgaaattcttgctgctctgtgtctctccatctgcctagggccctctgaggtcaggctggggtcagggcggccatgagaggcctcctgtgggaggaccaaggagcgctgtgggcgcctggagccgggcgggtgagattgaagcagtctgtgttgggtaggctgcggtgtgggactgtgccgtcggggcgcagttccctctgtgctgtgagtaatcctcggccgcatttgcagctcccaggggattgtgcaacttcctctccagctgaggtgcagggggctgggtgagaaacagcagccgccggggaaatgaggaaactgagcccggccctggggctggggtgcggccctgggctccggcccctggaggagctgagcattccaggggcctccttccagggggctgccctctcgaaggtatgagagcacacgcgtgcatgtgtgtgagtgtgtgcatgtgtgtgagcatgtgtgtgaatgtgtgtccatgtgtgttagcctgtgtgcatctgtgtgagtgtatgtgcatgcgtgtggtgtctttggggaggtgggtgggtagggatgaggcccctcaggctgcactggcattgggatgtctttggggaggggtgggggtctctgagcatggccaaggctggggtgagggaaagaatggggaagaaggtggccaagctctggagtgcaggttggacagcgtgggaaatcaggagtcagccagagttgtgcttcagtttcctcatctctccaggcttatttcaagggtcgagtgagaaggtcatgggcaggatgggcttagcatgtcactggccaggccacagtgaatacccatttacattaggggctgggagcatatgctctacatccacctgcttgaatcctggccctgtcgttttgcagtttcatgatgctggcaagttatcctcctctgcttcctcatctgtaacatggagatgacagttatagtgcccaccttgtgagttctgaagagtaaaagactttactcacataaagtgctcagaatagagccagcctcccactaagtgcctgcacaggttaacacttcaccaggacatagcatgtttgtgtgcagatggcaaaaaactgcccagggctcctgacgatcatttttgatggtggaagtttgagctggaactgagattgatagtaagagctcatgtttacctggccttattccatgtcaggtactgtgcccagtgattcatctgtaccagccccttcaccctcagtcaccccatgagggggatgctgctatcattcccattttgcagatggggacatgtaggcccaggggctagagtgacttgctccagggcagctatatcagtgagggagaatggcagaatggtccactcagcccacaggtgggcccctcacccacacccctgccccttttctgggttccaatagaagtatgggagaggaggaggatggagggtctgctgggaggggtgtgagggctggccttgcagcctgtgggctctggccagggagccctttcttttctctgtgccatccccaattaagtaatcaaagtaacccacagctataaagagttaaattaatatagcgaatggagccaggtgcggtggctcacgcctgtaatcccagcactttgggaggccgaggtgggcgggtcccctgaggtcaggagtttgagaccagcctggccaacatggtgaaaccccgtccctactaaaatacaaaaaattagctgggcatggtggcatgtgcctgtaatcccagctacttgggtggctgaagcaggagaatcgcttgaacccaggaggcgaaggggttcaatgagcctacattgcaccactgcactccagcctgaacgacggagggagactctgccttaataataataataataatataaggaatggtttattagtagttggagttggaagagacttcctaggagagtgagctccctgccagggtgtagtcttgagagagcagttgaaggccactcatctgtgggcatgagggtgcagtggttctgaatctggcttcagattcacacaggcctggttttcagctctgtctgagccagttactgtttggcctcaggcctcagtttcaccacatttaaaatgggggtgatagcagttcctatctcctagggtgatggtgaggatgaaataagacaccatagtaaaatgcttagcacaggtctggcctggagtaagtgtctgacagatggatgccattattaggcgcctgttgtagagagggccacgcgccaggcagatagttgggctgcacagatacttttggagggaggtttttcaaattgtggatcagggccactaattggaccctaattcagccatgaaatcagtttggtgggtctccatgaatttttttttaatgaaaaagaagagactagaaaatattcaagtgtattgctcagtatcagtaagcattgttgtgtagaacatgtttcgtgtgtgtgtgtgtgtgtgtgtgtgtgtgtgtatgtgtgcctagtgtcaaataaagtatatttttctgtgagccatggtccaaaactttggtgccactgcattagagattctgtccctcctgtgccatgtttatagagcacctactgaatataaggcgcagcagcagtgctatggccagggtgcctgtcctcagcaaacctcatggtctgactggagaatcagggcccagttcttagcaaggtggttaccaagactgtgggtcagcagaggagggagcagagtggtcagagagggattcctgggtgatgaccctgtgtcaggtggggacgatgagagggggtgatgcctggggtgaatggttggcctgggtcctgggggctggggctgggggctggagagctacctggaaaggtgggaggctgccgtcagtggaaggctgcagggtcaggcctggcaggagctgcccatgcttgctggagcagggggttgggtggaggttggggtctcaggattattcaagaacattacatttattgtgtactttatttctatgattattacattgtaatatatgatggaataattatatatgggtgagggctgtgccagtctccctggctggggtggggtggggtagagaaggactcggccttactgatgccccctcccccagcttgcaggatctgtagtcactatgggtgagacccacgtgggcctggcctgcaacctggctctcagcttgagccctatccagaagccagaagacttcccactatttagatccctgccctgggaagtgcttggcctagtcaggacctcagtttctccatctgtaaaggaggcacactgtctcctgagcggccagcctcctgggtggtgatgcccatcttgtgacctattgtggatgaaccggctgcaggaagtatgaagagctctgggtgggttatgattgtcgtctttaaggctgggaggactggggaaggtcatgaggacatcagctgcctgtctggagagcccctggcctccctaccctgtgacctagggcagtgggaggagaagcctgtgacccatggcaggctggggatatccccagctttgagtgcaggcagcccagtaggggcctcagatgatgagacccagatctggcctaaatctgggaacccccaacctctaaagctccactcttcattgagtaccccaggagtcccagcttaaggggctgtggtggcaggtggagaggcagtaacctaggactgattggcaggggccagttttcaggaggctgtgggtggcttccaacccactgagcacagagcccagaggctcaggcatgagctcccacagtagaatgtggtgtttaatgacaggtcacatatattggcactcctgtgtgccagcgctgtgctaagcacttttatatatttgcaaactttatacaacaaccgaatgcaggtctttttattatcccattttacagggataataaaatgggcctcaggaagctgaggcccagagaggttaaatctctcacccaaggttacctagctagtaaatgggagagctggcctgagggcctgagttctggattcgggatactagagttcaaatctgggtagtgccactttctagctgtgggtcctcaaacagtgactgaatctctctgaccattggtttcttcctctgtgccttcctcaaagggttgttgtgagagctatgtgagataaagactgagaagtacatagtacacaataagggccgaataaatgggacctgccacatgacctgcatgccagtaactgccgtgtgaccctgggccgggtgtctggcctcctaggtctcagtctcctcagttgtgtgacacagggcactgaccccttccttgctcctctcaatagggttgttgaagatgttggatgggtcctgaaggagaccttcagtgaaatagaagtggtagaccagcggtccccaacctttttggcaccagggactggtttcgtggaagacagtttttccatggatggatggcaggggagggtttcaggatcattcaagagcattacatttattgtgcactttatttctattattattacattgtaatatatgatgaaataattatacaactcaccataatgtacaattggtgggagccctgagcttgttttcctgccactagacggtcccatctgggggtgatgggagacagtgacaggtcatcaggcattagattctcctaaggagcatgcaacctagatccctcacatgcacaatgcacaatagggtttgcactcctataagaatccagtgccactgctgatctgacaggaggtggagctcaggtggtaatgtgagcaatggggagtggctgcaaatatagatgaagcttcgctcacctgcctgcctgcccaccactcacctcctgctgtgtggtctggttcctaaccggccatggattagtatgggtctgtggcctggggactggggacccctgtgctagactacttgaatctccagagctgtcaggaattctttagggtttgcagccaaccgcaggtcccaacggattgtgtttgggcctgcttcaggctttcatgtttcctgttggcccctgcaggcatttgagttggtggctccaaatctattccagggtttcccaagatgttttctgtggaaaggtttagaggtcaagcaggcacaggagactgtaagtcaaagaaaaaaaaaaaaagaaaaataggggttgggggaatggggagatgatagtcaaagggtacaaaacctcaaacagggggcataagttttttccttgagatgtattgtacggcatggtgaatatagtaaatagtaattattgtatatttcaaaatcatttaagagttaattttaaatgttctaggctgggtgtggtggctcatgcttgtaataccaacactttgggagactgaggcgggagacttcagcctaggagttcaagaccagcctgggcaacatggtgaaacctgttactacaaacaaaaaaatacaaaaattatccgggtgtgatgatgcatgcctgtagtcccagctatgggagaggctgaggtgggacgatcaattgagcctgggaggttgaggctgcagtgcgctgtgatcattccactgcactctagcctgggtgacagagcgagaccctgtctccaaaaacaaacaaacaaacaaaataaaacaacaaaaaaaaacacccccaaaattcaaatgttcttaccacccaaaatgacaagtatttgaggtgatgtatatgttaattaacttgatttaattattccacatggtgctcataaatcatagcatcaccttgtactccataaatatatacaactacacaaaaccccaaatggttttctttgctgtagggcttgtcagagcctgtgatatgctaatttttgttgtacatctccaatatgtggtcatgatatatactctagggtatctcaaaggcctggtgtttaaagccccattttccagatagagaaactaagacctggaatgaaacttaggaagggattttcccaggttatgcagttacctgttacagagctagggccagactccttgctcctgactccatggccagtgctctgcccaggatacctcttcctcttccttcttcctttgtcctcagagaagtgttgtgtgtgctgctgtttcctcctgagagctccttacctttttctggccccctcctgcttgctcccagcattagagggtgtctgtttccttctgggcattgctatgagatggagctatgcctagtttatggctgctgggagatccttctcagactaatagatggcaataaggcttcatcccagctgcagggcccctagcaagttaattccatttcctgagcctcattctcctcagttgtgtaatgaaactcatcatcttgtctgtcttctggagtttttgagaagttcagctctgatatcatacatgaacgtgctctactaattttcaatccatatgcagatatccatgagtctgacagttcttataatttctgggggcagtgaggacatgggaaaaggaggccctggctgtgggagctagcatggttggggccctaaagttctgatcccctcccccggccacagttgatgtctgcttttcagtgtactgctgcctctctctgctctcagttcccctgaacatgtctgaagtgggccggtctagctgactcgagggacccatgtcacaggtgagacatgaaatgaagcacgattttcgagctggggggccctattttcctagtttcctgctgggagttggtgttagagtggggaaacaactcaagtgacttggtgcctcagtacagctctgcctggagcagggagttcccaccagcttctgcccagtcctttgatgcccccacccttcatggagggtggccggtcacctggcttgtgatgtagggtgcacgcgggcatgccgatgcctccatcaacacagcagttaggttcgaaatgctccaggtcctctgctagctgtgggggactctgagtgatgggccagggggtaggccaggctgggttgtgaggtgggaggaggtggtggctccctgtcagagagtgtcctctcctggagggctgtttgcccaagttattcttagcacagactcattatagagtctatttttagccctgtttctaagtgttgccaacatctggtgcagccagcactaaagggggtgggggtggcaggggctactcctttggacatttctggggactggagcctctggcaggagagcaaggacagaatcttctacttcctgcacctgccacagcttgaagcttggcatgcagtaggtgtcctattcatgcttgtgcgttgattgctctcccaggatctcatccttccagctctagctcctgtgagtgggtgggtggtggggatggtgttaccacagctggagaggatgagctgaaggtgctcatcagataggtttcccacatccacccctcaggggtccagttggcctcagacccctgcagagaggcctcagaggagggaggcaagccccaaactatggtgcttgtgacagctaccgctgaaggaggagccagcagacattatagggagggggtgtaccactggggtgagactgcctggggttgaatcctagctcggctctttcctagctgtgtaaacttgggcaactcatcaacctctgtatgcctcagtttcctcctctgtgagatggagatgggagtgtagtgttgtgaggattaagtaagataatactgtatgaactgcctaaatagaaagtgctgtataatagagaggtggtggtattagtagcagtggtagtgctatattactgagaagctccgtatgtgacatcctgttggggtgagttgggtaggagacctctcagcttttctttgagtgagatgaggcttgcagtggggctcagaggaagttgttatagccaggcaccacgacagtggtgatgtctgcaaggctgcagtgggggtcaagagctatgtgctgggttggaatctgggctttgccactcacaggttgggtgaccttggatgagtcacttaatcttcctgaacgcccacttctttatatacaagaaagaaatgataatacctgggtcataggcgtgatgtacgtggagctttttgccctgtactgggagcatgggaggacctgaatccgtgagactttttttttttttttcttaattgagacagattctcgctctgtcgcccaggctggagtgcagtagcgtgatctcggctcactgcaagctccgcctcctgggttcaagcgattctcctgcctcagtctcccgagtagctgggattacaggcatccgccaccacacccggctaatttttgtaattttagtagagatggggtttcaccatgttggtcaagctggtctcgaactcccgacctcaggtgatccacccgcctcagcctcccaaagtgctaggatgacaggtgtcagccactgcgcccggctcatgagacttttttgggagtgggggtgttgctgtgtccctttcccatgtggaggatggggtcctgttgtcttgagagtcttgggaaacagcttggcctggaagttgggagggccagggctgtggtcctagctctccctaagctgtgtggtccgcacatactccctgcttcctccagacttccgcaacatggagaggccagagaaaactgtggttttcagattcttcgtcacagtcccagaaggtgccttgggtactatctgggagcgtgggggaggccctggttggaggccaggtggggtggtcctcccactccccatgctgctctcctgctcctcacactgactcctggtgctccatggagcggcttcatcctcatgttttacatatcaagggtccaggccgactttgtctgaaaatgggagtgctgctgctaacatcaacctgggactttctggtaggtgactcccaggctccttgtcgtctgacattttgtgccctctgacttggcatggactcccggaggagtgccaacctgtatatcagggtctggagtgctgtggtcactggattccctgagggctggagtcccttggggtgtggagggcagaggaggctgcctccagggcctctctggggccgggccgccactcaagggtagagcttccagcgctgccccagtctccccgcaccctcgggatgggggtcccctgaagacaatagtccgtctcagaagcagtgtctcacaggagggaggggtgatatgggcagaaaggccctgccagagtgctggcatgtagtaagtgctcaagaaatatttgaaatgaatgaatggaatgataccatcaaggccgcacctctgatctggtgatgaattttccctcgcctcccttttcttccttctcgcccctgctccctcttccccatcctctgctttgtctgactagccataagctaccccagcctgggttccagattcagccttattcataatctagaacaaagacacttccccaatgtgagttacagtttgttcatctggaaaacaaacacgatgggctcaggttccgaaggccctttggttctcaccgtctcttttctcagggcatgggagtgatttctcagagtaggggtggtagaagcacatgcatacacacacgcacacacacagacacgcacgcacatgcacgcacatgcatgcacatgcacacacacgcacacatgcacacgcatgcacatgcacacacacgcacacatgcacacgcacacacacacacacgtgcacacacacacgcacacacaggactcagtgcagtggtcttggctgggaaaggtccttgccctctgaccaggaaggagccctcggagctgaggtgctcccagactcagcactgtttggggcctacaggatgtggtgtggcccactctagctcaggctggggggttcctgtgggtgtcaggggatgggtggccatccaactgtgtccactgggctgggctgccacagtgactttgtgtatgaccttcagggagtgtgggtggcatgcatcaggacgcctatctgtgtcgttatgactgggcgtgagggagggtgccacatgtctagccagccagggagcagggccagttagctcctgttcctgggtgcctcctggctctggggagaatagaaaatgattcatgcaaaggggccctccctgttttggccacagcctgaggagtaaggtggcctggctgtctgcctttccctgctgcccaccaggtgcctgagttctcccctccttcctcgcctcagaccgcgtttctccctgggggtaggtggctgcccttccctgcagcctgacaccctctcagagacaattagaggagtaggctgcccatgcctacagctataagagtgagtcagcgtagggaccggaggggatcaagtctctctgaatcctgcggccagacggtccctgcaccagaagaagtggcccagtgaggcctgggctgggatgctgtggtcagcactgataccagctgagtggctttccagcttgagaagacctgccagggacaggagaggacaagctccacctgcccaccacccgcctcgccatcctggctgcagccagctggtgactcattctcctggggagtgagccagctcctctcctggggtaccccagcaccctggtgcaggctgggtggccaggagtcctgggtgcctcagaaaacctgtgctgagcccagggccctggtaagctggggagggaggactgaggccctctgtatggggtgggggtcgcagccagacttctcttgctccttctcctggcccccgcagacttcaccctccctctggccaaagaggaggctgcaaccccagattacgtaataggtccaaaatgcctcgcaagcgagcagcccagccagtggctagactcaggagtccccatttcccagtacctgccaccagagcaagttcccattcccttcctaggccgggtgggggagtgggtggtgcttgctcacccctggaaagagctgtgctgcctgggagggggtggggaggctttctccagagacatgaattcttggcctgaccccagatgccagcctgcctgcccagctccactccagagtaacgctgggtgcacacacagccccattgtgtgcctgggccccgtgcctgcccagggcctggcaccggctctatcaacagcagtggctccgtcagctcctcagcagcccctgccagtgcttgagcccttgggcccctggtgaggaggaagagggaggactagtgattaagggtatgagtcctgggtggggtaccaggaccttttggatactatcaactatgagagacaagagcagggagacttagtcctgttctccgaggaggaaactgaggccctgagaggcttcagtaacttgcccaaggcctcatggctagtgagaagcagagccggggttggagcccagagctgtggctgagccccttactggtctcgtcacccaatcccagaccaggactcaggaaaaggcacggtgccctctttccacagccccactttggggagcctctttctcgaaaatatatgtccccagggtagaagaggaccctgagacggtaggatctggagtcctgtaggaccctggaatggtaggatttggagtcctgtgtgcttgtgagaaacatgggggttcattttcaaggatggtgctggtggccagacaggcagagcaggtttccagagctggaggacaggctctgtgcctcagtttccctgctctacctgcactgtacatccactgtgccttctaggaggggatagaaatattgaggtgaggtatggccggggctggggactggacccccactgctgagctctataggctgtgcgaagcccccttcaccaacccagaaccccactcaatgcctcatgatggttctattctaagttgggtctgagccatccacctcctcagctttcccagcctgaagaggcctctgagctgggtgagcctgccaagggggcagcccagctcggtgccatgagggccctgcctctgccgcaggcccatgttcccccacccccctgccaaggtgagggtgcccagacatgacccttttggggcctgccctgtgttttactttccaggctaggcttattcactcagagaggcttgaccccctggggcttgggggagctgaagggctcctcccttctccaacagcccacccttttgttcccctgtctgtcttgggcatgaagcctggctccctccttctacaccacctcagcgctcttagcaaagggacagggaattctgcagtgactgcaggattgtgaaatgccagggctggaccttggggacaggcagggaagagagatgctggaaggggacaccgagactgtgtcctttcataccccacctgggaggccagtctcctccattctgctggcgctcattttcctgcatgtataccattcccacccaccagtcagcacaccttcacctaaggccacagcggtggggacgttgagcccagagggccatgtccgagtgtcctctacctggagcctgtgtgggagaggaggaaaccaagggacagccctcaaggagttcacactgcagctgagaaaaccagagaggtgacttctttgtacctgtttctcatttgtaaaatgagtacagtagtatttcctacttcctagtgttattgggaaggccaaatgaattaatacatgataaagccaagggcctggcactggctctatcacggctttagaagccatccttgatagatggttttacaactcaatacaagttttagtattatccatagtggtagaagaaatacaatatatgctatcaggtgatgatgttttttccaagctggattgtaaaaaccatagggcaagggctgtcttattcatccttgtattcctgtttcagacacagaaccaggcttggaacagagtaagtaattgtgcccaaatggtgattagaggtgggtgaagtcagggtgtgctgtcgggaggaggaggagaccctggagcagggcttccagagaggaggagaagttggataatctgtgggagaggaactgggggagggtctgggggcccagattgggttggcgtgagagagcaaggaggtccccttggctgcacccagtgtttgtttagggagagggatcctgcatgctttggaggcccaactagagcgcttggactttatctggtaggtagtggagagcaattgggggtgatggagcaggaaaaaaatggtctttctatgttgctccatctgtttcattttgtttttgctcccttgttctctgaggaatattttctttcttcatttctccaaagacaataaatcctctctgctcttcagcctcttctttctgatccgtagttacccctgtcccaaatccctgcattctgttcttggcttcttctccttggccatcctggcctgttgtccctgctgtgcttttacctggcttccccttcctttatctggtccctgacccaccttctctggaataggagttgggtggagttggacttgctgagagatgggtactggcatggcatgaccacatggtgggagctggtatgaaggcaactgagccaggaggatatcctctattctgatgtaactctatacatccttcagggaatgactctgccccagttatgtggctaaggcccattagaaggatcttactttatatttgtcaacctgtttaatgaaaatgtagatttccaaaatagataaattagggagtgatggaatcttattttctcgtttataaatttagtggaaagatcagcactttgggaggctgaggcaggagaatcgcttgaggccaggagttcaagactagcctgggcaacataatgagacccccatctctacaaaaaataaacaaattagtgggggcatagtggcacacacttgtggtctcaactacttgggaggctgaggtgggaggatcgtttgagcctggaagggtgaagctgcagtgagatgtggttgcgccactgcactccagcctggatgacagagtgagaccctgtctcaaaaataaaaataaaaaataaatttaatggaaagggatattgaaccagatgggaacgatgcagacaactagtgcctttttcatctccttttaaacatccatccatctatccatgcatacatctatccattatatccaccttttcatccattatatccatccatccatccatccacccaccattatatccaccttttcatctgtccacccgtccatttaggcatgcatccattatatccatccatccatccatccatccatccatccatccatccaccaaccattatatctactttttcatgcatccacccatccatttatgcatgcatccattatgtccatccatccattatatacatgcatccatctaatatttattgagcacctatcctgtgccaggtactgcattagatactttatgtttaatccttacagaaattctccagggtggatattgtcctaattttacacatgaggatactgcgaccctgggaatttaagtaagttgatgaaggtcacacagctagaaagtgacagatctgggattcagcttgactaggttcaaaacacacactcttagtgtttaatcaaatggcctctgttggtgtcaccagtgcctagttctaagtgcggaacataatagctgtgttattgaatgaacaggcatgccaaggttctggaatgctggagctctatagctctatcctaggagcagcctgggggcagaaggcaatgctgggcttctagtcctactggcatttgctaccagcaacctaatgttgccatcactacccccggtatggaggtttcttctccatgcaacttgcaactctggcaagtcctgttttcttctctctaccatcccagctctccttctgagggcagtcttaaccttccgccaagtggggaagttccaagtacacatttggccattgcatccagcttgaccagtctccccagtgactggtcttcccctagctcacacctgcctctctccttccctgtagggtgggctagcttgcattactctgacccttttattggcccctatttctaagctttagagttagctattcagtatcaggtcataactgcctcctcagggcccattgggtgaggcaaggatatgagtgcaaacagtttatttgggaggctcccccagggagcaccagtggtagagtaggattcatgagacaggaaggcaaggaagctgataaaatgtgtgtgaaggagcaaggtgactgtgggcatctgaggctcactgccattggaggcctctgcagaatatgctttagagttccccagtcaagtgataggtgtctttggctaagaggtggtggggaagggagggagctaacttcattggttcaggcaccaattcaggtgctggcacctggaaatcttcaggtgggcacttttgacatcgtgagggcccagagcatgtggctggggccctgatagcttttgccacctcatcaagcccagccctgggggtctgccaagccctcttcccacatctccctttctatgtccaagaggcttccccaggcagacccttccccagtcgccagttccacgctcactgtgtttcacagatacttagggagcatctacaaggtgccatggacaaaaagaggaagctgtcaggatgcctccaggcactcacagcagaggaaggtgacctgtgcggctgaggcgcctgccatgtggcagacactggctcgcccatcccaggccttgtgcaaggccagcaatgcccctgtggcatggcatcctctcctagagggaggtacagacgtgctgagcgccacagagcctagagccgtcttccacttccctcccaactctagcatcctgaggctgtgattgtagtggtttttctgacttccttttcctttctgtcactgcgcctgcctcttcccctagccccatggccgccacgtggctgccttttagtcagccgggaactgagcctcctagtagcctccctctgtgtctctgtcaggaacaggatacaattcagggacattttggtgggggagtaatttcgtgcggtggcatacctgtttgccctggcacaggctctgtcatgtctgcttcttggagaggagccttcttcccctgggctccacctgttcccatccccagccctcccagcttcaggctacaggtctcgcaccctatagggctgagggaatgggaagaattaaaagagggaagtggcgtgtaggtaaggccttctggggtgggggctaggggaagggcaggagatggggatggggcaggggctgggcctggcggtgtgcttcccctggagacgtggtcctgggccacaggcaggcacgccaagtcacagcccctctgacttcttcctccagccaccagccccagcctttccccttgatgtttcatttccaaaccaggtctgctctgggtgcgtgtgctggggtggcaggggtaggagtgtgtctgcctgtgccattccctaccctgtgggcaggcccagccatggcagcccgagtctatcatctccccactccgccacttggataggaaggtggctgcactcactccaggcaggtgtgttgttgggaggagaacagagaggattggttcaggcattggaagatggggtttatgtctcaggtttgagctcaagcatcttgggtccagggagaaggtgtaaggcagctgctgcctgagtctcaactctatgggggaaagcagagcagctctgagccttggggctgggcaggcaggagggcatggagcccagatgagtggaagagaatgatgatgaaagagcagacttcccgatgctcctcccccgaccccatcacatgcagagttcaacacaccccactcctcgctctgtcctggtaaaggcagagtgcttcttatggtgtttaaggacaggaaaagggctggaagtgtgtgtgtgtgaattttgcttcctgttcctttcatacctgggtgtgggcggggggagatgggggcaggttgggggacagctcactcactccatccggtgggtgggtgacttggtgggctgttggaatgttgccataggaggccatttctcctctatggggggagatggtggcttccaggtcaggtctcctcctctggctccctgacagagatggggtgggaatgccagccggagcgcacatggacagggcaggagcaaagctgaattctgggtctagggcagctgacagcatttgggaatcctggggtgggcccctgttagctcttcccagaaccccaactcttgggcaggatgggggtgggggggtgtaagggtggttgggggtgggtgtaggtgtgtgttgtgaggggagaagagcccccgctgagttcctgggccactgcctgtgctgtctagtggcctctgccagcactggctgccccgtcctgcccccaccaggcgtgactcagatcgaaagcagaagctgccagacactgcacagggtgaagtgaggcagaaccaactctgctattttggaacctggttaattcccccttctgccccccacctccctgctctcagggctcccatcccctccagctgtctggcacttcagcttcctcaaggggacagttggggcaggccttggtttcccctggcatggacgtggaaggccatgctgaggcccctgtccttgctaggcccctctccctggccagaggtgctggattctggggacctgcgctctggggttggggaggaagagcgccctctcctggtgggaactcgtgggcagggcggccctggcgagatgacggtcaccaggcctggcacccactctcccccgcccatctttggccgctctcaggccagctgtcagctgcctctcccaggggtgtgagctgacgagagcttcaggtgggagcctctcccggcagtgaatctgagggttgggagggatttccggacccagagggaagatattttggggccgagggcctttccagaacccatgaaatcacacaccctgctgcgaccagactgaccctccctagttgatggttcttttttggacatcctaggcctgcttgggattctggccccatgatttagggtttctttggagcccatctgagcctggggggccctgtggtggtggaagaggtccagcctgcggtggtgaaagaggtcagtggatgtgtgtttctgagctgaaaatgggtgtggagttgagagctgtcacctcttcatggacagggtggatgagggtccctggcccttcagaagctgtgtcgttgggaagagggtggactttacagctgtcccgtgtgagtgtacatgggagtgggcacaggccttgcggtatggctgcctctcagggaaccctgaagtcagagctccactctgctgattaccccccagcaacctggtgaggaggatggtggtatactgggggagaggggagtcagcaggcaggtgaccaattaaaatttgggtccttgccaacctcaggtgggcaggacgtaggtttctcattgttcagatggagctggggtttaggcaggtgggaggcagaggcagagccgtgtggaggagagagtgggctcctagacctgctgtgggagcctccacactcccaggcctcctgcggagcacacaggcccaggcacacactgtcccaaaggttgtctgctctcttctggagctgctctttgggcaggcaggcaagtcctggtgcagtgtgtgtgtactggtgagtgtgtatgtgtggacagtggcttatgtgtgagaggtggtgtttgcatgaatgggtgtgtctcatatggtctgtctgggttgcttttccactggtaaccatctcggctttgaagctgtttccccatagacctggattgttttcccctcctgcacgggccagagccccagcacccagtgagccagagcccacctgcagccttgcattctggcctccaccttggctcttgagcctgagaatcaggctgcttaatttccctgtggggctcagaagggccctgcctgtcctttaaaatagctctgtgcttccaccaggggcctgtgcttccctgctgtgttctcccacccgccaccaattttcatgcttggaaccagggaactaagtccccagaaggcaacaagtaaagtgtctttaatgtgcccacacatctcccagggcagtttgttaaaatgcagattctgactcagtgggtctgggcagggcctgagagcctgtttctaaccagcaaacagggcgtgcaatgccttaagaggccctctcccatctaaggccctcactgtccagccagatggctggtggtcacccaggcagggagctagtactcacagaccacctccaaggtgctaggcacatcacatatttcagttccatttaccccctcactgactctgaggaaggtggcattaccgccatccttttgtacagatggggaaactgaggctctgagcggttaagcacctgcccccagtcacaaagctgacaaatggcaaagccagatttgaattctggtctgtcagggtccagagcatattcgtgatccactaagcccggctgtcttccagagggcggactcaggacagatgacgtggtggaggtggaggcggggtcagaggctctgttggggaactgcaagggtagtcctgggtggttttggatggaaaggatatcttgaggggaaggagggttgaatgggagtagttctagaggaaacaagagctgaggggaggctggtgtcctgcacccacctgcttagccaagagccccttcactgatgggctcaagaccccctacctgcctcctctggcactttccagacagactctccacaggggcacccagcacactgtggggagaccaggtgccccagttctgctacctaccaactgtgtgacctcgggcaagttttcagcctctctgtgactcagttgccccctctgtaaaacaggggatatgtgaacgcctccatcatggtggatggagctgtggtgaggattaaatcagtaacacatatcaatgcagaacagtgcctggtgcagagtacgcactcagtgtgcatagtactaatgcctcttggtttgcacctgagagaaaacaggccaccttctgtgaattcaatgcaatcgtccatgctcatagatgtttttgtcctttcttcctccattcccctctccactgtcttcttttgtttaggaagacctggctacttcagttgtacagtggttgtttccaaagtactcagaagcaggtttgactcttaaaaacaaagccagggaatcgttctttacagcagaccagccacagggaggctggggaggctgaggcagcagatgacggaggaggagcagccccaggagcaggggcaggagccaggcactggcggggttggagtgctctgaggactttgggcctggggcagggagggctgaggcgggggtggcttaggcactgggaccctgagagccattattagaactcaggacagatgcagggggtcctgggcctgcggctgggtttgggaccaggagccagaagctgctctgcatgcccgctgtgtgcccagctgtggtcgttgtgcctgcctcttctcacacttggagtcaacgagccttccctgccctaagcagctggcagctagcagaagatgctggagtgtggattcttttctcctgaggagatggaaaagcaaaggctggatcctaaggctgccatggctctggagagggagctccccaatgctggggcagccagcacatgggacagtgaaaccggtgcctggcccttcccctcccagcctgcaggccgattccaccggaccagccctccacacatccatgctgccagaaccatcagcacaccaggcaggcggcagggagcctatgagaggtcccacacagcctctgcatgttatttgtgagggtcttgagtcccggagagggggacaggacttgcccaaggtcacgcagctgggtggtgcataccgatgcaggtcttccagtcccactctggccttaggtaggcttttgtgctgggcctgtggaggctgagagagtccttgcaaaacagactcatctcagagagtcagagcttgtgggccccaagtccacaatggcatgaactgaccaatcagatagagtcttaggcctcaccttccctggggagggacctcattgaccacataggctgacgtagcatccatgaaaactttagctgatctttcctgcaggggacatgagcaggttcgctggggtgggccagagggtacttggggcaagtggagtttcagtctctaaacccctctatcgccctcaggcccctttcctgtcctaggagccatctatggctgagtcccactcctcccccaacccttaccaccctcacctcactatggtctggtgccagatctctgatccctggaatcacatttctgtctgaccaactcatatagcctccccttccgccccctccgacccaggctctcaggcgggctaaccgtctcagcgagattcagatttgtcaccctctgagcctcctgggcatggatgtcttggctatttagcaaaaagcatctgtgggtggggtctgggagggctgaggagcatgcaggcctctctggggaacctctgtaggattcgctgagggtgacatgggatgaggggggcgcaggactgggagtgcaggggacaacaagccatctacatggggagacctttcctatgggccccaggttacctctcctgggctggagctgctggtggtcacatacctgagagacctgggcttgaacccccacttcactgtgctcttgcagtgtgacttctgacaagctgcttaatctttcttttttttttttttttgagacggagccttgctctgtcgcccaggctggagtgcagtggtgcgatctcagctcattacaacctctgcctcctgagttcaagccattctcctgcctcagcctcccaagtagctgggactacaggcatgtgccaccgcgcctggctaatttttgtatttttagtagagacagggtttcaccatgttggccaggctggtctcgaactcctgacctcaagtgatccacctgcctcagcctcccaaagtgctgggattacaggcatgagccactgcgcctggcctacttaacctttctgagtctcggtttcctatcctgctgtgttgctgtttatcccatcaagtgtttgtgtggatgaatgtgattgaacagaggccccttgcgcagtgcaatgtgggagggactcggagcgtttgccaagtgggtgataactgagtgtgtgggggtcactggaccagcagcccttgagggccgtgcatctctttctggaaagtctgatgggtgggatggtgtggaggttctgaagaagaaaagtgatttctctgaaacttccttgtagctgaggagactggtaggtggcaaggaaacaactagagaacaaagcatggcagacacaggcaggaggctggagtagatggagtgcccaggaggcgggtgcaggggcacaaggggtgggggttcagtcccaccactccccaacccaggagaaaggtggctgcctgctaaggggatccttagactgcaagcggcagctgagggatgcggctacacgtgtgtgcacatggacatgtgtgcatgtgtgcgtgcatgtgtgtgagagagaagagagaaagagaagcagacacggagagacagagcgtccacatgggtggctgggccggtccgtgcatatcacaggggtggaatccttttctagtttctcctttcatgttcctattagctacatgtccctcgtccctgtcctgccatgcccagtggcagtcgtctttgccagggcccagctggtcccagtgggacaggacagggcgactccctggtctgcaatggcctttgaagctgctccccctgttgtcccgggccaacagtctgaccagccaggaggcgccagttcccaccctttcctgtgggatgtgagctgaaacttggggctgatgggcctgagctgtgggaacaggaggccattaagtgggccaggagcttgtgtgaccgcccttcctctctcctctccttcctttccctcctccccacctcctgctggtgctcagagatttaaaaacaagcccctgactgccccctgcccccagccctgcagtctcccgcagcgcattcctgcagggggtctgggagaggcggtgcagaacgcatcctggggtcttgctctgctgccactgaagcgcattgtgcagatctcccttttggagcctctgcttcctcatgtaattcattctttgtttcttgatctttttttttttttttttttgagacggagtctcgctctgtcgcccaggctggagtgcagtggcgagatctcggctcactgcaagctccgcctcccgggttcacgccattctcctgcctcagcctcttgagtagctgggactacaggcgcccgccaccatgcccggctaattttttgtatttttagtagagacggggtttcaccgtgttagccaggatggtctccatctcttgaccttgtgatccgcccgcctcagcctcccaaagtgctgggattacaggcgtgagccaccgcgcccagcctcttttgtttcttgatctttattcatcacaaataggggttggtcagtcctcagtaagtgtccccacttggcagagcggttccatttcatgaaatatactgaagaccacatcctgcatgacagcctttgtgtgctgttggagaccatagcactcagccatggtgatgcaggacagggtcccggagggaacctgccagggtgatggtgacattctccatcttgatctaaacagtgattatacaaggccacacacctgtaaaaattcattgagctgtacactacaaatctatgcattttgctaggataagttacacttcactaaaagggaaaaagaccaaaacatggcattaaaactgttaaaagcatgtgcgtgtcccattgacctcatttctgcttctgatatcaaggacctttcaatcaaacagtgcacacttaccaggtgtcctgggtttgctatgtttctgtatcggaagttgccagctaatataataaaaggctatattatgaagtatctccagtgtgccaggaactgtggtaaacactccgactacttatcccttagaacccaaaggagtggacattgttattgctcacctgcctctctcatctcctgcagtgaatgacatgatatacaagctctggaaaagaaaatcttaaaagacccaaggcttttggagaggaaacagagggctcctggtaataggaaaagctggcctgaggccttcctgcccctatctagtaaggagagactgaagctggggttaccactaggctgctctgccccagtctgggctttcagatggtgtgtatgtgtgtatgtgtgaatgaatgggtgaatggatgggacactttccccaaaggaacttatgcagggatgcccccagtgggcctggacggagcaacactgaacagtgaccagaatggtgacacctcccctctgcccacaaattcacacctgcaagacaacttacacacccagcctcctcacttagagcacaactgctatgaggtagacgtggccccagctggcaagccctgcttgactgatggggagactgaggccatacccagacaattgagtccagcccaaggctaagacttgaacccaagcacttggcctttcccacagcatcatatgggcaggactgctggctcctgggagtcgtaggatacctttccacccctcactctgtttgggtctgggccatctgatgccccctccccaggccctacagtgactcatgaccacctccgtaatgtggaatggctttgtccatgaggattatgtgatgtccttgttctgtttcctagttcatcaggacttcctctgctgcctcctctgccagagggggctgagaaaaatcccaagtttggtatttttttctctcttcccttccctaggctgaaaggttcctaggaggccacaaagcccttcctttgcctccaggaatctcgaacctgttcaggaagcttttgtttagcggtcagtttctttccccaggactgaccgggcagctcccccacgactgagagtgtaacagactgaatcagaagaaaacttcttccgaccacagaggtgcagagcgtcatcaatggcttaaacaggcctcccagcctctgggcttgcacactttgttgtttcagccgccagacatatgtttttctgggaatacaggaaattatctctgctctttgaggaagggtagaatttttttttctgcctgtgtttggggattccagactgttccatcatcccggacaccctctggctcctgggctggatgaacgagatcagccgctgaaactctttgatcgcagggaggcttcttcagtgagaatttctaaaacaaaacgtggccgccctcaccctgaatgcaggactgaggccaaactcccagccccagggttggggcggtgcagccagactgccagggtccagccttgccactcattagctctgtgaccttcagcaagtgaccacctctctgggcctgtgtttcctcattccttgaatggggacaataatggtacccacgtcactcatatcatgaaataattatgataattacataaggtgctttgaacagtacctagcacacagtaagcattctatgagcattagctgttagcataaaatatttttttttcaattagaaagatatacatcttcattctagagaaagaataacattccaaaaggcttttaaaaccacacaaaatacttatggttacatcatccaaagaagtcagtaataattttgtatatttcctcccaagaggtttttctatacatatttttacattgtgatgatcagattttatatacaatttccccctacatcctacattttgtcacctgacatatcctcatgttatttattgtaagtatagcagtccatcaggagggacacaccgtaatttatttaactatcctataactggacattgaggttagttttgacttttttccatataatgtgaagtgcatctttatgcacaacatccttttctgcatctatgattacttccttggactggtgaatatttttcaaggctttgacatatattgccaaattgcttttccaaagaggttgtaccaaggtatgctctggcagttgtgttgaaggtgcctggtaccaaaggcattttaaagtcatagacacacttggggaagggggggggtttggagaaggggtggtgttggtgaaggtagtttccctaactcttcttttaaactatttaacgtctgccctcattctttttttttttttttttttgagatggagtttcactcttgttgcccaggctggagtgcaatggtgtgatctcagttcactgcaacctctgcctcccgggttcaagcaattctcctgcctcagcctcccaagcagctgggcctacaggcatgtgccaccacacctggctaatttttgtatttttagtagagacagggtttcaccgtgttgcccaggctggtcttgaactcctgacctcaagtgatctggctgcctcggcctgccaaagtgctgggattacaggcgtgagccaccatgccaggctggtctgccctcattcttatgtgattttaaaatgagaatacaacacacatacagaaaattataagttgtaagggagcagctgtacaaattattgtaaatatgacactctcatggcaccaacacccatatcaaattacaaaactttcctaatcctcttacccaccaagccatcttgtgtcccctcccagacactcccccaagggtaattaggatcctgagttctaacatagtagattaatgttgcgtttttttgaactcatatacgcagagcatgctgtatacacttttgtgccttggttctttcgttaacattatgtctgcgagagtcatctatgtcatgtgtaacaacagtgcatttgctgtcattgctttgtagcatttgattgtatggatgtaccaccacttcaatttattttatttatttattttttttgagatggagtctcactctgtcacccaggctagagtgcagtggcatgatctcggctcactgcaacctctgcctcccgggttcaagcgattcttctgtctcagcctcccgagtagctgggactacaggtgcacaccaccacgcccggctaatttttgtattttttaatagagatggggtttcaccacgttggccaggctggcttcgaactcctgacctcaagtgatctgcccgcctcagcctcccaaagtgctgggattacaggtgtgaaccaccatgcctggcccaccacttctttatctatctttctttagtggacatttgggtggtttccagttttggttcctatacacgcaaacattctagtatatgtgctttggtgaacacgtggatgcttttctggtgggcatgcataggagggggtccatgggtcatggagtgtgttttcagcttcctgctccaagttttaaaggatcatttagagggcagaaaaatccccaaggcagttcaggcctcacaagccactgaatggactggcgtcagctgacaatagtttgagggcactgcatgaagatggtactcccctcagaagcccttgtctggggctgtggtagaaactgagtggggccctggccctccagctccaaatgcttggtggctgctggccctggctctgtgcctctgctggccactcggtgtcctcacccagggaccgcggctggcctaatgaccactgcaccgagcagggcagggcttgggccagcccaggtggagctggggggattccttccccttggcgacccacctttggacatgactggaagccctggaagcaggttgggcccccccataaacccccagaagctgctgtgcttcctttctcctgttaacagaatcacacaagtcgcacatattcccactgtaagagctgagtgcttctccagtggaacgaagaactataaaaatccctctttatccctccccctccattgccccttcccactcccctccccagcggtaacaactctgaacagtttggggtgctgggagagcccagaatagtagttaaagagtgggggctgtgagccagcctgcctggatcaaatctccattctgctacttaatcagctgtgtaaccttgagtgagttccttcacctctctgtgcctctgtttcctccaggaaaaatggggataatactagtactcagctcattgggttgttgggaagaaaaaacagaattaacattaggaaaagcacattgaccagccctgacccatggcaatcattcacgaagcatttagcggttggtactctgatcttcctgttgtctacacatataccatttcatgattcatgggctggttcatactaaggtgtaaatgactgacaggcaaggcccacacacagactggatgaaaccagctctggcctgaccagaggagaccgggatccctggttatgaagcgactgccacacacttaccttgaatccccccaatggccccaaaaggcaggtgctgtgattagcaggtgctgcgttttagagaggaagacagcctagcacagagaggtgaagtagctttctgaagtcgcctagccagtaggggcagtgagcctgtgggattacagaactcattttggacatgactaagctggaacccagtctgggctttgaggcagagtcagctgagaggctgtgggtggacagcagcaggaggcagctggagggtcctgggggtgttgatgggggcagccatgtgattggggagaggcagggattctctgggggcatcaaacccttcctctcaggaggagggtgttacctgggaggggcaggggagaaggctctccagggaagtgccccatccctggtgtctacatgcagtaggcactccaggcccccagtgttactgaacctgtacacagtggaccctttccaggcatggtgggtctgaagggccagatggtgggaggggccagggacattttggttctcccatgtccatcctcttagttcttcctggctagactgggtgtcaggggaggctgagagtggaccctcaggattttagagtgagtaggcatgcttggaggctaaggatggggggattagcatgtcctggaccacccccatcgctctctgatcccctcaggtccctcccttaccccatacccatcccacctacaccacactcagcaacccaggctggcgaccagggccaggggagagggctggagcttcactggaggacaagctttgtgggtgtgacagctccagcggtggggttggggagcctcactaccctgccagcctctgtcaggggacagtagctgaggctactgacacccactgatgcacagacacctcactgtgtccacttctccaacgtcctctcccaggaggctcacccagattctggcagggggcggtggggcagggattcccaagtccattgtgcagatgagagaactgaggctggcccagccagtgagaggcagggtccagcccaggctctcctcatagcaaagccagctccagtccacgcgaggccaggccagacgctcagctctttgtcagagaaacaaggggatcattctcccctagccctccctgtgccggctggcactgccaggcccggtgcccacacccccaccagggccaactgaagtcagattgtccccaagggtgggggggtgagccagtgccgtgtgggtgggtgtgtagagggtacagctgcgagggggtgggttgggctggggtcagagcctatgaggtctgtagggctagtgtgcgtgtggtgggcagtgggggtacaaagacagggataaccctctgtagcagcataggaagggggtgggcaaaggcatgggtggaggctgcagctgtgttcctgctgcaggatgggaagggagtggtgggcatctgctcctttctttctggggactgccccgttggtagctgggtggagagacccaaggagctgagacagcccctttactgattcatggtgtagaggggcagagaaggaaggagggtggggtgagggccactgcctgccttcctaccttgtcgggaaggcacagtggtggtgggaggagccctggctggcagtcaggtggcatgggctccattcctgggcctggcagccaggcagcctgcaataagcttcctccctgctctgtgtggagaccctctcctccccagcatgggctcagaggccatgctgcctggggctgggttccagctctgtccctttcactgctgaaagacacttaatctcctgtgcttctgtttctccttatctataaaaggagagtaatatgcagaactacttcatagggctcttccaggtgaaggagtctggaacattgcctgacatacagtaaatgctcaaataaattcaagttattattatttctattatctggtgattttcactgaatatttgccagttctttttgctaatgctgactaagtccagtgtctggtattagccagaacatgtcagcctttgctgcttccctttgctatcccctgaggtctgggcctcattgttaggagcttgagacacagctctggcttctggtccacactgatcagttcgcctgccagtcatgtgcccatccatgtctcatgcactcagcctcccaggtgctacatactgtgcaagacctattaatttcatatagtgctccaatcttctgaagcagagaccgtttactaatgagaaattgactctcagagaggttaagtgacttgcccaaggtcacacagcaaagaagtggcagaactaggattcaagcccatattttctcagttcaaaagtccttgctcaaccacaaagtcatactgcctcttgcaatatccccaagatgggaccctccagcccctaccaggaccttcatggggtctggacacactcaggagccctgcacctctcagagtctcagcctgtctcagctggggaggaccttagaaattactgggtccaaccctttcattttgtgcatggagagatggaggctcagagggggaggggacttacccagggtcacttacctagggtcagtcaatgagctagggacagagtgggccaagctgtaggactcattcttccctgtctttccttccagactgggctggggggcttaagtcacacctgtcccactgagacctgtaggagattagggctgatgtgctggtgggaagtcctctctgggctctggcagtgccaggtgcctggaagtggccctccccatacaggccctcctaagcctgtggacttgcccttctctttattacactgtaggctccatgagctcaggaactgcagttgtatccccattgcctggctcacaaataagatacatttcttcacacatgcattcagcatatgccatgtcccaggtcctgagccagagtcccatggtatagcagtgaaaaagacagaaaatgcctgccctcagggaagtttgcattcccagtaagaaagagacagacaatgaatgaaatagctaggcaaaaatgcattgtatttaagatggtgataagtgatatggaggaaaataaaaacaaaagggaaggggcataggaagtggtggtggagggctttgtaattttaatagggtggtcctagaaggtctctgtaaggtaacatttgagccttggaggaggtgaaggagtgagccatgatgtcatctggggggagagcattccaggcagagggaacagcaagtgcaaaggtcctgaggtgggggcatgcctgggatgtttcggggatttcaaagtgcctggaggatgtagccggagcagataaaacaagagggagagctggcggatggggtcaaaggggaacacgaggtgggccagatcctagggggcctttccagtcatggtaaggactttagcttttcccctgaggaaggtgggaaccatggggagttgtgagcagaggggaagacaggatctgacttaggatttaacaggagttaaatgagttgctctactgagttgccagtagaacgtcctagggcaagccagaggaggcagtctgaacactgggctactcctgcgggattccaggtaagacccaggataggctgggcccaccttgtggcagcaaaggagggtggatatgaggtcggatctaacaggatcaggatgtgggcgtgacacagagaggagtggaagttgactcttagagtttgggatttaccaactgcaatgagtgaagaagacagaaccttcagttttggtccaggaaccaggaaacttggattcatgtctcagctgtcacccgcttgctcagtgaccttgggcaaatctcttcccctctcagggctcggtgtcttctcctctaaaatggatgcggtcccagtcattctggcctccccctgccagcccctgtgctttgaggaggacacgtgcctcatatacctgctgccccttctcatccacagggagccagcgccggcagccaccatggcgtcacgcatagggttgcgcatgcagctcatgcgggagcaggcgcagcaggaggagcagcgggagcgcatgcagcaacaggctgtcatgcattacatgcagcagcagcagcagcagcaacagcagcagctcggagggccgcccaccccggccatcaatacccccgtccacttccagtcgccaccacctgtgcctggggaggtgttgaaggtagggcctgttctggcctgccccccaccctgtccccactagtcccagcctcccctagagcccttgccttttccccctcccaggtgcagtcctacctggagaatcccacatcctaccatctgcagcagtcgcagcatcagaaggtgcgggagtacctgtccgagacctatgggaacaagtttgctgcccacatcagcccagcccagggctctccgaaacccccaccagccgcctccccaggggtgcgagctggacacgtgctgtcctcctccgctggcaacagtgctcccaatagccccatggccatgctgcacattggctccaaccctgagagggaggtgagtgaggagctggccagtggccatgctgcttgcagagctcgtgcccactgctgtgcttctgagactcccagtctaatggcagaggcaggggtgccttcagggagactcagtctgaggtggggacagagcccttctcagggagccccaatctcaggggggaagacacagccctgccctcagggagcctcacagaggaaacgccatccttactttcaaaagctctgctaggaagtcaggtgccgtggctcacgcctgtaatcccagcactttggaaggctgaggcagccagatcacttgaggtcaggagtttgagaacagcctggccaacatagtgaaaccctatctctactaaaatacaaaaattagctgggcgtggtggtgcacgcctgtaatcccagctacttgggaggctgaggcaggagaatcacttgaatcgggaaggcggaagttgcagtgagctgagatcgagccactgcacttcagcctgggcgacagagtgagactccttctcgaaaaaaaaaaaagaaaaaagaaaaaagaaagctctgctagggagaaacagaagacttatccaggaaagcccagcacactccccaagccagagacagaagtgagatcaaggaagctccctgggcaggtaggctccttggcaagaaccgtagcttcatgttgggccagtgggacctggacagctcatctcttctctgggcctatttcctctttccccagataagtaggttgggtgaggtgggctccaaggtccctccaggtcagtggttgtcccaatgcctctttcccctgcccacctcgtggtgggccctccccagatggacttttctcttttccagttggatgatgtcattgacaacattatgcgtctggacgatgtccttggctacatcaatcctgaaatgcagatgcccaacacggtactcctggctagggtggggtgggtgtgcaagggttctagggaggggggcacccactgtggctctgagcctggagagagtggagacagggttctcactgggcagagctggcatgtttctgtagagatgagtcattttcattaaataatgtgacaaaggccggggccaagaggaattatgaagcaagaaggatgtgcctcagcctctgtgcaccatggggcttcagaggggagaaggggctggggacacggagtgggcctgtggggggagctttccaggttggcgaaggggcagagggaggcagggagagcactgcatgggtggaggggcagtgtgtctatgggaaggtgtggaactaatgagctcctttggggacctgggcctcccctcctttaccaaacccagggcccaacaggcaaaagcctgtctgtgtctcttactccatggggcaagtgatctggggctggccttgtccccaaccacaggaacactccctctggcagcttcctgcgtctcctggcagaggtggggtagcaggtggggaggtgctgggcttggagtcaagaagcctggcttctggcttttgctgtgaccttaggaaatccctcaagcatactaaaccccagttttctcagctgcaaaatgggggtgatgctctctacccacaggattgtgggaagattagatgagggaagaaattgagggcaagctctctacaaaggtggcaggtgtgtacgctgggcaggtgggattgccagcgccccttccacccacttttctttggagctcctgaacctcagctacttactcctgcctttgggcatgagcctttcaccctgatcctggccccagcccatgccaccaagggaaagtccccagttcctgtggtggggagtcaatcctctgtccccactgccctggtgacatcgctgagtggcttagtaggagctggccgggactggttgggtccaaacctacagctagcaggggcagcgagggctgaggagggagggaggatgcaagtgattggtccctttagtagttcctgtgtacactgtggggtgtctgggcctgtgatttgttctgcatgtttctgtggcagatctttccagagctcagatctctccctgtcagactcctgcttcaacttcccttggctgcccattccaaaattccagtatctttgcaagtcaaacactgtactggggatccagatacatctgccctgcctacagcacctccacccccaccacttctgcccttgagctgctggaattgtgctctgccaagctgccctgtctgcttgtgccctggtggctgcccggagtgccttgcctcacatctctgctcaagactcagagttccacaccctccaggaaaccgtccagaaactctagaattgattagatgacctgctctagggcttccataatgcctggggcctaatcctatcacatattattggttggatcactctctcagacactctaggccaggggctccttgagggcagggactacatcttataatagctctggactctgcagaccttcaggttgaattgctgggtgaaagggcccaaggtgaattttgacactccaggtgtccccaggaaggactgctcctgggatgataggccctagagggggctccccgtggagagggggatactcatgggtctccctcaccccctaccccacagctacccctgtccagcagccacctgaatgtgtacagcagcgacccccaggtcacagcctccctggtgggcgtcaccagcagctcctgccctgcggacctgacccagaagcgagagctcacaggtactgcctccctctacccctgtgcctttgaatacccgactcctccctccttttctccctccctcccagctcctctctccttctcttttggcctccagatgctgagagcagggccctggccaaggagcggcagaagaaagacaatcacaacttaagtgagtcctgccccgcccctctccctgcctccctcttccttgttctcacctgggctggctaaaaagccactccctgacctgcactggtggaaggcttccctgctcaaggccaattcacttgcagatggcttaagccctcccattgctgtcgctcagtggtgcctgggactattagtgctgtctttccactaggcctctttaggagtgggtaggaaggattcctgtaagggatattcatgaaacccccagtttatcaggttgttttctgggttaaggcatggaacctggggcatcagagttctgtgtagcagggaagagtcctaccccaggcagctttgctgtgctacgagcatcaccatggctgattctacctttcagtgctcttaattgtgtctggcctttgccctggaccccctaattcctgtagaaatcccaatctgttggtcacctcttacttcctggaagaactaaatctaagctgcaggctgccctgaagcacccctccctgggctgggtacttctccccatggggtggggggtccccatccctctaattgctccttctggaatctgttacctttagttgaaaggagacgaaggttcaacatcaatgaccgcatcaaggagttgggaatgctgatccccaaggccaatgacctgtgagcaggtttctgagggggagggtgatgggtctgggtgggcagcagctgacaagtattatctgccctcagccccatgctagttactaggatgggaggagaattccttctagaagttcatctatttgagaaaagatctctccctctcccaaatcaggaaagaatcaggaaagctcaagacagatgagtttctgtcctggaagtgaggctgaggtcaagggaggcttcttggaggagcagtcatgctgagaaagttttcttaaggccattgggctggcagacaagaggccgggctcacgcctataatcccagcactgtgggaagctgaggcaggcagatcacttgaggtcatgagttcaagaccagcctggccaacatggcgaaaccccatctctactaaaaatacaaaacttagctgggcacagtggtgtgtgcctacagtgccagctactagggaggctgagacaggagaattgattgaactcaggaggtggaggtagcagtgagccgagatctcgctactgcactgcattccagcctgggcaacagaacgagactccatctcaaaaaaaaaaaaaaaaaaaagaaaggtaggctgggctggagtcttggtagtctgggaaggaggctgctctgaattgcctggtttcatgagattaatgaagtgggcagtggcaacagaagtcaccaggagggcccattctgtgcaaactgagatcagccacctccacctccaggtctggggttgctgggtaagactgggacaggccacataagctctgcaaccagagcagtagcaaggatttggccactcttctgagcatgcacctctaatttgcctggcctgctgctgcagggacgtgcgctggaacaagggcaccatcctcaaggcctctgtggattacatccggaggatgcagaaggacctgcaaaagtccagggagctggagaaccactctcgccgcctggagatgaccaacaagcagctctggctccgtatccaggtctggtcctgaacttggacttctttggtaactctgacccttaacctggctcctggccctaaggggcagtacttgtacttctgaagttggagacacaggaataatgcccattaggaaggaggatgtatcagttaggatgttttgctttggtaacaaacaatcctcagcatctttaagcaacacatatcagctggaggttctgttctgtgagaccctcattctggcacccacgctgctggcacccagctctctgatggcacatctagagctggctcttaaagccattgtcactcttaaggtgccacatgtcacttctgttcaatgggcttggccaatgcaagcacactctacaagtactctaacctcaagaggcaggaaaatgcaaacctatcatgtgcctggaaggtagagagctggaatcatttggtgggtggcactaggaatctccacagggccaacctaaagaaccaggagcttggcagagtcagccctaccagctggaactgagagttctagtcctggctctgagttgagggcctcttgtcctctttagacctgaggctggccctttacacaaagggcaattggactgcaccttgtttctctttcttatggtagatgacacaatttacattaaaatctagcacacacaggcacaaagtgaaaaatcagtttcatgaagtaacgctcccctcgtccttaatagatgcaatgcattctaataatttctattctagtctagtctagacaagtcaatttcaattaaaaaaatagaaagctggtcaagactcactacggtggcttcacaacccactaatgagttacgacttgtagtctgaaaaaacactggtctagactctagagctaccctatgctttcttccagcggaaacactttgggtcttgggtgccgtagggcaggggcaagtgctgtgatagaggcccaggggaggggtcctggtggctggtgcccataggtgtgttccccagccttctgtctgctcccctgcaggagctggagatgcaggctcgagtgcacggcctccctaccacctccccgtccggcatgaacatggctgagctggcccagcaggtggtgaagcaggagctgcctagcgaagagggcccaggggaggccctgatgctgggggctgaggtccctgaccctgagccactgccagctctgcccccgcaagccccgctgcccctgcccacccagccaccatccccattccatcacctggacttcagccacagcctgagctttgggggcagggaggacgagggtcccccgggctaccccgaacccctggcgccggggcatggctccccattccccagcctgtccaagaaggatctggacctcatgctcctggacgactcactgctaccgctggcctctgatccacttctgtccaccatgtcccccgaggcctccaaggccagcagccgccggagcagcttcagcatggaggagggcgatgtgctgtgaccctggctgcccctgtgccagggaacaggggccggcctgggggctgggagggccaggggcacctccctcccacccttcaggctgcactgtgtgtgaagtagccacctgccctgcctccctcctccccgttggcccctgtttggacttagtgcctgtctggcagcctgtggggtcaggagaagcacccccagggcagccctcttgactggcgcagtgggaagaggccttcagcccctctcccggagatggaatcgcggggcagggaggggcagggtgttctagaggtgagaagagggcctggtggagattccctgtcttctgagcccgagcccctcattaccagtgaaggacatgcttgaggggttcgggaagctcctcatctgaggcaactggtcctgggggtgctcaggcctgcctttttgggactcagatggcaggaggtccaccccgcagcctggtcctcggctctcccacaggtgggcaccccccactttggtgctaatagctctccaccaggtggtgtgagcgcgggggctgccagaagcgggaggggtcactgccggaagagcagctgccctccgacccctcactttgtgcctttagtaaacactgtgctttgtacttgctggtcctgtctctttggagtgggtctagggctgacagcgaacgggaggattcaacccagcgggccccctccagagtgcggatgctgcctgaagggagtcggggtggggggtacagggaagagggaacacgcttgtcacacgcctcagccctgcccggggaagacgaggggtttgggtgctgaggggggcacggtccctcctcacggccacgaggtggcgctgcggccacgccggttccacacctccagcggcggccggagcgagactagttgatgtggcgagagggttgctcacaaaccaagtgcgccgcccttagctgcttatttggggcaccctgggcccggggtggggggcatgcttcttctgtcccacccctgttctgggggtgacctccccaggtgggcggccacccggcttgagaagctgtagctgggcgctctggaggcggcgctcgcgctctgtctgccagacgggcttcccggtaactgaggggctgcgtcctgctagggctctggggaaagggacccccgtgagctagacagggaggagatgggagtccaggacggcgcgtggggtgttatgggcccgggtccccccgccccgctctggctctggcagcgaggcctgggcgcggcctttcctccgagctgcagtccttgggcctctgcttggagacgttggtgtttatgacctcgcctaggagggggacatgggctggggacagtcagggttcgactggcggctgctcgagccccggtgcctggcgggaacagggagagggcttttcgggcttcatccagttcccctctgctctccacggccgcttcaggcagagaccaaaatggctccccgtcatcgccctgagaggctgaaggggcctaatttaaaaaaaaaaaaaaatcccgggatgaaaatggctaatagggcaatttcctctgtgccgaacgggagatcaaatcaacgttgagcaattagcgtgcgaggggagagaaggaaaatgggccgggcggctgggcgctgatggtggccgggctggcgcaggctgcaggattaatctcaaggtcagatggagccggggatgaccttgtggagcctgagccagccggggcgctggcgcctcctcctagttccaggttccaccccaccacctgggacttacccatgccctggaaacccctctgagccccgtctgggtcaagccctgaactctgtgagacacctgattaactaggcttggcctgccttggccgggggatgaaggctccgggaagtcccaaggccggtccttcaggcccctgagaagtctctcccgaccccactggctcttccacttcaccctggggattgacctagtggagtggagggctgcccacctgcttcctctcacagcccttcaagatcacggatagcccttcctgccagcagatgtctgctaaaaagaaataaatatttaaaacatttttaaaaaggaaaaaaaaaaaaaaagaaaaagatcactgatatccccgcctccacctgcctgctgctttcctgcccctgggctccttcagcctggccactacctctggcattggagtatggactgcatattcgacaggacagagggtgtgagtggggttctgtccacaagagggtgccctgggccaggactaggcagctgcccgccgcggctggtgggggtgggggagtctcagcttcattgtacattccaagctgtctgcctgggtggctcccatcctgcctgggagtcctgcagtcctaccgatttggctgaggccggcccaggaactacttccggtatttcaataagccaccagaaagtgttcctgtttctgagaccagcctgaaggaccctcactttgtggctggaatggaatctggctggtgattatgaacgactctgattcaataagagggcaatgcatccttcagcaatatttatttggtggacaacacctttccaagtgtcaggtccatggaggaaattcttttttttttttttttttttttttgagatgaagtctcactctgtctcccagactacaatgcagtagcgcaatcttggctcactgcaccctctgcctcccgggttcaagcgattctcctgcctcagcctcctgagtagctgggactacaggcgcacaccaccacacccagctaattttttatttttagtagagatgggatttcaccatgttggccaggctggtctcaaactcctgacctcagctgatctgccagcctcaacctcccaaagtgctgggattataggtgtgagccaccacacccggcctttttttttttttgagatggagttttgctcttgctgcccaggctggagtgcaatggcatgatctcagctcactgcaacctccgcctcccaggttcaagcaattctcctgcctcagcctcctgagtagctgggattacaggtgcctgccaccacgcccagctaattattttgtatttttagtagagatggggtttcatcatgttggccaggctggtcttgaactcttgacctcactcaggtgatctgccctccttggcctcccaaagtgctgcgattacaggtgtaagccaccgtgcccagcctggaaattcttttttaaaaggcagagtagggccaggtgtggtggcttgcacttgtaatgccagctactcaggaggctgaggcaggaggattgcttgaggccaggagtttaaaaccagcctcggcaacatagcaagacccttaactctattttttttttttttaattagccaagcatggtggtgtacacatgtggtcctagctactcaggaggctgaaatgggaggactgcttgagcccagaagtttgaggctgcagtaagctatgatcatgctattgcattccagcttgggcaatacagcaagacactgtttctaaaaaataaaaaggcagagtaaggacattggctggtgtggacacaggagggatgagcctgtccagccccttcattttagggaggcttagagaacaaacagacacgtacagtgggagaggaagcagagaaagaggtcaaagctaagaggacgagaagcagtagctcccttggatccattgtggggccctcggcaggagccaggctgctggggtagcagaggtggtgagggtggaggatgcagacagagccccagcccctgaccctgctgtcttcagctccagttcctgcatctgtctatccccatcagctgctcggcctgcgttagtacctacctcttcagccttaggaagttctgcatgtccaactgcatctgctgggcggccggctccaccatctgtagaacagggcctgggaggctagagttggagtggcagccggggagggggttgcagggccttggaatgtgctgcttggaatgccatgtttccattatccatggttcctttaaagcagagattcttcctttactgtttgacgccattaacttagatgagagtctgatacatgctacacaccttctccccagacaaacacacacatagcctcctaaaaactaacctcaggttcaacactcaagctctcaacccatgccccgtgctccatctcaaagcccatgcccctcccctgtctttcaagctgcctggctcagctgcagccgccagagagccccttcccaggcacctgggtgtacctcctgccccctcacctcctggaactcctacctcttggggcccaggccccatccccctctcagacttctccagcctcatcttttttttctttgctctgttctttccaaggggggcagtggaatttatacaatatttaagcagccagagccgagtctgggaagatattattaatgtaaaagggacgggctgcaaatgcttttggacctggttacaattagagggtgatttttctaaaggtcaatgaattcagataatatccacaggggggagagaaatttaatacctttttagtgaattaattaattataatattatatcggcttggggttcttttccagagtgattaagggagctatctgtcttctgtgaggccggagaccggcgcctgccgccagcgaggaccctggcgcagggctcaggatggggggcccttccctctcctctcacccatgcagtggccaaggagctaggggcttgttaggcatgaaagaagacaggccggacctggtcagggctgagggtggtgcaggtattggcctttccccttggcctgtgtcttccacccccgggtctggccctcctgctgccatgtcaccaagcctcatgccatggtggcctgaagagctgagatgtggggtatggcctctttctttacacttggagaaactaaggctcacgggcttcagggacatgccttagctccactgtgggttaggacagactgaggtggcagagctggctggaaataccgagaagacaagaaggacctccctaatacctcccaaaccaggccttctggaaaatctccaccagccagaggtctgtggagctgcctgggaagcttctccatctctttcagggtgtatagtgtgcccagcctctgcttataaaatgaaaatgccccaggagtattgatacctccagttgctgtgaggcctaagatttctgtccctggagggatctgaaagtggccagggagtggtgcttttcacccatttattcatttattcatactcagtcaaatgttcattcaacaaacatttgtggcacacctgctcttgtgccatcagagagacctaaatatcacctcttgagcccctgcccacttcatcttaagccccagctgctcatctaagcaatggagggtggggtggggagagctccgtggtccctttctgtccagacaacagtcctaactcaacctgaaggcgagaagactggctgggatgcggtgggtttgtggagcaaagtgggtgctcattcactcagcataccctgagcacccactttgagctggccctgtgctgggtgctggggatatgtgggtggataaaggccagctggtcctggtgacagagtgggcacagggaggcagatgtgagcctgcaatcatgattccgtgtgggttcagcaaaaggagtagaagtgacattaagctgggttgtgagggaccagactgacaaggggagagggaaggcgcatggaaggagagggaggggcattctaggcattggacacagagtgtgcaaaggcctgacaaaggggggtacctgcagattagaggagatggtgggacagtagatgaggccgagtgggcggccacctttgtccccacccacgggcccaggcatgttgacaggaagacaaggccataggtcgggtccaggaaggcagggagcagcaaagccaaatagacttgcttttcttcccttgtttttgaggcagggtctcgccctgttgccctggctggagagaagtggagtgatcatacctcattgcaacctcaaattcctgggctcaagggatcctcctgcctcagccttctgagtagctgggactacagacacacaccaccacacctggctagtttttgtattttttgtagagattaggtttcactatgttgcccaggtggtctcgaatttatgggctcaagccatcctcctgcctcaacctcccaaaatgttgggattccaggcgttagctggtgtattgcacgctgggcccagattgcatttaaacgttggctctgccatgacttgccatgtgatggagcctccctgtgcctcagtttccctatctgtaatgggagattgcaatgtctacctcctaaggatgttgtaggaattaaaggaacgactgaagggaagaagtcggccctgcatttagcacatgatgtggctccagatatcttagactgtacatggccctcgagagggtgggtgggtcagggccatgccttctattgtgcccgaaattcctctttcctctcaagggggtgccagcaaaggccctaccctggggacatttttttggggggaatatcaacattttcctcccctcatggctcagccccatctttccccactccctgcctctgtccctcttctcccttcatgcaacatcccctccaccctgactcccccgcagcagcctcctcccccaccctctcctctctctccatgtgcggcgggccggggagggcctttccattgtactatctttgggccctaaattaaaattgatgacatcttgaaatgagcagtgagggtaattttgcttctgagccgggatgctaatgaggccccttaatggtgcaaacgcggagctgacgggtcgtgtgtcacgcgccgcagcgaggggggtaatggccgcggtaagtgccggtaattacaccctgtcttgctgtattttggcaggcctggtgggagagtgggggctcaatcaccactggcgggggcaccccccacccagcacgggactgacagccagagatacccacttccacccagccaggcccctcgacttcagcctcacctagaatgaggggcctgggcacagcccccttgccccatgcacacatggcatgcaaaacacatagtcacacatgccacagtcagaccattgtgcacccccacccccactccacacataactccacagcctgggcactcccccggtatgcacaaagcacacgcatagacacacacacacatgcacactcacccgttatgctcccccatacacttctacactctgcagatacacactgctccatatacacagcctgcacagcacacacacatgcacgtgcacacaaatacattctcaaagagcacacacacgtggagcgcctactgtgctctatgagctctatgtctgccaactctactcccaactcttctgaaataggtgttattctcattttatgacacagaaactgagtcttgggagatttagcaacttgtataagatcacacagctaggcagtgacagagacaggactggaatccagctgtttttactttgcaacctttccagcccccatatttcctcctatgtatgcatgcatatacacctctcactgcacaaacacacgcatgcatgcacatgtgcacagtcatcacccacagatcacgtagatcctctgtgcacccaaagacgcatacaaaggcattgttcaaatacctacgcgttgctgacacacatatgcaaggtgtgcttggtgtgtacacacagatgtgcacttgtgtcacatggtgtttgcacccctcacacatggtgagcaggatatcatggagaaggaagcctagattcctacatggggagctaggcatatagcctctccaggcttcggcatctcaatctctaaagaaggggaaataaacactactccacttccctccccagcacttaactgttgttaaggcagaatgacagccacacaaaggactgtgacgtgccctcctacaaacccccggcagaatcacacactgggtgcacgtatatgcattgtatgagtgtgcatgcactgtccaagtggcgtctaagctctctgtacatacaacattgtatttagacacatctctgcacacacactgtacacatgctgtgaatacacatcacagcacctgtgcagtaccctaagcgtacctgccagtgaaactggaaaccccacaaagcccatgggtacttgtcatgtgtatatactacatcccttcctcctccccccgaaaagtatgtatcaattctatgattatggtagaggttaaaagtatagactttggcgtttgaccgcctgggctctgcatcactttatttgctgtgtgacctcaggcaaattacttaacctctctgtgcctcattgtcttcctctgttaaatggggataataagagtgcatctgcctcaagggatgctgtcagattaaatgagttgacagatgtaaagcacttagtgcctggcacgtagtaagccccagtgagtgttgtgataaggtgtacaactacaacaaaggaacatacctcggggtgtggcaagcaccaaggagcaggcagtggaaggcagaggagggaacactcatatacggctggggcagtcaaggagggcctcctgtaggaagagggattagggctgagccttgaaagactgtagtttcgtttactgagttcctgctctgtgtcaggccctgtgctacgtgctttatatgaattatcccagtgagccttctgcgaaccctgggaggtgaccatggttatgtccatgttagagatgaggaggaaaaggtgcagagagactcggtaactcgtccaaggacaacaagggcctagataagagaaggagaagaggcacaggaattccaggcgggatgtgcagcttgtgttggaaatagagcaacagatgggaaacacacccagagggccttccttgctacactgtcatagtttccagttaatgagaagggggtgagcatctggagtgggggctgacctaattgctgtgtctcttgcagtgacaacagggacttgtggggggtgggagtggctggcactgcccacagcatgctcagggcaggggccagagctgggcatctgattcacctcccttgccccctcccccaccaagagccagggcctgacccagttcgggaagaggtgggtgctcccgcttaggccctggagaccaggcctggatccctggaaagggacctggacaggtgagaagcatggaggagttggtgaggggtcagtgagcaaatctctgcccactccaccctgaagccagcaccgctgcaccccagggctggttcctggagatgcctacatgaggaataagctgtgggccaggacactgaggctcccctcaaaccggccttaatatccctgttgcctcatgtccattaaactgtgcagggcctgacaagctcattcaccaccccttgaagagatcatagattttttcccctcagtgtttttcatgggctgttcctatttgtagtgcagttcttgacattcagcaaacagctccccacaaatagcctcctgtcccccaaccccacaaataacctctagccctcctcacccacacacccacccttttatcttgctggcatagagaaggtggggggctaggtggggaaggaggggaagggccatggcttccgaggcccgggacatgggttggcatcccacctcctccccttcctagtgtcggggcttggggaagtcctccacccttatctctgtgcctttgttttttcctctttggtcaggtggggacaacaaggcagcctcccaggctggggtgtctctggggttggtgtgaatcacatccagcaaagcacttggcccatgctggggtgggggtgttacccaaggagggatcacagcatttattgtccagatcaggagactctgaaagtggaaggggacattattaaagatcacaccagggcaacacatgacaactgggactgtcttgggagcagcaagatgagtgatcactggtctatgaggtgtctgtagcctttctgtccatcccgcctggtgggatgggctggggcgtctgtgtacacacatggaatggctagggctgggccaccttggggaagcagaacagcctgggtgcggaggtgtatagagaggtgggagcagtctcaggagccggaggtgacatcctagacacaaggaaggtggagctgttgggagtggcccccaaggctagacagaggagaggaaatctgagggtgggagagtagggtggggggactcaaatctgcagacaggcttggaggtatgaacaacctccattccagatcacagtgacagccgccctcgtggagcacctgcttggcaaagaaggcactgctctgagtacttttcatgcatttgctcatccaatccccacaacaagcctatggagagggtactatccttgtctccattgtacagaggaggaaactgaggcacagaggggttgagtaactcgcccaacgccacactgctaggaaggaaagagctgaaatttgagcccaggcagcctgctcctgttccctgggggccctcccttctcctggctctgcagagaagttaagctgtgttgctggggggcagatggctccatggaaggggcaagtccccttcccagcccaggtcccagtttccaacactgtgggacccgggaaattctgcaggaggctgccgggccaggggagagcagcttggctttggagaaggcctgcttggacctggctccacccctcactcgcagtgtgaacctcctgggtatatttctcaattttgtggagccggtctcctcaacgtggaagacgcctgttccgttgggcatcgggaggttcaatattctcagctgtgggaggcgactggtgtgaggcgggcctttcgagaaggctggttccctctcactctctgagctgggcctgtcctgggctcccctcaccccagggaggaagaaactcagcgctctggaacacctgctttactcctcatctgggccaggggtttgaaggaggagggctgcaaaggccaggatccaaggcgctcagtgatcatttgtgtcacgattatggaagggcagctagcttcaggccagggcggtgagtgctattccagctgaggctctggagcaggctgggctcaggcactgggctgggtggtggggttgccaactctgcgcccctcaggtaccttagctggtaggtcctaggaaaggggtgggggacagagggggctgcctcctaatgaacaattagtgtctgctgcgtggctaatcatgtggttccgtgtaattaagaagttaattagtgctgtgtcaattaaggtttaattagtcccctcttcagagaagcctgaaatgccctcctgctggaagcttctggaatggaaggtgggggagcgggaggcagatggaagaggggacagtgggtggggagggggccccacttccttttgtgcccctcccagttctgggatcagtgacttgctgcccccagccccacccgactggccctggtcatgacgactttggggccctacaaggctctcttctaccaccagggcttgcccactccagagggatgctaccctgtggcgctcttgtggaaggccctcttaagccactgcacccggttctctacatctgcttttgggtaactttctttttcttttcttttttttttttttttttttttgagacagagttttgctcttgttgtccaggctggagtgcaatggcgtgatcttggctcactgcaacctccgcctcccaggttcaagcgattctctgcctcagccttcccgagtagctgggattataggcatgtgccaccacgcctggctaattttgtatttttagtagagacggggtttctccatgttggtcaggctggtctcgaactcctgacctcaagtgatccacccacctcggcctcccaaagtgctgggattacaggcgtgagccaccatgcctggccgtccctagtctttttaccactcccttcttccatgatggacatcattgaacgtaagactttcaagcacatcttggataatttctttaggacatgactaagagaaaagatgaggcttttggtttgatcttctactaacccccactctgcccttgccatctaatcagagttgcttggggccatcgctgccctgacggcctcttttctctagtgtctgttcaacccgctgcagccgcctcatgcctgcttcctctgcctttcatctttttactcttgatggtattatgagcacaaattggctccaccttccaggaagttctgacctggacagttccctggtgcttccgcgaggaaacccacaatccttggtggtccctgtgtcgcatccccagcctggctgttggctacttctctgagttcccccaatcattcagctggacaaggctcctctcctgtccagagtgcctatctctgaccttctgcaactgcttctgttggattttcctctgaactccaaatttcccaaaccaaacaccagctgctccatgaaacttttcttgattccctcctctcagagggatgtttccaacttcagaacaaaggatgaagaaggctggtagagattatgcctcctgcttgacctcctgccaggtgttggcgggatggcattgctgggccatggcagcgtgtggtcagtgagggttgtgcagtaagccccctactctctgaatggaaggaggcactcagcaccgtcactctgacccagagccgtccttgcacttcaacaatcatttctaagcattttcttaatgccaggccctgacctagatcaggaaacagacagatgaataagactaacccttgcctacagtttagtaaacagccccttaggaagcaacgtggggagtgcctggggctcctgggaatgcaaaggagaggcccccagcaccatctccaaggtgggcactgctggtgtgactggcacgagccttcgtctccctcctcccatcccccaaccccaaaggggtagcaggaagacccactgggggagggaagcagagagatttggctcgaggagggaggaaatgaaatggagaacagagataattgttcccatttggcaactttttctaattagggaccaattatgtccttgggtacctaattggggacctggtagattctctaatttgctaggtaattactggccagtagttctaccagcatgaaatttgggggaaaaatacatgatcacaacaattgaattttctctgtttcagacgctttgcccagaagacaagctgggtgctctgagctctcttttgcctctgttaacaccgcctcccgccacctgtctctcctcaggcttccactgggctgtgtgcccttcctggtcgctcagctccaggagctggcaatctagctggaaaccatcagccaacaccacagggatatggggacatctgtgtttttgtctccctcgaattcatccagcttttggtaacatggaattactaggtgtgagaaactgttctaggtaacacacatacacaggcacagacagctttattaaattccacaacccactgacattggcatcattgttaatcccattttacagatgagaaaactgaggtactaagaggtcaagttaaatataggaatttaccctaaagaaatgatccaagatgtgcttgaaggttttatgttcaaggatgtccatcatggtgtcatttacaacgtccaacacaatcggagctggggcagatagtccgaccttgagtgctcacacgctattccatattgtacctttccattaaattgctctgcctcagttctcctctgtgaaatcattcctaaccacaatgcaataccaccttactcctgcaagaatggccattatcgaaaaattaaaaaataatcaaagttggcgtggatgtggtgaaaagggaacattttacactgtgggcgagaatgtaaactagtacaaccactatggaaaacggtgtggagattccttaaagaactgaaagaactggctgggtgcagtgcctcatgcttgtaatcccagcattttgggagcctgaggtgggtggatcacgaggtcagaagatagagaccatcctggctaacatggtgaaaccctgtctctgctaaaaatacaaaaaattagctgggtgtggtggcacgtgcctgtaatcccaggtgctcgggaggctgaggcaggagaattgcttgaacccaggaggctgaggttgcagtgagcagagacagcgccattgcactccagactgggtgacagagcgagactccatctcaaaaacaaaacaaaacaaaacaaaacaaaacaaaacaaacaaacaaaagaactaaaagaactaccatttgatccaggagtcccactcctgggtatctacccagaggaaaagaagtcattatacgaaaaatatacttggacacacatgtttatagaagcacaattcacaattgcaaaaatgtggaacctgcccaaatgcccatcagtaaacgagtggataaagaaactgtggcatatatatgatggcatactattcacccataaaaaggaatgaattaatggcatttgcagcaacctggagggattggagattattattctaagtgaagtaactcaggaatggaaagccaaacattttatgttctcacttataagtgggagctaagctatgaggatgcaaaggcataagaatgatacaatggactttggggactcttgggaaagggtgggaagggggtgagggatagaagactaaaaattggttcagtgtatactgcctgggtgatgggtgcaccagaatctcacaaatcaccgctaaagaatttactcatgtaaccaaataccacctgttctccaaaaacctatggaaataaattaaaaaaaaagaactaaaaacatgctatgtacagaaagaaagaaagaaaaaagtctacttcataaaaaataaaatggctttattgagatataaagccatttattgcacatatttaagtgtacaatttgataagatttgatgtatgtatccacccatgaagctatcaccacagtcaagatagtgaacacatccattacccccaaagggttccttatgatcctttgtgatccctcccttttgtttctccctatcccacctccaaccccaggcaactactgatgtgctttctgtgcgatagattagtttgtactgtttagaatttcacaaaactggaatcatagagaacgcacctatttttctctggcttcctttagtaggcataattagttttgtctgtgaatctaatgagatgcataactgagacacattcatgttgttgcatgtatcagtatttctttcccttttaatggctgagtaatattccattgtatggatataccagaatttgtttattcattcaaatttaaagacattgggttgtttagaagtttgactattgtgaataacactgctatgaacatttgtctacaaatatttgtagggacaagtgctttcatttctcttcagtaaatacctaggagtagaatgcctgggtcatgaggtgggtgtatgttcaactttttaagaaattgttggtcgggcacggtggctcacgcctataatcccagcactttgggaggccaaggcaggtggatcatgaggtcaagagatcgagaccatcctggccaacatggggaaaacccgttccctaaaaatacaaaaaaaaaattagctgggcatggtggcacgagcctgtagtcccagctacttgggaggctgaggcaggagaatcacttgaacctgggaggcggaggttgcagtgagccgagattgcgccattgcactccagcctggcgacggggtgagactccgtctcaaaaaaaaaaaaaaaagaaattgccaaaatgttttcaaagtgatcatatcattttacattcccactaacaatatatgagaattccaattcttccacagcctcaataatatttggtgtggtcagtttttaattttggccattctaatagatatatagtgatatctcatggtgggtttaattttaatttccctaataactaatgatgtcgaacatcttttcatatgtttatttgccatctgtattttttcttcggggaagtgtccaaatcttttgccagttttgttgggttgcttgttttctttattgagttttgagagttcctaatgcattctagaaacaaatcttttatcagatatcaaatcctttaccactttcctggtaaggagttcagagagctcctccatttttctcgcagagaaactaatgctaagggaaggaagtacatcagtcaatacgtttccagctaaaaataatagaaaacccaactaaagtgcttaagaatgattctataacaggatgttcagagatagtgtggttccagggttggttaattcagtggtgaagatgtcataaggagtagatagttttcttctttccactctggagtccttgagagtttgtcttgacctcttagactggctaccttcaataggcccaaggtggctcttttttaaaaaaattcattcaaataatatttttttgagcagttaaggagatacaaaggtgatttaaaacatggccagaggtgaggcaaatgcacaagtaatagaaagcaaagggcaagtttcactgaatcacagcagtcagagaaagtgcttttgggaaccaaattgtttccagcctgaagagccatggtggcaaatccaaaaaggggattgagattaaaatagaagacttcagtctggattgttggtgacactcagtatggactatatttgtctctccttttcctgtctccccatctttgggcttaatttaccagtagtgcccaggactgttccatgtgctttttctatacttgcttgcatttttgttttaatgtcttctacagaacgaggtcctttgggtgttttaggagtcttttcctgttttttaaaggattcttgtccttttgatcttggtgttgatgatggttttgagacttttccattctgatctgacttttgtgcatttctggctggagtgtcttgtatagatttcttcactggcgcttcttcagtttcctcatcatcaaaatcatcttcttcatcatcatcatcatcatcttcatcagcagcaagttttacttcttttctgtggaatcttgctaccacttccaggggcagactgctttccagatgtacttaagagtttcacatcctcctcctcttcaccttctgactctgcatcttcctccacagctactaagtgctgtccactagcatgcactggccctgaaccacacttcaaccataaggccactagtggtgttatttcaaagcccccaagggaaaccattggttgtgcagacattttcaaagttgccagtgtgactttaattggactgcctttgtaattcatggcctctgcttcaacaatgtgcaattcatcctttgctccagccccttaactgactgttcttaaagataactggtctcatcttcatcattatccgccttaaaatgatcatctttgttggcctttagttcacaactgaaaagatagttctgggacctcagtgggctcatgtccatgtccatcaaatcttccatcaggtggtgccacgcacttaggtgggagagaaggcagatggagataaacgaccactgctggagagaacagctgcacaggacagagtcacaccagggtggctctatttttataatcagaaagttataaaataattttcaaatatgttataccagactgtgacttgttttttcattctcttaacagtgtcttttggagaatagaagttcttaattttgataaagttgaatccatcaattttttaaaaagatctgtgcttttgttgttccatctaagaaatacgtagcaaacccaaagtcacaaatatttttcttctttgtttcttctggaagttttatagttttagattttgcacttaggcctatgatccattttaagttaatttttgcgtatggtgcaaagtatggttctctctctctttttttttttttttttttttttgcagatggatagccaattgtgctaggaccatttgttgaaaatatgatcttgctccattaaatcatcttgtcacctttgttaaaaataaattgatcaaggccgggtgcggtggctcatgcctgtaatcccagcactttgggaggctgaggctggtggatcatttggggtcaggagttcgagaccagcctggccaacatagtgaaaccctatctctactaaaaatacaaaaacttggccaggcgtggtgggtcatgcctgtaatcccagcaatttgagaggccgaggcaggtggatcacctgaggtcaggagttcaagaccagcttggccaacctggtgaaaccctgtctctgctaaaaatacaaaaattagctgggcatggtggcaggcgcctgtaatcccagctactcaggaggttgaggcaggaggatgaacccaggaggatgaacccaggaggcggaggttgcagtgagccgagatggcaccattgccctccagcctgggtgacagagcgagaccctgtctcaaaaaaaaaaaaaaaaaaaaaaaaaaatatatatatatatatatatatatatatatatacaaaaaattagccaggcatggtggtggtgtacacctgtagtcccagctacttgggaggctgaggcaggagaatcacttgaacctgggaggcagaagttgtagtgtgccaagatggcaccactgcactccagtatgggcaacagagtgagactctgtctcaaaataataataaaagaaaataaattgatcatatatgtatgggtccattgctggactttctattctgcaaatctatttgtctgtcttgattactgtagctttataaatcaggtagtataagtcttccaaacttcttctttttcagagtcttttggctcttctaggtcctttttctcgccacataaattttagaatcagcttattgacttccacgtaaaatcctgctggattctgactgggattgcactgatatagatcaattctggagagaattgacattttcacaatattgatttttttattaataaaccacagtatatctttccatttcttacttaattccgctcagcaatatattttacttttccagtgtacccagtcttacacatcttttttcagatttattcctatttaatagtgtttgatgctattataaatgtttttacaagtaattttggattgactagcagtttatacattttatcgatttttctcagagaataagcttttagtttcattcatttgatttattgttagtctgttttctatttcattgatttctgctctgttcttcaatgtttgttttctacttatttgggggattatttgcttttctttttctagttttgtcaggtagaagttttgatcattgatttgaaacctttcttttttctaataaaaagattctgtggtataaatttccctctaactactgttttagctgcaaactacaattatttattttatttatttatttatttatgtatttatttgagatgaagtctcactctgttgcccaggctggagtgcaatggcacgatctcatctcactgcaacctccacctcccaggttcaagcgattctcctgcctcagcctcctaagtagctgggattacaggtgcatgctaccacacctggctaatttttgtacttttagtagagatgtggtttcaccatgttggccaggctggtctcagactcctgccctcaagtgatctgcctaccttggcttcccaaagtgctgggattataggcatgagccaccgtgcctggctacaacctacaaattttgatatgctgtgttttgcttttattttcattctgcccaaaatatttcttggcgtgtggtggtggtgggggtagaaagccatgaaaaggcctccctcctgcaaccctgcgcctgcaccccggactgccccctcctctgcagggcccccactttctccttcctttccctgcagctggatgctggggctttggcagcaaccctgccggcccaggctggatctggagactacagaactacagggtgatcctggctgggaatgtgtatggtgagggcctttcagaagatggggctcaagtgggactttcaggaatgtgcagacactgtagtcactcaggggctccaagcttccagaactgggatgtcagcaggcttcgtgaaaatgattctagtggtcttcttgctttgcaaggcagaggatctgatggggccccatcttagtccacttgggctgctgtaacaaatgagtggcttataaacaacaaaaatttattcctcacatttctggaggctggaagtctgaggtcaagtgtcagcatagccaggttttggtggcgactcttttcccagttgcagatggctgtctctcactgtatcctcatgtggtggaaagcagagagcttgctctcttcctcttcttataaggatgctcatcccatcatagcgatccaccctcatgacctaattacctcctgaaggcgccacctcctaataccatcctatgatggcttggtgtgtcaacatacgaattttgagggacacaaacatgtgcaccgcaggccagttggccattgtgtctgtcatttgcctatgtatcctcagacacattccttgccctttgtctgatctgctctgccctgccctgccctacagggatgatggcccttgcagcctctgtttctcgggctcttatttcagctggcttccatctgagttcagccagtggggccactggagggagttcacaagctagaaggaagggagaagccagggaatttgtctccctttctctgccttgggtgggctctccagaagcagctgtctcctctgtggctccagcttccccaggccgccttccacaatcacagattctgctaggcagccccctcaccactgtggttttagctctttccacatggttctggcttctgggctctggtaacacctaacactacctcctcctattttctccctatcccttattggtattgctaatctctggggtgcctcatcataccattggcatcttggttcttccatcattcatgtaacctattccctgtatcaacagcctcccccaccacacacacacacacacacacacacacacacacacacacacacacacaatttggaatacgctgaattgtcctaactggctccaactgatagattcatcatccaaaatggaataccccctttggctagagttttaggaaaagatccccaagaggtggcaggcctcctttatggctcagccacacatctgcagtccaagttcaaggtattatcaagttcagggatgccacattgtcccacttcaaggggcaccattcatatagaattgaagcccttctctgggtagcaggattgctttcacttaatatactggcaagatgcaaggcagattttagtaggaagaatcacttggggccgggcacggtggctcatgcctgtaatcccagcactttgggaggccaaggtgggcagatcacctgaggtcaggagttcgagactagcctggccaacatggtgaaaccctgtctatactaaaaatacaaaaattagccaggtgtggtggcaggtgcctgtaatcccagctactcaggaggctgaggctggagaatcacttgaacccaggaggtggaggttgcagtgagccaagatggcgctgctacactccagcctgggggacaagagtgaaactccgtctcaaaaaagaaaacaacaaaatcacttggggcctctgtctttcggggaatgagatgtgtcttgagcatctgtttttgttttgtcctcccaatgcttccacagtataccccacactttgggagctgctcctctcctcctccatgtggttctgatgaatccatcaattaccaaagctccttctccagcagaggtaaacagatgacccaggcttgaccaatcgatgtatccaatgaaacactgatttacccagaggatgggcatgtgatcccagagagccatccagcatcctgtcctgggattgagaaactatgcaaagggtcctttctctcaccagggttgccaagatctctggtttctgttcaccttgttttcttcccacccaccaatgtggaggagatctatcttcaataggagacattgaggccatcacacagggaatctcagagttgagacagaaggaagaagacagagagaatcccagaggcactgggtccccagctcccatcctgattcctgaagctctttctttaattttacaaataccagagtgttccttccagccatgagcgccaataaattccttttgtgcttaagttggtttgcacaggatttctgtcactaacatggtagacacagggctctctgaattccttaccaggaaagtgagactttaggacaacccctccattcgtctcacagagaaactaatgccaagagaagggagtgcatcagtcagtaggtttctagctacaaatagtagaaaacccaattaaagtggcttaagaatgattctatcacaggaagttcacaggtagtgtggctccagggttggctaattcaggggtgaaggtgtcataaggagtagatagttttcttctttccactctggagttcttgggagcttatcttgacatcctagactggctcccttcaataggtccaaggtggcttgttctgtctgggttatggacaacaaccacttagggcagaaatgggaatgtccctgtctgatgtcctagaagcctctggagagttttatgtttcattggccaagatggtgtcacatgctcattcctaaaccaggcactgacggggggatgagaccaccatggttggcttagagcaatcatggttcatcccctggagttggggtctgctctctttgaatctcatggctgcttggagaagagtaaactaaatcaggagtctgttaaaaaaaaaaaaaaaaaggaagaaggcgaggcacagtggttcatacctgtaatcccagcattacgggaagctgaggtaggaggatcccttgggcccaggagttcaagaccagcctggacaacataatgagactccatctctacaaaatataaaaaagtagctgggtgtgatggtgcatgccttagtctcagctacttgggaggctgacgtgggaggatcacttgagcctgggaggttgaggctgcagcatcactgcactccagcctgaggaacagagagagattttgtctcaaaaaaaaaataaaataaaataaaaaaagaagaggcaaatggctgttgggtagggtagttgagacagctagctgtcccctcatatctagtcaccctttcttccacagtaatagaaatttcagctgggcatttggccacccagaataaagatgacattttctagcctcctcttatggtttggctatgtccccacccaaaatctcatcttgaattgtaatccccataatccccataatcgccacgtgtcaagggtgggaccaggtggagtcaattggatcatgggggcagtttctcccacgctgttcttgtgatagtgagtgagtctcccaagatctgatgatgaacatgtaagcatctggcatttcccctgcttgcactcactctgtcctgccgcctgtgaagaaggtgcctgcttctcctttgccttctgccatgattgtaagtttcctgaggcctccccagcagtgcggaactgtgagtcaattaccctttaaaaatcttttatttataaattacccagtcttgggtgtttcttcatagcagtgtgagaatggaccaatacacctcctttgcagctgaacgtggccatgtgactaagttctggctaatgggaagcttgcagaactttcacacagtggcttccaggaatcttcttgaagagggctctgacatgaaccttctaaacaggacaggggctgaaacgcatcttctctatgtggtttgttcccaccttcacctcacactgaagctcatcccctgtggctggcccgggtagtagagtccaaggtagaggaggtggggaggggctctgtggcagaccctggggctgagtccccaaaggtagccccctttctccctgcccagcagtgagttgggtttgtctggccatcaatcatcactccccttggtgggtgagggcaggttctgccaatgcctgcctgttcgctggtccttctcagggagggacaccctggcccccttctgcctctgggggcttttcttccacagcccagcaggctaggagcgctggagaacactccctgctgggaacggtccccaaccggcaaccatgggtttgctgtgtaaatatcgcagttccctcagaagcacgtgtccagttgcccacagtggtaaccagcttgataacactcctcactcccctactggtgtttcctggaaccccctcgtaagcaaattatttgcacttcaattcttgtctagagtcagcttctggaggagtccaacctaagaaggaatatgatccagtgtgggcaaagatgtaagtagaagcctgttggggcttctggaaatcgttccctccctgctctggtaaaaggtgagggaggagaagtcccccttttccatctgccttttttttttttttttttttttttttttgagacagagtctcgcttgttgcccaggctggagtacagtggtgtgatctcggctcactgcaacctccgccgggttcaagggagtcttgtacctcagcatcccaagtagctgggattacaggcatgcaccaccatgcccagctaattttttgtatttttagtagagacggggtttcgccatgttgcctaggctggtcttgaactcctgagctcaggcaatccacctgcctcagcctcccaaagtgctaggattacaggcatgagccactgcacccagcccacctgccctttttgttctcgagggatgccatgtgtaaagacacaacgcttggggctgtagtagccattttgtgactaggaggggagccatggacaacattctgggcatgatggagcaggaggttggaagccaggatccttgatggtgtcttggagtttcctgatcagctcagggctcacccacttccgcatttctagttaaggagacaataaatgtccttacagttgaggccatatttatttgggttctttgctgcttgctgccgaacacatcaatattgatacaagctttgtcccagaggtgttacctttgaaatcaggtcctcccactactaccttgagcccttggggtagagcgggaggcagaggggggcacaggcttgaactccacaggtggctgagggccaggggtcctggacgggagaggaacatgggggaagctagtgtctggggtcccaagaataggggatggggagggcaagaaagtcagtcctccattaatccgggccaagaggaccattgttattgttattagcacgaagcatctcgaggctcacactcgtcctggcctggctgggcccccctaatggtcccataaatcccagccataaagagtaatggggggagacaaatgagataattaggaataaatctcagcgcagtctctattcatcagcgtccctagaactggccaatcttccgagccattagccaggtcctaattaatgctgagctgcccagctctgcggaggctccatgcctgggagggatccgggctaaggggcaccactgcccccacagcccacagcgggcgaccttgggaggggccgggggctgtgtgccttcagcctgctgcttcacctttccgtctccaagggccttagtttgtccgcaccctcctgtctgcctccttgtctctgtctccttttgttcatcttactccatctccccgactaccttcaatcccgtgtttctctcttatcagatggccgcagtctatgttgttagctatggaagatctgagttagaaggaattgtgggaccacctgtaaaaactctccaccatctgtcctttctgccgccctgtcagtacctgggcagggacctaatctacactggctcccccagaacagtccttggaacagggatgaccccagccctgccccctgctgtggctgtccatctttcctggggcagttcttgctagcagagtattctctcattcctggagctgggaatgctctttctgttatgtctgcttctcggtcttacccctacctgctggaggctgaacataagccgcactctactcaagctccaggtacttgaaggccattcttgccttctcttctccagccaaatgtgctgagctgcactcgacaacttgaggtttccagctgggtctcctctactcagggacttctctgtaccacccgtggtagtctgaccccacggtaacttctgttgttttaatctgttagctttcccctcgtttttcttataacacccctacctctttgggaggtttcccttccttgattctatcagggtctggaggggtggccaagtagcccactctcccaggccacagaggcagcacacgatgaggcctggccagccacagccctccgtcccctggcaccgtgattggctcagggatgagcctgctgatgtgcggggccaatcagagtgcctccctggcctttgctatgtggccccaaggcagtagaactgagacggtgccaggtggaccgtgtgtctaccccttcccactccacatgtatctgtctgcagtaggaggaaatgtgccccgcacccagaaagaagcagacccggagatggcagggattgtgaactggacggtggctacggcctgggggaaagcggtgaaaccaggtgagaggcgaggaagggctgggagatggcttttctccagaggaggctgaggtgatgaaagggctgtgactgcggctgccatcccataccgtgtgtcctcaccagcctaggaaagtcagagcacagaggagcatctgcacagagatgacaagggaccggctctgtgagctctgtccccatgactcgctactcccccactgtggcctgagcctcctgtccctgcttctccctcacctctctttgcccagggccagccccaaggacgactaagctgttttccagctcggtcaacaagtggagtcccgctgccccctgctcagccctgggattgtgtgcagcagttggcctgaaaaccccagagaccagccccagcccccacaaccggaccatcaccctggggagcaggtgaagctgttgagggtgatggcacggggcagggatggacctgctcagcccagtgtcagaactgcttagcggtgttctgtcctggcagctctggagccatggaggccatggggcctgaagctcagtttgccccgctctgagtatgagaacaggctatgccagttaaagttccaaatacagggagaagctgatggagactatggaggcagaggggtccggctgattgccctcccctcacaaaccaccccctggttcagctacttgctctgccgtggggccacccctcttaggtttggcgcacaagatcactgagtggtcatggacagtactagccacagatggctaaacttggcctcaccaccttctctcccacaagcagggggtgcttgccttggtttagacaacccagggggcggggtggcctcttaagatgtctcccaggcaaaagtggcctgatctgctgctccaaagatgaaagaagactggagagaggcaggtgttccctggacactgtggctgcagtctacccactcttccgtcgtacacacaggcttggggaggaaagggcctctttcccggggcccacagcacagccaggcctaaaactgtctcctggctcagcccagccgttggaaagcagagcctgggagcctgtggtagaccatgaggagagggaagggcccagagccagggcttttgccatttgctgcccggcagggatcagggccacctgggcaaagacagggaggtgaggaaggcagggcaggtgtgggacgaagcttgaatggataggcatgagtctccacagcccagcctcaggctggccaggggtggcggcggctgcaggctgtgaaatgtgtgagtgtgtgtccgtgtgtgggtagatgtggtgtgagtgtgtgtgtggtgcgggtgatggaatgcatgagcctgcggaatgtatgtgagtacgtgactgtatggaaagtctgtgtgagtgtatgtgtgtgtgcatacaggtgtgaagtgtgtgtgtgtgtgagtgtgtgagtgtgtgtgtgtgtgtgtgtgtgtgtgtgtgctggggggctggctaaatccttcccctgtcccgccccaacccagcttagcctctagggtttcagccactgtcctaaagaaaacagcctggagcctgcagcaggaaatcgctgtttggattgcagaggcgcctcttcctgccacagccctgcggagcagggagggccaggagcaggccttcctgcccacctggaccagatatcgagctggtcaggagccccttcaccccctgatctggcctccctaacgcccttcagaccccagccttgaggactgaatgggaaaccctcccaccgttgtctctcgagggcagtgggagaagtggatgcccccgaggctgagtgagccgaggctggaacaccctcacagaggaaagccaggcagtcctgtcaatggtaggtccagcaatcccacattcacgaacattctgccgatacagctcattcatgcaaaagggtgtgcctcgctcagcctggtttgtaccaaagcgcttgagagcggattaagcagagctgggggtccctggactgtggcgcatccatccagggcaactcagccagctctccatgtgctgggaaggaagctccccaagacatggccaggtgggaaaaacagggtacagtgcagtgtgtacaggatcctcacatcttcgtaaaaaaagaaaacacatacatgtaaatgcttgtgtgtgcacagatcagactttcaaaccttccgtaccttgggcaggcaataactaagaaaatatataaaaatacgcacaaatagatacatgagtgctgggggtgcctcggggaccctctaccggcttgattgtgagaccccaggcaggtcccttcctctctgtgtcctgaatttcttgtgtgctctcagaggtcagaaaaccttgaagctggtgaagtgaggcgtgtgtgcgtggagatggagtggggagggggtggggggctagtttgcgttgcctgttagaacctcctcctcctgctgcaatgaaacccactcccaaggccataggctgctccctcctgtgacattccttaagagagtttggatttcatctggcccttttccccagtccccactccttccttccagaatccctcggaaccactccaagccttcattcctggaagcagtgcccactaatacccctgcagcccccgtctcaaggccttcatcagctgagtgttctccaagttgccccaactgtcccagagcctctcatgccccctggacctctcctggcctcctccaggtccaggatatgtgtggggggtgctggtccagctgcccccagtgcggccctgcgatcctcacagccgccattgcttctcaggcccttccctctgcactccaaggccgccccacagatggccgtaggggcccatgcagtcctgacaaggcttccttctttctcagacgcctggcaatagggggatgcctgaggctgggtgtgtgacccccactgggcctccagtgaagcccaggggcaagtctgggctgccccaggcctggagtagccccctcccaggcacccctctggcactgtcatgggcatcacctatgccttggagcgacttcatgggatagagctggagaagctgaagtcagcaggagattaattaatcaaaacccgaacacatctgctgttaattaattccatgccaaggttaactcttccctctgggcttcccctccccttggtgggaagaaggaaataatggtgggagacagcacccccttaaccttcttcccttagtgggaaacatgaagaagggaggggaacgtgaagggcagggcagtttctggggtaagaaagcagaagaggcagggcccccagagggcagggcagcctcacccatgtgggtgctttttagcggtggtagggggcgtttgcttttgagagtcagggtccatggcaattagtcatgagtcctgaggaaatctgagatggacaaatatctttatttacagcaacagatagaacagaccctccctcccttcccttcctttccccttccagtcttttccatactgttccccctcccgccccaccccaggctctcgcctagccctgccctctggggtcactgcgtgggttaggcccccaaaaaagcctaggaaaggagactggagagggctggctgagggtgggtggggcgtctcttcacatttttctgtcctctaagcctggggtggaggagagaggcaggcaccaggagcagggagaggtagagagctacggccccaccggcccaccctccccaagtaactttcacagtgttccccagccctggctgccccctgcggtccccaccccagccctgcccctaggttgtcctgtcaggtcctcagcaatgtatgaacctggtaacccagtaaagagttcaggcttctctgccatgggcccaccacccacggctgaggaggtggcccctctgagtgccccccactattttcaaggctggggttctgagaggacatgggtgggtaggagaggaccagggagagggggcttctcaagccttgtgtgacagtcctgggcctggccccactcagagggaccctgctggaatctgcaggggcgccaggctggcttagcccccgacagaggctcaggaggagaagcagagcccacagcactccatgcagatctccaggcagtccgcggactcgcagcaggcatccaggatgccgcagtccaggtcgcagggcaggtcgcagtcggcacactcgccagagccacagcagcagcagcagaggcacgagtcctccgagctgcaggagccacaggtggcgcagtccaggacgatgttgcacagcgtcaggaactcgcagaacaggcaggacaggatgcagtggacacagcagtctgcggggtggcggtggagagggggacgggtgagagaggggagggatgagcgtgtgtgaaatagccgggggtgtgggggcctgcggcagcggcagcagcagggacgctgagtgttcactgtgtgcctgaagctcacgaatccgtccccacagctccattttctaggtgatgaccccgaggcacagacagttaagcacatcggagcgggcagtctggatcatccttgctcttagccaccctctgtttatttgtttaaccaacatatggagtgatacatgttcttggcactgttctgagtgctgtgcatgaattacattcatttaggcctccaatgaatctatgaggcaggggcctttactagccccactctacagatgaagagactgaggttaagagaagtcggccgggcccagtggctcatgcctgtaatcccagctctttgggaggccgaggtgggcggatcacctgaggttaggagttcgagaccagcctggccaacatggcgaaatcccatctctattaaaaatacaaaaaattagctgggcgtggtggcacacgcctataatcccagctacttgggaggctgaggcaggagaatcgcttgaacccaggaggtggaggctgtagtagtgagccgagatcacaccattgcactccagcctgggcaacaagagctggactctctctcaaaaaaaaaaaaaaaaaaaaaagagagggagagtagttaagtctacacccagaatcctaccacctggctcatctctcacctggacaccttcgacagcctgcttactggtctccctttgaccactgccacctggcatctccactccacaccgcagccagagggatcctttagaaatacctgttggatcctggccctcctctgctcagacccctcccatggttcacatgtcgcttgtgataaaagctgaaatctttgaagtggcctctgaggccccctgtagtgtggtccctgtgccctcttagttctcttctcccactcttctcctccagatcactctgctctggccacgccagcctcctggctgctccttggccatgcaggcgctgattcctctgcctggaacaatcttgccacaggcacgtgcttggctgagtccctcatctccttctttgcccaaatgccacctctcaccgaggccttccaccacccgcttcaataccgcaaccggctggctctgcctcacactccctgcccggccctacctgactgccttcttcttccctcagaggacatcgcctcccactgtactacacggtttcctcatattcattgtcatctccttctaccggatatgtaagctccagcagggcaggcatctttgcccattttgttcaatgaaagattacaagtccctagaacagcgccagacacatagaggtgctcagtgaatagaatagaaatgcatgaagctgcgctgggcaccagctgggaggtggtggagctgggacttgaatccaggctgctggctctagaacccacgtcctgcagccctccgtgtgctggggccaggccatggggcaaagcgtgcagctctcctggccagggggccccctgggaggttcactgtgctgtggagggtctaaccctgttctcctgcattcctgtgtggagggaactagggtcttgtgatctctctccaaactggatagggtagttatcttcaaacgtaaatctaatgaggtgaccaccttgtttaaaacccttcagtggctccctactgctctccagatagtctaggcttactgcctggttggtaaggacctcccaggacccctgcctgctaggagtctcacctttggcagttcaccctccagccacactggccatttctcagctctgtgcgcatgctctcctggctggagcctccttctggtcttttaaggcatgttcagacatcacctccaagccttcccaggattccctccccagatttctgggctggtgtgagtggtccccctgtgtttgcgtaatcctctgcatgagtttatcattgcacttatcacatcgtatggcgattacctatctacgtctctcatgagagctttatgaggtcatgaaccaggtttccagcacatagcaggtgcctaggacatttcattttatttttctttgagacaaagttttgctcttgttgcccaggctggagtgcaatctcgggcacgatcttggctcactgcaacctccgcctccggagtagctgggattacaggcgcccaccgccacgcctggctaattttttgtatttttagtagagacagggtttcaccatttagacaaggctggtcttgaactcctgacctcaggtgatccacctgcctcggtggatcccaaagggctgggattacagaagtgagccaacgtgcctggccaggacattttaaatgaataaatggctccttcataaataagactgttgggactgggcttggtggctcacgccggtaatcccagaactttgggaggccgaggcgggtggatcacctgaggtcaggagttcgagaccaagctggccaatatggcgaaatcctgtctctactaaaaatacaaaaattagctgggcgtggtgggacgcgcctgtagttccagctactcaggaggctgagacagaagaatcgcttgaacccgggagaaggaggttgcagtgagccaagattgcgccactgcgctccagcctgggcgacagagcaagactccatctcaaaaaaaaaaaaaaaaaaggaaaaagactgttgggcagaatctgctttgcagagtgggaaggtttctgagcatgttatgtgcaagtgtgttttgcagatgcccaggccagggtcccttcacatggacaggaatcactggaacattctgaggtaaaggtcaggccatcactgagctcaggcagctgttggccatgttcaattgatggctgatgaggaggggactggctgcccctgtggccctgcagaggatctttgtgttgtaggcacatcggctggttgggtgtctggatcctctgacctcctactgcaccttgcagccctgccctggcaccattttattctgctacatgttcttttttcctcccttaacagaaaatttctgtttccagaaacagagtggcttaagatggatcaacccaggtggctccgttccttgtcacagcaactctgggaaagaagggatggggaggggtttggggtggggtggggaggtggccttgagaaggcaggtacacctttacccaacgggtgtactttgcaaggttctaagatttggtcatgcgtcaggttccctgcagggcttgttaagctccaccagagattccaatccagtaggcgtggaaggaggctgagatcctgcatctctaagtaacagcctggtgaaggtgctccagtgggcccatgcgtcatgcttcgaggaacccggctttggaggcctctcccagggagagatgggatgggtgcttaccttcctgtgcctggagggggatctgggaggtggtggatttgctgctgctcttactcttcttgctgccctggctggcgagagatgggtgtgtctgcaacttccggtgggccttggggccacccagggcaccattccccgcccgtctggtgccgcccagctctgaggggtggccagagtcattcggcagaagtggggtgcagcccaaggggttcccctgaggctggcctggagagatgaagagaaagtgtgatgggaaaagggtgggggtcattcggcccccagagctatgctcgaatcctgcctgctgcattcttacatataccccaaagcacccagccagacctgtatcctgcagatggggaaactgaggcccagagagaagaaatgactagtccagagccacgccatgaaattgagttgggcctagctcctgactctcagttcagtgctcagtccagaaatgacagatgtataagggcaggggctcggagccctggacctctcctttgttcctcacacaaagtccattctcctgctcttgtcatcctggggttttggcagagtggtggcagtggcagtgctggggaagaggggtggtttggctggggttgggagcgcagcagtgaagaagttaatcttcacctcggcctctgccaagcccccagctgttattgcccttggcgcactgggtgatttattggaaacatctgtttggagatgaacgcctggctctggaatccaggggctcctcactgcagcccctctacctcctgctccttccacctggtgcctccactcaagcctctgccctccgcaccctcaaccccatcctgcctctatgggcagctggcagaggggtctgggagaggagggagggaagaaggcaagaagaagggcagtggggagacccctgaagccaggacccccgggtccccattgcaggctgagggaccagacttcagctttatcaatggagtacaggcaaggtgaccctggagaccccccaaaccccgaattccttcctgctcctcgctcagggatgttcagttctgggtgagaaccagctggctcagttctgctctcaagagatgaggggaggtgtgtatggtggggggagtgcggagggactgaagaggggtcactgagagctctggggcccctcagctgtgcaggggtcctgactcctgggcaggaccctgtggcctcaaggaccctctgtaaatgtggggggcacttcagtccctcaggagctgggatctggatccccatctccctccaggcctggtctgtgtatgtgaattgtgtaggagatgtcttgggggccctggagcccaaggagaggggagggtggcctcggtgcctcccttggctgaagaggccgggtcttccagtgatggcagcagtcacaacattgcacactgcctgcttcctgcacgccagcccttctaagtacttgctgctcacgcatcccctcagtattgctagtcttcttttactgatgaggaaactgagtcccggagaggtagaggtacagtaagttgcccaaggtcacatagctagcaagtgtcagagaggtacagtaagttgcccaaggtcacacagctagcaagtgttagagattaggagctggggctcagagggcagaggccagcatgggggcagaggctgggagacaagcgactgaggaataagctgctactaccacgacaatcactaccctcataactggtgttatgtaccaggcacagtgctagaagctttaggtggagcagcttctttttttttttttttttttttttttgagacggagtctagctccgtgcccaggccagagtgcagtggcgcaatcccggctccctgcaacatccgcctcccgggttcacaccattctcctgcctcagcctcccgagtagctagggactacatgcgcccgccaccacgcccggctaattttttgtattttttagtagggatggggtttcaccgtgttagccaggatggtctcgatctcctgacctcgtgatccgcccgcctcagcctcccagagtgctgggattacaggcgtgagtaggtggagcagcttctttaggcatcgcaatagatctactactggccccatttcacagatgagaaaacagaggcccagagaggggaaaacttgccaaaggtcctctagctgggaagtggagtggggagggcatgaagattgggagaaaggagctgaggacaaggtgggggatcgggggagggtgggaagcagggttctggagaggctccatgctgggagcctccagcaagaggtgtggctgatgcctgcatctggataaacagggttaaggctatggttagtggccaggcctgaatcatcaggcccccacctcttggccccacacagggtgactgggccaagtccttggccagcttcggtgccccttgcccttctgccgaaacatgggcacactgaccagagggcgggagtgtgtggtgagctgaaggatctgggcgacgtggacagacacagagcttgtctgtggccatggccgtgggggctgagtcacagagcaaacactcagggctcacagacacaggagtgtctgtcccattcccaccagaccccctcctccactgccaaggcgctgacctctttctctcaattctgctagtgggtgtgctggaggagaccgagggccgtgcactagtgggattagtaagcctgacttccagggagtccagcttagccccagatgccctggctggaggaggcttccagctcagccatgccagctgggcatgcaggcaggcactgcaaagagtgttgggccgggagacctgagtttcccagcttgggaccagggtgggccgttctctgtgcctgtttcctcatctctaaaatgggcttcgcagtagccatcctgctgcctcattgcaggctgattaggagagcaagtgagcccactcagggaaagaaagttggaaagtaaaaatgtgtctaaagatgtgggcaaatcttcgttagttataaaatgatcccagctgttgcttctcctgttcttgagggtgaaggtggaaaattctctccctccccccaggacctccttggagaactcgagccaggcctgggaatggagctgaattttgttcctttcgccctagagcaactgggggcttcttccttttatccctgattcccggaaggatggagatgcatcaggccctggctccctgccggaccccagccccgtagctctcttcctgaggcagggggtgcctctctccaggtagccgcatgctctctgtcctgagccattttgcctggagcctgcccacactccctgcttcctagtcactttgcagtggaggtcttccccttgacagaaagcacagtgacagtgcccttcccctttctgctgcctgtgctgccacactcaaggttctggccaagcgggtgcacccatttttgccgacccatttgggttgagttccctagtgcaaccctacatgttgccatccaacctcctggccccctaggactcacatgtcacagcttctgtggggacgtcgaggtcagtgctgtccaggccctgggggatgccagggccattgccttggggcatgggggttgccgcctcctccagggagccctcctctggtgctgcctccgcagggtgagtggatcctgttactacctccagcccaggaaggagggatagggtctgggctaggaaaaaagcagatgactgaggtccattttcctggggccttcctgtttgcccagccgtgggccccgccccacagcccagcatgcccactgaaccctcattctttgtctgtctgcatcagttatgcagcccttactctagctgacaacagcaccgggctccaaaatagaaagctcccaaaccacaatctgggagtgagcaagggtgtgcatgcatttgagtgtgtgcacgtgtgcatgtggtgtcgggaggggcagagatggcagaatataaagagaagtagggagaggaggcagaaacacaacacgggagaacagacggacggtcagcaacggagagatagggacaggcatcgagagtgacagggagaatcaaagggacagtgagaggtagaggtaaagggagatagagcatcggactgcgagagattgggcacggaaaagggatccacagtgacccagtgacagacagcctgagacgggagtgagacgcagcaatagcacggaagtcagtaatggagagaaagatagagatggggcaggggcagaggcgacagagaaggtagcactgtgtgatacagagcgcggagggagacgggagaaactgggtcagagaggatgatgatagaggagtcagaggaacctgggggtgaggagcagggaggggctacagtcaggaggaggacaaggagccggccggagcactggggaagaggtgaaccgcagccacatgtaattacagtggctctgtgcaggggcggcaggaggcagaaatggagccaccttcaaacccacagctccccagcctgcaggactagggcccctaggctcagggggaaaagggatgggggatgggaggtgagggagggaggaagaaaggggtccgagcgtccacacactcagccaggggtcaggggcgggcccaggctgtggcaatgaaagggtgtagggtgcagcctgggcctctcatcagacctcagcctatgcagttagttggaaggacaggggtctaaagagggtggccttccacctgccccctccccaaatatcatgttgggagaaggagcaaggagacacagaaacaagagactcagagatgcagaggccaaaagagcgcagggagaggcagggtgacacagagggggacacaaggagaggcagggtgacacagagggggacacggggagaggcagagtgacacagagggggacacgggcagacagggagatgatgagaaacagcagggaagcccaaagagtacacaccccacagagagaccagaaagaggcacatgcagagacagagacacagagagacacagggtagtcttgggaattgaaatggaatcaatcacagagaatagtgaggggttgacacagagagggagagagtgggggtgggggagagaggcaaagagagggagatgagagatcaaagaagagaggagggaggtaattagagggatcagtggaggcttgggcatgcaggcctgggggatgggagttggaagcatgctgaggagaagatcctgtggcccagctgcctccctgggcccagagcacagccttctgtggccatgaccctcagtgaccctcatgacccttgttccaaggggtctggtcccccacagccaggggaatggacgccccagaggccccatgtgggaagcacagagggcggcaggcccagcaggcatgctctcacctgcccagggaaaaaccacagggcttgcctggagacaggagctggggcaatggggagggagggctggcgctcctaggatttgtgcagggcaggagagttatgtgctgggaacccttcccggggcccatggctccacggaggcaggggtgggttcctttcagctccatctgctctttgggcctgttgagagctcccctcttagctgggttaatcattgggaaatcaaatagcttttggacgatcagaggatttggacaaggaggagcaggcaagtggagacgctggtgctagatggtgcctctcctagccctgagcccggtctacaccagctcagatatggctcttgaaggctaagaccaagttgccatgaaaagggaggctcagggtcctaatttccaggaaaccaggggcctgcctagctccggaccctggcccccagaggcaccttgctatggccctgggccctgaactgggggacctgactctcccacagggtgtaatgagacagaaagacctgagtgagaagcagaagatccaagccctacattcaccagttaccagcctggcaaattatcagagttgggttactttgcatggaaagggttgggttactttgcagtcctaatctcatgccacagggtttcaaggaggaaagaaaatgctcatcagggggttgttcacgagcctttcacccacagccctactactcttccctccttcccttcctctcttctttccttcctccctcctttctctctctcttttttttttaatgagtagtttggcttctgacctttccccttccttccttccctccttccctccctccctccctccctccctccttccttccttccttccttccttccttccctccttccctccttccctccttcctgtgctgtgtggtttaacatttattaagcacctacgaggcacccagcaatatgacaagtattgggtatacccgagtgagaaagaccagctcactgcctcggagttctcggttaggggagaggtgggctggtggctcttacatacccagaggtgcaagagttacactggggcatctggaagaatggtggaagcacagaagacgggcacctagcccagatggctgagtgtgtcaagcaggcttcctggggcaggcagtactcacactgagtcttgaccaatcagcagtacagagggggagttttgagaagagcagcaggaatcaagacccccgagtgagccgctacacagagagcaaggaagccacatgctgcggggtggtgttgaggctgggaagcctagaatgatagcagggcatgacaggccttgtggtcatttcccaggcttcctgctgaggtcaccagggctcacagaggtgacactgtgagtcctatggtagagagagccaggacttctgctccctgccctgctccccctcctccccgcagtgttagagagggaggaaggcaaggaagagggtttaaggagcctggagttcacatctccacctgccttacccaaagtgtctctgctctctgggcagcctctcctgacagtcacctacagggctggtgaccttggatctggtgggaacaggaaattacagagtgcagaccaaggcccgaggaggcccatcccacagaaagcctaccaggcatcagaccgtggaggaaaaatgaggaaggaaagaaaaccaagtccaataatcctgacctggagacacacagagggacagagaacctctggagccaggaggggccacagaggggacccagcaaaccagcacggagggcagaagagggagctgtgccagatatccagagacagggaagcagaaggaaaaggaagaagcagctgcaggaagacctggtctgcagaggagacactgcccgggtggcccagacccctaggtgtggactgagaagcagctcctgcttggaacagatggggcagaggcgccaagagcccactttgccattctgtaaccaagagacaccgctgtccagccacagaggggagaacatctcaggggagaaacttctggagggtggaagtgtggggtgggcaggaggcaagggggtggccagcaaaggtgaaggaggccccccgtgtggatgtgcaattcatgtactgcagaaggtgcctgccaagggggtgagcggatgtggctgaagtccttgccctcctagtaggtgccatctgctcacccaactgcgcacctgctccatctgaccaagggggttcctttttctaatctgcaccgggtgccacacatgctggctccgagcagaagcccccagccctgtactcctcctctcaagggtggctatctacaaaggggagatacggaaaggcaacagcccctttgcttcaatacactctcattcctaacatggggtaagattctggtaaatgcctggagctctggaaagacgccccagatgggagtgggagagccatgtttaaatccatgagcccaagaggaaaggccgagactcacaccctcagcaaggactctgtgggttctctctgcttgccatccaccaagttgaggggtggtcctggaccaacagggagtaggggggaacctctttccggtgggatggtttcaagcctgcacagtgcccatgggagtttcagccaaaaaatccctggctggtgtggagagaggcctgtgttccagagctccacggcctactgccttaagtttagccctcgtcattgtctttgtggaccgtggatctgggcttcccacttggaactctgaccgtctctggagagggaaggccagaacctcatatggtcagagagtggtggctggaaccccacacctcaatctttccttggcttggcattcaaggcctcagtccggaccttcaatctatcaatgtaccaggatcctgtgttccacgcagaccggcctccccatggtctgggccattgccggatcttctgaccagtccacccatgcttatattattcctgttgaccagaagatcctacccctcccactctccaaacccaactcatcctggaccaagctcaaacttcacctcttcctctagacagctttctctgacccagttgctaagaatttagctccagtgttccctcttgttaattacaatttgctagtgaaatcccggcttctcaaccagactacagccctcccaactcactcccttggagtggtgtccatattcatctctgcatccccagggggcactcggcaaatgcctactggggagtactttctggagtttggaatgcccctgtcaggggaaggagaaagagaaagaaatgaagactaggggtggcacctggacctgaaccccaagaaagtcagagagggtggactcctttgatgcacacatggttgatgcgaatccaatggtcacactcccaggccaccaagctgaaaactaaagagggcctgagctggccagttagtctgggacaagttggttttattttaggtctgaaggttccaaatccccaggaaattcaatttagaaccatgaacaggaatgtgacgccccaatgctgggcaaaaatgtgcctgtgggctagggagccaggctcccggggctctcaggggtgggtggggaggaggccactaggagagccaagggtgtgggggcttggccacctgcccctaccagatctgccctgagtccccttgtgccctgtctgcatctggggtggctgagggaggaggccgacttgctccctggctgtcctgccagcagagcccctggggcagcgctgtggccttgctgttctgtcagcactcagggagtaaagcgtgggggattctggtctcaaattcaggcatctgtggggttttggctgggtctcctgcggtttgggcttcctgggcagcaggctcattctcccaaggcggtggcagagcgaagccttgagttatgaaagccgcattgtctggcccagcccaggctggggagggggtctgctggggtgctggggggcctcaagttacagcccagagcttaaccctcccagttgcccacgctggccccggttgtgtgcagttagccctctcctcttgctgctggagctgagaatggcttcaacaaggaaggggatcttggaaggaggtagtggagggagagcagagaaaatggataaggggagggagaaagctggagagagtaagaggatgggagagcaggaggctgaggaagggaggaggcaggaaggaggcccagcgggacagggaaggttcccagacacagagaaggacccttccaagtgccctgcccccagctgtccctccgggctgaaggagtccaattcttggaggcgctcatcctgcagaaggccccgttgcaggggccccacagagacagcaggcaatttgaggcttggccaagatgggctgtagacacactggcctcatctatgtgctggctgttggccagacatcttccacttgtcctcactctggtttagaggaccccccacctccacaactaggcgtccataccaagtaggtggggagtggagaggggcctcctagaacaggcaggcaggccggcttcgagggcgcatgtggaggctcaggccagagaagggaaggagcttgtccaaggcaaggcagggagttcgtgtcagaggttcaggaacagaccttcattattcagagtcaaagaggggaaagggggaatggcgctggtggggaggaaggcaacgacttagacagtggagattccaattatgaaatccgggtccacactcctgcacgcggttcccctggccctgaacacatcccagaggttcctgacttctccttgacccggacttccatttgggagcttcggcttaggcatctggccagtgaggggaagggactgagaaccagggccggcgaggcccctactccaaaccccttcagggagtcacaaaccgtacttggcgtgagaggctcccccaggaatcgcgggtaggttacagacggcgccaggcgcgggacggggcatttcacttgggctgaagacactgggttggggtgcgtgtgtgtgcacagggcaggggcggcggggactggccggcacgagagggaaggaaggcgagggagaagggatggcaagaaagaggggaggggctgggtcctgcagccgctcgcggcagacaaaagttttcgggaagcgctgggctctggttgggctgggggaagggaagtagagaaagattcagacaacgccccctcccccacaccaggcccccacaaatatttacacactgggcagaaacagttgagacacaaatcccagacggacagacaccgcggagtgtatgtgtgtgtgtttgtgtgtgtgtgtgtgtgtgtctggtgtcgggagttgcggggagttggagccaacttggcgcagccgcagcctctgttcagggccctgcctccctcgcccagccccctactctccttggaccaagtcctcaaacccagacttttcgtccctacccccaccaagctccctggaacggtctccccgcgtctggggacggagaggagaactaataactggccccttcagccgcccacccgcccctgtccagcttcgctcgccactcccggtcctacctgggcccggggctgcgctgggggctccatagggcgcgtcgcagccagaggggcgctggccgctcacctggtacatcggccccggacctgcggaaaacagggctcagcgggcggcgccggaggcgggcaaggggcgattcccccgcagatgcgcgcctcccacgtccactcactcgtgcgagccgtgctacgctctcttccagccggatccccgcgcggggcccgccatgcgcgcctgctccgggcgcccctgcccaggtcccgctggctcccgggtgctcgcctggcgccccttcccctctcactcgctgctttctcccatttcggcgccagctcacgccgttcgccccttccttcttccttctctccctccagcccccctcgctcctcccctactcgcctctcccctcccctcttccctggcccaccctctccccgccccctcctcgccttctcagtcgcccctctgcgggtcccctcccccgcgccgggcttggcccagccaggagccggacacgtctgtccgcggggcgcccgaggcccgagcccccacaggaagccggctgggcgcgcttcctccgcgctctcggagcggggcctcagtctccccgactccctgctctctgaggcccggagatccgcgggctgcacgttttcctttgcctgtccaaactctgcaaaagtttctggaaaatcaggagaaagagagaaacctcaaccacttcgtggaactgtctgaataattgcggcctccaaatctctttgccccaaagatgggcgcgatcaagtttctcagtcacgttttacccaccccctcggtctcctcccggggtcctaagccagggacagggatctgggctcccaggccacccgcccacagcgccagagttgtctgtccgggaaatccggttagtgaccaaccagcctgccctgtgccgcagcagcccagagcatcctcgaccctcctgcccctaccagctgtgcgtgggaatgtgtgtcagaaaaccgactttgggggcaaagagaggtcctccgaattcagcccttctttgggatccagactgaatccgagggcttctaagatgagggttcggggagaaaggggagggagggagcctctcccggtggggccagccgggcggcgcgtctggatggtgagccgtggtggtaggaagaagccgctgccaggcagtccaagagggttcaggggccctcagcgcgaccccggaacctggtccccgagaatggggaagactttggagcctgcggctctccaggtggggctgggcgggcccgtgggatgatgctcaggtggggcagccccctggggtgacagcgtctcggccgtacttgtctagggccgcctaggagccgcgtctgggctccccgccacgagggccagtgagcacactggaaggcagcggcggcaccaggccaccttttctagtcccgagtccagccgggtctggaagtggagagctgggacgcaggaggccgggcgtcccagctccccacttcttggactctcctagcccccatagtcgctacttacggctatcgcaggtcctggggcgccgtcggggccaggaccgggatggcccccacggcgccggcagcgctctcggcacccgcggccacgtcccagcgatgggctggggtggttgcggcccggaggaaggtggggcgggacaagaagagagtgttccgccccccaggccgggctgctagccgcgggggtctgtcctagtgccccaggagccggccgggatccggctgctgtccgggagctctggagagctgagccaactcccgcttcctggcacgggctgagtcacccggacgggacgcgcccgcgcctgggcctggcggctgctgcattcttacctgcttacctgggcgcgcacgctgggcctcacccacctccgaaggcaatcctcaccgtctctctccgtttcctcccgcgtatagggccccctcccgaaccccagacctcagtgctgcacccctccccctgctttctcgtctcaatccagggcccctaaactctgcatcagctcagtcccggagccttactattccaagtcgcctgcttgatctcaaaagtcctctgaatctggcccagtactaatgtctgttttgttggaaatgtaaattatgctttaaatttaatcacgcatgctggttatacaggtgtgctcattttgtaaggatgcagcaagctgaacatttatgatgcaggcacttgtttgtatgactattatacttgaataaaaagtttttaaaaatcaacacattaaaatcaacattccagttcagagcatgataggatatgatggccaggctggaggcctggcatgggagcccagtttccagacccaccatctactatatttctttggggaaatccctttgcctctcagcctcaggagggatgagcactggggcccaggaccaggactggggtgaggtaagtgagacactcacctggtgtgcaagatttcggggatgccaagataaggaattttttttttggaggcaggattttgctctgtccgccaggctggagtgtggtggtgagatctcagctcattacaatctccacttcccaagttaaagcagctgggactacaggtgcttgccaccacacctggctaattttttttagtagagacggggttttaccgtgttggccaggctggtctggaactcctgacctcaagtgatctgcctgccttggcctctcaaagtgctgagattacaggcatgagccaccgtgcccagactgatgaggaatattttaaggcaatattttaatataccaaatgggcaaactacagttctttgggccagctgccttgttttttttaaataaagttgtattggaaacaggaccaggattaaggtaattaatcacgcaagttcagggtcagatcctgtctttatctaaaatgttggcattttgtttatcatagactttttggcattaatttggatttttatacatattgcaggaaaatattgttttatcttaattactgagttttttgatgcccccttaagttttgaacctgagccaagtgcctcattcactccaggtttcacatgcctcaccctagacccggccctgttattgtctcttcctgaaggacctgtccaggaagccagggtaaatgaggggagatcaaaggtgttcccccacccaacactgtcacacacacacatatgcacagcaccaagtgggctctgcacccaagcccaggcccagcttccccggggcccaccgatcagttcagaataaagcgcaaagtccctcagtctccatgaactgggccccacctgccttggccctcatctccccttacttattccctgccagccatgctacttccttttctcggttaatttgccaggcaccttctcgcctcagggcctttgcccttgctctttcctctgcccagaatgtgcatcccctagatacccacattggccctttcctcgtttcttctgcttatgtcagcttctaagagaggccgtcccagacttctcactctctgcccccaacaccattttattattctacccagactttttcagcacttggcctattctatatttgctcatctgttggtagagtgaaaggccctgagagcagggactggcttgtctactagtgtattccctagagatgtgtctgccacagagagtgcaatacattttccaatttcagaggttggaaaacagaggccagagaggggaaagagctaatgcaagtcatgtagtgagttagtggcaaaaccttaccaaatcccaactttccagactcccacctcagtattctttcctgccttccagggcttattccccactctccaccccagagccttccaggcaacaaaggggacagaactgccttgcacgggctctgcccctcacaatacccttcaaagtggagcaggccagctcacaactcctcccttgcagttcattccgcaagaccacaaggtctggcccagctccagcctctggcgcccacccctccttggtggccagcagaacgcacagctcttcccccacttcctgtctctggcagagggccagtctgctgggctggcttctgcagctggaccacaactgtggtctcagtgcctggagaatggggtcaggacactgggagaatgggaccctcccggaagagggatgcataaattggggcgtgtttgtgtggggtgaggagaagctgctgggtggggattgagagcccccagctctttctttctacccccatctcggatgggcactgagcagagaatggggctctaaccctcccccttcctgaagaaaagaatgtgcagtaggatgaagggtgctctgggccccatgcctgattctagccctccctgctacccctggtgatggaggatgacggtggcgtgtcaatttcagcggtcatgtgttgagcgtgttctatatgacgagcctttgccagatacttctagatttgttatttcctttaatgcctacaacagtcagcatagttattaaccccattttacagatgaggcaactgaggtacaatgaagtgatgtgaagagacttacccactagtaatgggtggagctgggacttggaccatgttttctgaagccaaacacagcactcaccccaatcccaggcatggccttcagcgtgtagaaaggactgtgatgttctctttcatgtgctgcccccctccccaagctagttgctgaagatagggacatggccctctgcatccctcctctgtctcattgtgttggggtaccaggaacttggcagggtatataggaagaatggggcttggatctgtgtcatggagaccaaatttgcatcctggctcaatcacttctaccaccctatgtgattttgagcaaatcacttgaactctccaagcctttagttctcctgtttaaacgtggcaaaggcgttggctgtcagcaaatgggaactcttgcccaccacgtccctccccaggggagggaagcttcaaagggcaacatttctgttatactaagttttatttacaaacccttaacctcatacttatggtattttattttatttatttagagaccttgtctcaatgagctacaggtgcatgccaccatgtctggctaattttattttattttactttatttttgtagagatagagtctcacttagttgtccaggctggtctcaaactgctggcctcaaacaatcctcctgtcttagcctaccaaaatgcagggattacaggccatttcaacaatttttaagtgtacaattcagtggtaataattatatcacaatgttgtgcaaacagcactaccatctatttccaaaacttttcaccacctcaaacagaaactaactattaagcaataactccttctattaatttcttaggtctgtcatgacaaagtatcaaaaactgggtggcataaactggtagcaatttattattgcctgatagagttggaggcaagaagttcaaaatgaaactgtgggcagggctgtgctctctctgacagctctgggggagaagtcttccctgtctctcctagcttctggggcttgccagcactccttgaatcgccttggtttgtggatgcattgctccagtcacacggctgtctctccctgtgtgtcctcacatcagtgtctctctatatatgtctgtgtctgagtccacatttttttttttttgagatgaggtctctctctgttgcccaggttggagtgcagtggcatgatttccactgactgcatcctctctacttcccaggctcaagtgatcctcccacctcagcctcccaagcagttgggattgcaagcgtgcactaccatgcccggctaactcttgtatttttagtagagatggggtttcgccatgttgcccaggctggtctcaaactcctgagctcaggagatctacccgcctcagcctcccaaagtgctgggattacaagcgtgagccgctgtgcccggcatgtccaaatttttgtaaggacaccagtcatattgaattagggatcatattaacctggttaaatctgcaaggactctatttccaaataaggtcacattctgaagtaccgggaggtaggacttaagcatatcttttggatttttatacatattgcaggaaattacacaattcaatccataacactccccagaaaaagctggatcaaagtagaaaagtaaagaagtgagatgaaaagtaagtgtaaatgaacctaatataaataaaagtaaatgtaaatatatgtttcttcctaaaccccactatggagacaatgatgtgctactgaaggaatatatgtatttaacaaacaggcttgccttaccctactggttaagcttttcctggagcccacatttctttgaaaatctgatgaaagctataagcaccctctccaaaaacctcccccttaagaaaatgtagcatttccaatacaagctggggagattcctggacaccccagaaagccccattgaagaatatttgccgtaattggaaggactgctccaagggtggaaactcaggcatctggggagtgctgttggggatgggaagagagaattgcatccacctctgtggtcctgtttccagtctgtaggtgttttttaattatttgtgtatttatttattttttgagatggagtctcgctctgtcacccaggcttgagtgcagtggcgcgatctcgctgcactgcaagctcctcctcccaggttgacgccattctcctgcctcagcctccccagtagctgggactacaggtgcccgccaccacgcccggctaattttttttgtatttttagtagagacggggtttcaccgtgttagccaggatggtcttgatctccgacctcgagatctgcccgccttggcctcctaaaatgctgggagccactgcgcccagcctcaagtctgtaggttttttagggtaatctaacgttattgaagacaataaataaggcaaaatcgatgggaagtatagaaagtgaattgagtcggattatcaaaaagcacttcctagtagccaagagaataagacaggattgtgggtgaggagggaggtggagagtggaggagagcattgggtgggtttttttttgtgtatcctggtctctgaagatgcccatgaactctagttggggtgacaggtggcctggcctaaagcagtcaagctgatgggtgggatgatatcagatttccactaagggggaatcactgagagtttgggtttggagtttcctttctgctctggcccttgcaataagaagaagcaaataagtttcacattaattaccccatttattgccctctatatcaattggagcccaatcaggaaaatagaaggcagtctaggcacctcaaggagaagaccgtttaatttagggagttggttacaaatgtcttggaaaaatgaatgagcaaagggagaaggcgatgctctgagttgagggagctgctactgcccgtgggctggaaccagaagcacacacttgctggttagcagctggaagcactgccactgccgaaacaggcctgctgccactgccgctgccgagacaggacgctgccactgagccacaaccaaggagcctgccctcccagggatgctgctggaacgcctaccctagggccgccatggctgctgccactgcggaagtcacctccagaagcagagaaagctgctattcccttcctcatgccttcccatctctcaccactttatcccattggctgaacttaactggagttcaggaagtgtcatttgcaggctcccaggccctgcaaaagaaagataggaaagaatgaatctcagagccaacaggcaaaggaccagcacaccgtagtagctaaagcggaccccagcctctttctctcctccctcccccagattattgtctttcaacctaactgcttcacagcctttacactagaagtaagtgcattgtttgcaaatgtgttttgtgtctcccctcactagaacagatcgccttgaggacgggattctatcttgtcttctacactttctccaacacttagaacaggtgcctgagccagtgctcaaagaaatgttcttcctgactacttttgtcctctctcaagtagagagaagacagagtctaaccctgttgcccaggctagagtgcagtggcacgattacagctcactgcagcctcaacctctgaagctcaagtgatcatcctaccttggactcccaagtagctgggattacaggtgcacgccaccatgcccagctaattttttttttttttttttttttttgtagagagggagtttcgccatgttgcccaggctggtcgcggactcctgagctcaagctcagcctcccaaagtgctgggattacaggaatgagcccatcccactctctacttttaatatacaaagaaaccaaggtctagaaagctctgacttgcccaaaggcatgcagctgccatgacatgtcctgctggccagcctcagaaaggtcttgggtgaggacagggctgacttggcagctgcccactccctgccatacctctgggatctggctgccccaagcaaactataagccatgacgttgatgcctttttcacgtttccatgtgctcttggagctgagggcaagaaggggtgactcagccgtgacctcctatgggctggtaacttcattctgctccaagaaataggacatcccggtggctctgccaaaagggccatgatggaaatcagggcgtagcaactgaggcagggactgagagacaggcacgaggcccgtgctggcccctccctcctcagttccccagggtggagcgctcagtggcagagtcaccgctatacctatacttacggcgaccatatttcccaaaccaaaagttcttacatgtggttagacacatatgactgtccctatgagggaaatgggagagagaattagacatagtgtctatcctaaggtttttcaacctcagcactattgacattttcgggctggatgattctttgttgagggctgtcctgctcattgtaggatatttagcagcattcatggctgctacccaccagatgccagtaacacccccaacccccagtcatgaaaccaaaaacgcctccactagacattgccaaatgtcccctggccttggggggaggcaggggttcaaaagcactcctgattgagaagtactggtctgttcttgaaacccagcgtgtattctattctggactgtctaggggcctggagatggtgcccagtctgatagagaaatatggcccttgtccctcaagggagacaggcacagtcctgtctctagtctaagggtagaggtagagtcctgcccttggggaactcctgagctaatgggggagattggacagtagtccctagacaggttgaaaacacagtggtcaagagcatggactttggtgccagaatgcctgaattcaaatcctgggtctgccattcatagcataagttacctctttgtgcctcagtttctttatctgtaaaatgggcatagtgatagcatcttttttttttttttttttttttgagccagagtctccctctgttgcccaggctggagtgcaatggcgcaatggcggctcactgcaacctctgcctcctgggctcaagtgattctcctgcctcagcctcctgagtagctgggattacaggcgtgcgccaccacgcctggctaatttttgtatttttggtagagatggggtttcaccatgttggtcaggctggtcttgaatttctgaccttgtgatctgtccgcttcggcctcccaaagtgctgggattacaggcgtgagccaccccacgcagccgatagcatctgtttttagaattttattacatttaaaactttttgtaacaaactttattttttaggacacttttagatttacagaaaaattaagaagtacagagttcccatctatgttactgccagttttcccaattattgacatttgtttcaattaacgaaccaatattgatacattattagtattgttttaaagcccctagttaattcatattttcttagtttttacttgatgttctttttctatgtcaggctcccattcaggacatcacatcatatttagttgtcatgtctccttacgctgctgttggctgtgacagcttcttagacttttcttacttttgatgaccttgagagctttgaggagcactgggcaggtatactgcaggatgtccttctgttggaatttgcctgatgcgtttctcatgattagactgggcttatgggtttctgggaggaagaccacagaggtaaagtacaatagtcatgggccaggcacggtgactcacacctgtaatgccagcactttgggaggctgaggcgggcggatcatgaggtcaggagttcgagaccagcctggacaacatagccgggtgtggtggcatggacctgtagtcccagctactcaggaggctgaggcaggagaatcacttgaacccgggaggcagaggttgcagtgagctgagatcgcgctactgcactccagcctgggtgacagagtgagactccgtctcaaaaacgacaacaacagaaaacaatagtcatcaaatcatatcaatagcacatcctacgaaccatgacttataaccactgatgttaaccttggtcacttggctgagatcgtgtttatcaggtttctccacagtcaagttacccctctcctctccaaactgtactctttggaaggaagtcactatgtgcagcctatgcttaaggagtcgggagctcagagggttttggggcatgttgaataaggttagaaatgtaaagtccttagggcagtgcctgctgtgtggcaagccctatataatgatttactgttagtgtgatgatgccgagacagtctggaggggagatcagtgtccacatagaaaacatgcttaggacagcttgatagatagtgtactgcattaggccaaagatgccccaggagtttatgagtatgttaccatacagggcaagagggactttgtagatgtgatgaagggcgtggaaccttgaaatgggaagattagcctggattatccaggtaggccaatctcatcacataaatctttaaaagtggagagccttgccgggcgcggtggctcacgcctgtaatcccaggactttgggaggccgaggtgggtggatcatgaggttaggagatcgagaccatcctggttaacatggtgaaaccccgtctctgctaaaaaatagaaaaagttagccgggcatgatggcgggtgcctgcagtcccagctactctggaggctgaggcaggagaatggcgtgaacccaggaggtggagcttgcagtgagccaagatcgcgccgctgaactccagcctgggagacagagcgagactccgtctcaaaaaagaaaaaaaaaaaaaagtggagagcgttttctggcagagatcagagagagagtatgacagcctagcagagggcagaggcaggcagcaagtgggggactgtacccttcttggccaccttagagggtagagagagggagctaggccccagaaaggcaggcactctgccaacacttcagcgtagccccatgagacgcgtgatgggcctctgacctgcagaactgcagtaagacaggaaactcacattgtttaaagccgctgatggaagactggcagcgataggaaacgaattcatgtactgacaagcacaaggctggaagtggaaccatagtcctaaagcaaaaatgactacttaccaactacgaatgaatcagccctccatccttgcaagctcagtttttcctaacaataacaaccacgaaaagaaatcaatgagtctaccatttcttgagggacaacttcaggctaagtgctccgctaggccttttaaaatgttgtgtcatgtaatcttcacaccatgtaatactctttctatattaatagcgtagacagagggagagacctcttgtccttccttcttctctcccaggttagctccttgctgataattaactctcaacaagtcaaaataagctcttcagtaagccaaagtccctttaaatccaaagaattagttggagtggtgtgtttactatcttagaggcctcagttcaagagtatctaaaagacagtctcgtaggtttgtcagaacatcacccgaatatctggaatatcctggaaccattcattcattcaatacgcatctgttgagcaccaactcttgagcccctgccctcaagaagctcagtctctgtggggatagtgaggtgtggacaggcatcaccacagcctggagcagtgtgggttgtagccgccttcaggaagcataccgtgtttatttaactggggaggaggcataaggctgtggcaatctgggaaggcttcaaggacgtggcgcatttaacttgggcctttaagaacaggtaggcttcactaagcaaagatagtgccagaggaattccaggtaggacaagcaaacgcacagaggcaggggaacagaggcccatggatcttctatgtctcatggcatccttattgagtaggtgccagtattgtccccattttgtggaagaacaaactgaggcacagagcagttgaatgacctgccctagagaacactcagcttataaatggtaagctgggtttacagctgcagtctgactacagaactcccgctcttagtcttttcttcacatctgctggggaaatgcaagtttagcagggtgaattcagatcatgggtgcaaataagtgaaatgcatttaaccattccctttgtcattcaataaatattgaccacatacccattgggtgctagctctgtgctaggggacttagcagtgccccccaaccaggagctcccatctgaaggaggaaggagatgtgtggatggagacctgcctcactactcagtgagtgccccaagagagggggacagaggaaggaaattgtggatgtgaaaagctggctccggaggaatcctttttttaggaagataagcgagggagccaagtcagtagagtcagggaaaagcagtccaagagccagaagtcaagccaagagggcagaaccacacccacccctaacatctgcaggacccaggaaaccccacgaaccgcctctggctcacagccagcctctttctgttcacactcctggcttgtcttgcagagtgaggagcgtcatgtgaatgagcatgccagtgccagcaatgccttcaggctctggcctataaacagctccacctataaacagctgcccctggttactcctcaggcgaggggacatgtaccagaatcacactttagcctcataaggacaaagccaggaaaaggaggaaaataaaacaaaaccaaaaacaaaggggcatgaagaagcttttggaggtaatggctgtgtttgttaccttgattgtggtgacgttttcacaggtatatgcataagtctaaatgcatcaaatcgtatataggagatgggtgcagttttttgtgtatcaacaacaaagaagaaaaaggaggagcaagaggaggaagaaaaacataaaacagacatataaaaagaaaatagatgatggggctgggggaggggaggaaggggaagtgatgccaacgggtgcaggatttccttttggggagatgaaaaggatctaaacgtgactgtggggatggctcacaaagctgaataaatgaaaaaccgttgaatagtatttaaatctgtgaactgtatgatacataaattacatctcaataaagctgttacaaaaaatagctatatgctggggcacgtggaagcttcaataagcttcaaggaattgaaataatattttagaaaataaaaagaataataggccaggcacggtggctcatgcctgtaatcccagcagtttgggaggccaaagtgggcggattgcgaggtcaagagatcgagaccttcctggccaacatggtgaaaccccgactctaccaaaaatacaaaaatcagctgggcgtggtggcgcgtacctgtagtcccagctacttgggaggctgagggggaattgcttgaacctgggaggctgaggttggagtgagccgagatcacgccactgcactccagcctgacgacagagcaagactccgtctcaaaaaaaaaaaagaataatagggcaggccaggttcagtggctcacgcctgtaatcccacactttgggaggctgaggcaggtggatcacttgaggtcaggagtttgagaccagcctggccaacatggtgaaatcctgtctctactaaaaataaaaaaaattagctgggtgtggtggcacgtgcctgtggtcccagcgactcaggaggctgaggcaggagaatcacttgagcccaggaggtggaggttgcagcagtgagccaagatcgtaccactgcactccagcctggatgacagagcaagactccatctcaaaaaaaaaaaaagaagaagaataggacaaactgagggaggaagcccttgcaggctctagaagagagcctagggctattggggcaaataatgtccaaacattggttacctggcccatggcccagcgacaagttacacgttccagggaggtgtgtttctttgaccccgtgagctccctgctctatcagggaccctggttgtccaggtctaaaggccattttggatagaatcatggaagccctaagaacaggtttcagcctttctccctcttctccagggaggctgagtggagcaaggataaataagaggccactggccgggcgcggtggctcacgcctgtaatctcatcactttgggaggccaaggcgggtggatcacctgagatcaggagttcgaaaccagcctgaccaacatggtgaaacccagtctctactaaaaatagaaaattagccgggcgtgatggcgcatgcctgtaatcccagctactagggaggctgaggcaggagaatcgtttgaacccgggaggtggcggttgcggtgagccgagatcatgccactgcactccagcctaggcaacaagactgaaactccgtctcaaaaaaaaaagaaagaagaaagagaggccacaaggtgcccggggcttggtgagagagcagtgtctgtgttgcaggggcttgtggagacgtcccagggcattaggtggggaatggaaggtggaaggcacagagcactctttcaagaaatttggcagtgagaggaaatatagcaagaggaaaagagctggagagggagggaggacagagggaatgtttttgtttgtttgcatttagagggcagtagacaggagtatgttttcgtctgagggaaaaggagtgtggagagagagagggactgaaaaatcagaggtagagggaagggaatgaaaaggaaatatgaccaaaaaggatcttttttttttttttttcagatggagtttcgctcttgttgcccaggctggagtgcaatggtgcgttctcgccttcccgcaacctccacttcccaggttcaagcgattctcctgcctcagctgggattacaggcatgcgccaccacgcccggctaattttgtatttttagtagagacggggtttcaccatgttggtcaggctggtttctaactcctgacctcaggtgatctgcctgcctcagcctcccaaactgctgggattataggtgtgagccaccctgcccggcccccaaaaagtatctttttacctcatcagccaggggatttgacagccttatgaaaaaagcaggacctctctttctctgaggcaaggtagggggtagattgagggagccctacctggacggtcttgactgtccctgaaataattacatgtattgaacattcactcactgtgtgccaggcactgttttaagtgttaagcatgtcatatcttgctcatttctcacaaccaccctcaaggtcaatacaatcattgttcccttcatttgacagtagggaaaactcaggcacagagaggactggtaactggcccaaagtaatgcattgagttagcaatgctcttagacataggcagagaggcctctgacctgaggtctgaatgtttgaaggctctgcacgtcatagccacccagaaaacaaacttactaacaaaggaagacttcagctactggccatagtgaagttacagagatgagatttactgtcctgccttgaaaaactagggctccagataaagtagatgaaacaatgatttttcagactttgaacaaaggcaactcaggactatgatctctgagaaaagggaaacaaaaaaggtgagccctataattacctccagctcacggcctgaggcagtttgcaggcttcagtacagggacagggaatccaaacagagtttggagtcttgctgattgagaaaacagagttcaagaggccaacgggctggaatttgcagggcagaacaccagagagcagggagctgagcatatatccaaagatctgcagagatgtcttcttaactctttggctgagtactgatttgcacatgcatgaaaggcaaggcctgggaaagaaccacagaaggcagagcagtgcctggggctcacacagggttgagattagtttctgttcccaaaaggcagaacgaaaagaccttgtaatacatgggatatcaggtacaattctcaaacgggtattgccttagtagaggtctaaattaaccttagactaacagctcctctgtatctgtcctaacaaatcttaaaagtaagcatcagaagtaaaaatctgattccaaatgtgttaagtgtgtggccagaaccaagtctgacactacttaaaggaatgcaacaaaatgcagcctcaaacaatgtaaagttcacaatgttcagagtcctgtcaaactacagatcaattacctcataaacataaatgcaaaaattctaaacaaaatttttgcaaatcaagtccaacaacatataaaaagtataaaacaccatggctaagtggggtttatctcaggaacacaaagttggtttaatgtttgaaaatcaatcaaatttaattcactatattaacaaactaaaaagtgaaaaccatgtgatcattgcaatatatgcagaaaaaacatttggtaaatccagtatttattcctgataaacactctcagaaaactaggaatagaaagaaagttcctcaatctgataaagagcatctaaaaacaaacaaagaaacaaacaaacacaacaaaaggcatacaaagaaatagaaagtgtgaccacaaccaatggaaaaatcaatcagtagaaacagaccctgaaatgaagagatgaagaaattagcagaaaaggacattgaaagagatgacataaatatgactcatatattcaagaaggtagagaaaatcatgaatataataatgaaaatgtgatttccaggaacaaaaatatagcatctcaaataaataaaaaaatacagtatattaaataaaaaatacactggagtggataaaaagcaggttagatactataaaataaattattttgaagatatagcaataaaaaaatctaaataaaatacagagagaaaatgagggtggggggaataaacagagcatcagtaacattggaggtaatatcagacaatctaacacgtgtaattggagacccagatagggtgaggagataaaaaatgatatttgaagaaataatggttaagaattttctaaatttgccaggcacagtggctcgtgcccataatcccagtgctttggaaggcagaggtggacagatc

SEQ ID NO: 2003 - protein, 476 aa, Homo sapiens
MASRIGLRMQLMREQAQQEEQRERMQQQAVMHYMQQQQQQQQQQLGGPPTPAINTPVHFQSPPPVPGEVLKVQSYLENPTSYHLQQSQHQKVREYLSETYGNKFAAHISPAQGSPKPPPAASPGVRAGHVLSSSAGNSAPNSPMAMLHIGSNPERELDDVIDNIMRLDDVLGYINPEMQMPNTLPLSSSHLNVYSSDPQVTASLVGVTSSSCPADLTQKRELTDAESRALAKERQKKDNHNLIERRRRFNINDRIKELGMLIPKANDLDVRWNKGTILKASVDYIRRMQKDLQKSRELENHSRRLEMTNKQLWLRIQELEMQARVHGLPTTSPSGMNMAELAQQVVKQELPSEEGPGEALMLGAEVPDPEPLPALPPQAPLPLPTQPPSPFHHLDFSHSLSFGGREDEGPPGYPEPLAPGHGSPFPSLSKKDLDLMLLDDSLLPLASDPLLSTMSPEASKASSRRSSFSMEEGDVL

SEQ ID NO: 2004 - DNA, 324 bp, Homo sapiens
cagagactcactcccagctagtttgggttggagtgagtctctgcttgtaaactcagaggaatgcctgcccaaactagctgggagttcagaaccatggtggaataaagaaatgtgcatctggtctcttctgttgtttttatttcatatcagattaaatttctttaccatgttggctaagtctaaatattagagatgaggctgtgcctactccctggccagctctgctgatagcctatgatgggttccaatgggaaatgactctttactattaaaagacaaggaaagctctgacttcgtacttctctgatgaatggcaatgtaaat

SEQ ID NO: 2005 - DNA, 12382 bp, Homo sapiens
ggaaatcgaggctgcagtgagctatgactatgccactgcactccagcctaggcgaaagagcgagaccaaaaaagaggaatgactaggtaagaaaattctaggactgacttgggaaggggaagggggcgaaccgcgggggctcacatacccgaagttttcttctccaccattggcacaacacaactgtcggaagaaactgctgcgcacgcgtactaaccccaaggctttagtaggggcgccatcacttccggtagcttgtacttctgcgcgtgcgccacagctttgactcattacgtggcgtttccttggagacaagaaagcttttcgccatgttttataggggcaaaaccacttccggcctcagtgtggaggtgtaaatcttgtgggagccacgaaatgggtcattttaaagatgtggtcacggtgttcttacaagaaatcttattttcctttggtccttgtgaagatgctgtgatcacaaaggcagcccctggagcttctccgggcagaagaggaggtgggctggactgtcaaagaaagtggctggcttccgtgggcaatccgaggttcctagtggccctctgcagaaagctgaactcccagttcccccaggcctccgtcccgcggcggactcctaggcttcctccctccctgtcgccgccagcctctcgctctccccgtcttccgcccgcactctctgggcagggctgcggccaggacccgcccccgcgtcccgcccgaccctccgccaggggtcacttcccctgtccaggtttcagcttccacatgtgtcaagcggctggctcagcccagagtccctgtctcccgcccgccggcccgagccgccgcccctcccccgcctcccgtgcgcccgggacaatcctcgccttgtctgtggcgccggcatctggagctttctgtagcctccggatacgcctttttttcagggcgtagccccagccaagctgctccccgcggcggccgcacagcagcccgagcgccccctttccagagctcccctccggagctgggatccaggcgcgtagcggagatcccaggatcctgggtgctgtctgggcccgctccccaccatgacctcctcggggcctggaccccggttcctgctgctgctgccgctgctgctgccccctgcggcctcagcctccgaccggccccggggccgagacccggtcaacccaggtgagatcccggggaggcccggcacggccgagggggcagaggctggcgtgcctgccagcctggcccggagagggtcggaggctcgaggaggtgtctggcccgtcccccgcccagcgtgctcttgaggctgagtcgcgccaagcccctcgcccatcactaccctgaactggggtttccagcctccctatgcaaagggactcggaattcctgggcaccactcccaccctgccctccttggggtcagagtgttcctgggtgagaagagtttaagaatgggaaggaagaaagggagggaagtcgagtgagagggaggacagcaaagcacgtgaggcccggagctgggcggtggatctcaagtgccatttccctctggtaacagagaagctgctggtgatcactgtggccacagctgaaaccgaggggtacctgcgtttcctgcgctctgcggagttcttcaactacactgtgcgggtgaggagagggaaaggcccctgggagggggtcccagcaggaggggtgggctgaagtctggatgcccaggtccccacggtaagcctggtcaggagttccccccacaactccccaccccttgcctggcacggggcaatcttctccacagaccctgggcctgggagaggagtggcgagggggtgatgtggctcgaacagttggtggaggacagaaggtccggtggttaaagaaggaaatggagaaatacgctgaccgggaggatatgatcatcatgtttgtggataggtaacggggctggggatagggagcggggtaaggatgctgaggttcccagtggacccctgcccatcctccccttcctcacccagctacgacgtgattctggccggcagccccacagagctgctgaagaagttcgtccagagtggcagccgcctgctcttctctgcagagagcttctgctggcccgagtgggggctggcggagcagtaccctgaggtgggcacggggaagcgcttcctcaattctggtggtgagtggcagagtgcccaaggcagaggggccaagagcggtgggacacagagtgttaaaggcgcctgagggctggagacagcctgggggacaggccctgggaccctgggagtctcgaggtcaacactccccctccccgccaggattcatcggttttgccaccaccatccaccaaatcgtgcgccagtggaagtacaaggatgatgacgacgaccagctgttctacacacggctctacctggacccaggactgagggtagggaaggcagaggagtgggcgcatcccgcagctctgtgggagtggaggcctcaggctgaatgggatttggggagcaaagggggttgcaaagagaaaaatgtgtgcctgggcgtggtggctcacgcctgtcatccaagacttttgggaggcttaggcaggaggattgcttgagtccaggaatttaagaccagcctggacaacatagttgagacctcatctctacaaaaaaaaagaaagaaaaaattagccaggcttcatggtgtacgcctgtaatcccagctacttgggaggctgaggtgggaccatcacttgagcccaggagtttgaggatgttttgcaccactgcattccagcctgggtgacagaatgagactctgtctctcacaaaaaaaggaaaaccatggtggctcatgcctataatcccagcactttgggaggctgaggcgggtggatcacctgagattgggagtttgagaccagcctggccaacatggtgaaaccccgtctctactaaaaatacaaaaattagccaggcgtggtgacactctcctgtagtcccagttacttggaaggctgaagcaagagaatcaattaaaccgggaggcagaggttgcagtgagctgagatcgtgccattgcactccagcctaagcaacaaaagcaagagaagaaaaaaagagagagaaaagtgagaaatgatgtcctttccactccttccattttaaccactccatcgcatctcattccatttaggagaaactcagccttaatctggatcataagtctcggatctttcagaacctcaacggggctttaggtgaggaggaagacagccgcaggtgggcgatgcgcagcctctgcagctaggggtcttgagctgggagaggcttctggaggagctgggctgatccaagcccacctctatgtggttttgtcaggcgtctgagtggctggttgtgtaagttgcactgtgctgatggtactaccagaagcaagggaagcaaaaacgtgtctggcatctgttgcacacatgctgtgcctgggcaccgggccagggacttttttttttgagacagagtttcgctctgttgcccgggccggagtgcagtggtccaatcttggctcactgcagcctccacctcccgggttcaagtgattcttctgcctcagcctcccgagtagctgggattacaggcatgcgccaccacgcccagctcattttgtatttttagtagagacagggtttcaccatggtggccaggctagtctcgaactcccaacctcaggtgatccgcctgcctcaacctcccaaagtgctgggattacaggcatgagccactgtgcccggtctacttctgtgattccatttaacaaagggaaggtccctggttatccttcttgtacagatgaggaaaacagcttgtggaggggttggtgacttgcctcaggggatggggagaacggggagagagagaggccaggcacggtgcctcacgcctgtaatcccaacattttgggaggcccaggcaggaggatcacttgaggtcaggagtttgagaccagcctggccaacatggcgaaaacccgtctctactaaaaaaaagtacaaaaatgagctgggcgtggtggcgggtgcctgtaatcccagctattcagaaggctgaggcaggagaatcactggaacccgggaggcagagcttgcagtgagccgagattgcgccactgcactcctgcctgggtgacagagtgagattccttctcaaaaaaaaaaaaggccaggtgcgacagctcacatctgtaatcccagcactttggaaggctgaggcgggcagatcatgaagtcagaagtttgagaccagcctggctgacatagtgaaacccagtctctactaaatatacaaaaattaggctgggtgtggtggctcatgcttgtaatcctagcactttgggaggccgaggcaggtggatcacctgaggtcaggagttcaaggccagcctggtcgacatggtgaaaccctgtctctactaaaaacacaaaaattagccgggcatggtggtgcgcgcctgtaatcctggctacccgggaggctgaggaaggagaatcgcttgaaccctggaggtggaagttgcaatgagccaagatcgtgccactgcactccagcctgcgtgttgggagtgagactccatctcagcataaaaaacaaaaaatacaaatacaaaaattagccaggtgtagtggcatgtgcccatagtctcagctacctgaaaggctgaggcaagagaatcttttgaactcaggaggcagaggttgcagtgagccgagaccacgccattgcactccagcctgggtgacagagtgagactccatctcaaaaaataaaaataaaaaaaaaaaaaaacaaggagagagagaatatgaggaggggtagggatgctgaggctcctactggcctcccgctcagctcaccctccccttcctcgcccagctgcggtgtgatcacgcaggtagtaggcagtggagctctctgggccagcagcctggtcagaacccaaaggttcctgcccacaacgagccacactccaggatagccctggtgtccctttattccctggagaatttgggaccccatatttagaagaatgtgttgcttggtagctcccagagaaagggggtctgaagcctggcctttttcttccccagatgaagtggttttaaagtttgatcggaaccgtgtgcgtatccggaacgtggcctacgacacgctccccattgtggtccatggaaacggtcccactaaggtgccaccagtggtctcaacccccgccccgccctgccccaacccccaggcacctccaacccttctgagaagctggcccttcccagcccccatatcagaggtgcctgacccccacctccacccctggaggcctcagccactcagcctcagtctgtccccaacagctgcagctcaactacctgggaaactacgtccccaatggctggactcctgagggaggctgtggcttctgcaaccaggaccggaggacactcccgggggggcaggtgaggtgggggtgccagggaggggcacgagagggcagcgtgctgagcaggaggtacaaggacagcggactggggggcggtgggggcatcgctcctgggtccctgcacctgtcagggtggaggttgggtgggggcagcagggaagtccgggcttctctctgagtccctgcgtgttgcatcttccagcctcccccccgggtgtttctggccgtgtttgtggaacagcctactccgtttctgccccgcttcctgcagcggctgctactcctggactatccccccgacagggtcacccttttcctgcacaacaacgtgagactcccctgttggagcctctcctgagggaccctttccctgccctgatcagaactctcgtgcccccacccccatctccttcctgcacccccatccctcaggtgccgcctccctgccctctgagcccatccccctatgtcttcccctcccaggaggtcttccatgaaccccacatcgctgactcctggccgcagctccaggaccacttctcagctgtgaagctcgtggggccggaggaggctctgagcccaggcgaggccagggacatggccatgtgagcgggtgcttgcggggaggagagggtgggatgaggctgtagggtcaggggtgctgccacctgctgcctggcccttgcctcacctgtcacccatccagcccctcctgggcctccccattcgcatccttgcagcccccatgctgtcactcctgcccttgccagctcacccagacagcagagagcctggggaaggaaggatagacactgcctccctcctcttctcctgggggcatgggccagttaccccatccacaccgcctccccacctgccgccgtctcagctcgcctctcacctccagggacctgtgtcggcaggaccccgagtgtgagttctacttcagcctggacgccgacgctgtcctcaccaacctgcagaccctgcgtatcctcattgaggagaacaggtggcttaccccctctccccgcagccggagggcaccccaacaggccccgggaaccccactcctgccctgggcaccgggctccccaggcctgctcccgtctgcccagccctcacccccacctgtccgcaggaaggtgatcgcccccatgctgtcccgccacggcaagctgtggtccaacttctggggcgccctgagccccgatgagtactacgcccgctccgaggactacgtggagctggtgcagcggaagcgagtgtgagtcccgccagcctgcagccccccgcctcctccgacccggggcccaggtagacccaagccccctactctcaggggtttggagtggtcaccagtcagaggtgccatgaggctggctgcagtggctcacacttttgatgccaccactttgggaggctgaggtaggaggactgcttgagcctgggagtttaagatcagcctgagcaacgtagcaagagcctatctctacaaaaaacttaaaatattagctgggcacggtggtgcgtgcctgtggtcccagctactacggaggctgaggtgggagaatcacttgaacttgggaggttgaggctgcagtgagccatgtttccaccactgcactccagcctggaaacagagggagaccctttctcaagaaaataaaaaacaagggccggccgcggtggctgacgcctgtaatcccagcactttggaaggcagaggcaggtggattactcgaggtcaggagttcgagaccagcctggccaacatggtgaaaccccatctctaccaaaaatacaaaaatcagccgggcatggtggctggcacctctaatcccagctatttgggaggctaaggtgggagaattgcttgaacctgggaggtggaggttgcagtgagccaagatcacaccactgcattccagcctgggtgacagagcaagactccgtctcaaaaaccaaaaacaagaaacaaaaaagaagtgccacagcttggggtaggaactgaccgcattttgggaggtggggtggttgggaccagcagtgcttgacaagggacatgcaggggccttatgttcagggactgggataccctgagggaagaaggacttcccgggatgagctgggcagaatttggggggctgtcctcccagctgaccgcggtgtcggtgcctccaggggtgtgtggaatgtaccatacatctcccaggcctatgtgatccggggtgataccctgcggatggagctgccccagagggatgtgttctcgggcagtgacacagacccggacatggccttctgtaagagctttcgagacaaggtgagcgcgggtgcacggtctggcctgggggcagtcccccagactccaggcatcgcctgcatcacggacacccccaccccactacagggcatcttcctccatctgagcaatcagcatgaatttggccggctcctggccacttccagatacgacacggagcacctgcaccccgacctctggcagatcttcgacaaccccgtcgtgagtggggaccccacgcccagagcacacaggttccccgccttgtgctaaggaagacaccaaacgtgatggctgctgccagcgcaggacactgagtgggagggggcggtcccctgggggctgggagcgagggggcacagatctgatgtgccccccaccctctcacaggactggaaggagcagtacatccacgagaactacagccgggccctggaaggggaaggaatcgtggagcaggtgagcccacgcagcctccccacccaccccctgccctcatggccatcgcctcttgggggcccccgcctggattcaaagttttcacactgagttccccagagatctgagggttttctgttcagacaagatgaaggcagaggccgaacagaaaggactcttgcccccaaagccagcattgatcagacagcctcttctcctgtatattgggtatactggtgttatgcttgaaatcacatcttaaaagaagaatggggctgggctcagtggctcatgcctgtaatcccagcactttgggaggccaaggtgggtggatcggttgaggccagaagtccaagaccagcctgggcaacatagcgagaatctgtctctacaacaacaacaaaaaaattaaataagaaatgaggccaggagtggtgctcatgcttgtaatcccagtacattgagaggccgaggcaggcagatcacctgaggtcaggagttcgagaccagcctggccaacatggcaaatcctgtctctaccaaaaaaaaaaaaaaaaaaaacacaaaaattagtcaggtgtgatggcgtgcacctgtagtcccagctactcgggaggctgaggtgggagaatcgcttgaacctgggaggcagaggttgcagtgagccaagatcacgccactgcactccaccttgggtgacacagcgagaccctgtctcaaaaaaaaaagaaaagaaaaaattagcttggcatggtggcatgtgcctgtagttccagctacttgggagtctgaggcgggaggatcgcttgagcccagaaggtcgaggctgtagtgagctatgattgtgccactgcactccagcctggttgacagagcaataccctatctcaaaaaaaaaaaaaagaggtatgcactgttacggaagtttggaaaccactgtcccagcacgaggggctccaggaccctctgccacctctcctgtgccagaaaccggtcctcagccttgccactccctcagcccctacctggcgggtccccggctgctctcacaaagccttccctgctcctccctgccccttcccattctgcctgctgcctgtccccttccccgttctgcggcgtcagctagccctgttctccctcgccccatcctcagccatgcccggacgtgtactggttcccactgctgtcagaacaaatgtgtgatgagctggtggcagagatggagcactacggccagtggtcaggcggccggcatgaggtaagggcctgggcgaggagggcagaggccttcccagaggaggaggtgcaggatctggtaaacaaacaatggaatcaggaaaatgggagcaaagaggggttcccaggggggaggcagaccctggggtcacaactgcattcattcatgtattcaagaaatatttactgctgggcacagtggctcatgcctgtaatcctagcactttgggaggctgaggcgggaggattgctcgagcagggggagtttgaggccagcctgggcaacatagcgagaccctgtctctacaaaaaatttaaaaattagccgagtttgggccaggtgcggtggctcacgcctgtaatcccagcactttgggaggccgaggcaggtggatcacctggggtcaggagttcgagaccagcctgaccaacatggagaaaccccatctctactaaaaacacaaaattagccgggcatggtggcgggcgcctgtagtcccagctactcgggagctgaggtagaattgcttgaacccgggaggcagaggttgcagtgagccaagattgaactccaggctgggcaacaagagtgaaactccatctcagaaaaaccaacaaattagccgggcatggtggcatgtcccagctattcaggaggctgaggcagaaggatcacttgagccccagagttagaggctgcagtgagctatgatcatgccgcagtactccagcctgggtgacagagcaagactctgtctctaaaaaaagagaaaaggaaatcattcctgggccactgtcctagactgcactgcaggaatgcctcatgccggtcgagctctgccctgctgtgagcagcagccaccacacagcttctaaggctgcgatgagcagcctgggtgcaatagaagccacggggaagccttgacccagacttgggaggagtagggagcttcacaggacaggtgacatcttagctgagacttgaagggccgggagcagtgagtcaggccgagaagtagcaaagaagactgttctgcacagaggaacacaggtgtgaaggctggaggacgggaggaaggaggctggactgccctggggtggggagcgccatggctggaggggcgggtggctcagtgcccgccgcccccaggattcaaggctggctggaggctacgagaatgtgcccaccgtggacatccacatgaagcaggtggggtacgaggaccagtggctgcagctgctgcggacgtatgtgggccccatgaccgagagcctgtttcccggttaccacaccaaggtgcgctgcccacctgccagctgcctccccaccttccccaccccagtcccggacaggaagtctccacgcagacccctttcggccccggcagcatttgggctccatgcattttagttcccaggggaatgagacgctgcaggaggcaccccaggggagggagggcgccaggctgagacccaaggtgaggcttggccctaatttaatgccagtgagcagcgagagcctcctacgcaggggtcccgccgcccctcccctcccctccctggacagggaccgtcatctccctgaagacaccctgcgatggccgggcgtggtggctcacacatgtaatcccagcactttgcgaggctgaggtgggtggatcacctgaggtcaggagttcaagaccagcctggccaagatggtgaaacctcgtctctactaaaaatacaaaaattagccgggtgtggtggcaggtgcctataatcccagctactcgggaggctgaggcatgagaattgcttgaaaccgggaggcagaggttgcagtgagccaagatcgagccaagatcgcaccactgcactccagcctgagtgacagagcgagactatctcaaaagaataataataatacaaaataaaagaccccctgcgcccgcagctgtccctgcagcctcttccctcctctcccccaggcgcgggcggtgatgaactttgtggttcgctaccggccagacgagcagccgtctctgcggccacaccacgactcatccaccttcaccctcaacgttgccctcaaccacaagggcctggactatgaggtgcgccccagtcacactacccacccacgcttcacctcaggaccctcgggtccccacctagagcccctgcgtgcatcccccagctcccctccctgcccatttcccagtgactttgtgggtatcagctcctggatcgcttctgggcaggcggcctctgcttcctcctggatcttcctgtctgcaggcaccccagcctccggtgtctgccatatctgccatctcccttgtcaccccggtctgctgcaccgtgccccccggtctggccgccctgccccgtgtatctgcctgctccccaggccccacgtctgctcactccatgtttcctttcccttctctttccagggaggtggctgccgcttcctgcgctacgactgtgtgatctcctccccgaggaagggctgggcactcctgcaccccggccgcctcacccactaccacgaggggctgccaacgacctggggcacacgctacatcatggtgtcctttgtcgacccctgacactcaaccactctgccaaacctgccctgccattgtgcctttttagggggcctggcccccgtcctgggagttgggggatgggtctctctgtctccccacttcctgagttcatgttccgcgtgcctgaactgaatatgtcaccttgctcccaagacacggccctctcaggaagctcccggagtccccgcctctctcctccgcccacaggggttcgtgggcacagggcttctggggactccccgcgtgataaattattaatgttccgcagtctcactctgaataaaggacagtttgtaag

SEQ ID NO: 2006 - protein, 738 aa, Homo sapiens
MTSSGPGPRFLLLLPLLLPPAASASDRPRGRDPVNPEKLLVITVATAETEGYLRFLRSAEFFNYTVRTLGLGEEWRGGDVARTVGGGQKVRWLKKEMEKYADREDMIIMFVDSYDVILAGSPTELLKKFVQSGSRLLFSAESFCWPEWGLAEQYPEVGTGKRFLNSGGFIGFATTIHQIVRQWKYKDDDDDQLFYTRLYLDPGLREKLSLNLDHKSRIFQNLNGALDEVVLKFDRNRVRIRNVAYDTLPIVVHGNGPTKLQLNYLGNYVPNGWTPEGGCGFCNQDRRTLPGGQPPPRVFLAVFVEQPTPFLPRFLQRLLLLDYPPDRVTLFLHNNEVFHEPHIADSWPQLQDHFSAVKLVGPEEALSPGEARDMAMDLCRQDPECEFYFSLDADAVLTNLQTLRILIEENRKVIAPMLSRHGKLWSNFWGALSPDEYYARSEDYVELVQRKRVGVWNVPYISQAYVIRGDTLRMELPQRDVFSGSDTDPDMAFCKSFRDKGIFLHLSNQHEFGRLLATSRYDTEHLHPDLWQIFDNPVDWKEQYIHENYSRALEGEGIVEQPCPDVYWFPLLSEQMCDELVAEMEHYGQWSGGRHEDSRLAGGYENVPTVDIHMKQVGYEDQWLQLLRTYVGPMTESLFPGYHTKARAVMNFVVRYRPDEQPSLRPHHDSSTFTLNVALNHKGLDYEGGGCRFLRYDCVISSPRKGWALLHPGRLTHYHEGLPTTWGTRYIMVSFVDP

SEQ ID NO: 2007 - DNA, 3386 bp, Homo sapiens
gccgcggccagctccggcgggcagggggggcgctggagcgcagcgcagcgcagccccatcagtccgcaaagcggaccgagctggaagtcgagcgctgccgcgggaggcgggcgatgggggcaggtgccaccggccgcgccatggacgggccgcgcctgctgctgttgctgcttctgggggtgtcccttggaggtgccaaggaggcatgccccacaggcctgtacacacacagcggtgagtgctgcaaagcctgcaacctgggcgagggtgtggcccagccttgtggagccaaccagaccgtgtgtgagccctgcctggacagcgtgacgttctccgacgtggtgagcgcgaccgagccgtgcaagccgtgcaccgagtgcgtggggctccagagcatgtcggcgccgtgcgtggaggccgacgacgccgtgtgccgctgcgcctacggctactaccaggatgagacgactgggcgctgcgaggcgtgccgcgtgtgcgaggcgggctcgggcctcgtgttctcctgccaggacaagcagaacaccgtgtgcgaggagtgccccgacggcacgtattccgacgaggccaaccacgtggacccgtgcctgccctgcaccgtgtgcgaggacaccgagcgccagctccgcgagtgcacacgctgggccgacgccgagtgcgaggagatccctggccgttggattacacggtccacacccccagagggctcggacagcacagcccccagcacccaggagcctgaggcacctccagaacaagacctcatagccagcacggtggcaggtgtggtgaccacagtgatgggcagctcccagcccgtggtgacccgaggcaccaccgacaacctcatccctgtctattgctccatcctggctgctgtggttgtgggccttgtggcctacatagccttcaagaggtggaacagctgcaagcagaacaagcaaggagccaacagccggccagtgaaccagacgcccccaccagagggagaaaaactccacagcgacagtggcatctccgtggacagccagagcctgcatgaccagcagccccacacgcagacagcctcgggccaggccctcaagggtgacggaggcctctacagcagcctgcccccagccaagcgggaggaggtggagaagcttctcaacggctctgcgggggacacctggcggcacctggcgggcgagctgggctaccagcccgagcacatagactcctttacccatgaggcctgccccgttcgcgccctgcttgcaagctgggccacccaggacagcgccacactggacgccctcctggccgccctgcgccgcatccagcgagccgacctcgtggagagtctgtgcagtgagtccactgccacatccccggtgtgagcccaaccggggagcccccgccccgccccacattccgacaaccgatgctccagccaacccctgtggagcccgcacccccaccctttggggggggcccgcctggcagaactgagctcctctgggcaggacctcagagtccaggccccaaaaccacagccctgtcagtgcagcccgtgtggccccttcacttctgaccacacttcctgtccagagagagaagtgcccctgctgcctccccaaccctgcccctgccccgtcaccatctcaggccacctgcccccttctcccacactgctaggtgggccagcccctcccaccacagcaggtgtcatatatggggggccaacaccagggatggtactagggggaagtgacaaggccccagagactcagagggaggaatcgaggaaccagagccatggactctacactgtgaacttggggaacaagggtggcatcccagtggcctcaaccctccctcagcccctcttgccccccaccccagcctaagatgaagaggatcggaggcttgtcagagctgggaggggttttcgaagctcagcccacccccctcattttggatataggtcagtgaggcccagggagaggccatgattcgcccaaagccagacagcaacggggaggccaagtgcaggctggcaccgccttctctaaatgaggggcctcaggtttgcctgagggcgaggggagggtggcaggtgaccttctgggaaatggcttgaagccaagtcagctttgccttccacgctgtctccagacccccaccccttccccactgcctgcccacccgtggagatgggatgcttgcctagggcctggtccatgatggagtcaggtttggggttcgtggaaagggtgctgcttccctctgcctgtccctctcaggcatgcctgtgtgacatcagtggcatggctccagtctgctgccctccatcccgacatggacccggagctaacactggcccctagaatcagcctaggggtcagggaccaaggacccctcaccttgcaacacacagacacacgcacacacacacacaggaggagaaatctcacttttctccatgagttttttctcttgggctgagactggatactgcccggggcagctgccagagaagcatcggagggaattgaggtctgctcggccgtcttcactcgcccccgggtttggcgggccaaggactgccgaccgaggctggagctggcgtctgtcttcaagggcttacacgtggaggaatgctcccccatcctccccttccctgcaaacatggggttggctgggcccagaaggttgcgatgaagaaaagcgggccagtgtgggaatgcggcaagaaggaattgacttcgactgtgacctgtggggatttctcccagctctagacaaccctgcaaaggactgttttttcctgagcttggccagaagggggccatgaggcctcagtggactttccaccccctccctggcctgttctgttttgcctgaagttggagtgagtgtggctcccctctatttagcatgacaagccccaggcaggctgtgcgctgacaaccaccgctccccagcccagggttcccccagccctgtggaagggactaggagcactgtagtaaatggcaattctttgacctcaacctgtgatgaggggaggaaactcacctgctggcccctcacctgggcacctggggagtgggacagagtctgggtgtatttattttcctccccagcaggtggggagggggtttggtggcttgcaagtatgttttagcatgtgtttggttctggggcccctttttactccccttgagctgagatggaacccttttggcccccagctgggggccatgagctccagacccccagcaaccctcctatcacctcccctccttgcctcctgtgtaatcatttcttgggccctcctgaaacttacacacaaaacgttaagtgatgaacattaaatagcaaag

SEQ ID NO: 2008 - protein, 427 aa, Homo sapiens
MGAGATGRAMDGPRLLLLLLLGVSLGGAKEACPTGLYTHSGECCKACNLGEGVAQPCGANQTVCEPCLDSVTFSDVVSATEPCKPCTECVGLQSMSAPCVEADDAVCRCAYGYYQDETTGRCEACRVCEAGSGLVFSCQDKQNTVCEECPDGTYSDEANHVDPCLPCTVCEDTERQLRECTRWADAECEEIPGRWITRSTPPEGSDSTAPSTQEPEAPPEQDLIASTVAGVVTTVMGSSQPVVTRGTTDNLIPVYCSILAAVVVGLVAYIAFKRWNSCKQNKQGANSRPVNQTPPPEGEKLHSDSGISVDSQSLHDQQPHTQTASGQALKGDGGLYSSLPPAKREEVEKLLNGSAGDTWRHLAGELGYQPEHIDSFTHEACPVRALLASWATQDSATLDALLAALRRIQRADLVESLCSESTATSPV

SEQ ID NO: 2009 - DNA, 1557 bp, Homo sapiens
ctctctctctctctcctgctgcattgtgaagaaactgcttgcttccctctcaccctctgcagtttcctgaggcctccccagccatgcggaacgctgtagaccaagacctggaattaacacatcagaagattctatggggaaacccatttaaaaataggatgcatttttttcttttctgcacagggagaaagtttaagctctcctcactatgagttttcaagtataaaagactttttcttccacgattttgagaacaactgaggactcttgtgaccaggacaacagggaagcttgcagcaagatagctccaggttggattcatgcttcgcaccccaagggctgccagccagagaggaggagaagcaatcactcctgcagtttctgaacactacacagacgccaggtagcttcttcaggagaacagccctctgaggaggcaggaagaggaggcttatctttcagcagccggagctgctgagatctctgggcagattaagctctctctaatggatgggctccagcctggcacattcagtggagagggatccactcatccatcatcaacataatatggtcctccctgcacttcacagtgtcctcttgctattgaaaaggcttttttgccttctcaagtttctttgtcaacagtctacaggaagaagctcaggccgccaccggcagaggtgaatgcaagctcacgttttatttctgactgcttaatcattgcctcgatcactgctcaagctctgcctttgtttccaaaggttacctgtgggaaaacttctttttctatgctgaaattaatagggaggcaaagatgagtccactgataagcagagccttaaaactcacatagagaaacaactttgctggagtgtgtgtgagtgaaccactaaggaatcagatagtgtgatggcagttatcattgcaggttaagacatttctacaaatatttcgacatctccatatactcactcctttcccccctgagtggagagactcagctacccagagaggaagctcaaaaaaaacagaagcttcaaacaaacaaccaaccaaaaaaaaaaaaaactgtgggttcatcagaggtggtagggaagacaaaaacatgggaggagcagctgggcacggtggctcaagcctgtaatcccagcactttgcgaggctgaggtgggtggatcacctgaggtcaggagttcgagaccagcctggccaacatggtgaaaccccatctctactaaaaatacaaaaaattagccgggcgttgtggtacgcacctgtaatcccagctactccggaggctgaggcagcagaatcgcttgaacccaggaggcagaggttgcaacgagccaagatcgcaccattgcactccagcctgggcaacaagagcgaaactccatctaaaaaaaacaaacaagcaaacaaacaaaaaacacgggaggagcaataaaaaggaatccatgctttgatttttttttttagtgagaggaagggaaggctgctgcctctcacttctccctgttttgttgttcttttaagtagcatgtgtcactctgt

SEQ ID NO: 2010 - DNA, 656 bp, Homo sapiens
aaggctaggtagcgaggctgggtggtgcggcccagccccggccgtcccggcgtcgcttcggagcgcggcggcagctgactgcgccttcacgatccgctgggacccgcgagccccgccgccgttatgaacatccgcaatgcgaggccagaggacctaatgaacatgcagcactgcaacctcctctgcctgcccgagaactaccagatgaaatactacttctaccatggcctttcctggccccagctctcttacattgctgaggacgagaatgggaagattgtggggtatgtcctggccaaaatggaagaggacccagatgatgtgccccatggacatatcacctcattggctgtgaagcgttcccaccggcgcctcggtctggctcagaaactgatggaccaggcctctcgagccatgatagagaacttcaatgccaaatatgtctccctgcatgtcaggaagagtaaccgggccgccctgcacctctattccaacaccctcaactttcagatcagtgaagtggagcccaaatactatgcagatggggaggacgcctatgccatgaagcgggacctcactcagatggccgacgagctgaggcggcacctggagctgaaagagaagggcaggcacgtggtgctgggtgccatcgagaa

SEQ ID NO: 2011 - DNA, 6662 bp, Homo sapiens
ggcggttaagtcctgtacctaggaaagagggcgagctctggggcgctctccggtgtcatgaggagcttcaaaagagtcaactttgggactctgctaagcagccagaaggaggctgaagagttgctgcccgacttgaaggtgggggtgctgcctggctcgggatacacctggctttccaaactgagctgttttgtgtttgccttttgaagagatggataagagttcctgtccaaccctccagctggttttcccagcagccgatctgatgctgagaggagacaagcttgtgatgccatcctgagggcttgcaaccagcagctgactgctaagctagcttgccctaggcatctggggagcctgctggagctggcagagctggcctgtgatggctacttagtgtctaccccacagcgtcctcccctctacctggaacgaattctctttgtcttactgcggaatgctgctgcacaaggaagcccagaggccacactccgccttgctcagcccctccatgcctgcttggtgcagtgctctcgcgaggctgctccccaggactatgaggccgtggctcggggcagcttttctctgctttggaagggggcagaagccctgttggaacggcgagctgcatttgcagctcggctgaaggccttgagcttcctagtactcttggaggatgaaagtaccccttgtgaggttcctcactttgcttctccaacagcctgtcgagcggtagctgcccatcagctatttgatgccagtggccatggtctaaatgaagcagatgctgatttcctagatgacctgctctccaggcacgtgatcagagccttggtgggtgagagagggagctcttctgggcttctttctccccagagggccctctgcctcttggagctcaccttggaacactgccgtcgcttttgctggagccgccaccatgacaaagccatcagcgcagtggagaaggctcacagttacctaaggaacaccaatctagcccctagccttcagctatgtcagctgggggttaagctgctgcaggtcggggaggaaggacctcaggcagtggccaagcttctgatcaaggcatcagctgtcctgagcaagagtatggaggcaccatcacccccacttcgggcattgtatgagagctgccagttcttcctttcaggcctggaacgaggcaccaagaggcgctatagacttgatgccattctgagcctctttgcttttcttggagggtactgctctcttctgcagcagctgcgggatgatggtgtgtatgggggctcctccaagcaacagcagtcttttcttcagatgtactttcagggacttcacctctacactgtggtggtttatgactttgcccaaggctgtcagatagttgatttggctgacctgacccaactagtggacagttgtaaatctaccgttgtctggatgctggaggccttagagggcctgtcgggccaagagctgacggaccacatggggatgaccgcttcttacaccagtaatttggcctacagcttctatagtcacaagctctatgccgaggcctgtgccatctctgagccgctctgtcagcacctgggtttggtgaagccaggcacttatcccgaggtgcctcctgagaagttgcacaggtgcttccggctacaagtagagagtttgaagaaactgggtaaacaggcccagggctgcaagatggtgattttgtggctggcagccctgcaaccctgtagccctgaacacatggctgagccagtcactttctgggttcgggtcaagatggatgcggccagggctggagacaaggagctacagctaaagactctgcgagacagcctcagtggctgggacccggagaccctggccctcctgctgagggaggagctgcaggcctacaaggcggtgcgggccgacactggacaggaacgcttcaacatcatctgtgacctcctggagctgagccccgaggagacaccagccggggcctgggcacgagccacccacctggtagaactggctcaggtgctctgctaccacgactttacgcagcagaccaactgctctgctctggatgctatccgggaagccctgcagcttctggactctgtgaggcctgaggcccaggccagagatcagcttctggacgataaagcacaggccttgctgtggctttacatctgtactctggaagccaaaatacaggaaggtatcgagcgggatcggagagcccaggcccctggtaacttggaggaatttgaagtcaatgacctgaactatgaagataaactccaggaagatcgtttcctatacagtaacattgccttcaacctggctgcagatgctgctcagtccaaatgcctggaccaagccctggccctgtggaaggagctgcttacaaaggggcaggccccagctgtacggtgtctccagcagacagcagcctcactgcagatcctagcagccctctaccagctggtggcaaagcccatgcaggctctggaggtcctcctgctgctacggattgtctctgagagactgaaggaccactcgaaggcagctggctcctcctgccacatcacccagctcctcctgaccctcggctgtcccagctatgcccagttacacctggaagaggcagcatcgagcctgaagcatctcgatcagactactgacacatacctgctcctttccctgacctgtgatctgcttcgaagtcaactctactggactcaccagaaggtgaccaagggtgtctctctgctgctgtctgtgcttcgggatcctgccctccagaagtcctccaaggcttggtacttgctgcgtgtccaggtcctgcagctggtggcagcttaccttagcctcccgtcaaacaacctctcacactccctgtgggagcagctctgtgcccaaggctggcagacacctgagatagctctcatagactcccataagctcctccgaagcatcatcctcctgctgatgggcagtgacattctctcaactcagaaagcagctgtggagacatcgtttttggactatggtgaaaatctggtacaaaaatggcaggttctttcagaggtgctgagctgctcagagaagctggtctgccacctgggccgcctgggtagtgtgagtgaagccaaggccttttgcttggaggccctaaaacttacaacaaagctgcagataccacgccagtgtgccctgttcctggtgctgaagggcgagctggagctggcccgcaatgacattgatctctgtcagtcggacctgcagcaggttctgttcttgcttgagtcttgcacagagtttggtggggtgactcagcacctggactctgtgaagaaggtccacctgcagaaggggaagcagcaggcccaggtcccctgtcctccacagctcccagaggaggagctcttcctaagaggccctgctctagagctggtggccactgtggccaaggagcctggccccatagcaccttctacaaactcctccccagtcttgaaaaccaagccccagcccatacccaacttcctgtcccattcacccacctgtgactgctcgctctgcgccagccctgtcctcacagcagtctgtctgcgctgggtattggtcacggcaggggtgaggctggccatgggccaccaagcccagggtctggatctgctgcaggtcgtgctgaagggctgtcctgaagccgctgagcgcctcacccaagctctccaagcttccctgaatcataaaacacccccctccttggttccaagcctcttggatgagatcttggctcaagcatacacactgttggcactggagggcctgaaccagccatcaaacgagagcctgcagaaggttctacagtcagggctgaagtttgtagcagcacggataccccacctagagccctggcgagccagcctgctcttgatttgggccctcacaaaactaggtggcctcagctgctgtactacccaactttttgcaagctcctggggctggcagccaccattaataaaaagtgtccctggctcagagccctctaagactcagggccaaaaacgttctggacgagggcgccaaaagttagcctctgctcccctgagcctcaataatacctctcagaaaggtctggaaggtagaggactgccctgcacacctaaacccccagaccggatcaggcaagctggccctcatgtccccttcacggtgtttgaggaagtctgccctacagagagcaagcctgaagtaccccaggcccccagggtacaacagagagtccagacgcgcctcaaggtgaacttcagtgatgacagtgacttggaagaccctgtctcagctgaggcctggctggcagaggagcctaagagacggggcactgcttcccggggccgggggcgagcaaggaagggcctgagcctaaagacggatgccgtggttgccccaggtagtgcccctgggaaccctggcctgaatggcaggagccggagggccaagaaggtggcatcaagacattgtgaggagcggcgtccccagagggccagtgaccaggccaggcctggccctgagatcatgaggaccatccctgaggaagaactgactgacaactggagaaaaatgagctttgagatcctcaggggctctgacggggaagactcagcctcaggtgggaagactccagctccgggccctgaggcagcttctggagaatgggagctgctgaggctggattccagcaagaagaagctgcccagcccatgcccagacaaggagagtgacaaggaccttggtcctcggctccagctcccctcagcccccgtagccactggtctttctaccctggactccatctgtgactccctgagtgttgctttccggggcattagtcactgtcctcctagtgggctctatgcccacctctgccgcttcctggccttgtgcctgggccaccgggatccttatgccactgctttccttgtcaccgagtctgtctccatcacctgtcgccaccagctgctcacccacctccacagacagctcagcaaggcccagaagcaccgaggatcacttgaaatagcagaccagctgcaggggctgagccttcaggagatgcctggagatgtccccctggcccgcatccagcgcctcttttccttcagggctttggaatctggccacttcccccagcctgaaaaggagagtttccaggagcgcctggctctgatccccagtggggtgactgtgtgtgtgttggccctggccaccctccagcccggaaccgtgggcaacaccctcctgctgacccggctggaaaaggacagtcccccagtcagtgtgcagattcccactggccagaacaagcttcatctgcgttcagtcctgaatgagtttgatgccatccagaaggcacagaaagagaacagcagctgtactgacaagcgagaatggtggacagggcggctggcactggaccacaggatggaggttctcatcgcttccctagagaagtctgtgctgggctgctggaaggggctgctgctgccgtccagtgaggagcccggccctgcccaggaggcctcccgcctacaggagctgctacaggactgtggctggaaatatcctgaccgcactctgctgaaaatcatgctcagtggtgccggtgccctcacccctcaggacattcaggccctggcctacgggctgtgcccaacccagccagagcgagcccaggagctcctgaatgaggcagtaggacgtctacagggcctgacagtaccaagcaatagccaccttgtcttggtcctagacaaggacttgcagaagctgccgtgggaaagcatgcccagcctccaagcactgcctgtcacccggctgccctccttccgcttcctactcagctactccatcatcaaagagtatggggcctcgccagtgctgagtcaaggggtggatccacgaagtaccttctatgtcctgaaccctcacaataacctgtcaagcacagaggagcaatttcgagccaatttcagcagtgaagctggctggagaggagtggttggggaggtgccaagacctgaacaggtgcaggaagccctgacaaagcatgatttgtatatctatgcagggcatggggctggtgcccgcttccttgatgggcaggctgtcctgcggctgagctgtcgggcagtggccctgctgtttggctgtagcagtgcggccctggctgtgcatggaaacctggagggggctggcatcgtgctcaagtacatcatggctggttgccccttgtttctgggtaatctctgggatgtgactgaccgcgacattgaccgctacacggaagctctgctgcaaggctggcttggagcaggcccaggggccccccttctctactatgtaaaccaggcccgccaagctccccgactcaagtatcttattggggctgcacctatagcctatggcttgcctgtctctctgcggtaaccccatggagctgtcttattgatgctagaagcctcataactgttctacctccaaggttagatttaatccttaggataactcttttaaagtgattttccccagtgttttatatgaaacatttccttttgatttaacctcagtataataaagatacatcattt

SEQ ID NO: 2012 - protein, 1795 aa, Homo sapiens
MEAPSPPLRALYESCQFFLSGLERGTKRRYRLDAILSLFAFLGGYCSLLQQLRDDGVYGGSSKQQQSFLQMYFQGLHLYTVVVYDFAQGCQIVDLADLTQLVDSCKSTVVWMLEALEGLSGQELTDHMGMTASYTSNLAYSFYSHKLYAEACAISEPLCQHLGLVKPGTYPEVPPEKLHRCFRLQVESLKKLGKQAQGCKMVILWLAALQPCSPEHMAEPVTFWVRVKMDAARAGDKELQLKTLRDSLSGWDPETLALLLREELQAYKAVRADTGQERFNIICDLLELSPEETPAGAWARATHLVELAQVLCYHDFTQQTNCSALDAIREALQLLDSVRPEAQARDQLLDDKAQALLWLYICTLEAKIQEGIERDRRAQAPGNLEEFEVNDLNYEDKLQEDRFLYSNIAFNLAADAAQSKCLDQALALWKELLTKGQAPAVRCLQQTAASLQILAALYQLVAKPMQALEVLLLLRIVSERLKDHSKAAGSSCHITQLLLTLGCPSYAQLHLEEAASSLKHLDQTTDTYLLLSLTCDLLRSQLYWTHQKVTKGVSLLLSVLRDPALQKSSKAWYLLRVQVLQLVAAYLSLPSNNLSHSLWEQLCAQGWQTPEIALIDSHKLLRSIILLLMGSDILSTQKAAVETSFLDYGENLVQKWQVLSEVLSCSEKLVCHLGRLGSVSEAKAFCLEALKLTTKLQIPRQCALFLVLKGELELARNDIDLCQSDLQQVLFLLESCTEFGGVTQHLDSVKKVHLQKGKQQAQVPCPPQLPEEELFLRGPALELVATVAKEPGPIAPSTNSSPVLKTKPQPIPNFLSHSPTCDCSLCASPVLTAVCLRWVLVTAGVRLAMGHQAQGLDLLQVVLKGCPEAAERLTQALQASLNHKTPPSLVPSLLDEILAQAYTLLALEGLNQPSNESLQKVLQSGLKFVAARIPHLEPWRASLLLIWALTKLGGLSCCTTQLFASSWGWQPPLIKSVPGSEPSKTQGQKRSGRGRQKLASAPLSLNNTSQKGLEGRGLPCTPKPPDRIRQAGPHVPFTVFEEVCPTESKPEVPQAPRVQQRVQTRLKVNFSDDSDLEDPVSAEAWLAEEPKRRGTASRGRGRARKGLSLKTDAVVAPGSAPGNPGLNGRSRRAKKVASRHCEERRPQRASDQARPGPEIMRTIPEEELTDNWRKMSFEILRGSDGEDSASGGKTPAPGPEAASGEWELLRLDSSKKKLPSPCPDKESDKDLGPRLQLPSAPVATGLSTLDSICDSLSVAFRGISHCPPSGLYAHLCRFLALCLGHRDPYATAFLVTESVSITCRHQLLTHLHRQLSKAQKHRGSLEIADQLQGLSLQEMPGDVPLARIQRLFSFRALESGHFPQPEKESFQERLALIPSGVTVCVLALATLQPGTVGNTLLLTRLEKDSPPVSVQIPTGQNKLHLRSVLNEFDAIQKAQKENSSCTDKREWWTGRLALDHRMEVLIASLEKSVLGCWKGLLLPSSEEPGPAQEASRLQELLQDCGWKYPDRTLLKIMLSGAGALTPQDIQALAYGLCPTQPERAQELLNEAVGRLQGLTVPSNSHLVLVLDKDLQKLPWESMPSLQALPVTRLPSFRFLLSYSIIKEYGASPVLSQGVDPRSTFYVLNPHNNLSSTEEQFRANFSSEAGWRGVVGEVPRPEQVQEALTKHDLYIYAGHGAGARFLDGQAVLRLSCRAVALLFGCSSAALAVHGNLEGAGIVLKYIMAGCPLFLGNLWDVTDRDIDRYTEALLQGWLGAGPGAPLLYYVNQARQAPRLKYLIGAAPIAYGLPVSLR

SEQ ID NO: 2013 - DNA, 164 bp, Homo sapiens
  misc_feature (135)..(135): n is a, c, g, or t
ggagctgtcgcgtaccctgtagagtcggtctctgttgctctttttgcctgaggagtcttccatcctacgtcgagctctgactcccgtgctgtcgagagggagtccccggggacacctcggcacgcagcggagatnctctttttgccaccaatcccttcgatcag

SEQ ID NO: 2014 - DNA, 543 bp, Homo sapiens
  misc_feature (73)..(73): n is a, c, g, or t
  misc_feature (419)..(419): n is a, c, g, or t
  misc_feature (433)..(433): n is a, c, g, or t
  misc_feature (455)..(455): n is a, c, g, or t
  misc_feature (492)..(492): n is a, c, g, or t
ccctgatttgatgttatagcttatataaatggccacggtttctgcaaccacagtttaggataagcaaggcagncactcagattatgaaaaatggcagtaagttggctggagtttggtatacatatcatatcaatactgaatcttcacactccggagctccgattctagaaggctgatgctcttgtgagggcaacaggagttagctgcatattaattactgtagaactttccaggtaattagggaatgtgaaattgcctgaggccatttcatcccaactaccttaacctcaagagtcactggcatgtatttttctgtgatattgggagacaaagtattaatccagggcacaccatctcaaagctgacacacatatctacggtcatctccaaaggtatatgaattgcatatattcggtcgnattcaccaagtccntttttgcggggaaccaagggtncttgtcctcctttgggggttcccggcaaatttccatntcctcttttttttccctcaggggcctgttgttccggtgggttcatccggaa

SEQ ID NO: 2015 - DNA, 319 bp, Homo sapiens
  misc_feature (18)..(18): n is a, c, g, or t
  misc_feature (115)..(115): n is a, c, g, or t
  misc_feature (164)..(164): n is a, c, g, or t
  misc_feature (187)..(187): n is a, c, g, or t
  misc_feature (209)..(209): n is a, c, g, or t
  misc_feature (225)..(225): n is a, c, g, or t
  misc_feature (262)..(262): n is a, c, g, or t
aacgaagcaatgactttntcagggagaaagatttgcatccatgctgaggaaatagacagggccagtaatcacacagcaacaatcatctgtaacttgcagaaattcaatgtatgantaagtgtttaaagcctagatagagggcaattatctggttatctgttttncatatttctatcagagataaaancctctttagggaaatttatgangggccatttgaaaganggtttccctcttttgtagaaaagaattctcttaaaanttaaaacaaatttgggaggctgggggatttttgagagtttaaaagagtgaggaagat

SEQ ID NO: 2016 - DNA, 436 bp, Homo sapiens
ttttttttttttgcagagacagagtttcctcataatcaccctggctggtctcgaactcctgaggctcaagcaatccgcccacctaggcttcccaacattctgggattacaggcacaagacaccacgccagacctaaaatttttttctatagcaacctgaactgacttaaccaggagatttcaagaaaacaaatgaaaacacaatgaatgtgggagagaaagagaatgagttcaactcaggccaaatttaaaatggctgatgtatgtccaagcagaataatcagtaggtagttggatacgtgaggctgaagcattgagaagagtctgggccaaaaataaagacacagtgaccattcatagttacattagatagaactctcggaagggtgtgaaagaggacaaaacatagaaaactgactggggttttcagatctttg

SEQ ID NO: 2017 - DNA, 287 bp, Homo sapiens
  misc_feature (4)..(7): n is a, c, g, or t
  misc_feature (139)..(139): n is a, c, g, or t
  misc_feature (165)..(165): n is a, c, g, or t
  misc_feature (196)..(196): n is a, c, g, or t
  misc_feature (201)..(201): n is a, c, g, or t
  misc_feature (239)..(239): n is a, c, g, or t
  misc_feature (257)..(257): n is a, c, g, or t
gtannnngcaatctgtaacagttttggtagtggtattacagaggatttgtaaaatggattggagtacttaccactatttcatctgctctgaaatagttcactaaccaaactactgacaacagtttaattttggttcttnccttaaaattatacagactgcaccangaacaccatatggacctagtaacacttcagnttttnagaccttacaacctttgcaagtgcttctatggatttcnggggctctttaggatttnctactgcttgaggtcactttgggtaattga

SEQ ID NO: 2018 - DNA, 2784 bp, Homo sapiens
accaaaccgtcctctacagcctcctggccccggcgcaggctgcccgtactgcccgtggcatgagggagccggaagagctgatgcccgattcgggtgctgtgtttacatttgggaaaagtaaatttgctgaaaataatcccggtaaattctggtttaaaaatgatgtccctgtacatctttcatgtggagatgaacattctgctgttgttaccggaaataataaactttacatgtttggcagtaacaactggggtcagttaggattaggatcaaagtcagccatcagcaagccaacatgtgtcaaagctctaaaacctgaaaaagtgaaattagctgcctgtggaaggaaccacaccctggtgtcaacagaaggaggcaatgtatatgcaactggtggaaataatgaaggacagttggggcttggtgacaccgaagaaagaaacacttttcatgtaattagcttttttacatccgagcataagattaagcagctgtctgctggatctaatacttcagctgccctaactgaggatggaagactttttatgtggggtgacaattccgaagggcaaattggtttaaaaaatgtaagtaatgtctgtgtccctcagcaagtgaccattgggaaacctgtctcctggatctcttgtggatattaccattcagcttttgtaacaacagatggtgagctatatgtgtttggagaacctgagaatgggaagttaggtcttcccaatcagctcctgggcaatcacagaacaccccagctggtgtctgaaattccggagaaggtgatccaagtagcctgtggtggagagcatactgtggttctcacggagaatgctgtgtatacctttgggctgggacaatttggtcagctgggtcttggcacttttctttttgaaacttcagaacccaaagtcattgagaatattagggatcaaacaataagttatatttcttgtggagaaaatcacacagctttgataacagatatcggccttatgtatacttttggagatggtcgccacggaaaattaggacttggactggagaattttaccaatcacttcattcctactttgtgctctaattttttgaggtttatagttaaattggttgcttgtggtggatgtcacatggtagtttttgctgctcctcatcgtggtgtggcaaaagaaattgaattcgatgaaataaatgatacttgcttatctgtggcgacttttctgccgtatagcagtttaacctcaggaaatgtactgcagaggactctatcagcacgtatgcggcgaagagagagggagaggtctccagattctttttcaatgaggagaacactacctccaatagaagggactcttggcctttctgcttgttttctccccaattcagtctttccacgatgttctgagagaaacctccaagagagtgtcttatctgaacaggacctcatgcagccagaggaaccagattatttgctagatgaaatgaccaaagaagcagagatagataattcttcaactgtagaaagccttggagaaactactgatatcttaaacatgacacacatcatgagcctgaattccaatgaaaagtcattaaaattatcaccagttcagaaacaaaagaaacaacaaacaattggggaactgacgcaggatacagctcttactgaaaacgatgatagtgatgaatatgaagaaatgtcagaaatgaaagaagggaaagcatgtaaacaacatgtgtcacaagggattttcatgacgcagccagctacgactatcgaagcattttcagatgaggaagtagagatcccagaggagaaggaaggagcagaggattcaaaaggaaatggaatagaggagcaagaggtagaagcaaatgaggaaaatgtgaaggtgcatggaggaagaaaggagaaaacagagatcctatcagatgaccttacagacaaagcagaggatcatgaattttctaaaactgaggaactaaaactagaagatgtggatgaggaaattaatgctgaaaatgtggaaagcaagaagaaaactgtgggagatgatgaaagtgttcctacaggttatcacagtaaaacagaaggagcagaaagaaccaatgatgatagctcagctgaaactattgaaaagaaagaaaaagccaacctagaggaacgggccatttgtgagtacaatgaaaacccaaaaggatacatgcttgatgatgcagatagcagttcattagaaatcctagaaaacagtgaaacaacaccaagcaaagacatgaaaaaaacaaagaagatttttctgttcaaaagagtcccctcaataaatcaaaagattgtcaagaataacaatgagccgctcccagagataaaatccataggagaccagatcattttaaaaagtgataataaagatgccgaccagaaccacatgagtcagaatcatcagaatatcccaccaacaaatacagagagaagatcaaaatcctgtacaatactataaatatatatttatgttttcacagtcaccaagtgtattgtaatgtatacttgaaaaatgttataacttatgaagtaaagtttctgatagtagtctttaaaagatataagacttaatatgttttattcagcttctataagtgtgaccagttttgatatttatttatgctaatatttttaacaagtcatttcaaaatatgtgtatctcaaattctccctaaagtgttgtggccttaactgttcagtattgcaataaaaaatatatttttatatgtggaaaa

SEQ ID NO: 2019 - protein, 815 aa, Homo sapiens
MREPEELMPDSGAVFTFGKSKFAENNPGKFWFKNDVPVHLSCGDEHSAVVTGNNKLYMFGSNNWGQLGLGSKSAISKPTCVKALKPEKVKLAACGRNHTLVSTEGGNVYATGGNNEGQLGLGDTEERNTFHVISFFTSEHKIKQLSAGSNTSAALTEDGRLFMWGDNSEGQIGLKNVSNVCVPQQVTIGKPVSWISCGYYHSAFVTTDGELYVFGEPENGKLGLPNQLLGNHRTPQLVSEIPEKVIQVACGGEHTVVLTENAVYTFGLGQFGQLGLGTFLFETSEPKVIENIRDQTISYISCGENHTALITDIGLMYTFGDGRHGKLGLGLENFTNHFIPTLCSNFLRFIVKLVACGGCHMVVFAAPHRGVAKEIEFDEINDTCLSVATFLPYSSLTSGNVLQRTLSARMRRRERERSPDSFSMRRTLPPIEGTLGLSACFLPNSVFPRCSERNLQESVLSEQDLMQPEEPDYLLDEMTKEAEIDNSSTVESLGETTDILNMTHIMSLNSNEKSLKLSPVQKQKKQQTIGELTQDTALTENDDSDEYEEMSEMKEGKACKQHVSQGIFMTQPATTIEAFSDEEVEIPEEKEGAEDSKGNGIEEQEVEANEENVKVHGGRKEKTEILSDDLTDKAEDHEFSKTEELKLEDVDEEINAENVESKKKTVGDDESVPTGYHSKTEGAERTNDDSSAETIEKKEKANLEERAICEYNENPKGYMLDDADSSSLEILENSETTPSKDMKKTKKIFLFKRVPSINQKIVKNNNEPLPEIKSIGDQIILKSDNKDADQNHMSQNHQNIPPTNTERRSKSCTIL

SEQ ID NO: 2020 - DNA, 444 bp, Homo sapiens
cggccgctgagtggtggggacgcgctggccagggacagggccgtcagagaggtggggatggaaccacgcttgcgcagctgcttcaggtttagggcttccatgctgccactggttacacgcgtctcaatctcctccgcgcggagctccgtggactccttctcttcctgaatcatcctgatttcctcattgatggcatccagctgctcctgcagcatcatggccagggtctgggcatctgaatggccgctgggggagacaacatccgcagagcccaccagaccccctggctcatcctcatccacgtcggagatctcagggtcactgtcaaaggcagggccagctgccggggccagcatcccaggcagtggagaagtctcccagtccttggaagacccttccctcaatgccgagtagcggcgatgcacgcctgggggtgcgtgtgtg

SEQ ID NO: 2021 - DNA, 398 bp, Homo sapiens
  misc_feature (106)..(106): n is a, c, g, or t
  misc_feature (356)..(356): n is a, c, g, or t
tttttttttttttgatcaggaaaatgtctatttattccaaaaaataccaagtcgcagctcctctggctgtcctcaccagggaattaattaggggaaggggccagtnttggagagggggtggagagaggaagtgatgaggagggaggcagaagctgttggagggtcttcaggtgtggaactatttatcttctccctgtgaagtgccccctcccatgctcccccaaccagacggggagatgcctgtgtgtgtgtgcttgtgtatgcatgggtttgtgtgcatttgcatttgttggggcatggggaagtctcagatgacgaggtcccagctcaagacatgtgggaggggaattgccccngggtcagggcagcctgttgccaattgaataggggacagggtt

SEQ ID NO: 2022 - DNA, 2119 bp, Homo sapiens
ggcacgagtaggggtggcgggtcagtgctgctcgggggcttctccatccaggtccctggagttcctggtccctggagctccgcacttggcgcgcaacctgcgtgaggcagcgcgactctggcgactggccggccatgccttcccgggctgaggactatgaagtgttgtacaccattggcacaggctcctacggccgctgccagaagatccggaggaagagtgatggcaagatattagtttggaaagaacttgactatggctccatgacagaagctgagaaacagatgcttgtttctgaagtgaatttgcttcgtgaactgaaacatccaaacatcgttcgttactatgatcggattattgaccggaccaatacaacactgtacattgtaatggaatattgtgaaggaggggatctggctagtgtaattacaaagggaaccaaggaaaggcaatacttagatgaagagtttgttcttcgagtgatgactcagttgactctggccctgaaggaatgccacagacgaagtgatggtggtcataccgtattgcatcgggatcttaaaccagccaatgttttcctggatggcaagcaaaacgtcaagcttggagactttgggctagctagaatattaaaccatgacacgagttttgcaaaaacatttgttggcacaccttattacatgtctcctgaacaaatgaatcgcatgtcctacaatgagaaatcagatatctggtcattgggctgcttgctgtatgagttatgtgcattaatgcctccatttacagcttttagccagaaagaactcgctgggaaaatcagagaaggcaaattcaggcgaattccataccgttactctgatgaattgaatgaaattattacgaggatgttaaacttaaaggattaccatcgaccttctgttgaagaaattcttgagaaccctttaatagcagatttggttgcagacgagcaaagaagaaatcttgagagaagagggcgacaattaggagagccagaaaaatcgcaggattccagccctgtattgagtgagctgaaactgaaggaaattcagttacaggagcgagagcgagctctcaaagcaagagaagaaagattggagcagaaagaacaggagctttgtgttcgtgagagactagcagaggacaaactggctagagcagaaaatctgttgaagaactacagcttgctaaaggaacggaagttcctgtctctggcaagtaatccagaacttcttaatcttccatcctcagtaattaagaagaaagttcatttcagtggggaaagtaaagagaacatcatgaggagtgagaattctgagagtcagctcacatctaagtccaagtgcaaggacctgaagaaaaggcttcacgctgcccagctgcgggctcaagccctgtcagatattgagaaaaattaccaactgaaaagcagacagatcctgggcatgcgctagccaggtagagagacacagagctgtgtacaggatgtaatattaccaacctttaaagactgatattcaaatgctgtagtgttgaatacttggccccatgagccatgcctttctgtatagtacacatgatatttcggaattggttttactgttcttcagcaactattgtacaaaatgttcacatttaatttttctttcttcttttaagaacatattataaaaagaatactttcttggttgggcttttaatcctgtgtgtgattactagtaggaacatgagatgtgacattctaaatcttgggagaaaaaataatattaggaaaaaaatatttatgcaggaagagtagcactcactgaatagttttaaatgactgagtggtatgcttacaattgtcatgtctagatttaaattttaagtctgagattttaaatgtttttgagcttagaaaacccagttagatgcaatttggtcattaataccatgacatcttgcttataaatattccattgctctgtagttcaaatctgttagctttgtgaaaattcatcactgtgatgtttgtattctttttttttttctgtttaacagaatatgagctgtctgtcatttacctacttctttcccactaaataaaagaattcttcagtta

SEQ ID NO: 2023 - protein, 445 aa, Homo sapiens
MPSRAEDYEVLYTIGTGSYGRCQKIRRKSDGKILVWKELDYGSMTEAEKQMLVSEVNLLRELKHPNIVRYYDRIIDRTNTTLYIVMEYCEGGDLASVITKGTKERQYLDEEFVLRVMTQLTLALKECHRRSDGGHTVLHRDLKPANVFLDGKQNVKLGDFGLARILNHDTSFAKTFVGTPYYMSPEQMNRMSYNEKSDIWSLGCLLYELCALMPPFTAFSQKELAGKIREGKFRRIPYRYSDELNEIITRMLNLKDYHRPSVEEILENPLIADLVADEQRRNLERRGRQLGEPEKSQDSSPVLSELKLKEIQLQERERALKAREERLEQKEQELCVRERLAEDKLARAENLLKNYSLLKERKFLSLASNPELLNLPSSVIKKKVHFSGESKENIMRSENSESQLTSKSKCKDLKKRLHAAQLRAQALSDIEKNYQLKSRQILGMR

SEQ ID NO: 2024 - DNA, 3118 bp, Homo sapiens
ggggggggggggggggggagaggcttccctggctggtgcctgagcccggcgtccctcgccccccgccctccccgcatccctctcctccctcgcgcctggccctgtggctcttcctccctccctccttccccccccccccacccctcgcccgctgcctccctcggcccagccagctgtgccggcgtttgttggctgccctgcgcccggccctccagccagccttctgccggccccgccgcgatggaggtgccccagccggagcccgcgccaggctcggctctcagtccagcaggcgtgtgcggtggcgcccagcgtccgggccacctcccgggcctcctgctgggatctcatggcctcctggggtccccggtgcgggcggccgcttcctcgccggtcaccaccctcacccagaccatgcacgacctcgccgggctcggcagccgcagccgcctgacgcacctatccctgtctcgacgggcatccgaatcctccctgtcgtctgaatcctccgaatcttctgatgcaggtctctgcatggattcccccagccctatggacccccacatggcggagcagacgtttgaacaggccatccaggcagccagccggatcattcgaaacgagcagtttgccatcagacgcttccagtctatgccggtgaggctgctgggccacagccccgtgcttcggaacatcaccaactcccaggcgcccgacggccggaggaagagcgaggcgggcagtggagctgccagcagctctggggaagacaaggagaatgatggatttgtcttcaagatgccatggaagcccacacatcccagctccacccatgctctggcagagtgggccagccgcagggaagcctttgcccagagacccagctcggcccccgacctgatgtgtctcagtcctgaccggaagatggaagtggaggagctcagccccctggccctaggtcgcttctctctgacccctgcagagggggatactgaggaagatgatggatttgtggacatcctagagagtgacttaaaggatgatgatgcagttcccccaggcatggagagtctcattagtgccccactggtcaagaccttggaaaaggaagaggaaaaggacctcgtcatgtacagcaagtgccagcggctcttccgctctccgtccatgccctgcagcgtgatccggcccatcctcaagaggctggagcggccccaggacagggacacgcccgtgcagaataagcggaggcggagcgtgacccctcctgaggagcagcaggaggctgaggaacctaaagcccgcgtcctccgctcaaaatcactgtgtcacgatgagatcgagaacctcctggacagtgaccaccgagagctgattggagattactctaaggccttcctcctacagacagtagacggaaagcaccaagacctcaagtacatctcaccagaaacgatggtggccctattgacgggcaagttcagcaacatcgtggataagtttgtgattgtagactgcagatacccctatgaatatgaaggcgggcacatcaagactgcggtgaacttgcccctggaacgcgacgccgagagcttcctactgaagagccccatcgcgccctgtagcctggacaagagagtcatcctcattttccactgtgaattctcatctgagcgtgggccccgcatgtgccgtttcatcagggaacgagaccgtgctgtcaacgactaccccagcctctactaccctgagatgtatatcctgaaaggcggctacaaggagttcttccctcagcacccgaacttctgtgaaccccaggactaccggcccatgaaccacgaggccttcaaggatgagctaaagaccttccgcctcaagactcgcagctgggctggggagcggagccggcgggagctctgtgaccggctgcaggaccagtgaggggcctgcgccagtcctgctacctcccttgcctttcgaggcctgaagccagctgccctatgggcctgccgggctgagggcctgctggaggcctcaggtgctgtccatgggaaagatggtgtggtgtcctgcctgtctgccccagcccagattcccctgtgtcatcccatcattttccatatcctggtgccccccacccctggaagagcccagtctgttgagttagttaagttgggttaataccagcttaaaggcagtattttgtgtcctccaggagcttcttgtttccttgttagggttaacccttcatcttcctgtgtcctgaaacgctcctttgtgtgtgtgtcagctgaggctggggagagccgtggtccctgaggatgggtcagagctaaactccttcctggcctgagagtcagctctctgccctgtgtacttcccgggccagggctgcccctaatctctgtaggaaccgtggtatgtctgccatgttgcccctttctcttttcccctttcctgtcccaccatacgagcacctccagcctgaacagaagctcttactctttcctatttcagtgttacctgtgtgcttggtctgtttgactttacgcccatctcaggacacttccgtagactgtttaggttcccctgtcaaatatcagttacccactcggtcccagttttgttgccccagaaagggatgttattatccttgggggctcccagggcaagggttaaggcctgaatcatgagcctgctggaagcccagcccctactgctgtgaaccctggggcctgactgctcagaacttgctgctgtcttgttgcggatggatggaaggttggatggatgggtggatggccgtggatggccgtggatgcgcagtgccttgcatacccaaaccaggtgggagcgttttgttgagcatgacacctgcagcaggaatatatgtgtgcctatttgtgtggacaaaaatatttacacttagggtttggagctattcaagaggaaatgtcacagaagcagctaaaccaaggactgagcaccctctggattctgaatctcaagatgggggcagggctgtgcttgaaggccctgctgagtcatctgttagggccttggttcaataaagcactgagcaagttgagaaaaaaaaaaaaaaaaaaaaaaaaaaaaa

SEQ ID NO: 2025 - protein, 566 aa, Homo sapiens [sequence omitted]

SEQ ID NO: 2026 - DNA, 377 bp, Homo sapiens
cttaatctccatagcaaaatcccaaacagcattagcagatcgaattgtttcttctaagacttcctttttctgaatgtgtgcacatcccttctcgtgctcacacacttgcccacacactcacttcttcctgcgctgtggctgctctaagcagggctgtgcatggtgcaaagctgcagtcagtgagcctggcagcctgtggtttctgttatggaaatggttccatggtgaaacacatccctgacccttcacagacttacacatttactcaccaggaggtggcagcggtgtgggaggaggagtgttgaccttggacgcaggagagacacctgggttctagttcaagtcggccaaggactgtgtgaccttgacaagtctaa

SEQ ID NO: 2027 - DNA, 383 bp, Homo sapiens
  misc_feature (229)..(229): n is a, c, g, or t
  misc_feature (376)..(376): n is a, c, g, or t
tttttggtacagaaactaccacagcaagaagcggttaatgtaaaaggatatacaaatcaatcaatcattgattggccaatgatatgcaaagtagcaaaaacaatgcctctatttatcctcgccattaatctattcaaacatataaagattttactggtaaaattatacaactgtgttagacgtaatgcagtaggtaccttatacaaatcattgaaaacttacatttaanaggagtccctcattgggtccacaaaactaatctctttttacctcctgcccagttcaggcacttgctactggcacaggggataggattccacccggctatccggatagggggaggatggtccctcttcaaattagggtatgggcaaangccttaa

SEQ ID NO: 2028 - DNA, 196 bp, Homo sapiens
acttcccgggacaaaaggaagaatggaagcgcgatggtggatggaacaaaagatgttagctcacccacagatctcatagtgattaaaatgaaagaacgttcaccccaaatccttatgatgtggtttaaaaataaagagttatagataagaccctattttcgaaaacaaagtgttaaatccccccccggaagttcca

SEQ ID NO: 2029 - DNA, 694 bp, Homo sapiens
  misc_feature (580)..(580): n is a, c, g, or t
  misc_feature (606)..(606): n is a, c, g, or t
tctgtaaaggtgtgactttataaagacatctccagcttcctgtctctgcactctgcgggaagcaatgcgagggcatgtccgcggctcagagaactagagcaagtccctgatgtacaggctgcgccgcacggcgttggagacaccctcgttgaagcggaaccagacctcgctcctgcccaccgctgtgcccatgcgccgctccactgagtcctgctccggggccgtgtcccctgcactcaggactgctgtgctcctgacgaccacacgtccaaagaagtccttctcaggctgttcctcccgggccgctcgcctcatgatgtgctccagccgctgctcatggttgcgtggggcaggtcggtgcacccctttctccccaatgccccccagcagaccctcgagccctggggggctcccatccacctgggggctgttctctacccgggcagaagcctccgcccgccgcatcttctccacctcgatctcgcgggcgatgagctgcttcgtctggtaggtgaggggcttgcgggcaggcagctcagggaagcggcagagttcctccacgttcggctccagcctgtanatgtactggccatcgggcgtgcgctnctggcgtaggtcaggctgtaagcgagcctcgtgccgaattttggcctcgagggccaaatccctatagtgagtccattaaattcggaac

SEQ ID NO: 2030 - DNA, 261 bp, Homo sapiens
atctgcaggtgagagctggtctgttgcagaccttcccatctggatccatctgtgtttccctggaatggacaggcagctctagtcagtgagaaatcgcagatgtgagagagctgacacatgtccagctaatgaaaggaggaggaaggctggtctccgattgagctttgaagattaggaggaaaagaggagctttggaatatctatttcaaataaatttggtgtatttaagaatctggattgtttataatttgggcatttggg

SEQ ID NO: 2031 - DNA, 2629 bp, Homo sapiens
acttgtcatggcgactgtccagctttgtgccaggagcctcgcaggggttgatgggattggggttttcccctcccatgtgctcaagactggcgctaaaagttttgagcttctcaaaagtctagagccaccgtccagggagcaggtagctgctgggctccggggacactttgcgttcgggctgggagcgtgctttccacgacggtgacacgcttccctggattggcagccagactgccttccgggtcactgccatggaggagccgcagtcagatcctagcgtcgagccccctctgagtcaggaaacattttcagacctatggaaactacttcctgaaaacaacgttctgtcccccttgccgtcccaagcaatggatgatttgatgctgtccccggacgatattgaacaatggttcactgaagacccaggtccagatgaagctcccagaatgccagaggctgctccccgcgtggcccctgcaccagcagctcctacaccggcggcccctgcaccagccccctcctggcccctgtcatcttctgtcccttcccagaaaacctaccagggcagctacggtttccgtctgggcttcttgcattctgggacagccaagtctgtgacttgcacgtactcccctgccctcaacaagatgttttgccaactggccaagacctgccctgtgcagctgtgggttgattccacacccccgcccggcacccgcgtccgcgccatggccatctacaagcagtcacagcacatgacggaggttgtgaggcgctgcccccaccatgagcgctgctcagatagcgatggtctggcccctcctcagcatcttatccgagtggaaggaaatttgcgtgtggagtatttggatgacagaaacacttttcgacatagtgtggtggtgccctatgagccgcctgaggttggctctgactgtaccaccatccactacaactacatgtgtaacagttcctgcatgggcggcatgaaccggaggcccatcctcaccatcatcacactggaagactccagtggtaatctactgggacggaacagctttgaggtgcgtgtttgtgcctgtcctgggagagaccggcgcacagaggaagagaatctccgcaagaaaggggagcctcaccacgagctgcccccagggagcactaagcgagcactgcccaacaacaccagctcctctccccagccaaagaagaaaccactggatggagaatatttcacccttcagatccgtgggcgtgagcgcttcgagatgttccgagagctgaatgaggccttggaactcaaggatgcccaggctgggaaggagccaggggggagcagggctcactccagccacctgaagtccaaaaagggtcagtctacctcccgccataaaaaactcatgttcaagacagaagggcctgactcagactgacattctccacttcttgttccccactgacagcctcccacccccatctctccctcccctgccattttgggttttgggtctttgaacccttgcttgcaataggtgtgcgtcagaagcacccaggacttccatttgctttgtcccggggctccactgaacaagttggcctgcactggtgttttgttgtggggaggaggatggggagtaggacataccagcttagattttaaggtttttactgtgagggatgtttgggagatgtaagaaatgttcttgcagttaagggttagtttacaatcagccacattctaggtaggtaggggcccacttcaccgtactaaccagggaagctgtccctcatgttgaattttctctaacttcaaggcccatatctgtgaaatgctggcatttgcacctacctcacagagtgcattgtgagggttaatgaaataatgtacatctggccttgaaaccaccttttattacatggggtctaaaacttgacccccttgagggtgcctgttccctctccctctccctgttggctggtgggttggtagtttctacagttgggcagctggttaggtagagggagttgtcaagtcttgctggcccagccaaaccctgtctgacaacctcttggtcgaccttagtacctaaaaggaaatctcaccccatcccacaccctggaggatttcatctcttgtatatgatgatctggatccaccaagacttgttttatgctcagggtcaatttcttttttcttttttttttttttttttctttttctttgagactgggtctcgctttgttgcccaggctggagtggagtggcgtgatcttggcttactgcagcctttgcctccccggctcgagcagtcctgcctcagcctccggagtagctgggaccacaggttcatgccaccatggccagccaacttttgcatgttttgtagagatggggtctcacagtgttgcccaggctggtctcaaactcctgggctcaggcgatccacctgtctcagcctcccagagtgctgggattacaattgtgagccaccacgtggagctggaagggtcaacatcttttacattctgcaagcacatctgcattttcaccccacccttcccctccttctccctttttatatcccatttttatatcgatctcttattttacaataaaactttgctgcca

SEQ ID NO: 2032 - protein, 393 aa, Homo sapiens [sequence omitted]

SEQ ID NO: 2033 - DNA, 6974 bp, Homo sapiens
cggtgctggagaagtttgcgctgcggttcgtgagcgcagggtgcgggccccgccggccgctgcgcgcccgctgccatggctttccgcaggaggacgaaaagttacccgctcttcagccaggagttcgtcatccacaaccatgcggacatcggcttctgcctggtgctctgcgtcctcatcgggcttatgttcgaggtcacagccaagactgcctttctatttattttacctcagtataacattagcgtgcctacagcagacagtgagaccgtgcactaccactatggccctaaggacctggtcacaatcttgttctacatcttcatcaccatcatcttgcatgctgtggttcaggagtacattttagataaaatcagcaaacggcttcatctctccaaagtcaaacacagcaagttcaatgaatctggacagctggtcgtctttcatttcacctcggtgatttggtgcttctacgtggtggtgacggaaggatacttaacaaacccaagaagcctctgggaagactacccgcatgtgcacctccccttccaggtgaagtttttctacctatgccagctggcctactggctgcacgcacttcctgagctatacttccagaaggtacggaaggaggaaattccccgccagctccagtatatttgcctgtacctggtgcatatagctggagcatacctcttaaacctgagccgcctgggcctgatcttgctgctgctgcagtactcaactgagttcctcttccacacggctagactcttctactttgcagatgaaaacaacgagaaactgttcagtgcctgggctgctgtttttggggttacccgcctcttcatcctcacccttgccgtgctggccattggctttggactggctcgcatggaaaaccaggcatttgatcccgagaaagggaacttcaacactttgttttgcaggctctgcgtgctgctgctggtgtgtgccgcccaggcctggctcatgtggcgcttcatccactcccagctgcggcactggcgggaatactggaatgagcagagtgcaaagcggagagtcccagccacacccagactaccagccaggctcatcaagagggaatctggttaccatgaaaatggagtggtgaaggcagagaacggaacctccccacggactaagaaactcaagtctccctaaggccaaagtgctaagaacaggaatcctcttggtgggggccgagcagggggcaaggagcccaggccccctccctgcctcctccttcctgcctgtgatgctccgtctcaaacagccgaaacctgtcttgcaatggggggagggggcgtttcgctttccttcttcttggcttcctcttattcttccacaaaccattctcaataaagccaaaaatctttctctttctccccctcaggccacctcctgtcctcactcctgtcctgtgctggcttttctggaacgccaggcgcccatggctggcacctttctgcttgctctgtttcttgccttatggctgctgcttttcctttttacttcctattttcaccttatcttgcaatttttctgtctgatttttacaatgggaggggagctaagattgcagtcctgtccttcggtcccccagggcctgccggtcagaagcctggggctggtaggcccttggtggtcctcatgtggatgggcaagaagagagcggccatctcggatcataatctccttggtgctgattaactgacgagatatatgattccagttctgcatgtaccatcttgaggcacagcagccactgctcgttgtaaatgccaaggcatttggctttgggacgtgacaactcaatccagaaggatggtgtgaactcggttgggtcccgtgactcgagctcctaccagtggctggccgcggattggaagccagcctgctgtcgctctgtggggaggacatgtcttcccactgcttagagcgagagcagagcaaactgcgcagcaggcacctccagaaaggtaatggtggcagaacccacagtggagtcgacctaggcctttctccagcagtcccagtcgccattgctttttcagccattcacaagcattcaaaaccaaaccaaacagcagttcatatacctgcctgagataggctggtcctcacctccagagccagccagccccgtcaggggccaaacttactaccttgacttcatctctagctgcagaaacactaagtctcaagggcttcagccccatgctggtcccttggtgttcagggagggtcacttggaccgctgttcatctggccgcccttgttgagtgttctttggaattgtcgttttttgagcacaactacagcattttagactgcatgaaaccatgactgactgagagtcactctctgggtagatgataggcgcctttctggccccttccctcacagattctttcccctcccctccacctgaagagaaggcctccaagtccttttggtgccttgtgaggacttttagaaggggcgttcagctttaaaaagccggtcctaattacggccggacgcagtagcttacgcctgttatcccagcactttgggaggtcgaggtgggcagatcacctgaggttaggagttcaagaccagcctggccaacatggtgaaaccccatctctactaaaaatacaaaaaattaggtgtagtggcaggcacctgtaatcccagctactcgggaggctgaggcaggagaatcgcttgaacctagaaggtggaggttgcagtgagcggagattgtaccatggcactccagcctggacaacaagagcgaaattctgtctaaaaaaacaaaagtcccaattaagaacctccgaactctgttttgaggcaaaggggagtagttcttggtaggtgcaggaatagtagtgtcatttggaatactggtcatctttctgacatcacagtagaaaccaaaccttggatttagattcaaaaggggggaaatgggtcttttcatcaaggcaactccccttctccaagtcacttacatcatagataaattttagcttcccagtaactgagggatttgtttcctaacgccattggaggccttcatccctctctacgataaggttgcagaaatgggaagagctacccgtggttgcttttgattacccttaggaagtgagacagtgtttttgaaaatatgtatttctcccatttctccctctccttccctgacacttctctgggctgcacagcagaaacgttggtaaaagggcagtttggtttcaacacagcagacctgatatgggatcccttagccactttagtcaaacagccctgacagagtctataattgagttcaggccccccaccttgcctaataactgcaaatcgcatgttcagccagcagcctcctaagcccaccttcctcccccattagagaacacccatcctaggtgctctccaggctgtgtcattggcagggcttcacatgcaggaggcctctctcaggtgagtccaggttaaactgttgagttgtggcttcaacagatatgtatggcatgctgggatgtgccaggtgcctgcgttgtgccagttgctggagaggtagtgtgagcagagcagctgaaatcttgccatcaagcaaccctcattctcatgcctgtaggtttccattgctctgtcccaggacacttgcgtgccagagacgccacaacttcatgtccctgtctcttgcaagctccccgtgctgccagtacttcatgccttggatgtggtcccaccagcccagtggctggggtcagcttaggctctgcttcccagtggacgggtgtgctaagggtttattttatgtaaaaaaaaaaaaaaaacaaaaaaaaaccctgagaccatgagtggggctggcatcttgccagcctgggcttcagggatgtttggggggggtggttagagggtagttgtagggtactttgtcacccccctccccctgccaccctccctggcacgtttatttcacagcagagccaagtctgtggcaggttgacacagactgtgttgccagagctgaaataattccacttcatcctatgagcgtgttgggctagcttgttctaattttggccactttggctgttttcttcagttttatgcattctctcctgccccaaagtgccaagccatttgtgaaggctctgccagacacctccaagcttgagagctcagcaccatgcaccaagagcaggagaaaagacgtaaacctaccccagcaactgtggcctctcgacagccctggctaactaacttacatttgtggggaagccaacagacacagcaggaggagagggaggtggcgctggtggaccaaggatctgtgctacccgctcccctccttggaggtgcagtgatgatgggagttatttttaccatccgggcgctgatagctgcactattaataaattgcatgtgttccttttgaaggtaggggatggttctgggtgagaggggagcaggctgagccggcgggggatctgctgtcctcccttttgagtcagttctaatcccatgtgtgtctgggccaccagaccgaaatggttgctgagaaacttgtctgttcatgtcccaaggcataacttcccaacatttaagaaaccccaatagacacctctgccctggccacgttcacagatccttctcttgaccggaaaccctgggaccctaagaacccctgaagcttggggtgggtgtgtgcttctggggtctcttttgggacctcctttgtcagtaccccttcttttttctaagcagctaataagaggttgggtgaaagagtgcatctcctcccaggattccacaacaaaattcttatcttccatggatgctttaattggaagtgggttgccgacccccttgtgcctagaaaaggcctttgcttgggtttcctttgtatgcttcagccttcctagttggtttttctaggcctggtgtgagaggtagggaagtctgcacataactaattcttttgcttaagggcctatggcacaagtgcacaaacttcaattcttgatgttctaagctctctcctctaacagagggagtgctgaaagcttttgagtcaagacaatggagtgctcttcctccctcactctgccttccgagcttatggttccttttctcaggagaggattttcaggattattggaggattaggtcattgtcagatgactggaaaacctaaataggatctctctccagctcaaggttgtcccagtgaggaagactttaccaacttctcactctaccccactactcacatgagtgttagctccaccttgcaaaggctgaagaccagttctccccagtgaaagctgcctcattcttttatggagttccctggagtggcagagctataaagacgagcattgggatttgcagtctccatgtagcctttcgtgcttggcaacccctgtagactttttgtcccaagcagattgcgtgcgtgcgcctgtgtgtgagaataagtgccttactttgctgtgtggttttcaacttgtactccgtggccagcccccagttgccagggctcgacggcagccaaggacaccatacctcagtatagttatatataaaatggacacggattgtgacagtttcaccccatttgtttctaaccccgctgcccaggattagggtctgtggtgtgttctgttttgtttttggtttctcccttgtgtcagttctcttctggcccagctgggtggctgtggaagtctgtgaggtggcccaaccacaagcatacctattaagagaagcccagagcttccagcccccacttcgaaaactctcctctggccccacatagcaaactccttctccgttattttccccacccccagattttttttaaaaggcccacttgccataacctcttttggtctattttgcttcccattcagcccaaagtttatatgataaaggtgtttacttttacttcccagtctccaagtgctaacacataaacacatacatgtctgactgttgcagaactgttcgagctcctaattcagtgttaccttgttttagtcgcagcaaccctctcccctaccccttgcccgcccacgtttttctcactcttccgggttgtgcaataactctcccagccagtggtcctttccacagcctttctgtcccttaaaacacctgcaactgggggagaaatgggacccatgggagggggagtcatcatcccttacacaagaaatagccactttccttttgttgtcattcttgtgatcctgggtgggtttctgtggcactcttttagaacatgtagcatcatcttagaggtctatttttaaaaaatgtgttgaagaggaaaaaaccattctcacgatggggcttaagtcattgtccaggaataagattggcgtggtgcccatgacatcaccgtcactctgcctaaaagcactctagagctacttgttcacgtggagaggaaggatattttgcgaagcaacagccgcaggtggagagccctgttcacctgatagggtctagctgtgacagtaaatataataccgctgtttccttgggtacagatttgagtgttcatgtgatgagactgtaaacctcatttttcggttcctctgtttaaaaaaacatctgaaggatgaactaaggctgctggtgccctgagcaactgataatgcaaatgtggacaaagtgtctgttttctactctagcctgttcatatggaccaaatttcaacaaggaactcaaggaaaatttgtacctgccgtatttatgctttcatgtaaaaaagggttggggggaggggtgtctttttgcttttggtgaactttttttcaaaatcatttttccactgtttctgtctggttttaaaacaaattacagttttgtatggattttttaaatgtacattttggaacaaatgatcaaatattttctgaaataacaataaaaggcagaaaatt

SEQ ID NO: 2034 - protein, 370 aa, Homo sapiens
MAFRRRTKSYPLFSQEFVIHNHADIGFCLVLCVLIGLMFEVTAKTAFLFILPQYNISVPTADSETVHYHYGPKDLVTILFYIFITIILHAVVQEYILDKISKRLHLSKVKHSKFNESGQLVVFHFTSVIWCFYVVVTEGYLTNPRSLWEDYPHVHLPFQVKFFYLCQLAYWLHALPELYFQKVRKEEIPRQLQYICLYLVHIAGAYLLNLSRLGLILLLLQYSTEFLFHTARLFYFADENNEKLFSAWAAVFGVTRLFILTLAVLAIGFGLARMENQAFDPEKGNFNTLFCRLCVLLLVCAAQAWLMWRFIHSQLRHWREYWNEQSAKRRVPATPRLPARLIKRESGYHENGVVKAENGTSPRTKKLKSP

SEQ ID NO: 2035 - DNA, 477 bp, Homo sapiens
cggcgtcctcggcgggtgcggcgggtgcggtgcgttcctggcggctgcgaaagtcctgcagggcgcggcggttctggaaatcgatgagcgccacgcgatggccgcgttccagcagctctcgcccgcgcagcaagtacgatctccttgtggtcggtggtgacgatggtgaagtacacgtacttgcccgtgcgctccacgcagtccaccttgaggatggagtggaagcgcacgtccttggggcgcgcgcggagggctggcggggaacaggctcaggcggtcggaggtgagcaccccgcgcttcttcttccatagctggaagaggctgtcgctgcgcttctccaactcgccctcgcgtacaccatcgtcgggggatttcatgtcgtgccgagcgcgggactgggagcggcaatgcgggcggtgacggcgccggctctgctcctcgtggccccggcgcggcctttatagctgccctcgtgc

SEQ ID NO: 2036 - DNA, 1184 bp, Homo sapiens
acctgttagctgctcttgctgccccagggcaaggccggatatggacttgggctactggaggagaaaagccattttggagcaaacaaactggttaagagacagcagtggcgtgtgggagaaaagagcttgtttgggggccttggctctaacacttagctttctgtatcctccgggcctcagtttcttcattcacaaaggagggatgaaaagctgagcagagaaggggagttgcagggaggccctgcaggggcgatgtggcagccctggggagcagcaggctggacctgggttttgaccctggggcatgggacttctcagcttttctctggaagaggagccaggaacccctttccggggagctgaccacagctctgtcctggcaggtacaatgcccaggagtactacgatcgcattcctgagcttcggcaggtcattgagcagctgagcagtggcttcttctcccccaaacagcccgacctgttcaaggacattgtcaatatgctcatgcaccatgaccggtgagctggttggcccgggaatcactcaggtggggccgcagggcagatcgaggctcaggtgtgtggtggggaagccggacgcgggtcctggtagttggagccaggcgcctttggaagcagcatgaccctctaggtccccggctgtccactgggacagggcaggcttggcccttgacctcatagaacttatcctagccccctaaaggaatagcacatgcctatcctttcccctccaggtttaaagtcttcgcagattatgaagactacattaaatgccaggagaaagtcagcgccttgtacaaggtgaggggtcctgggccaggggttggcagggctttggtggccctggttgggatgaggcagaaggtggagatcctgccagcagagtgaaccagagcttccctttgacctgcagaacccaagagagtggacgcggatggtgatccggaacatagccacctctggcaagttctccagtgaccgcaccattgcccagtatgcccgggagatctggggtgtggagccttcccgccagcgcctgccagccccggatgaggccatctgagcctccagaccagaccccaaaccagcccttgagtctgtcacactctcttgggccagccccagcacctcatgcagagggtggggtactggagttagatctct

SEQ ID NO: 2037 - protein, 842 aa, Homo sapiens
MSRPLSDQEKRKQISVRGLAGVENVTELKKNFNRHLHFTLVKDRNVATPRDYYFALAHTVRDHLVGRWIRTQQHYYEKDPKRIYYLSLEFYMGRTLQNTMVNLALENACDEATYQLGLDMEELEEIEEDAGLGNGGLGRLAACFLDSMATLGLAAYGYGIRYEFGIFNQKISGGWQMEEADDWLRYGNPWEKARPEFTLPVHFYGHVEHTSQGAKWVDTQVVLAMPYDTPVPGYRNNVVNTMRLWSAKAPNDFNLKDFNVGGYIQAVLDRNLAENISRVLYPNDNFFEGKELRLKQEYFVVAATLQDIIRRFKSSKFGCRDPVRTNFDAFPDKVAIQLNDTHPSLAIPELMRILVDLERMDWDKAWDVTVRTCAYTNHTVLPEALERWPVHLLETLLPRHLQIIYEINQRFLNRVAAAFPGDVDRLRRMSLVEEGAVKRINMAHLCIAGSHAVNGVARIHSEILKKTIFKDFYELEPHKFQNKTNGITPRRWLVLCNPGLAEVIAERIGEDFISDLDQLRKLLSFVDDEAFIRDVAKVKQENKLKFAAYLEREYKVHINPNSLFDIQVKRIHEYKRQLLNCLHVITLYNRIKREPNKFFVPRTVMIGGKAAPGYHMAKMIIRLVTAIGDVVNHDPAVGDRLRVIFLENYRVSLAEKVIPAADLSEQISTAGTEASGTGNMKFMLNGALTIGTMDGANVEMAEEAGEENFFIFGMRVEDVDKLDQRGYNAQEYYDRIPELRQVIEQLSSGFFSPKQPDLFKDIVNMLMHHDRFKVFADYEDYIKCQEKVSALYKNPREWTRMVIRNIATSGKFSSDRTIAQYAREIWGVEPSRQRLPAPDEAI

SEQ ID NO: 2038 - DNA, 1972 bp, Homo sapiens
ctgaacaggaagcagttcgctcgcgcctaggttggcgcgggctgggaggtgttccagccctttaagatgttgcgcgtggtgagctggaacatcaatgggattcggagacccctgcaaggggtggcaaatcaggaacccagcaactgtgccgccgtggccgtggggcgcattttggacgagctggatgcggatatcgtctgtctccaggaaaccaaagtgaccagggatgcactgacagagcccctggctatcgttgagggttataactcctatttcagcttcagccgcaaccgtagcggctattctggtgtagccaccttctgtaaggacaatgctaccccagtggctgctgaagaaggcctgagtggcctgtttgccacccagaatggggatgttggttgctatggaaacatggatgagtttacccaagaggaactccgggctctggatagtgagggcagggccctcctcacacagcataagatccgcacatgggaaggtaaggagaagaccttgaccctaatcaacgtgtactgcccccatgcggaccctgggaggcctgagcggctagtctttaagatgcgcttctatcgtttgctgcaaatccgagcagaagccctcctggcggcaggcagccatgtgatcattctgggtgacctgaatacagcccaccgccccattgaccactgggatgcagtcaacctggaatgctttgaagaggacccagggcgcaagtggatggacagcttgctcagtaacttggggtgccagtctgcctctcatgtagggcccttcatcgatagctaccgctgcttccaaccaaagcaggagggggccttcacctgctggtcagcagtcactggcgcccgccatctcaactatggctcccggcttgactatgtgctgggggacaggaccctggtcatagacacctttcaggcctctttcctgctgcctgaggtgatgggctctgaccactgccctgtgggtgcagtcttgagtgtgtcctctgtgcctgcaaaacagtgcccacctctgtgcacccgcttcctccctgagtttgcaggcacccagctcaagatccttcgcttcctagttcctctcgaacaaagtcctgtgttggagcagtcgacgctgcagcacaacaatcaaacccgggtacagacatgccaaaacaaagcccaagtgcgctcaaccaggcctcagcccagtcaggttggctctagcagaggccagaaaaacctgaagagctactttcagtcctcccctagctgtccccaagcctctcctgacatagagctgcctagcctaccactgatgagcgccctcatgaccccgaagactccagaagagaaggcagtggccaaagtggtgaaggggcaggccaagacttcagaagccaaagatgagaaggagttacggacctcattctggaagtctgtgctggcggggcccttgcgcacacccctctgtgggggccacagggagccatgtgtgatgcgtactgtgaagaagccaggacccaacttgggccgccgcttctacatgtgtgccaggccccggggtcctcccactgacccctcctcccggtgcaacttcttcctctggagcaggcccagctgaaccaatggaggcctggggacatctggcatggtcacccctgcacatgatctgaggccagctccccttccctgagctgcctcctgcttctccctcaaagtctcctacccttctcttcctcttttaagccctctcttcctcgctttccttcctacctagctccttgttggtgagcttcttgtgccttaatcctgtgacccagccccttacaccactttccaccttcctgtccgaagtacacggacactagctgccccaggaagttgtgtgattttaaatcacttctgtctttgctggaaagtgtatttgtgcataaataaagtctgtgtatttgttaaaaaaaaaaaaaaaa

SEQ ID NO: 2039 - protein, 518 aa, Homo sapiens [sequence omitted]

SEQ ID NO: 2040 - DNA, 406 bp, Homo sapiens
  misc_feature (218)..(218): n is a, c, g, or t
  misc_feature (323)..(323): n is a, c, g, or t
  misc_feature (338)..(338): n is a, c, g, or t
  misc_feature (382)..(382): n is a, c, g, or t
tttttttttttttttttttttttgtgtgtggtttttctttttttaatgtctgctgttaataaaatatttttacagagaccaaaaagtcagaatagtgcaaaacatctcaacaccatgcattcatgaccacttctcgtttgtgttaaacatttgttccaagtcacatatttacagagaaatgaaggcgtctgtgcagacactggaccgacggggtagantcaaaacaaaacaaaaaacaaacaacgttttgatttcacatctgcaatcacatgctaagagttgtgtgggaggggaagcctccccgggactgcttggccggtttntgggggtctgagggngcacgagacaggggtgggacaggggtcaagtcccccgggctgtntggttggggatgatcaggggaccc

SEQ ID NO: 2041 - DNA, 607 bp, Homo sapiens
  misc_feature (601)..(601): n is a, c, g, or t
cggcacgaggtctgaagttagtggagaccatcaaaatgactgtacatttcataactctgggaagatttcaaatgtgaagtgcccctgtgcattttcttggccatagcacggcattcttgctttagctgtgctttcctgggatgagaagatcttggtgtatttaacacataagctttgttagaaatcacctctgaagatcatttcattttctcactttgggttgttgcaagacaaagcaaaggaaaaggaacacaatgaaggaggccgtgacatttttagttgccaccgttgtaactcaaacaatatgggtttgttggtgaactgatttatcaaggcttctgttacggttttgcatctgtgtgtgaggaaaattttaatttatttggaagtatttattagccatgttgttggtcctgaaaataaatctctaagtagcacagttgtgggtatattatgcagacacttaccacaatacctgcaaaagtaactgtggttttctttcaagacactgtaataaacagtgaactaagagaatagattctgatacatctcgataaatcattctctgcaaaaagttcagggctaatgcatttatgtgtanttttaa

SEQ ID NO: 2042 - DNA, 337 bp, Homo sapiens
caaggagctggtcctcagtcagcctgatgaggacaggtcagtggccaacccttttgccccagtccttcatctggagacagtcacatagtcacgtcaacagttcacccaaagagaagaggtggggcctggcttctcccacagggcacagcctaactatggagacccagggctccttcctgctgcactaggcctgtgctctccctattgccttcaggtggtgtgatcccggcttcctcacagagcccttttttccttctgcccagctccatcccaccagagtttctacccccgctgaggcatctcctgggcacagaccaccacactctaagccggctgg

SEQ ID NO: 2043 - DNA, 6735 bp, Homo sapiens
gcctgcagagagaggcactttgcaccacagacagatagcaagaagggaaagacagagagtgagaaaaaagaggagtcagtcgctcctggggaagggagagagtgagactgggagaaagagaagcacagaaagtgtgtgtaaaacggagtaaagaaagaaaaaaaaaaaactacccttaaagcacatttaaaaaaaaaaaactctggcaattcaagaaagaaacaggctacgtttaaagagcatagagacaatgaaaggctaaagaaaattttaaaatctctgccacagtctcataggtgcttggaaatgaaagtagaactgcctgtctttaacggactctgacagaggtaactggattagggacgagtacgccagctttttttttttttttttttttttttttaacatcttaaatcctgaaaaaaaaaaaaaaaaaaaaaaaaaggcagcagctccgaattgaatgaattgatgggcacactccaactgctgggctggagagactggacttagtcttgccatttctgcttctttgaaagaggagacaacttgggcttccttttaatttagttttttttccccttctcccccaacccccaaccttcccccttacctcccccaccccctttatcaccaccccccttttaaataagagggtgaaggggaaccagagcgcacaagggaactgactcaggaggcagagaagatgggcatcctcagcgtagacttgctgatcacactgcaaattctgccagtttttttctccaactgcctcttcctggctctctatgactcggtcattctgctcaagcacgtggtgctgctgttgagccgctccaagtccactcgcggagagtggcggcgcatgctgacctcagagggactgcgctgcgtctggaagagcttcctcctcgatgcctacaaacaggtgaaattgggtgaggatgcccccaattccagtgtggtgcatgtctccagtacagaaggaggtgacaacagtggcaatggtacccaggagaagatagctgagggagccacatgccaccttcttgactttgccagccctgagcgcccactagtggtcaactttggctcagccacttgacctcctttcacgagccagctgccagccttccgcaaactggtggaagagttctcctcagtggctgacttcctgctggtctacattgatgaggctcatccatcagatggctgggcgataccgggggactcctctttgtcttttgaggtgaagaagcaccagaaccaggaagatcgatgtgcagcagcccagcagcttctggagcgtttctccttgccgccccagtgccgagttgtggctgaccgcatggacaataacgccaacatagcttacggggtagcctttgaacgtgtgtgcattgtgcagagacagaaaattgcttatctgggaggaaagggccccttctcctacaaccttcaagaagtccggcattggctggagaagaatttcagcaagagatgaaagaaaactagattagctggttaaaggtatgattataagagagcttattgttttaaaaagttatataaaggcaaggaaattaagaactgaatccatatttcaacagagccctattggcttactgaaagacaggagtttatctatcggaagaacatgaatctctaacagctccatacttctttcactactcaaatggcattgggctgagtaagtaaccatatcacctctcttcttagtaaaaagccctatgtgaaaagatcccaagatggagaggaagaaacgctaattcagcatgtgttcattctgcattgagaaggaactgatacatctgatgcatgctttgagaccagaagaaaagacttacctgaataattactacattagggaagctactgtctacgttaagataaagggtattgccttggctctatttggcatggatggagcccagttggaaaattcccaaatattacaacaagtccttgaacccaggccatgtggttagacgttggtgttaaggttagaccttatgttagagtcatttctgatgttccagcttctagccatgtagtgctctcagtcttcataccccagaaattattggtatatttgtagataccgagaatgatccctcagtctgagaggttagaatgatcatctgtaatctgagggttaatttctaggcaggtggagagagtggtaaaaaagaaatgaaattgacaagctaggaaagaggaggcagaaagatttggaaaattcacagagtttcacccttaagctgtagagagtgggtcacatttgttagccacggaaacatagaaacatacacaaggccagaaaaagaagaaggagctcaactaaaagtggcatagagaatacacatataaaaacaatatatttgtcatatgctcctagagaggagaaaggggtgattgaaagaaaaaaaaatacttaaatatttgtaattgtgaggggtttcttttggaaataattacttttgaaccatgtatgtggtatgtatattttcagtgggttaattataccccatgatacctattaaaggaaaaccagtgggtctggtggtgctggtcttttcctccccattcctacaatttctatgtggcccaagtcattcctaatcttggtctctatagcagtgttctctctgaatgctgagctgaagaaattatacgtacatacacacatacatacatacatacaaatatatgtatatatattctcagctgctgcgggaggtaggtaccatggccattcagcacagccttgatttcctcccaaagtaggtgagctatagtgaagaataggtgcaaacaaacaagcttacttccattgcaaaatagaagaagaggaagttagagataattctgatcaatcattttggaggctttgttataaggcaacccccggtatatcatggaatttccattgacatttgaatttggacttggatcttcccttggtcccattagctgaggtttagtaatctaaagtccctatagtatatgattataatgctattttaaaaaatatatatataaaatatttttttctttttaaaatagacactatagttttacccataagtaatatttaaagattatagctcccaaaagaatggaccaaccactttcgtatcataatttctttttggtaaatatgagactattatgaaatcatagtatatgattgtatttaaaggtacaatcaaaggatcttttgtccattccattaataactgaataaaaaataaataaaatggatagaaaaaaactaaagttgaaaatacattcttaaactagttgtctgaaatgagaaaagagtgagaactaggtgtgcaagaaccaaacgtattttattttattttttaaatgggagcaacatatcagtcgtgtcaccagctggtatattgtgtaaatattaaagctccattgggactgatttttcatggcaacatcagctttctaatgttctaaattctataaaaaccacccacaaagaaacaaagcaaatttcattatctaatgagttgctggaaaatcatattgagaataattatttcagattcctcagttgttaacttctacattcaagggcttatctctgcccccattgatttttaacctcaaaatggtgtgagatttactgtggaaccctaaagcagtaaaataaaaaacctggttgcagcacattcacactgttgtccttaaaattccccttttttctctatgtacgataaagtaacagtatgtcagataagccggtggggggatgagattaggctgaggcagtgctagtcaactgggggaaaaggatgatggaaaaatcacccagttgtgctatatttttaaagaaggaggtcgtttatgtgtgcagacaattctccctgaggttagcccaatggagaaatgaagcagaggaaggaaacatagaaagacatgggctatcagggaggaagatgttcaatagaacatgcaagaatttctggaagaaaggctgtggaagggccaatggagaaaatgaatggacaaagctcaggaatccctacgctatgtagaatgttcttggtgttatcagggttaagccctgtaattatgtaacctatttatcgcaacatgaatttttatgatttcttgtgatgtattcttttatgaaattaacaagaactcattattttgaggtagaggaaaatcaatgctttatctgatatgctgagaaattattagattgccaatactcatgtgcgtttcatgtgttttataaggtttgttcctttgaagaattgtagttcttagtcccacagggaaatgtgtatctatttatatatcatagtataaatctatgatatatttatatcatatataaaagtctgagttctctttcttagtccctaatcatgtttctcccataggctgtgtttacatggagctatcggtttagccttttaagcttcattagcttgtctattattgaaatagtttccaagaaattttagatattatcataacatctgggtctactcaaacacttattgtttgaaagacttatgtcttggacctatcaaaaactgactttatttattgcttagtgaaaatactagtgggatcaacaatgattttcttgaatgggcatgaatggagatgcccgcacagtaatgtagaaatgtttcatacagctattaaaatgtaactgacctccttagaggcagattagtaactgttcctactttgtatagctaagtgacagtcacttaacttacatgactttcttttttcacattgggtctctggtcctgtgtcttcacctcatttatagcacgtctccttgatttttggtagtatcaacttcccagtgatctgttcagttaagttcttctcccgttaaccaggaagtgcttattctctcatcacagtgggaagaatagcctattgtctttcattttgcctgagtgtattttactatttgggctctgaaataaaaattatgaaatatggtgaggtcacatgttggtgctgccttgctgcataaaattctaggagggcaggttaggagacagttatgtatggcctttcgggaaaattcaaagggtgggattacaagggtgttcctcaggcatgcccctatgggccctatgtggaagcaagaagaattgactgatttacaggacttctctttatgtcaatcttaagaggatggatgaatctggacatttgttccacccgacctctgactgatggtttggaaaataactttaattaggatcatatgaccattgaaaaaggaaaaatgtagactctgacttccgtcccactgaaggattaatgaaaacctttactagcatttagagcttttcagaacatccccactgtcatgtgtctcagcagtggagactgcaagtaaggcttttaattttaggaggtttttttttttttttttttttcccctaaatggtatggccaaaagtcagagttaaaatatatatagttagattccaacttcctccttcactctaaaaatagaatccaaacccactcttcatatatgcttccagaatggggcttaagtaccaatctctgctttgcaatgggcacaatcttggtcatgtcctgaggctctctaagaaaagagaggatctaggatgggagagctagaaagttgctaactgggaagaacaaggccctgaggggttggtctaccaatctgggaagatttgaaaacaaacttctcgcaactgaaggaaggctgaaggctgctgcaagtcattgagtgactttaggatgagcaaaacattgggccacttcctaatgccctatgtgtatagtaccagaagcaaggtctcagacttaacagacccagctctgttccaaggtgagtctgaaccaatagaaagcaaacatgtgcagatatccaaacaagactgctcatgcaagtcggggctggctacccgtcttaggcagcaacagcagagctccagggagcttattcaatatttactgagacttcgaagacccagcagatgtttaatgaagtcactattttggctcaaaccctccacttctccccctcccctcaaaaagccaacaggtaaacacataaatgaaagaaacccacagaaggggatgggaaataaagaaaattctctcaagacttctccaggcccatgtcactggtcagcgtggtttttatgtgtattaggattgggggatgtgaagaaataagtatccagtactttataaccaaagcaattaaatgatattggggtagggaatgttggccagttttgtttagttttgccatcacattgtcacccagacctcacctagccccaagtaatcgggcgccccgaagagggagacagagatgtgccagagttgacccagtgtgcggatgataactactgacgaaagagtcatcgacctcagttagtggttggatgtagtcacattagtttgcctctccccatctttgtctccctggcaaggagaatatgcgggacatgatgctaagagccctgggtaaatgtggtgagaatgcacgcgtgcatatgctacacatatgtgcttctcagttgcagaaaatgaactgctttgggagattatcagtagaaagagtgttatcatattggtgctgagtgctatgtgtgcttatacaatttgttcttgtattttaataaactttgaataaaagaataaaaaaaaaaaaaaaaaaaaaaa

SEQ ID NO: 2044 - protein, 273 aa, Homo sapiens
  misc_feature (133)..(133): Xaa can be any naturally occurring amino acid
  misc_feature (266)..(266): Xaa can be any naturally occurring amino acid
MGILSVDLLITLQILPVFFSNCLFLALYDSVILLKHVVLLLSRSKSTRGEWRRMLTSEGLRCVWKSFLLDAYKQVKLGEDAPNSSVVHVSSTEGGDNSGNGTQEKIAEGATCHLLDFASPERPLVVNFGSATXPPFTSQLPAFRKLVEEFSSVADFLLVYIDEAHPSDGWAIPGDSSLSFEVKKHQNQEDRCAAAQQLLERFSLPPQCRVVADRMDNNANIAYGVAFERVCIVQRQKIAYLGGKGPFSYNLQEVRHWLEKNFSKRXKKTRLAG

SEQ ID NO: 2045 - DNA, 422 bp, Homo sapiens
caaatgagaaggttgggttaggtaatttttaaaaatcgcttcaagtttcttaactccacaattattttcctgagactcttgcaagcaactgatctttataggtcatgcctcaaattcccaattgatgtcatctgggcaaatcagtccaatgacagccacaagtggtcagaaagctttcttagcagccctcttggtcactaggcacactacctaggagtcaagctgtgacaagaggctgcttcttaaacttacaaaagataggatcttccaggatgtgctgctctgatgtttttgaagggcatagagaaacacacgggcaatgtttgcagaggcaacagactaaagaaagcacatctatagttgtattggctttgtgtgggttgtatggtaaacaggtagtcaccctgcttaatgtgggtatc

SEQ ID NO: 2046 - DNA, 4493 bp, Homo sapiens
cacgggctgagccccgcgccgccaccatgtccgtggccttcgcgtctgcccggccaagaggcaaaggggaggttacgcagcaaaccatccagaagatgctggacgagaaccaccacctgatccagtgcatcctggagtaccagagcaagggcaagacggccgagtgcacgcagtaccagcagatcctgcaccggaacctggtatacctggccacgatcgcagactccaaccagaacatgcagtccctgcttcctgccccgcccacgcagaacatgaacctgggccctggagccctgactcagagcggctccagccagggcctgcactctcagggcagcctgagtgacgccatcagcacgggcctgccaccctcctccctcctgcagggccagattggcaacgggccgagccacgtgtccatgcagcagacggcgcctaacacgctgcccaccacctccatgagcatctctgggcccggctacagccacgcgggacccgcctcgcagggcgtccccatgcaggggcaaggcaccatcggcaactacgtgtctcggaccaacatcaacatgcagtccaacccagtctccatgatgcagcagcaggcggccacgtcgcactacagctcggcgcagggcggcagccagcactaccagggccagtcgtccatcgccatgatggggcagggcagccaggggagcagcatgatggggcagcggcccatggcgccctaccggccctcccagcaaggctcttcccagcagtacctgggccaggaggagtactatggcgagcagtacagccacagccagggcgccgcggagcccatgggccagcagtactaccccgacggccatggcgattacgcctaccagcagtcatcctacacggagcagagctacgaccggtccttcgaggagtccacgcagcactactatgaggggggaaactcccagtacagccagcagcaggccgggtaccagcagggtgccgcgcagcagcagacgtactcccagcagcagtaccccagccagcagagctaccccgggcagcagcagggctacgggtctgcccagggagccccgtcacagtaccccggctaccagcaaggccaaggccagcagtacggaagctaccgagcaccgcagacagcgccgtctgcccagcagcagcggccctacggctatgaacagggccagtatggaaattaccagcagtaagggacacacattctggctggagcccttgtggtagcgtgttcatccaggggccggatgggctggcggcagctctggtgaattgtgacatgttggttacctgttcgcccagtgccacgtctgcatgtgaagcgtgctcatttcatgctgggtatgacgccgagcgcacaccactggcgtgagacagcgcttggtggtgtgatacttttggtgctgtgtatagtattgtatgtcggtacacggagaggtatcctttttttgtcccccgcccccttctcaatgtttctagctagctttgggggtcattttgtcatcagagcattctgtgcccagggacaggacagatctcgaggacaccacagtccacctgttcccgtcaacagacgttaggtctcattttcctcctcatgcagtgttgtagtgtgggttgtcaacttttctttaactggctacgccacagctggacacacatgcagcccctggagggcagcctcttcctgtgcctcgatggggtgggtgggagggcatcttctgtgcgttgggtcagtttctgttacgtaacgaaaaggataaacatctcccacgggagaggccacagatggccacttccagagcttgcccattgcctgtctctcgccaattccgtttatccaaaaaggtacatgtttttgtattaaaaagtaaacagggatcagtgactgtattccaaataaatatgaatccctaagggccgtggacaaattgcctaacccagggccagcggtattgctgaaggaaaggggcagctctctgggaagtgggccctcagagattactctggctttgacccttgtttagctgatggtcatttctgggattggaatatttaataagcccaattctaagttgataggtaattttaaatattcaaaccaaatcttcccaacagttggcaagttgtttattttatattatttcttccaggacctacttgctcagatctccaagcaagcatttcttttcttttagggatgtctgaaagtcacatccagttacattactgtgttctttctaatgaaaagtaaaggttttatatagagaaacttgagtaatttttacatttctaagacattaaatcccatttaaattctgtgtgaacattaaagacagcacacttgcaaaagtatggtcaaaggaaaaaaatcccacatttcaattaacaagtagcatggacatttgatcaacctttagttggaataataatattcatatttgctatgaatccttttaaaaaaatctttggataaatgctgacagatttccaagaactaccaagaaaatacaagagatatccaatgcttgatatatgaggcctagtaataacgatatttctctttaattgatgttttgttttaaaagttaaaagtaattcttggcgtggtggttcacgcctgtaatcccagcactttgggaggccgaagcgggcggatcacctgaggtcgggagttcgagaccagcctgaccaacatggagaaaccccgtccctactaaaaatacaaaattagccaggtatggtggtgcatacctgtaatcccagctactcgggaacctgaggcaggagaatggcttgaacccaggagacagaggttgtggtggggcaagatcgcaccattgcacccgagcctaggcaacaagagtgaaattccgtctcaaaaaaataaataaataaataaataaataagttaaaattaattctttatccagagtcgggtgctttagaatttataagtcacttatgtgttttgcttgaattaattctgacagcccctatgaggaaatctggaggcaggtaacagttcccattttagagatgaagaactgaggcacagattaaaggacttgcctgtgttgaataccagtcctgttctaggacattctcccctctcctaggagacggatgtcacgcacaaatggggagagaagtgtttattttgtaggcactaagggtttctaaaacccttaacactggtaagggctcaaaaataaacgtatgtgttcatattcgatcaccgaaatgagagttcttaattgctaattgacaaacgcgttagcaatttcagttagggagtcatctcccttgattgtgttcttttcctgtcaattttcatagacctaatttgcaaactcaatcggggactaaaatttcccactgaaaatgttaaacattttagataactgtgaagatagtttatttttattccttgccaatctgggaatatgccttttttgtgtgtttgtgtgtttttttaagtgctgtattaataatactttctgaaagaaaaggacacttaccccaaaacttcaatctgaaatgtcttacattaagaatatcttgaatgttgtgtatatattttaaaaagcactttgcaaaatagtttgtacatttatttcctaatttatacatgatttttggtgttaatatatttaatgattaataacagaatgtttatttaatgtgctgtccatttttatgtaatattatggggaaagtgatgccagcagttccttttcattattctatcttctgtcatatgaatgttgagcaaagcttaggccaacatgaattgtttgtgaagtgtggttgatggtgctttgtttttttctgactacttctatggaaggccagtgaagaagcaaaggaagacatgaaaattgacgctcattcttcttcctattgttccctgacatccagcaaattgtgaatttgaaaaatgatggccagttttcagaagtgctgacaaattcatattggtatgcaaaagctcatcacccattaaggtttgttgttgaatcaacagtactcagcatattaaaacagtacatcagaactcatgccaacagtctttatgatgggattaaggtggacaagatctcctaagatctgtgaatgggattaaggtggacaagatctcctaagatctgaaaagaaaccttaatacgctcatatggttggagtgttaagtgaacctctgattttgtcagggtttttctacgtgtaggcgtgaatagggggcaccccttcaaaactgtacaaagaagacgactgttttccatttccatttaaacatttttagccacttcatttctatttattgaacaggtcaaatttgtcttgttatttgtgagtacagtacatttaaaaaacatccttatcggttatttttttttcagtcggagtttgacgtataaattgtttatgcttttggtgtaatctcttaataaactggttcttcaaaaatc

SEQ ID NO: 2047 - protein, 404 aa, Homo sapiens
RAEPRAATMSVAFASARPRGKGEVTQQTIQKMLDENHHLIQCILEYQSKGKTAECTQYQQILHRNLVYLATIADSNQNMQSLLPAPPTQNMNLGPGALTQSGSSQGLHSQGSLSDAISTGLPPSSLLQGQIGNGPSHVSMQQTAPNTLPTTSMSISGPGYSHAGPASQGVPMQGQGTIGNYVSRTNINMQSNPVSMMQQQAATSHYSSAQGGSQHYQGQSSIAMMGQGSQGSSMMGQRPMAPYRPSQQGSSQQYLGQEEYYGEQYSHSQGAAEPMGQQYYPDGHGDYAYQQSSYTEQSYDRSFEESTQHYYEGGNSQYSQQQAGYQQGAAQQQTYSQQQYPSQQSYPGQQQGYGSAQGAPSQYPGYQQGQGQQYGSYRAPQTAPSAQQQRPYGYEQGQYGNYQQ

SEQ ID NO: 2048 - DNA, 276 bp, Homo sapiens
  misc_feature (7)..(7): n is a, c, g, or t
  misc_feature (132)..(132): n is a, c, g, or t
  misc_feature (270)..(270): n is a, c, g, or t
ttgtttnacataatacagaatatatagtggctaccttgtatcttggtctggattctctctctgagaccccggattttactttctctttggagggcgctgggacatacatctctcaatccagcttcctccgcntcctcccatcttgccccatttctgccacgtcagacacttcctgagagtctcaccttcaaaatgacaccgctgcccatccattgctcaatggtacagagtgtggggtcagtccaccacccttgacctcacggcaggcanaggtga

SEQ ID NO: 2049 - DNA, 326 bp, Homo sapiens
atccccagagccgcagctgaggccctctggcccagaagcagagtggccttcggaccagagaggctaaaagagatgctaagagaatgcctgcaaaagaagtcgccattaatgtaacagatagcatccaacagatggacagaagtcgaagagtcacgaagaactgtgtcaactagcagagagtccaagcagaagggcagatggacttcttcagtgtccttcacggcactggatcccatcaaagaaccttgaagaagtggctgccccttgctggacctgaattctactgagtccctggcaagactgtcttacctggcagcaaactgctg

SEQ ID NO: 2050 - DNA, 416 bp, Homo sapiens
tttgtttttgattttttgctaagtttttattttaattcaaggactttgcttcatacaaaatgtcattgtagaaacaacagcagaatccaaagtttggctgataaatatgactcaggcagcaaactagtcaatcacagaatttctttttaagtaggtcccagttgtgttgcatggttgggacttttttttttttttaacacttcttaaatataaagttttgcaacaaacctttgatttatatcaaatataattaaaaattaacaaatgaatacattgtatcaaaaagtacgaagatatacattatcatgcacatacttgtatatatgtatatatgtatatatgttacatgcacacataacttgttcaaactacagccactgcttgactggttccagatgcagacaactgggtgatgc

SEQ ID NO: 2051 - DNA, 633 bp, Homo sapiens
ccaagtgcctgaccgccaggccctcacacccaggctcctgggcactgtggtgtgaggcgaggcctcgggatccatcaccgcaggatgttgtgaaaagtactcgcgatggcagccaggtagcaagcccttgccagtggagagcactggatgtcatggtggcaaacaaggcagccatttgctgtcctcctcccacgagtggaaggggtttccaaggaagccacagggcagctgaccacgtgcttgtgtgaggcattttcagtctgttctgcatatgattctcagggcacactctgtggtatgtgaaataggtttccttccacatacagcagaagagaggcaaaggctggtaggaaggaggaagacattggctgggggcttggatgtggggccgtcagggcaggagggaggaagccccagctggaatgaaactcagagcaagtgaccgagggaggacacggctcctgccactgaggccgggcacctgatgcccagcactgtcctggcgccagacacagggagcaggcagtcaagtgaggtctgacccccatggccacgctcaggagagaaagaccatgctcaggacactgtccaaggtgcacaagatgctgggaggtccttgtttggtgaagaaag

SEQ ID NO: 2052 - DNA, 1891 bp, Homo sapiens
ccgcttcggggaggaggacgctgaggaggcgccgagccgcgcagcgctgcgggggaggcgcccgcgccgacgcggggcccatggccaggaccaccagccagctgtatgacgccgtgcccatccagtccagcgtggtgttatgttcctgcccatccccatcaatggtgaggacccagactgagtccagcacgccccctggcattcctggtggcagcaggcagggccccgccatggacggcactgcagccgagcctcggcccggcgccggctccctgcagcatgcccagcctccgccgcagcctcggaagaagcggcctgaggacttcaagtttgggaaaatccttggggaaggctctttttccacggttgtcctggctcgagaactggcaacctccagagaatatgcgattaaaattctggagaagcgacatatcataaaagagaacaaggtcccctatgtaaccagagagcgggatgtcatgtcgcgcctggatcaccccttctttgttaagctttacttcacatttcaggacgacgagaagctgtatttcggccttagttatgccaaaaatggagaactacttaaatatattcgcaaaatcggttcattcgatgagacctgtacccgattttacacggctgagatcgtgtctgctttagagtacttgcacggcaagggcatcattcacagggaccttaaaccggaaaacattttgttaaatgaagatatgcacatccagatcacagattttggaacagcaaaagtcttatccccagagagcaaacaagccagggccaactcattcgtgggaacagcgcagtacgtttctccagagctgctcacggagaagtccgcctgtaagagttcagacctttgggctcttggatgcataatataccagcttgtggcaggactcccaccattccgagctggaaacgagtatcttatatttcagaagatcattaagttggaatatgactttccagaaaaattcttccctaaggcaagagacctcgtggagaaacttttggttttagatgccacaaagcggttaggctgtgaggaaatggaaggatacggacctcttaaagcacacccgttcttcgagtccgtcacgtgggagaacctgcaccagcagacgcctccgaagctcaccgcttacctgccggctatgtcggaagacgacgaggactgctatggcaattatgacaatctcctgagccagtttggctgcatgcaggtgtcttcgtcctcctcctcacactccctgtcagcctccgacacgggcctgccccagaggtcaggcagcaacatagagcagtacattcacgatctggactcgaactcctttgaactggacttacagttttccgaagatgagaagaggttgttgttggagaagcaggctggcggaaacccttggcaccagtttgtagaaaataatttaatactaaagatgggcccagtggataagcggaagggtttatttgcaagacgacgacagctgttgctcacagaaggaccacatttatattatgtggatcctgtcaacaaagttctgaaaggtgaaattccttggtcacaagaacttcgaccagaggccaagaattttaaaactttctttgtccacacgcctaacaggacgtattatctgatggaccccagcgggaacgcacacaagtggtgcaggaagatccaggaggtttggaggcagcgataccagagccacccggacgccgctgtgcagtgacgtggcctgcggccgggctgcccttcgctgccaggacacctgccccagcgcggcttggccgccatccgggacgcttccagaccacctgccagccatcacaaggggaacgcagaggcggaaaccttgcagcatttttattt

SEQ ID NO: 2053 - protein, 556 aa, Homo sapiens
MARTTSQLYDAVPIQSSVVLCSCPSPSMVRTQTESSTPPGIPGGSRQGPAMDGTAAEPRPGAGSLQHAQPPPQPRKKRPEDFKFGKILGEGSFSTVVLARELATSREYAIKILEKRHIIKENKVPYVTRERDVMSRLDHPFFVKLYFTFQDDEKLYFGLSYAKNGELLKYIRKIGSFDETCTRFYTAEIVSALEYLHGKGIIHRDLKPENILLNEDMHIQITDFGTAKVLSPESKQARANSFVGTAQYVSPELLTEKSACKSSDLWALGCIIYQLVAGLPPFRAGNEYLIFQKIIKLEYDFPEKFFPKARDLVEKLLVLDATKRLGCEEMEGYGPLKAHPFFESVTWENLHQQTPPKLTAYLPAMSEDDEDCYGNYDNLLSQFGCMQVSSSSSSHSLSASDTGLPQRSGSNIEQYIHDLDSNSFELDLQFSEDEKRLLLEKQAGGNPWHQFVENNLILKMGPVDKRKGLFARRRQLLLTEGPHLYYVDPVNKVLKGEIPWSQELRPEAKNFKTFFVHTPNRTYYLMDPSGNAHKWCRKIQEVWRQRYQSHPDAAVQ

SEQ ID NO: 2054 - DNA, 379 bp, Homo sapiens
  misc_feature (248)..(248): n is a, c, g, or t
  misc_feature (260)..(260): n is a, c, g, or t
acgcgtgggcggacgcgtggggccagctgcctgcgctgctcgccagcttgctcgcactcggctgtgcggcggggcaggcatgggagccgcgcgctctctcccggcgcccacacctgtctgagcggcgcagcgagccgcggcccgggcgggctgctcggcgcggaacagtgctcggcatggcagggattccagggctcctcttccttctcttctttctgctctgtgctgttgggccaagtgagcccttnacagtgcccccntggaaacccacttggcctgcataccgcctcccttgtcgtcttgcccccagtctacccttcaatttagccaagccagactttggagccgaagccaaattagaagtatcttctttcatgtg

SEQ ID NO: 2055 - DNA, 3287 bp, Homo sapiens
ccctcaccgggggcaggagggaccaaggctgggcccagaacacatagtcctagggtaacagtgaaggggtcgtgaggggacagtgactcccttccaaccccttcttcatagggactgttggcaaacaaagaaaatcaactgggaaaatgaagacctgctggaaaattccagttttcttctttgtgtgcagtttcctggaaccctgggcatctgcagctgtcaagcgtcgccccagattccctgtcaattccaattctaatggtggaaatgaactctgtccaaagatcaggattggccaagatgacttaccagggtttgatctgatctctcagttccaggtagataaagcagcatctagaagagctatccagagagtagtgggatcagctacattgcaggtggcttacaagttgggaaataatgtagacttcaggattccaactaggaatttatatcccagtggactgcctgaagaatactccttcttgacgacgtttcgaatgactggaagcactctcaaaaagaactggaacatttggcagattcaggattcctctgggaaggagcaagttggcataaagattaatggccaaacacaatctgttgtattttcatacaagggactggatggaagtctccaaacagcagccttttcgaatttgtcctccttgtttgattcccagtggcataagatcatgattggcgtggagaggagtagtgctactctttttgttgactgcaacaggattgaatctttacctataaagccaagaggcccaattgacattgatggctttgctgtgctgggaaaacttgcagataatcctcaagtttctgttccatttgaacttcaatggatgctgatccattgtgaccccctgcggcccaggagagaaacttgccatgagctgccagccagaataacgcccagccagaccaccgacgagagaggtcccccgggtgagcagggtcctcccggggcctccggcccccctggagttccaggcatcgatggcatcgacggtgaccgaggtcctaagggccccccgggccccccgggtcctgcaggtgaaccgggaaagccaggagctccaggcaagcctggcacacctggcgctgatggattaacaggacctgatggatcccctggctccattgggtcaaagggacaaaaaggagaacctggtgtgcctggatcgcgtggatttccaggccgtggtattcctggaccccctggtcctcctgggacagcaggactccctggagagcttggccgtgtaggacctgttggtgaccctgggagaagaggaccacctggcccccctggccccccaggacccagaggaacaattggctttcatgatggagatccattgtgtcccaatgcctgtccaccaggtcgctcaggatatccaggcctaccaggcatgaggggtcataaaggggctaaaggagaaattggtgaaccaggaagacaaggacacaagggtgaagaaggtgaccagggagaactcggagaagttggagctcaaggacctccaggagcccagggtttgcgaggcatcaccggcatagttggggacaaaggggaaaaaggtgctcggggcttagatggtgaacctgggcctcagggtcttcctggtgcacctggtgatcaaggacagcgaggacctccaggagaagcaggtcccaaaggagatagaggggctgaaggtgctagaggaattcctggtctccctgggcccaaaggagacacgggtttgccaggtgtggatggccgtgatgggatccctggaatgcctggaacaaagggtgaaccaggaaaacctgggcctcctggtgatgcaggattgcaggggttaccaggtgtacctggaattcctggtgcaaagggtgttgctggtgaaaagggtagcacaggtgctccagggaagcctggtcagatgggaaattcaggcaaaccgggccaacaggggcctccaggagaggtgggaccccgaggaccccaggggcttcctggcagtagaggagaattaggaccagtgggatccccaggcctaccaggtaaactgggttctctgggtagccctggcctccctggcttgcctgggccccctggacttcctggaatgaaaggtgacaggggtgtagtcggtgaaccgggtccaaagggtgaacagggtgcctctggtgaagaaggtgaagcaggagaaaggggggaacttggagatataggattacctggcccaaagggatctgcaggtaatcctggggaacctggcttgagagggcctgagggaagtcgggggcttcctggagtggaaggaccaagaggaccacctggaccccggggtgtgcagggagaacagggtgccaccggcctgcctggtgtccagggccctccgggtagagcaccgacagatcagcacattaagcaggtttgcatgagagtcatacaagaacattttgctgagatggctgccagtcttaagcgtccagactcaggtgccactgggcttcctggaaggcctggccctcctggtccccccggccctcctggagagaatggtttcccaggccagatgggaattcgtggccttccgggcattaagggtccccctggtgctcttggtttgaggggacctaaaggtgacttgggagaaaagggggagcgtggccctccaggaagaggtcccaacggtttgccaggagctataggtctcccaggtgacccaggccctgccagctatgggaaaaatggccgagacggtgagcgaggccccccagggctggcaggaattcctggagtgcctggacccccgggacctcctgggcttcccggtttctgtgagccagcctcctgcaccatgcaggctggtcagcgagcatttaacaaagggcctgacccttgaaaggcttactgctgcatggctgtctgcatgaaccacgcctggtgaaggagcctgggtgagaaacaccatccaaagctggggcaaagatgattaccttcagcatgattacaatgtattaccttcagtatgattacagaagtcctacttgacaatcacatatagaagaacggtgctattcagtaagttctctttcctttcccttggagggaagacagcagagtcatcagttaaaaaaaaaaaaaaagaaaaccaaacacctcccttgaacaaatttatactcctgttcccaggatcttgagctttagtgtgctatacctatgtgtcttatcgtgggccactgtgccaataaacaaaaacaactgtttggtttacctc

SEQ ID NO: 2056 - protein, 921 aa, Homo sapiens
MKTCWKIPVFFFVCSFLEPWASAAVKRRPRFPVNSNSNGGNELCPKIRIGQDDLPGFDLISQFQVDKAASRRAIQRVVGSATLQVAYKLGNNVDFRIPTRNLYPSGLPEEYSFLTTFRMTGSTLKKNWNIWQIQDSSGKEQVGIKINGQTQSVVFSYKGLDGSLQTAAFSNLSSLFDSQWHKIMIGVERSSATLFVDCNRIESLPIKPRGPIDIDGFAVLGKLADNPQVSVPFELQWMLIHCDPLRPRRETCHELPARITPSQTTDERGPPGEQGPPGASGPPGVPGIDGIDGDRGPKGPPGPPGPAGEPGKPGAPGKPGTPGADGLTGPDGSPGSIGSKGQKGEPGVPGSRGFPGRGIPGPPGPPGTAGLPGELGRVGPVGDPGRRGPPGPPGPPGPRGTIGFHDGDPLCPNACPPGRSGYPGLPGMRGHKGAKGEIGEPGRQGHKGEEGDQGELGEVGAQGPPGAQGLRGITGIVGDKGEKGARGLDGEPGPQGLPGAPGDQGQRGPPGEAGPKGDRGAEGARGIPGLPGPKGDTGLPGVDGRDGIPGMPGTKGEPGKPGPPGDAGLQGLPGVPGIPGAKGVAGEKGSTGAPGKPGQMGNSGKPGQQGPPGEVGPRGPQGLPGSRGELGPVGSPGLPGKLGSLGSPGLPGLPGPPGLPGMKGDRGVVGEPGPKGEQGASGEEGEAGERGELGDIGLPGPKGSAGNPGEPGLRGPEGSRGLPGVEGPRGPPGPRGVQGEQGATGLPGVQGPPGRAPTDQHIKQVCMRVIQEHFAEMAASLKRPDSGATGLPGRPGPPGPPGPPGENGFPGQMGIRGLPGIKGPPGALGLRGPKGDLGEKGERGPPGRGPNGLPGAIGLPGDPGPASYGKNGRDGERGPPGLAGIPGVPGPPGPPGLPGFCEPASCTMQAGQRAFNKGPDP

SEQ ID NO: 2057 - DNA, 1745 bp, Homo sapiens
ccgtcgcccggatcccctgagctgcccgccatcccacgtgaccgcgccgccccccagctccaccgctgagcccgctcgccatggccctcttcggggccctcttcctagcgctgctggcaggcgcacatgcagagttcccaggctgcaagatccgcgtcacctccaaggcgctggagctggtgaagcaggaggggctgcgctttctggagcaagagctggagactatcaccattccggacctgcggggcaaagaaggccacttctactacaacatctctgaggtgaaggtcacagagctgcaactgacatcttccgagctcgatttccagccacagcaggagctgatgcttcaaatcaccaatgcctccttggggctgcgcttccggagacagctgctctactggttcttctatgatgggggctacatcaacgcctcagctgagggtgtgtccatccgcactggtctggagctctcccgggatcccgctggacggatgaaagtgtccaatgtctcctgccaggcctctgtctccagaatgcacgcggccttcgggggaaccttcaagaaggtgtatgattttctctccacgttcatcacctcagggatgcgcttcctcctcaaccagcagatctgccctgtcctctaccacgcagggacggtcctgctcaactccctcctggacaccgtgcctgtgcgcagttctgtggacgagcttgttggcattgactattccctcatgaaggatcctgtggcttccaccagcaacctggacatggacttccggggggccttcttccccctgactgagaggaactggagcctccccaaccgggcagtggagccccagctgcaggaggaagagcggatggtgtatgtggccttctctgagttcttcttcgactctgccatggagagctacttccgggcgggggccctgcagctgttgctggtgggggacaaggtgccccacgacctggacatgctgctgagggccacctactttgggagcattgtcctgctgagcccagcagtgattgactccccattgaagctggagctgcgggtcctggccccaccgcgctgcaccatcaagccctctggcaccaccatctctgtcactgctagcgtcaccattgccctggtcccaccagaccagcctgaggtccagctgtccagcatgactatggacgcccgtctcagcgccaagatggctctccgggggaaggccctgcgcacgcagctggacctgcgcaggttccgaatctattccaaccattctgcactggagtcgctggctctgatcccattacaggcccctctgaagaccatgctgcagattggggtgatgcccatgctcaatgagcggacctggcgtggggtgcagatcccactacctgagggcatcaactttgtgcatgaggtggtgacgaaccatgcgggattcctcaccatcggggctgatctccactttgccaaagggctgcgagaggtgattgagaagaaccggcctgctgatgtcagggcgtccactgcccccacaccgtccacagcagctgtctgagccctcaatccccaagctggcagctgtcattcaggaccccaacccctctcagcccctcttttcccacattcatagcctgtagtgccccctctaacccccagtgccacagagaagacgggatttgaagctgtacccaatttaattccataatcaatctatcaattacagtccgtccaccacctc

SEQ ID NO: 2058 - protein, 493 aa, Homo sapiens
MALFGALFLALLAGAHAEFPGCKIRVTSKALELVKQEGLRFLEQELETITIPDLRGKEGHFYYNISEVKVTELQLTSSELDFQPQQELMLQITNASLGLRFRRQLLYWFFYDGGYINASAEGVSIRTGLELSRDPAGRMKVSNVSCQASVSRMHAAFGGTFKKVYDFLSTFITSGMRFLLNQQICPVLYHAGTVLLNSLLDTVPVRSSVDELVGIDYSLMKDPVASTSNLDMDFRGAFFPLTERNWSLPNRAVEPQLQEEERMVYVAFSEFFFDSAMESYFRAGALQLLLVGDKVPHDLDMLLRATYFGSIVLLSPAVIDSPLKLELRVLAPPRCTIKPSGTTISVTASVTIALVPPDQPEVQLSSMTMDARLSAKMALRGKALRTQLDLRRFRIYSNHSALESLALIPLQAPLKTMLQIGVMPMLNERTWRGVQIPLPEGINFVHEVVTNHAGFLTIGADLHFAKGLREVIEKNRPADVRASTAPTPSTAAV

SEQ ID NO: 2059 - DNA, 6972 bp, Homo sapiens
cgcccccgcctctgagctcccttcccatggcggccctagtgttggaggacgggtcggtcctgcggggccagccctttggggccgccgtgtcgactgccggggaagtggtgtttcaaaccggcatggtcggctaccccgaggccctcactgatccctcctacaaggcacagatcttagtgctcacctatcctctgatcggcaactatggcatccccccagatgaaatggatgagttcggtctctgcaagtggtttgaatcctcgggcatccacgtagcagcactggtagtgggagagtgctgtcctactcccagccactggagtgccacccgcaccctgcatgagtggctgcagcagcatggcatccctggcttgcaaggagtagacactcgggagctgaccaagaagttgcgggaacaggggtctctgctggggaagctggtccagaatggaacagaaccttcatccctgccattcttggaccccaatgcccgccccctggtaccagaggtctccattaagactccacgggtattcaatacagggggtgcccctcggatccttgctttggactgtggcctcaagtataatcagatccgatgcctctgccagcgtggggctgaggtcactgtggtaccctgggaccatgcactagacagccaagagtatgagggtctcttcttaagtaatgggcctggtgaccctgcctcctatcccagtgtcgtatccacactgagccgtgttttatctgagcctaatccccgacctgtctttgggatctgcctgggacaccagctattggccttagccattggggccaagacttacaagatgagatatgggaaccgaggccataaccagccctgcttgttggtgggctctgggcgctgctttctgacatcccagaaccatgggtttgctgtggagacagactcactgccagcagactgggctcctctcttcaccaacgccaatgatggttccaatgaaggcattgtgcacaacagcttgcctttcttcagtgtccagtttcacccagagcaccaagctggcccttcagatatggaactgcttttcgatatctttctggaaactgtgaaagaggccacagctgggaaccctgggggccagacagttagagagcggctgactgagcgcctctgtccccctgggattcccactcccggctctggacttccaccaccacgaaaggttctgatcctgggctcagggggcctctccattggccaagctggagaatttgactactcgggctctcaggcaattaaggccctgaaggaggaaaacatccagacgttgctgatcaaccccaatattgccacagtgcagacctcccaggggctggccgacaaggtctattttcttcccataacacctcattatgtaacccaggtgatacgtaatgaacgccccgatggtgtgttactgacttttgggggccagactgctctgaactgtggtgtggagctgaccaaggccggggtgctggctcggtatggggtccgggtcctgggcacaccagtggagaccattgagctgaccgaggatcgacgggcctttgctgccagaatggcagagatcggagagcatgtggccccgagcgaggcagcaaattctcttgaacaggcccaggcagccgctgaacggctggggtaccctgtgctagtgcgtgcagcctttgccctgggtggcctgggctctggctttgcctctaacagggaggagctctctgctctcgtggccccagcttttgcccataccagccaagtgctagtagacaagtctctgaagggatggaaggagattgagtacgaggtggtgagagacgcctatggcaactgtgtcacggtgtgtaacatggagaacttggacccactgggcatccacactggtgagtccatagtggtggcccctagccagacactgaatgacagggagtatcagctcctgaggcagacagctatcaaggtgacccagcacctgggaattgttggggagtgcaatgtgcagtatgccttgaaccctgagtctgagcagtattacatcattgaagtgaatgccaggctctctcgcagctctgccctggccagtaaggccacaggttatccactggcttatgtggcagccaagctagcattgggcatccctttgcctgagctcaggaactctgtgacagggggtacagcagcctttgaacccagcgtggattattgtgtggtgaagattcctcgatgggaccttagcaagttcctgcgagtcagcacaaagattgggagctgcatgaagagcgttggtgaagtcatgggcattgggcgttcatttgaggaggccttccagaaggccctgcgcatggtggatgagaactgtgtgggctttgatcacacagtgaaaccagtcagcgatatggagttggagactccaacagataagcggatttttgtggtggcagctgctttgtgggctggttattcagtggaccgcctgtatgagctcacacgcatcgaccgctggttcctgcaccgaatgaagcgtatcatcgcacatgcccagctgctagaacaacaccgtggacagcctttgccgccagacctgctgcaacaggccaagtgtcttggcttctcagacaaacagattgcccttgcagttctgagcacagagctggctgttcgcaagctgcgtcaggaactggggatctgtccagcagtgaaacagattgacacagttgcagctgagtggccagcccagacaaattacctatacctaacgtattggggcaccacccatgacctcacctttcgaacacctcatgtcctagtccttggctctggcgtctaccgtattggctctagcgttgaatttgactggtgtgctgtaggctgcatccagcagctccgaaagatgggatataagaccatcatggtgaactataacccagagacagtcagcaccgactatgacatgtgtgatcgactctactttgatgagatctcttttgaggtggtgatggacatctatgagctcgagaaccctgaaggtgtgatcctatccatgggtggacagctgcccaacaacatggccatggcgttgcatcggcagcagtgccgggtgctgggcacctcccctgaagccattgactcggctgagaaccgtttcaagttttcccggctccttgacaccattggtatcagccagcctcagtggagggagctcagtgacctcgagtctgctcgccaattctgccagaccgtggggtacccctgtgtggtgcgcccctcctatgtgctgagcggtgctgctatgaatgtggcctacacggatggagacctggagcgcttcctgagcagcgcagcagccgtctccaaagagcatcccgtggtcatctccaagttcatccaggaggctaaggagattgacgtggatgccgtggcctctgatggtgtggtggcagccatcgccatctctgagcatgtggagaatgcaggtgtgcattcaggtgatgcgacgctggtgacccccccacaagatatcactgccaaaaccctggagcggatcaaagccattgtgcatgctgtgggccaggagctacaggtcacaggacccttcaatctgcagctcattgccaaggatgaccagctgaaagttattgaatgcaacgtacgtgtctctcgctccttccccttcgtttccaagacactgggtgtggacctagtagccttggccacgcgggtcatcatgggggaagaagtggaacctgtggggctaatgactggttctggagtcgtgggagtaaaggtgcctcagttctccttctcccgcttggcgggtgctgacgtggtgttgggtgtggaaatgaccagtactggggaggtggccggctttggggagagccgctgtgaggcatacctcaaggccatgctaagcactggctttaagatccccaagaagaatatcctgctgaccattggcagctataagaacaaaagcgagctgctcccaactgtgcggctactggagagcctgggctacagcctctatgccagtctcggcacagctgacttctacactgagcatggcgtcaaggtaacagctgtggactggcactttgaggaggctgtggatggtgagtgcccaccacagcggagcatcctggagcagctagctgagaaaaactttgagctggtgattaacctgtcaatgcgtggagctgggggccggcgtctctcttcctttgtcaccaagggctaccgcacccgacgcttggccgctgacttctccgtgcccctaatcatcgatatcaagtgcaccaaactctttgtggaggccctaggccagatcgggccagcccctcctttgaaggtgcatgttgactgtatgacctcccaaaagcttgtgcgactgccgggattgattgatgtccatgtgcacctgcgggaaccaggtgggacacataaggaggactttgcttcaggcacagccgctgccctggctgggggtatcaccatggtgtgtgccatgcctaatacccggccccccatcattgacgcccctgctctggccctggcccagaagctggcagaggctggcgcccggtgcgactttgcgctattccttggggcctcgtctgaaaatgcaggaaccttgggcaccgtggccgggtctgcagccgggctgaagctttacctcaatgagaccttctctgagctgcggctggacagcgtggtccagtggatggagcatttcgagacatggccctcccacctccccattgtggctcacgcagagcagcaaaccgtggctgctgtcctcatggtggctcagctcactcagcgctcagtgcacatatgtcacgtggcacggaaggaggagatcctgctaattaaagctgcaaaggcacggggcttgccagtgacctgcgaggtggctccccaccacctgttcctaagccatgatgacctggagcgcctggggcctgggaagggggaggtccggcctgagcttggctcccgccaggatgtggaagccctgtgggagaacatggctgtcatcgactgctttgcctcagaccatgctccccataccttggaggagaagtgtgggtccaggcccccacctgggttcccagggttagagaccatgctgccactactcctgacggctgtaagcgagggccggctcagcctggacgacctgctgcagcgattgcaccacaatcctcggcgcatctttcacctgcccccgcaggaggacacctatgtggaggtggatctggagcatgagtggacaattcccagccacatgcccttctccaaggcccactggacaccttttgaagggcagaaagtgaagggcaccgtccgccgtgtggtcctgcgaggggaggttgcctatatcgatgggcaggttctggtacccccgggctatggacaggatgtacggaagtggccacagggggctgttcctcagctcccaccctcagcccctgccactagtgagatgaccacgacacctgaaagaccccgccgtggcatcccagggcttcctgatggccgcttccatctgccgccccgaatccatcgagcctccgacccaggtttgccagctgaggagccaaaggagaagtcctctcggaaggtagccgagccagagctgatgggaacccctgatggcacctgctaccctccaccaccagtaccgagacaggcatctccccagaacctggggacccctggcttgctgcacccccagacctcacccctgctgcactcattagtgggccaacatatcctgtccgtccagcagttcaccaaggatcagatgtctcacctgttcaatgtggcacacacactgcgtatgatggtgcagaaggagcggagcctcgacatcctgaaggggaaggtcatggcctccatgttctatgaagtgagcacacggaccagcagctcctttgcagcagccatggcccggctgggaggtgctgtgctcagcttctcggaagccacatcgtccgtccagaagggcgaatccctggctgactccgtgcagaccatgagctgctatgccgacgtcgtcgtgctccggcacccccagcctggagcagtggagctggccgccaagcactgccggaggccagtgatcaatgctggggatggggtcggagagcaccccacccaggccctgctggacatcttcaccatccgtgaggagctgggaactgtcaatggcatgacgatcacgatggtgggtgacctgaagcacggacgcacagtacattccctggcctgcctgctcacccagtatcgtgtcagcctgcgctacgtggcacctcccagcctgcgcatgccacccactgtgcgggccttcgtggcctcccgcggcaccaagcaggaggaattcgagagcattgaggaggcgctgcctgacactgatgtgctctacatgactcgaatccagaaggaacgatttggctctacccaggagtacgaagcttgctttggtcagttcatcctcactccccacatcatgacccgggccaagaagaagatggtggtgatgcacccgatgccccgtgtcaacgagataagcgtggaagtggactcggatccccgcgcagcctacttccgccaggctgagaacggcatgtacatccgcatggctctgttagccaccgtgctgggccgtttctaggggcctggcttcctcagcctcttctctttaggcccagctgctgggcaaggaattccagtgcctcctacgggggcagcacacttagatattcctggacatccagattgctcacatgtgctgaccacacttcaggctctggactggagctctctggcatgggggtggggcctcagatgctggggcccagtctgccccatcttcattcctgcaccttaaacctgtacagtcatttttctactgacttaataaacagccgagctgtcccttg

SEQ ID NO: 2060 - protein, 2225 aa, Homo sapiens
MAALVLEDGSVLRGQPFGAAVSTAGEVVFQTGMVGYPEALTDPSYKAQILVLTYPLIGNYGIPPDEMDEFGLCKWFESSGIHVAALVVGECCPTPSHWSATRTLHEWLQQHGIPGLQGVDTRELTKKLREQGSLLGKLVQNGTEPSSLPFLDPNARPLVPEVSIKTPRVFNTGGAPRILALDCGLKYNQIRCLCQRGAEVTVVPWDHALDSQEYEGLFLSNGPGDPASYPSVVSTLSRVLSEPNPRPVFGICLGHQLLALAIGAKTYKMRYGNRGHNQPCLLVGSGRCFLTSQNHGFAVETDSLPADWAPLFTNANDGSNEGIVHNSLPFFSVQFHPEHQAGPSDMELLFDIFLETVKEATAGNPGGQTVRERLTERLCPPGIPTPGSGLPPPRKVLILGSGGLSIGQAGEFDYSGSQAIKALKEENIQTLLINPNIATVQTSQGLADKVYFLPITPHYVTQVIRNERPDGVLLTFGGQTALNCGVELTKAGVLARYGVRVLGTPVETIELTEDRRAFAARMAEIGEHVAPSEAANSLEQAQAAAERLGYPVLVRAAFALGGLGSGFASNREELSALVAPAFAHTSQVLVDKSLKGWKEIEYEVVRDAYGNCVTVCNMENLDPLGIHTGESIVVAPSQTLNDREYQLLRQTAIKVTQHLGIVGECNVQYALNPESEQYYIIEVNARLSRSSALASKATGYPLAYVAAKLALGIPLPELRNSVTGGTAAFEPSVDYCVVKIPRWDLSKFLRVSTKIGSCMKSVGEVMGIGRSFEEAFQKALRMVDENCVGFDHTVKPVSDMELETPTDKRIFVVAAALWAGYSVDRLYELTRIDRWFLHRMKRIIAHAQLLEQHRGQPLPPDLLQQAKCLGFSDKQIALAVLSTELAVRKLRQELGICPAVKQIDTVAAEWPAQTNYLYLTYWGTTHDLTFRTPHVLVLGSGVYRIGSSVEFDWCAVGCIQQLRKMGYKTIMVNYNPETVSTDYDMCDRLYFDEISFEVVMDIYELENPEGVILSMGGQLPNNMAMALHRQQCRVLGTSPEAIDSAENRFKFSRLLDTIGISQPQWRELSDLESARQFCQTVGYPCVVRPSYVLSGAAMNVAYTDGDLERFLSSAAAVSKEHPVVISKFIQEAKEIDVDAVASDGVVAAIAISEHVENAGVHSGDATLVTPPQDITAKTLERIKAIVHAVGQELQVTGPFNLQLIAKDDQLKVIECNVRVSRSFPFVSKTLGVDLVALATRVIMGEEVEPVGLMTGSGVVGVKVPQFSFSRLAGADVVLGVEMTSTGEVAGFGESRCEAYLKAMLSTGFKIPKKNILLTIGSYKNKSELLPTVRLLESLGYSLYASLGTADFYTEHGVKVTAVDWHFEEAVDGECPPQRSILEQLAEKNFELVINLSMRGAGGRRLSSFVTKGYRTRRLAADFSVPLIIDIKCTKLFVEALGQIGPAPPLKVHVDCMTSQKLVRLPGLIDVHVHLREPGGTHKEDFASGTAAALAGGITMVCAMPNTRPPIIDAPALALAQKLAEAGARCDFALFLGASSENAGTLGTVAGSAAGLKLYLNETFSELRLDSVVQWMEHFETWPSHLPIVAHAEQQTVAAVLMVAQLTQRSVHICHVARKEEILLIKAAKARGLPVTCEVAPHHLFLSHDDLERLGPGKGEVRPELGSRQDVEALWENMAVIDCFASDHAPHTLEEKCGSRPPPGFPGLETMLPLLLTAVSEGRLSLDDLLQRLHHNPRRIFHLPPQEDTYVEVDLEHEWTIPSHMPFSKAHWTPFEGQKVKGTVRRVVLRGEVAYIDGQVLVPPGYGQDVRKWPQGAVPQLPPSAPATSEMTTTPERPRRGIPGLPDGRFHLPPRIHRASDPGLPAEEPKEKSSRKVAEPELMGTPDGTCYPPPPVPRQASPQNLGTPGLLHPQTSPLLHSLVGQHILSVQQFTKDQMSHLFNVAHTLRMMVQKERSLDILKGKVMASMFYEVSTRTSSSFAAAMARLGGAVLSFSEATSSVQKGESLADSVQTMSCYADVVVLRHPQPGAVELAAKHCRRPVINAGDGVGEHPTQALLDIFTIREELGTVNGMTITMVGDLKHGRTVHSLACLLTQYRVSLRYVAPPSLRMPPTVRAFVASRGTKQEEFESIEEALPDTDVLYMTRIQKERFGSTQEYEACFGQFILTPHIMTRAKKKMVVMHPMPRVNEISVEVDSDPRAAYFRQAENGMYIRMALLATVLGRF

SEQ ID NO: 2061 - DNA, 744 bp, Homo sapiens
aaagaggacgccatgattggttggcgctggggcggcggacggtggaagggcctggcgagtctaggttttacgcctgtgctggactttctccttccatgtttccaggccgtggggggctacagagggcgagaagtcggctcagcggaaacctggatttggttctaagccgtggggttgagaaggggtgaccggaagtgatcgtgggactgaccggaagcgaggcctggaggggaaagagagagcgagacctgggagggagggggcctccagcagaaaggggcgggggaaaaggtgcaaaagcagcgtgggagcgccgggctggcttcctgcggctgctgctggtctgactgggaagcagcaagccaccactacgaactctcaagaggagtgggagtgcgggagtccagagctgcctctgggaagtctgcagtagttgagcaaaggggtcctcacgttcctgagagctgggcaggggggattttggaacctggggcagccaagaacgagcagccaagggtacgggagattagttgtgcacagagcagtgctggtcgggcttgggggtggctggtgggcactgcgtgggaaaccttggtttgtagttttcttggtttgcgttactcctgttgggtagaattaccctccgcgcctttgtacaagacacggtgtctcctggggcaaggaaggagccaggatggcctgggctctgaagctgcctctggccgacgaagtgattgaatccgg

SEQ ID NO: 2062 - DNA, 413 bp, Homo sapiens
tttttttttttttttttttttttttttttcaggggagatagtttattgtcgccagtagacccaaacaataagacaaattgcaaaagaaactcagtctgctcccaaaagcagatacatcccagcagtcgagtcacagagggccatctcagtttctctccccttccaaccaccccttccaacctctctatagcacacacaaccaagaaagtgcatatgtagttgggttttcccctccaagtgcacaaagcgcaagaacattccaaaatttgcctttggtgaatcaactcaaaacactgagaagttattacacctccccacacacacacagtgtaacttttggggtgggtgtggtgagatgtttgatatttgtatatataatatatctatacctagagagagagactatgtacagt

SEQ ID NO: 2063 - DNA, 325 bp, Homo sapiens
cggccgcgtccaggcacaggccatgcagtgacgcccccccacccctccacctttgcccggagcgcgggcagcagcccagcgcgccagccggccccggggcaggagcggtgctaggcaggggtggggtggccgggcccagggaccgggagccggggagggagccgggcaccgagcagagggcgggggaagcggcgccgaagtttgcctcggactcgccgggcgctgcggtggctccctgggccgaggactgttgctgccgctgccgccgccgcttcattgcacattcaagtggaaaattttcaggagtcagcagaaacattgtgtc

SEQ ID NO: 2064 - DNA, 332 bp, Homo sapiens
gggggacacacagtgcaggcgcccaagccgccgccgccagatcggtgccgattcctgccctgccccgaccgccagcgcgaccatgtcccatcactgggggtacggcaaacacaacggacctgagcactggcataaggacttccccattgccaagggagagcgccagtcccctgttgacatcgacactcatacagccaagtatgacccttccctgaagcccctgtctgtttcctatgatcaagcaacttccctgaggatcctcaacaatggtcatgctttcaacgtggagtttgatgactctcaggacaaagcagtgctcaagggaggacccc

SEQ ID NO: 2065 - DNA, 4073 bp, Homo sapiens
gctgggcagtgcccatgctgggatgtgctgctgctgtggctgctgcccgctgctggcccacctagagcaggggtcacttcgagagaggacccgggaaaaggagaagatgaaggaagccaaggatgcccgctataccaatgggcacctcttcaccaccatttcagtttcaggcatgaccatgtgctatgcctgtaacaagagcatcacagccaaggaagccctcatctgcccaacctgcaatgtgactatccacaaccgctgtaaagacaccctcgccaactgtaccaaggtcaagcagaagcaacagaaagcggccctgctgaagaacaacaccgccttgcagtccgtttctcttcgaagtaagacaaccatccgggagcggccaagctcggccatctacccctccgacagcttccggcagtccctcctgggctcccgccgtggccgctcctccttgtctttagccaagagtgtttctaccaccaacattgctggacatttcaatgatgagtctcccctggggctgcgccggatcctctcacagtccacagactccctcaacatgcggaaccgaaccctatccgtggaatccctcattgacgaagcagaggtaatctacagtgagctgatgagtgactttgagatggatgagaaggactttgcagctgactcttggagtcttgctgtggacagcagcttcctgcagcagcataaaaaggaggtgatgaagcagcaagatgtcatctatgagctaatccagacagagctgcaccatgtgaggacactgaagatcatgacccgcctcttccgcacggggatgctggaagagctacacttggagccaggagtggtccagggcctgttcccctgcgtggacgagctcagtgacatccatacacgcttcctcagccagctattagaacgccgacgccaggccctgtgccctggcagcacccggaactttgtcatccatcgcttgggtgatctgctcatcagccagttctcaggtcctagtgcggagcagatgtgtaagacctactcggagttctgcagccgccacagcaaggccttaaagctctataaggagctgtacgcccgagacaaacgcttccagcaattcatccggaaagtgacccgccccgccgtgctcaagcggcacggggtacaggagtgcatcctgctggtgactcagcgcatcaccaagtacccgttactcatcagccgcatcctgcagcattcccacgggatcgaggaggagcgccaggacctgaccacagcactggggctagtgaaggagctgctgtccaatgtggacgagggtatttatcagctggagaaaggggcccgtctgcaggagatctacaaccgcatggaccctcgggcccaaaccccagtgcctggcaagggcccctttggccgagaggaacttctgaggcgcaaactcatccacgatggctgcctgctctggaagacagcgacggggcgcttcaaagatgtgttagtgctgctgatgacagatgtactggtgtttctccaggaaaaggaccagaagtacatctttcctaccctggacaagccttcagtggtatcgctgcagaatctaatcgtacgagacattgccaaccaggagaaagggatgtttctgatcagcgcagccccacctgagatgtacgaggtgcacacagcatcccgggatgaccggagcacctggatccgggtcattcagcagagcgtgcgcacatgcccatccagggaggacttccccctgattgagacagaggatgaggcttacctgcggcgaattaagatggagttgcagcagaaggaccgggcactggtggagctgctgcgagagaaggtcgggctgtttgctgagatgacccatttccaggccgaagaggatggtggcagtgggatggccctgcccaccctgcccaggggccttttccgctctgagtcccttgagtcccctcgtggcgagcggctgctgcaggatgccatccgtgaggtggagggtctgaaagacctgctggtggggccaggagtggaactgctcttgacaccccgagagccagccctgcccttggaaccagacagcggtggtaacacgagtcctggggtcactgccaatggtgaggccagaaccttcaatggctccattgaactctgcagagctgactcagactctagccagagggatcgaaatggaaatcagctgagatcaccgcaagaggaggcgttacagcgattggtcaatctctatggacttctacatggcctacaggcagctgtggcccagcaggacactctgatggaagcccggttccctgagggccctgagcggcgggagaagctgtgccgagccaactctcgggatggggaggctggcagggctggggctgcccctgtggcccctgaaaagcaggccacggaactggcattactgcagcggcaacatgcgctgctgcaggaggagctacggcgctgccggcggctaggtgaagaacgggcaaccgaagctggcagcctggaggcccggctccgggagagtgagcaggcccgggcactgctggagcgtgaggccgaagaggctcgaaggcagctggccgccctgggccagaccgagccactcccagctgaggccccctgggcccgcagacctgtggatcctcggcggcgcagcctccccgcaggcgatgccctgtacttgagtttcaaccccccacagcccagccgaggcactgaccgcctggatctacctgtcactactcgctctgtccatcgaaactttgaggaccgagagaggcaggaactggggagccccgaagagcggctgcaagacagcagtgaccctgacactggcagcgaggaggaaggtagcagccgtctgtctccgccccacagtccacgagactttaccagaatgcaggacatcccggaggagacggagagccgcgacggggaggctgtagcctccgagagctaagggggcccctcccccctgccccgtgccccactgaagaacattactgagggggctaaccttggggactccaatttgccaatgatgagggaacatttgaaagaactgcaaattgtccttgccagctcttgggatccttggatacctggggccatttaagaagctaggggaattaggccacaacaccccctgggacatccgaaagctacaccacagatgccagtggttcatgccttcttcccgcaactttaggaaaatttatttatttattgtttattagttatggggggagaggggagatttaaaggaccagggacatgggaaccaagccatagggatcagagggccttgtccttgaacactactggggtatattcaggctcatccacgcagctgctgggttcttgccctaacggccctcccctgcaacatccgtcttggaggagaggctgcagccacagcaccctactgccctttaaataaaggagggctgtgggcagggccatgtccctttctcctctcccctcaacctcttactgctgttctccctttctccgtccttcatggaagccctgggagataacctggcttcctggagttgatggaataaaggttggggtggccataatggtttgttgggggtgagggaaaaaacccacagggaccagaatgttttgttgttcttttgttttcttttttgtaccaaagtcaactgcacgtgttttatatttttaagagatcgtaggcaattagagatcgaagcctcctatctccacatctctgaagaagttgaggggtgggggagagaatgacttctgccttcatctgcagtaacggggggacctatactgacctcttccccagccatttagaaacaagttctagggtgggttggaaaatctccaagagccctgacctcatcttccacctcagcaaccatgacctgaaacctcagcgtgaatttgggggatttttcagtggaacccttgcccccaaatgtcgaccagcccccaaatgtcgaagaattttcttcttgccaattttgttgtttaaaaaaaaaattcagggaaaattaaaaacctggaactcc

SEQ ID NO: 2066 - protein, 994 aa, Homo sapiens
LGSAHAGMCCCCGCCPLLAHLEQGSLRERTREKEKMKEAKDARYTNGHLFTTISVSGMTMCYACNKSITAKEALICPTCNVTIHNRCKDTLANCTKVKQKQQKAALLKNNTALQSVSLRSKTTIRERPSSAIYPSDSFRQSLLGSRRGRSSLSLAKSVSTTNIAGHFNDESPLGLRRILSQSTDSLNMRNRTLSVESLIDEAEVIYSELMSDFEMDEKDFAADSWSLAVDSSFLQQHKKEVMKQQDVIYELIQTELHHVRTLKIMTRLFRTGMLEELHLEPGVVQGLFPCVDELSDIHTRFLSQLLERRRQALCPGSTRNFVIHRLGDLLISQFSGPSAEQMCKTYSEFCSRHSKALKLYKELYARDKRFQQFIRKVTRPAVLKRHGVQECILLVTQRITKYPLLISRILQHSHGIEEERQDLTTALGLVKELLSNVDEGIYQLEKGARLQEIYNRMDPRAQTPVPGKGPFGREELLRRKLIHDGCLLWKTATGRFKDVLVLLMTDVLVFLQEKDQKYIFPTLDKPSVVSLQNLIVRDIANQEKGMFLISAAPPEMYEVHTASRDDRSTWIRVIQQSVRTCPSREDFPLIETEDEAYLRRIKMELQQKDRALVELLREKVGLFAEMTHFQAEEDGGSGMALPTLPRGLFRSESLESPRGERLLQDAIREVEGLKDLLVGPGVELLLTPREPALPLEPDSGGNTSPGVTANGEARTFNGSIELCRADSDSSQRDRNGNQLRSPQEEALQRLVNLYGLLHGLQAAVAQQDTLMEARFPEGPERREKLCRANSRDGEAGRAGAAPVAPEKQATELALLQRQHALLQEELRRCRRLGEERATEAGSLEARLRESEQARALLEREAEEARRQLAALGQTEPLPAEAPWARRPVDPRRRSLPAGDALYLSFNPPQPSRGTDRLDLPVTTRSVHRNFEDRERQELGSPEERLQDSSDPDTGSEEEGSSRLSPPHSPRDFTRMQDIPEETESRDGEAVASES

SEQ ID NO: 2067 - DNA, 3789 bp, Homo sapiens
gttcacagttgaggaccacacaatgcaaagagattttagatggctgtgggtctacgaaataggctatgcagccgataacagtagaactctgaacgtggattccactgcaatgacactacctatgtctgatccaactgcatgggccacagcaatgaataatcttggaatggcaccgctgggaattgccggacaaccaattttacctgactttgatcctgctcttggaatgatgactggaattccaccaataactccaatgatgcctggtttgggaatagtacctccaccaattcctccagatatgccagtagtaaaagagatcatacactgtaaaagctgcacgctcttccctccaaatccaaatctcccacctcctgcaacccgagaaagaccaccaggatgcaaaacagtatttgtgggtggtctgcctgaaaatgggacagagcaaatcattgtggaagttttcgagcagtgtggagagatcattgccattcgcaagagcaagaagaacttctgccacattcgctttgctgaggagtacatggtggacaaagccctgtatctgtctggttaccgcattcgcctgggctctagtactgacaagaaggacacaggcagactccacgttgatttcgcacaggctcgagatgacctgtatgagtgggagtgtaaacagcgtatgctagccagagaggagcgccatcgtagaagaatggaagaagaaagattgcgtccaccatctccacccccagtggtccactattcagatcatgaatgcagcattgttgctgaaaaattaaaagatgattccaaattctcagaagctgtacagaccttgcttacctggatagagcgaggagaggtcaaccgtcgtagcgccaataacttctactccatgatccagtcggccaacagccatgtccgccgcctggtgaacgagaaagctgcccatgagaaagatatggaagaagcaaaggagaagttcaagcaggccctttctggaattctcattcaatttgagcagatagtggctgtgtaccattccgcctccaagcagaaggcatgggaccacttcacaaaagcccagcggaagaacatcagcgtgtggtgcaaacaagctgaggaaattcgcaacattcataatgatgaattaatgggaatcaggcgagaagaagaaatggaaatgtctgatgatgaaatagaagaaatgacagaaacaaaagaaactgaggaatcagccttagtatcacaggcagaagctctgaaggaagaaaatgacagcctccgttggcagctcgatgcctaccggaatgaagtagaactgctcaagcaagaacaaggcaaagtccacagagaagatgaccctaacaaagaacagcagctgaaactcctgcaacaagccctgcaaggaatgcaacagcatctactcaaagtccaagaggaatacaaaaagaaagaagctgaacttgaaaaactcaaagatgacaagttacaggtggaaaaaatgttggaaaatcttaaagaaaaggaaagctgtgcttctaggctgtgtgcctcaaaccaggatagcgaataccctcttgagaagaccatgaacagcagtcctatcaaatctgaacgtgaagcactgctagtggggattatctccacattccttcatgttcacccatttggagcaagcattgaatacatctgttcctacttgcaccgtcttgataataagatctgcaccagcgatgtggagtgtctcatgggtagactccagcataccttcaagcaggaaatgactggagttggagccagcctggaaaagagatggaaattctgtggcttcgagggcttgaagctgacctaaatctctttgcctaacaacttgggatcctgaagataaatatgtgttggacaagcatagaaagtgatttatatttttaatggttttcaagtggaagttcctttgaatttgtcagttcattcctggaaaatcttttgagttaaaataaggatcctaggacagcacctcgaactacaggccctaaagagaaattgcctcaaaccacaagtgctgtaacttcctcccctttctgtcaattggttgtctttaaatattgcaaaagtcctgatgctaaacagtatttggagtgttttcagtgtctgtactactgttgtacaccttggtatttttttaaacactgttaactgaaatgttttgatgattttatgtgatttgtgtttctaaacttctctttacattaatgttgttactggtgaaaggcatgagagcagcactaagtcctctgtgtaactgccattgtctttccaatccccagtagaccagtaaataaataacacatcagtgtcttctagaaggtgcctgaccaggttcaccttttaaacgacaaagcatggtttgtggctttttgcaaaattactatgaaccaaaagttgacaaatgttccaaagttattttctctaacatatcacattaaagatctgtttcagaattgtaaaaagtacatctagatgtgtttacagaaagcaagtatccagtatgactggcatgtgttcatgctattcagaatcacttgtaaatagtctgcttttaaaggagggcatgttcagttttctgtgaattaaaatatgctcatgtgtgggcacacacgcacaaacacacacacgcacgcacacagtggcagaagggatttatattaatattctttcccctctggccttcttacagtctgttggtccctttgcttctgttgtcagtgtgttgaattgcaaaccgagtactgctgtaaatactatgtttacttcatgctgaatgtttgcaaagacttgatataagtattaatagtaatgaatcaatgaataaataatgagctagggtttgtgaggctttctacaaataggtcagctccacctggagtgcgaattgccagagacaccttggtagtgcccatcggcaaatcgcaatggcagcatgtgagtggaccattcagaaacttctgcttggtggaaagtaaacagagaggatggaggtttggggcgaatgtcctgaggcagagatggtctttattgtgtgtggtggtggttgtggtatttataataatgcaagcataccctcccttgagtctcaattgaagataaaagaatgtactgagcaagcaaagccaatggagagtatttcacaaaaatactttgtaaatgagatgccagtagtgttcaaagttgtatttttaaaagataaatattcctttttatacctcagttttgtgtcctgttttttaatgacttacgctctaagtaatccattagtagttatctcagtccctccctttgggttactagaatgttggaaaaagatgccaagtctgtcttgacaactggaaacagggttccacagcagcccattcgtgctgaaaactggcttcccccctgaagcaccctgctgtggcaccagcaggaagctcaggttaattttacactagcttgctcactgatgcatctctcatcaatgctacggaaggctttgattcatcagtctcgggctcttggaatacctaattttaataatatctatgaaatcaagggaaactttccatttacagttatttcttgtttaaataaactaaattaatttttaggggagagcagtaggaaaaagagctaatgcatgcggggtttaatacctaggtgatgggttgaggtgcagcaaaaccaccatggcacacgttcacctatgtaacaaacctgcacatcctgcacatgtaccccggaacttacttaaaa

SEQ ID NO: 2068 - protein, 610 aa, Homo sapiens
MQRDFRWLWVYEIGYAADNSRTLNVDSTAMTLPMSDPTAWATAMNNLGMAPLGIAGQPILPDFDPALGMMTGIPPITPMMPGLGIVPPPIPPDMPVVKEIIHCKSCTLFPPNPNLPPPATRERPPGCKTVFVGGLPENGTEQIIVEVFEQCGEIIAIRKSKKNFCHIRFAEEYMVDKALYLSGYRIRLGSSTDKKDTGRLHVDFAQARDDLYEWECKQRMLAREERHRRRMEEERLRPPSPPPVVHYSDHECSIVAEKLKDDSKFSEAVQTLLTWIERGEVNRRSANNFYSMIQSANSHVRRLVNEKAAHEKDMEEAKEKFKQALSGILIQFEQIVAVYHSASKQKAWDHFTKAQRKNISVWCKQAEEIRNIHNDELMGIRREEEMEMSDDEIEEMTETKETEESALVSQAEALKEENDSLRWQLDAYRNEVELLKQEQGKVHREDDPNKEQQLKLLQQALQGMQQHLLKVQEEYKKKEAELEKLKDDKLQVEKMLENLKEKESCASRLCASNQDSEYPLEKTMNSSPIKSEREALLVGIISTFLHVHPFGASIEYICSYLHRLDNKICTSDVECLMGRLQHTFKQEMTGVGASLEKRWKFCGFEGLKLT

SEQ ID NO: 2069 - DNA, 407 bp, Homo sapiens
  misc_feature (42)..(42): n is a, c, g, or t
  misc_feature (393)..(393): n is a, c, g, or t
ctcctgggcacaagtgatgcccccacctcagcctcctaagancccaggattataggtgtgcgccactgcttctggctgggcatctttttttaaaagtcctaatgtacagctgcaattgtgaaacattcattacctgttttcatatttagaatgagggtaatccttctagaggcacacaaagttagctgagtagcaaaaagctgggtctcaaaccaaggtcttctaatttcaaatatcatgttttatctactttaccatgaagctgaattgtgtgagcacaattatgaggtctcctttggcctcccaccctcgctgtattgtccattttccaaggtaaacacacccagttgttttcagttgttttttactctgtggattttcagtggccttctngctcttcctagtta

SEQ ID NO: 2070 - DNA, 549 bp, Homo sapiens
aacttttattaatctttattttaaaacataaccagatgcaccttggttgtttacattctctggttgccattcagtctcaaagtaaacactgggagcatatgataaatcgtagtttaaggaagccatagcacttacagagttctcaaatggttacaatataaaatctgtcataaaaatcagtaaaagatgcaaggtagaacacattttaacactggtacaatggcagtagcagctttgcaaatgtttgtctatatgatttccacaggactttttttttttgcctggcctcattatgtagcaaagcattttttcttttctttttgagatggagtcttgctctgttacccagcaggctggagtgcagtggtataaacacagctcactgcagcctcaacctcccgggctcaagtgattcttccacctcagtctcctgagtagctgggactacaggcacacatcaccgctcccggctaatttttcgttttttgtagagttggggtcttgcagtgttgcccaggcttgttttgaactcttggcctcaagcgaacc

SEQ ID NO: 2071 - DNA, 451 bp, Homo sapiens
  misc_feature (8)..(8): n is a, c, g, or t
  misc_feature (245)..(245): n is a, c, g, or t
  misc_feature (404)..(404): n is a, c, g, or t
  misc_feature (414)..(414): n is a, c, g, or t
ccgtgccntcaccccagagcagctgcagcctcagccggccgcccctccgccagccaagtccgccgctctgacccccggcagcaagtcgccaccatggtgaagatcgtgacagttaagacccaggcgtaccaggaccagaagccgggcacgagcgggctgcggaaggggtgaaggtgttccagagcagcgccaactacgcggagaacttcatccagagtatcatctccaccgtggagccggcgcanggcaggaggccacgctggtggtgggcggggacggccggttctacatgaaggaggccatccagctcatcgctcgcatcgctgccgccaacgggatcggtcgcttggttatcggacagaatggaatcctctccacccctgctgtatcctgcatcattaganaaatcaaagncattggtgggatcattctgacagccagtcacaaccca

SEQ ID NO: 2072 - DNA, 2260 bp, Homo sapiens
aagcccagcagccccggggcggatggctccggccgcctggctccgcagcgcggccgcgcgcgccctcctgcccccgatgctgctgctgctgctccagccgccgccgctgctggcccgggctctgccgccggacgtccaccacctccatgccgagaggagggggccacagccctggcatgcagccctgcccagtagcccggcacctgcccctgccacgcaggaagccccccggcctgccagcagcctcaggcctccccgctgtggcgtgcccgacccatctgatgggctgagtgcccgcaaccgacagaagaggttcgtgctttctggcgggcgctgggagaagacggacctcacctacaggatccttcggttcccatggcagttggtgcaggagcaggtgcggcagacgatggcagaggccctaaaggtatggagcgatgtgacgccactcacctttactgaggtgcacgagggccgtgctgacatcatgatcgacttcgccaggtactggcatggggacgacctgccgtttgatgggcctgggggcatcctggcccatgccttcttccccaagactcaccgagaaggggatgtccacttcgactatgatgagacctggactatcggggatgaccagggcacagacctgctgcaggtggcagcccatgaatttggccacgtgctggggctgcagcacacaacagcagccaaggccctgatgtccgccttctacacctttcgctacccactgagtctcagcccagatgactgcaggggcgttcaacacctatatggccagccctggcccactgtcacctccaggaccccagccctgggcccccaggctgggatagacaccaatgagattgcaccgctggagccagacgccccgccagatgcctgtgaggcctcctttgacgcggtctccaccatccgaggcgagctctttttcttcaaagcgggctttgtgtggcgcctccgtgggggccagctgcagcccggctacccagcattggcctctcgccactggcagggactgcccagccctgtggacgctgccttcgaggatgcccagggccacatttggttcttccaaggtgctcagtactgggtgtacgacggtgaaaagccagtcctgggccccgcacccctcaccgagctgggcctggtgaggttcccggtccatgctgccttggtctggggtcccgagaagaacaagatctacttcttccgaggcagggactactggcgtttccaccccagcacccggcgtgtagacagtcccgtgccccgcagggccactgactggagaggggtgccctctgagatcgacgctgccttccaggatgctgatggctatgcctacttcctgcgcggccgcctctactggaagtttgaccctgtgaaggtgaaggctctggaaggcttcccccgtctcgtgggtcctgacttctttggctgtgccgagcctgccaacactttcctctgaccatggcttggatgccctcaggggtgctgacccctgccaggccacgaatatcaggctagagacccatggccatctttgtggctgtgggcaccaggcatgggactgagcccatgtctcctgcagggggatggggtggggtacaaccaccatgacaactgccgggagggccacgcaggtcgtggtcacctgccagcgactgtctcagactgggcagggaggctttggcatgacttaagaggaagggcagtcttgggacccgctatgcaggtcctggcaaacctggctgccctgtctcatccctgtccctcagggtagcaccatggcaggactgggggaactggagtgtccttgctgtatccctgttgtgaggttccttccaggggctggcactgaagcaagggtgctggggccccatggccttcagccctggctgagcaactgggctgtagggcagggccacttcctgaggtcaggtcttggtaggtgcctgcatctgtctgccttctggctgacaatcctggaaatctgttctccagaatccaggccaaaaagttcacagtcaaatggggaggggtattcttcatgcaggagaccccaggccctggaggctgcaacatacctcaatcctgtcccaggccggatcctcctgaagcccttttcgcagcactgctatcctccaaagccattgtaaatgtgtgtacagtgtgtataaaccttcttcttcttttttttttttaaactgaggattgtcattaaacacagttgttttct

SEQ ID NO: 2073 - protein, 488 aa, Homo sapiens
MAPAAWLRSAAARALLPPMLLLLLQPPPLLARALPPDVHHLHAERRGPQPWHAALPSSPAPAPATQEAPRPASSLRPPRCGVPDPSDGLSARNRQKRFVLSGGRWEKTDLTYRILRFPWQLVQEQVRQTMAEALKVWSDVTPLTFTEVHEGRADIMIDFARYWHGDDLPFDGPGGILAHAFFPKTHREGDVHFDYDETWTIGDDQGTDLLQVAAHEFGHVLGLQHTTAAKALMSAFYTFRYPLSLSPDDCRGVQHLYGQPWPTVTSRTPALGPQAGIDTNEIAPLEPDAPPDACEASFDAVSTIRGELFFFKAGFVWRLRGGQLQPGYPALASRHWQGLPSPVDAAFEDAQGHIWFFQGAQYWVYDGEKPVLGPAPLTELGLVRFPVHAALVWGPEKNKIYFFRGRDYWRFHPSTRRVDSPVPRRATDWRGVPSEIDAAFQDADGYAYFLRGRLYWKFDPVKVKALEGFPRLVGPDFFGCAEPANTFL

SEQ ID NO: 2074 - DNA, 608 bp, Homo sapiens
gagccgagaggggcgaatccggcttcgctccgcgccgccgggaggagctgtctgcagccccctcctcccgccctcgcctctccctcctccttctcccgccctcctcgccgatccgggcggtgctggcagccggagcggctggcgtggcgggccgagcagccggggcagccgcgcgtggtgcatccactggtgcgccgatgcctccgtcctgtgtctctatccctcccgtggcctttgtcagctgctgcccgctgggagctggggcctgagagcgccgtgttccacgtcagacagccccgcaggtcagctggccgggccgagggcgccagagggggccatgtcgtaccagggcaagaagagcatcccgcacatcacgagtgaccgactcctcatcaaaggtggacggatcatcaacgatgaccaatccctttatgctgacgtctacctggaggatggacttatcaaacaaactaggagagaacttaatcgttcctggtggagtgaagaccattgaagccaacgggcggatggttattcccggaggtattgatgtcaacacgtacctgcagaagccctcccagggatgactgcggctgatgacttcttcc

SEQ ID NO: 2075 - DNA, 3403 bp, Homo sapiens
tggactcaagaacataggacagcttgtgaaataggttcttacttgtaaggtttgtatttatttttcttgcttttgaaatcttggatttaaatataataaaagtagatagcactgtcaatatttagactgtactgataactgtttaggtaaaggtctgttgactcttgtatcctagtaagactttgaaagtaaactttgtaaaataatgatttagtttgtcccttccctcttataaaattgaaagtgtaactcagaaagtaggctgtaagatcttcaggctgatgtaggatggtatactgcctaaccagtgaggatgacttttgggaaaataatgtggaagaaactaactgtggagcagcatcttacttatatttaattatagtatagtgaatatctggatcagcagatgatacttattttatagtagggcatttgcttttctctaattatctacttagaaaaagctgcttgcttttaaatgagagatttctggtcataaataagggggaggaattatagtttaaaagcaacacctcatgggagcaataaatgaactcacatagcagtagcttctttttcgggagctttatctgtaggtctgtacttttaacatacattattttggataataaggaggaacatatgcagcagaaaaaagaggaggaagaagttcttaaagaagtaactgcacatttccaaattactttaactgaaactcaagcccagctggaacagcatgaaatacacaatgccaaactgcagcaggagaacatggaaatgggagaaaagctaaagaagctcactgaccagtatgcactgagggaagaggtaaacggcgtttggtttgtttatagacagctgctcaccagtagcaaaagctacaccctaccgtaaagtaaaaactctttcacaggacagtattttagaacttttgtgtatgcacagtggaaattacatgtttattaggaaaagagtagaaacctgtaaacagaatgactaaattggagcatcacttggcccaagtgtcagtggagtaggataagtaaagggatttctaggagatgtgtaccacttgtctcccatatgatgctacaagattgtcaatatagcatacagatatttttctcttatgcagtctaataatacagatttgttccctaaatactctgtatctcagatttctgtgccaatctgaacaatataaataggagaattgtgctatttgtgagaataaggaacctactaattacccatcaccaagtcacattgtttgtgtaatcaaagaagtaaaaagtttgtggaggactcaatagttgtcgaacctagtcattggagttattttataaattgatgtggaagttgtatgatggctaaataaaaaacaaataggtgataacctgcttatttgtttttattttttctttacttttagaggtctatacatagggtaagatttcaattttcaaaggatgcatccccttcctttattatgctttaagctagtaaaatatatatttaaatccttacttagtagattaaaattggaaatagaaagtgacaacttagaaattaataaaacagtaaatattactttatgcatatcaaaatgttattttgagttacaccttttcatgctacttttgaaaacatttttctttaagattttgagtatcttttaaaccattttcctctatgtttcaagaacatttcaaacttattatggaagctgcaaacttatagtagaatatatcacttggctttagcaattatttacttttgtttctagcaactcttgtttccatctatttttgagcaaatccaagatattatatcattttatttattactattcaaatatgcatcatgaaataagattctttttaagccataatcactgtactatttttactccaaaaggttaaacaattgctatgtaatcacataccttctcactgtactatttaaatatctgttacttcccttttccttcaggttgtttacatcaacatcaaaataaggtttatacattttattgttttaatatgtctcaagtctttttagtatataagcttcccccccctcttttttttccttggaatgtatttattaaagaaattttttaggcctatatagtgaacttttaaaattaaatttgttttatattataaagcatattatgaatatcatcagtttttttaaaagaatcctttaaattccattgttttaaataatggtattaaaaatgattaattttattttattttttattattttactctttaggatttatattattttaactgtattaaactctccaaatttgctatagaagtagcagattgggagaggacatgtgttcaagttgtactacttgtatgtcttgtttagatattacagtctttttcttttatcagaaaataattgaataatgataaaatcagttgcagattaagacagattatctgttgcagtcttctcaaaacttaatttaagtacattattttcagctagcatttcttccttcacatagaacctccatgtgtggagggatttcctaatgagtctattgtatgtacaatagcacttaatgacatagcttttaaataataacaggattttaccaaatgtttaatatgtgccaggcatcaagcaccttacacagtttaattattgcatagatttggacagcaactttgcaagttaggtatggtcatgaacctttgcagataaggaaactgtgtttcacaaggagaagaaattgtcctggatcatacaataagctaggatttgctccagaccatttttttcattttatcaggctacctacaattaaggaatttcagaagattttgtgaacaaaaaatgtccaggaattatgtgtgtaataaatgaatttgatattttgatctccttatccatctttttcttgataaaatatcagcttttttttttccaatgtagggcagaagcaagaagtacagatattttgatggggacagcccacgtctgatagggtgggacatggggcagcagttagagggttgtgctctttctagtgtgggatagtttgcaagatgatatgttgtagccacttctgcagtgacggggacagaaggagtcagtgttcttaactacagtggtagcagcagaaaagaagggtaagcagggttctagaagtttgtgttatgttttctccccactgtatttatttctttggttagtggtgcaagaaattctgttttcctgtagcaaattaataaagcgttcaaacataaggaattacgacaacagcttgtagatgccagacttcaacaaacagcacagctgataaaagaagctgatgaaagacatcagagagagagagagtttgtaagttctacttcttgaaaaaaaaaaaaaaaaa

SEQ ID NO: 2076 - DNA, 4221 bp, Homo sapiens
gtcggccgtcccctttaatttttaaatacacggtcccctcttttctctggggggggcaagcaagaaatcaaagaaggaggagacaagccgtcaattttctccaaaacaaaccccaccgggcaatttggtctcggggtagggggagacggggtgattgcaaattattccaggacgagatccagttctccagcgggaaaggggcaaaggaacgccgcgcgttggaagggccagggtacgcagctccccttgcagcgcccgcaggacccccgcaagctcgtgccggcgaaatcggagaccgccgatctgtcctcgttctctcctgcacgtctggctgcattcggaggaagacctggggcgcgagcgagcggcgacagcatgagcctgtgctgacctccgcgcggcgggccgagcccagggctttgtcgcggtacctgcgcccagcccgcgccgcaactctgtgcccagcttttgcaatcttttgttgcagcgctgaccgcaccaagttaaatgctcccttgcaatttttcttttttttgtttgtttgtttaatttttggagagctcgcgatcttggaaaagcctcagacgccatctacagttaaaacgtaggtaactgccctctcccgcaccccccccttacacgccccccaccctttccaccaaaaaaagggggtgcagcgcggattctggctgccgtgcgtcgccagccggtagacccgtgcttgtttcctttctctttttgtttggcttctaacgcgttgggactgagtcgccgccgtgagctccccgaagactgcacaaactaccgcgggctcctccgccccgtctgcgattcggaagccggcctgggggtcgcgtcgggagccctgcgctgcagctccgcaccttagcagcccgggtactcatccagatccacgccggggacacacacacagagtaactaaaagtgcggcgattctgcacatcgccgactgctttggggtaacaaaaagacccgagttgcctgccgaccgaggacccccgggagccgggctcggagcagacgaggtatccggcggcgcccatttgggggcttctaactctttctccacgcagcccctcttctgtcccctcccctctcgctcccttttaaaatcagtggcaccgaggcgcctgcagccgcactcgccagcgactcatctctccagcgggtttttttttgtttgtcgtgtgcgatcctcacactcatgaacatacacaggtctacccccatcacaatagcgagatatgggagatcgcggaacaaaacccaggatttcgaagagttgtcgtctataaggtccgcggagcccagccagagtttcagcccgaacctcggctccccgagcccgcccgagactccgaacttgtcgcattgcgtttcttgtatcgggaaatacttattgttggaacctctggagggagaccacgtttttcgtgccgtgcatctgcacagcggagaggagctggtgtgcaaggtgtttgatatcagctgctaccaggaatccctggcaccgtgcttttgcctgtctgctcatagtaacatcaaccaaatcactgaaattatcctgggtgagaccaaagcctatgtgttctttgagcgaagctatggggacatgcattccttcgtccgcacctgcaagaagctgagagaggaggaggcagccagactgttctaccagattgcctcggcagtggcccactgccatgacggggggctggtgctgcgggacctcaagctgcggaaattcatctttaaggacgaagagaggactcgggtcaagctggaaagcctggaagacgcctacattctgcggggagatgatgattccctctccgacaagcatggctgcccggcttacgtaagcccagagatcttgaacaccagtggcagctactcgggcaaagcagccgacgtgtggagcctgggggtgatgctgtacaccatgttggtggggcggtaccctttccatgacattgaacccagctccctcttcagcaagatccggcgtggccagttcaacattccagagactctgtcgcccaaggccaagtgcctcatccgaagcattctgcgtcgggagccctcagagcggctgacctcgcaggaaattctggaccatccttggttttctacagattttagcgtctcgaattcagcatatggtgctaaggaagtgtctgaccagctggtgccggacgtcaacatggaagagaacttggaccctttctttaactgagctcatgccccacggagacttagcaggttccaggagtgagcgagggcagcggaaaggagttcttccgggggacacgaattgcctggctgagtagcaagaaagacacactcttaagtttcttggttcagagcaggaaaaccttcaaggagctgactgaccacgtagcatgggggcaagaggcgtgggatggggattggggtgagatggatgggagcccgctggagcttgtcttccctaacatagcctgggagaccaccccttgccacttgggccacttccgcctaccccacttttcattttgttccaaaatagttgcagatcctgacagaatcaaaactctctgcctcaaacacacatcctggcatcgcactgttagcatttaacttcttgttaggattcagggaaggaacagttggccaagaattttttttcttttaaacaagccaaccacctagctggtaattaatgaggttcacttaaaaaaaaaattcggtgcacacagactgacatgaaacctgggtgctacagtaaaagaaaacaaaagtccagtttgtgtctcttaatcgctcacttcaactcatttcttctaaataaactatttaatatcctggtcaggaaatgacatgttaatgctttgctccctgaagggggaaaaaatctgtcctttaacaagctattctgttttgtgtcaattgggtccgtggcaaggaagctattaggaagtcaaacggtccaggatgcattacctgctaatccttaggtttaaagggggaaagaaaagggaagaagaaaggaaaagagaaatccaactcctttttcatgttttgcttttgaacaatgagggtttgtgtgacaggcattcctctttgctgagatgatagcaatggcctgagattttagcaagctcctggagtctgatgcttttgcagtactctgatcgcaactaaacatttgtctttgttttattagaaactagtgaaacaaagcaggttgtcccacatgtataaaatacagggcagctatttagttttctttacagagaatgatccttttaaggcttgtaaggccctctggtttggacaaaaaccctcagtagagacaagcgggaaggataattagctgaaagctatgatgatataaataaaaacagctctctatcccaatacgcacctttgtattttcaagaactcttctatttattaaggaaaatgtcacattgtgatgtattaagccagtacttcaattacgggttgacttgggatgacatattacatgctgtagttaacatttataattctttttccttgtttgagtatttctgtctctgaaataaccttttacttggcttttctagatagctttatttgatttcgagtggcaaaatgttttttattacggcttttctattgctgtatgatacagaactcttttggcataaatatttgtgttcccagtacctcacttgttcggatttgactgcctgtatatgttttgtgaaatggtcctgtttttgggtaggtgacacgtggactctagtatgtaaatgttacttgaatctgtgcttcataatagtgtgtggcatgtatgtgcagactcttggatgctttatgcctgcgcaccaggagccctgtcctcacgttcccaggagggcggcttcacccttcgtaaccaggagacaaggcggccatggatttgcccttgattctattttgctaatggaagatagaaaggagagaaggtttttttttttttttaacattctgaagatggtgctgtgtcaagaaggaccttttttttcccctctcccctattttttaagtaccttggaggaggagaggttggtgacatgcatggtggggatctatggcctctggtgctttgtcctgtatttggtttaatgtttttgtcctaatctcttcaatcaataaaattgtgcgtatttaactaaaaaaaaaaaaaaaaaa

SEQ ID NO: 2077 - protein, 343 aa, Homo sapiens
MNIHRSTPITIARYGRSRNKTQDFEELSSIRSAEPSQSFSPNLGSPSPPETPNLSHCVSCIGKYLLLEPLEGDHVFRAVHLHSGEELVCKVFDISCYQESLAPCFCLSAHSNINQITEIILGETKAYVFFERSYGDMHSFVRTCKKLREEEAARLFYQIASAVAHCHDGGLVLRDLKLRKFIFKDEERTRVKLESLEDAYILRGDDDSLSDKHGCPAYVSPEILNTSGSYSGKAADVWSLGVMLYTMLVGRYPFHDIEPSSLFSKIRRGQFNIPETLSPKAKCLIRSILRREPSERLTSQEILDHPWFSTDFSVSNSAYGAKEVSDQLVPDVNMEENLDPFFN

SEQ ID NO: 2078 - DNA, 229 bp, Homo sapiens
ggtgaataccaggagcctggaggaaatgttaaaggggtttgggctccacctgccccgggttttggagaggatgtgcccaataggcttgtcgataacattgatatgatagatggagatggagatgatatggaacggttcatggaggagatgagagagctaaggaggaaaattagggaacttcagttgaggtacagtctgcgcattcttataggggaccctcctcaccatg

SEQ ID NO: 2079 - DNA, 773 bp, Homo sapiens
ggctaggtacgaggctgggtggtgctggaaaaaagcgacttgtggcggtcgagcgtggcgcaggcgaatcctcggcactaagcaaatatggacctcgcggcggcagcggagccgggcgccggcagccagcacctggaggtccgcgacgaggtggccgagaagtgccagaaactgttcctggacttcttggaggagtttcagagcagcgatggagaaattaaatacttgcaattagcagaggaactgattcgtcctgagagaaacacatggttgtgagttttgtggacctggaacaatttaaccagcaactttccaccaccattcaagaggagttctatagagtttacccttacctgtgtcgggccttgaaaacattcgtcaaagaccgtaaagagatccctcttgccaaggatttttatgttgcattccaagacctgcctaccagacacaagattcgagagctcacctcatccagaattggtttgctcactcgcatcagtgggcaggtggtgcggactcacccagttcacccagagcttgtgagcggaacttttctgtgcttggactgtcagacagtgatcagggatgtagaacagcagttcaaatacacacagccaaacatctgccgaaatccagtttgtgccaacaggaggagattcttactggatacaaattaatcacgattgtgattttcaaaggttcgtttcaagagaccagctgagcttctcgaggggtatcccgcagttagagtatttaggtgagctgggatcgtc

SEQ ID NO: 2080 - DNA, 1902 bp, Homo sapiens
tctctaagtgagtttggtcggaggctgccattcacagtgacttgtatttgccacagcagctctttctaagcccagtcctgggattatctcagggatcatcccacaccccagcggggagatgggccaagtccccacctgacctcatcttaggtagagaggcttccatggaagtgtgggctggctgtggggggttgagacctagccccgttcttttgacatttcaccctgtgttctccaaactccagcaagcagcttccatagctcattaaatttgactgaaggtctgatggcttgcaaagcaaattctttacaactgttataaaggtttcattgcttaagcatataatctagcaaaactgccaagccccctccactccctaaactctaagacttgccagggaagagaacagtggccagtggactgcaggagtaactgcactcagcccagaactccctggaggacacagggaaggttctggaaaggtggcggtacctcacagggagagacgtggtgctccagggcccaacttgctcatgttcagatcctcactctgcaacccaccagccggctgtgagtggctacacaatctctgcctcagtttccctatctgtacatgggttgttcatagcctccacctcagagggtagtaatgatgccaagctcttagaacagtgctcagcatgtgtgcatcctgtgcctactctatgccaagcactacagagagaaaaatgaacaaaatagggagaaatccctgccctcatggagtttacatcggggcagggggcgggggcggcacagagcagacaatcaatacagtgattagcccccagttaggttaggcatttccaatctttgccaataagccacatatttgcccaagttagggtgcatccttcccatgaactttgactgtgacctttgactatggggtgacatcttatagctgtggtgttttgccaaccagcagctcttggtacacaaaatgtgctgctagcaggtgccccggccaaccttgtccttgacccacctgcctgttaagaaaagggtgttgtgttttgcaacagcagtaaaatgggtcaaggtttagtcagttggaagttgtgtcaaaactcactatggttggttgagggctcgaagtctcccagcattcattaacaactatctgttcaatgattatctccctggggcgtgttgcagtgagttggcccaaagcataactgaccctggccgtgatccagagacctgccccctgacgtcagtggcgagcctccctgggtgcagctgaggggcagggctattcttttccacagtatttaaagctgggaggttctgccaccaagcacggccttcccactgggaacacaaacttgctggcgggaagagcccggaaagaaacctgtggatctcccttcgagatcatccaaagagaagaaaggtaagtagagctttgcatttacattttgaaaaattacaaagatgaactcatttttttcctgagagcaataactatttggcaatgcacagccctggcaaaaggccgtcgaatgtgtttgaaggtgtctgttgttgtttttgttcaggacgcttgcgttttctatttcaggtgacctcacattcgtgccccttagcagcactctgcagaaatgcctcctcagctgcaaaacggcctgaacctctcggccaaagttgtccagggaagcctggacagcctaccccaggcagtgagggagtttctcgagaataacgctgagctgtgtcagcctgatcacatccacatctgtgacggctctgaggaggagaatgggcggcttctgggccagatggaggaagagggcatcctcaggcggctgaagaagtatgacaactggtaagctcggcccccgctgcctgtcccagcaccc

SEQ ID NO: 2081 - protein, 74 aa, Homo sapiens
MPPQLQNGLNLSAKVVQGSLDSLPQAVREFLENNAELCQPDHIHICDGSEEENGRLLGQMEEEGILRRLKKYDN

SEQ ID NO: 2082 - DNA, 406 bp, Homo sapiens
  misc_feature (60)..(60): n is a, c, g, or t
  misc_feature (194)..(194): n is a, c, g, or t
ttttttttttctctggggcaatagcagaataggagcaagccagcactagtcagctaactnagtgactcaaccaaggccttttttccttgttatctttgcagatacttcattttcttagcgtttctggagattacaacatcctgcggttccgtttctgggaactttactgatttatctcccccctcacacaaatnagcattgattcctgcatttctgaagatctcaagatctggactactgttgaaaaaatttccagtgaggctcacttatgtctgtaaagatgggaaaaaaatacaagaacattgttctactaaaaggattagaggtcatcaatgattatcattttagaatggttaagtccttactgagcaacgatttaaaacttaatttaaaaatgagagaagag

SEQ ID NO: 2083 - DNA, 2002 bp, Homo sapiens
tataacgtgagggctgaatgcagcccattctctggagaacttcctcacacaccgcagcaaagagaagactgaaagacaaacctgggtgcagccagagaggtccagatagatgagcttgtggcatccattccccaagttcagcctagggactccacgtaccccagctgggtctcattgttccagaactgcattagttaagattacccagacttggatttcaaaggaatactttcattgttccgtctgtaacacgaagtaattggggccagctggatgtcaggatgcgtgtggttaccattgtaatcttgctctgcttttgcaaagcggctgagctgcgcaaagcaagcccaggcagtgtgagaagccgagtgaatcatggccgggcgggtggaggccggagaggctccaacccggtcaaacgctacgcaccaggcctcccgtgtgacgtgtacacatatctccatgagaaatacttagattgtcaagaaagaaaattagtttatgtgctgcctggttggcctcaggatttgctgcacatgctgctagcaagaaacaagatccgcacattgaagaacaacatgttttccaagtttaaaaagctgaaaagcctggatctgcagcagaatgagatctctaaaattgagagtgaggcgttctttggtttaaacaaactcaccaccctcttactgcagcacaaccagatcaaagtcttgacggaggaagtgttcatttacacacctctcttgagctacctgcgtctttatgacaacccctggcactgtacttgtgagatagaaacgcttatttcaatgttgcagattcccaggaaccggaatttggcgaactacgccaagtgtgaaagtccacaagaacaaaaaaataaaaaactgcggcagataaaatctgaacagttgtgtaatgaagaagaaaaggaacaattggacccgaaaccccaagtgtcagggagacccccagtcatcaagcctgaggtggactcaactttttgccacaattatgtgtttcccatacaaacactggactgcaaaaggaaagagttgaaaaaagtgccaaacaacatccctccagatattgttaaacttgacttgtcatacaataaaatcaaccaacttcgacccaaggaatttgaagatgttcatgagctgaagaaattaaacctcagcagcaatggcattgaattcatcgatcctgggtctttgagatgaaaccctgcaagtagacttacgtgaatgatttttgctgtgccgcttttttagggctcacacatttagaagaattagatttatcaaacaacagtctgcaaaactttgactatggcgtattagaagacttgtattttttgaaactcttgtggctcagagataacccttggagatgtgactacaacattcactacctctactactggttaaagcaccactacaatgtccattttaatggcctggaatgcaaaacgcctgaagaatacaaaggatggtctgtgggaaaatatattagaagttactatgaagaatgccccaaagacaagttaccagcatatcctgagtcatttgaccaagacacagaagatgatgaatgggaaaaaaaacatagagatcacaccgcaaagaagcaaagcgtaataattactatagtaggataaggtagaaattgttctgattgtaattagttttgtattttctatactggtgttagaaaacatatgtttacatttgattaactgtgttgcctatttatgcagggtaatccagctaaaggaagctttctttaattataagtattattgtgactattatagtaatcaagagaatgctatcatcctgcttgcctgtccatttgtggaacagcatctggtgatatgcaattccacactggtaacctgcagcagttgggtcctaatgatggcattagactttcataatgtcctgtataaatgtttttactgcttttagaaaataaagaaaaaaaacttggttcatgttta

SEQ ID NO: 2084 - protein, 313 aa, Homo sapiens
MRVVTIVILLCFCKAAELRKASPGSVRSRVNHGRAGGGRRGSNPVKRYAPGLPCDVYTYLHEKYLDCQERKLVYVLPGWPQDLLHMLLARNKIRTLKNNMFSKFKKLKSLDLQQNEISKIESEAFFGLNKLTTLLLQHNQIKVLTEEVFIYTPLLSYLRLYDNPWHCTCEIETLISMLQIPRNRNLANYAKCESPQEQKNKKLRQIKSEQLCNEEEKEQLDPKPQVSGRPPVIKPEVDSTFCHNYVFPIQTLDCKRKELKKVPNNIPPDIVKLDLSYNKINQLRPKEFEDVHELKKLNLSSNGIEFIDPGSLR

SEQ ID NO: 2085 - DNA, 501 bp, Homo sapiens
tgaaaatagaccaatcatttaagagctttttagcaaatgattcaattcttactctttttctcccaagattgaaaagcataatgtatttctctaaagtaggaatctagagagcccctgtgagtggacaaatgtcagtaacacttgaacacatgagaagataagtgttatgttgtgataatttaaagttaaatttgcttttcgggtaggatccctaaatagatgggatttttaaatagatgatatatagatgacaattgcaattgtcattttcattattttccctacagtaaagaacctagctctgagcagtgaaattgtaatggcactttaaaggaagtaagccgttaactgttctctagtggagcgatctccaactgttttggcactagggacgggttttgtggaagaaaatttttccacaggactgggggtttagggggatggtttcaggatgattcaagtacattacatttatcattagattctcataaggagcatgca

SEQ ID NO: 2086 - DNA, 190 bp, Homo sapiens
  misc_feature (77)..(77): n is a, c, g, or t
attttttttgttttagttcaaacagctggtcattaatgcagtccccatttctagagcgaagtgctgctggacatgantgcccgcctgattaatgctgcccctccgagggtccttcacccagcagtcatgctcgcagcagaataatgtagcatgatgtgattgcactctaacaggatagtatgtcattgtg

SEQ ID NO: 2087 - DNA, 4092 bp, Homo sapiens
agccagcccttgccgtggccggagccgagcggcgcatccgggccggagaagaggacgacgacgaggtcctcgaagtggacccgtttgcgaagcgccagggagaaggaggagcggacgcatcgtagaaaggggtggtggcgcccgaccccgcgccccggcccgaagctctgagggcttcccggcccccactgcctgcggcatggcccggggctcggcgctcccgcggcggccgctgctgtgcatcccggccgtctgggcggccgccgcgcttctgctctcagtgtcccggacttcaggtgaagtggaggttctggatccgaacgaccctttaggaccccttgatgggcaggacggcccgattccaactctgaaaggttactttctgaattttctggagccagtaaacaatatcaccattgtccaaggccagacggcaattctgcactgcaaggtggcaggaaacccaccccctaacgtgcggtggctaaagaatgatgccccggtggtgcaggagccgcggcggatcatcatccggaagacagaatatggttcacgactgcgaatccaggacctggacacgacagacactggctactaccagtgcgtggccaccaacgggatgaagaccattaccgccactggcgtcctgtttgtgcggctgggtccaacgcacagcccaaatcataactttcaggatgattaccacgaggatgggttctgccagccttaccggggaattgcctgtgcacgcttcattggcaaccggaccatttatgtggactcgcttcagatgcagggggagattgaaaaccgaatcacagcggccttcaccatgatcggcacgtctacgcacctgtcggaccagtgctcacagttcgccatcccatccttctgccacttcgtgtttcctctgtgcgacgcgcgctcccgggcacccaagccgcgtgagctgtgccgcgacgagtgcgaggtgctggagagcgacctgtgccgccaggagtacaccatcgcccgctccaacccgctcatcctcatgcggcttcagctgcccaagtgtgaggcgctgcccatgcctgagagccccgacgctgccaactgcatgcgcattggcatcccagccgagaggctgggccgctaccatcagtgctataacggctcaggcatggattacagaggaacggcaagcaccaccaagtcaggccaccagtgccagccgtgggccctgcagcacccccacagccaccacctgtccagcacagacttccctgagcttggaggggggcacgcctactgccggaaccccggaggccagatggagggcccctggtgctttacgcagaataaaaacgtacgcatggaactgtgtgacgtaccctcgtgtagtccccgagacagcagcaagatggggattctgtacatcttggtccccagcatcgcaattccactggtcatcgcttgccttttcttcttggtttgcatgtgccggaataagcagaaggcatctgcgtccacaccgcagcggcgacagctgatggcctcgcccagccaagacatggaaatgcccctcattaaccagcacaaacaggccaaactcaaagagatcagcctgtctgcggtgaggttcatggaggagctgggagaggaccggtttgggaaagtctacaaaggtcacctgttcggccctgccccgggggagcagacccaggctgtggccatcaaaacgctgaaggacaaagcggaggggcccctgcgggaggagttccggcatgaggctatgctgcgagcacggctgcaacaccccaacgtcgtctgcctgctgggcgtggtgaccaaggaccagcccctgagcatgatcttcagctactgttcgcacggcgacctccacgaattcctggtcatgcgctcgccgcactcggacgtgggcagcaccgatgatgaccgcacggtgaagtccgccctggagccccccgacttcgtgcaccttgtggcacagatcgcggcggggatggagtacctatccagccaccacgtggttcacaaggacctggccacccgcaatgtgctagtgtacgacaagctgaacgtgaagatctcagacttgggcctcttccgagaggtgtatgccgccgattactacaagctgctggggaactcgctgctgcctatccgctggatggccccagaggccatcatgtacggcaagttctccatcgactcagacatctggtcctacggtgtggtcctgtgggaggtcttcagctacggcctgcagccctactgcgggtactccaaccaggatgtggtggagatgatccggaaccggcaggtgctgccttgccccgatgactgtcccgcctgggtgtatgccctcatgatcgagtgctggaacgagttccccagccggcggccccgcttcaaggacatccacagccggctccgagcctggggcaacctttccaactacaacagctcggcgcagacctcgggggccagcaacaccacgcagaccagctccctgagcaccagcccagtgagcaatgtgagcaacgcccgctacgtggggcccaagcagaaggccccgcccttcccacagccccagttcatccccatgaagggccagatcagacccatggtgcccccgccgcagctctacgtccccgtcaacggctaccagccggtgccggcctatggggcctacctgcccaacttctacccggtgcagatcccaatgcagatggccccgcagcaggtgcctcctcagatggtccccaagcccagctcacaccacagtggcagtggctccaccagcacaggctacgtcaccacggccccctccaacacatccatggcagacagggcagccctgctctcagagggcgctgatgacacacagaacgccccagaagatggggcccagagcaccgtgcaggaagcagaggaggaggaggaaggctctgtcccagagactgagctgctgggggactgtgacactctgcaggtggacgaggcccaagtccagctggaagcttgagtggcaccagggcccggggttcggggatagaagccccgccgagaccccacagggacctcagtcacctttgagaagacaccatactcagcaatcacaagagcccgccggccagtgggcttgtttgcagactgggtgaggtggagccctgctcctctctgtcctctgacacagagagctgccctgcctaggagcacccaagccaggcagggggtctggcagcacggcgtcctggggagcaggacacatggtcatccccagggctgtatacattgattctggtggtagactggtagtgagcagcaaatgcctttcaagaaaataggtggcagcttcactccatgtcatatatggagtgaatatttcaaaacgttgggaataagggcctgcaaaaggcagcgaggaggcacctcgggtcttgaggttcctgacaaccgatctggtctgttggtttgaggatgaaggggctccatttctgctgcctccctgctgagaatattctccctttagcagccaaagattcgctggaacggaggctgccctctgctgcctgttggggtcggaagacaaggggcttctgaaatgggagttcctgagatacaacaaaatgtgtgccttcaaagaaactgacagctttgtatttggtgaaatggttttaattatactccatgtgtattttgcccactttttttgggaattcaagggaaagtgtttcttgggtttggaatgttcagaggaagcagtattgtacagaacacggtattgttatttttgttaagaatcatgtacagagcttaaatgtaatttatatgtttttaatatgccattttcattgaagtattttggtcttaagatgactttagtaatttaactgtttatgttacccacgttgggatccagttggtcttggtttgcttctctctgtaccacgtgcacatgaggtccattcattttacagcccctgttacacacagacccacaggcagccgtctgtgcccgcacacattgttggtcctatttgtaaatcccacacccggtgtatccaataaagtgaaaccaacccc

SEQ ID NO: 2088 - protein, 943 aa, Homo sapiens [sequence omitted]

SEQ ID NO: 2089 - DNA, 93443 bp, Homo sapiens
gatcacgaggtcaggagatcgagaccatcctaacacagtgaaaccccgtctctactaaaaatacaaaaaattagccaggcgtggtggtgggtgcctgtaatcccagctactcaggaggctgaggcaggagaatggcgtgaatccgggaggtggagcttgcagtgagccgagatcgcgccactgcagtccagcctgggggacacagcgagactccgtctcacaaaaaaaaaaaaaagaaaagtttattattcttaggcccagcatggtggcttgcgcctgcaatcctaacactttgggaggcagaggctggcgcatcacttgaggtcaggatttcaagaccagcctggccaacacggtgaaactctgtctctactaaaaatacaaaaattagccggagtggttgtgggcacctgtaatcccagctaatagggaggctgaagcaggagaatcgcttgaacccagaagcacaggccacaggctgcagtaagccgagatcaagccactgcactccagcctgggcaagagagccaggctctgtctcaaaacaaggaagagaacagtatgttattcgtaacaaaataattaatattttaaaggagatgattggtcagttacattaatgctgtgggctacaggcacagtaagccttttttcagcagggttacctcgatgagagcctggctggcttcctcacttagccgcggcatgatggtgctgtgcgcgtaggcaatgtagtcctttagcaccgccatgtccaggagctcctcctctgcctgctcctcgctctggtagtacagtgcgaccaggtggtgagccagacgcctgtcataggcttcgtcctgagggtccagcaagaggaagatcaaatcaaacctaagaaaacaaagtaaaaatactgtttttccagcaccttgtgaggccgaggcaggtggatcacctgaggttggtagtttgagaccagcctggccaacacggtgaaaccttgtctctactaaaaatgcaacaattagccaggagtggtggtgcctgcctgtaatcccagctacttgggaggctgaagcaggagaatcgcttgaacctggaaggcgaaggttgcggtgagccaagttcgcgtcactgcactccagcctggccgacagagggagactctgtctcaaaaaaacaaacaaaaaaacccaaaacaacaacaaaaaaactgttttcctagttgagacaccaatacacctacaaacgacgtactaaagactgcttgagcaccacagatgtgcagtcaatgtgcaccctgtgagcgccatcagggagaagcatctttgcctggtgtggaaagggccttcgtgtccatccactcaccccactcaccctgtgctgtccctagtccttaggtcggcccagggaacggctggggaccaatcagctgagtcaaaggaagtcttcccttagggaaacgttactataattttgacgatggaaagttttttttttttttttttttttgagacagagtctcactctgtagcccaagctagagtgaagtggtatgatctcagctcactgcaatctccactcccccaggctcaagcaattcttgtgcctcctcagcctcccgagtagctgggattacaggcatgcgccgccacgccgggctaattttttgtattttagtagagatggggtttcatcaagttgcccagggtggcctcaaactcctgagctcaggcgatccacccacctcagcctcccaaagtgctggaattacaggtgtgagtcactgtacctggctgacaatggaaagatttgaatgaaaacacattcaactgtttttttgggaaaaaaaacttctgtcaaaaaaaaagaaaaaaaagcaagtaattaaaacctaaaatccatttatgaaaaatgtccaatatttgtagtggggccaagagtgaagattatgtgattgcactttaataaatctaacttttcagagcctcatctactgtacggaattgttctctgttgactctcagcagtggctttaggactaagagtagtgagtgacagccatgtgtaaacggcgtgggaggtaaacatcccaactgcttaaaaaacaaatgagaacacacatcatccttgtcgtgaaaactcttgaccaaccaaatttgaaacatcttgataagagtgaagagtttccattagcagttgctgaaatcttagtagctccttttcaatctcaccctgaatattctacaaatgaacaaaataaaaatctgttttaataccttgataataaagtatgaggcagctggatgttttcaatggttgtttttttaggattccactgagactcaatgggatttgctgctgccaggacagaggtgcgcgcattgagctgacagatgatcccagcctatcagagcaaagagtgcagttagaagcctctccctgacgctggcaattaacaagcaccgtcttcgcccggccacctactaaacccatattccctccactgagtttctattgcctgagccatgttgcctttactgacttcagcagttcacctggataagccctgtcctcagattcatgccaaggactgagtttagatgaatgtgtgctataaccacatctttctcaggaagcaggcaccttgcaagagctttaggacaaattcaaggctagtacagcaataaagacaaaacgtgacaccctgtagaagacatgttgagatttagctgaaatatgatgtggaaagcacttatcaatctccccaagttagaaccaaggtagcacagcacagttccacagaccctgtctttcaagggtccacatattttaaacacgtccatgttcacggtggagaaggcgactcacctttgcaatggacagagtctgctgttccatgacttcatgcaataccgatcttgtactttcattcatcttgtcgaactcatcgatacagcagatgccgttgtcactcaggacaagagcacctgtctgcaggaccagctgccttgtctcagggtctttcattacgtacgcagtgaggccaactgcactggagcccttcccagacgtgtactggcccctggggacgaggttgtacacgtactgcagcagctgggacttgctggtaccagggtcgccacacagcaagatgttgatctcagcccgaaatttgccccttccagtgtgactaaaatccttccttgtcccgccaaagagctgaagcaaaattccctaaataatcagagacatgtctaaacattcattttctgcacagttaactgagatgtagtttaaactttagaggtacttttctctcttataaagaactacaattaagaaatcacaggaaggtataaaaaggctcgtgaaagtgcttgatatgctttaagttatcactgaccagttcatcagcacctatcattacaccagaatggtggccatgcaagtccctattctgacactgtgtggcctcttctgtttagaaacctaagtttagaccagagatgaggatagacaatgctatgattcttctcaaccaatggcaagtcaggttgccagcacttgctctaacaggccacaactctgtcctttatggcggatggctcgagtggcggagtggatgtttatactatttgatcccaaagaattgtaaatcccaacccctagtttaaaatccactgttaccttctttatatcttcatgttcataaatgcttggagccaaggctgaagcaagcctctcataaatgtctggtttcctggaaagttccttaagcaattccacacgtttctctgaaaaaagtttctgttctgcttcttcatcaaggccatgcagacgttttgcatccgttttccgataatgaatgacatcaatgtgggttttgtagacagacttcacattactcactcttggattgactcgaataggcacagctcgatagatgcctgagggcacaaccaggagatgcacttttaccttcccatatcttcctccgagtggctcagcaaccagcgtaggcaacaggtgcacttcagagcgaggcaccacgtcgggctggccctggaaagggtgagctccaccgtctcttaaatgaccctcccaagcccaggactcaggcccacattgcaaagctcccgcttgctatgagcaagcagggaaatagcagcaggaaacggacaagctcgaaagaaccaaggtggctcatgtctgtaatcctagcactttgggaggctgaggcaggcggatcacctgaggttgggagttcgagaccaccctaatcaacaaggagaaccctgtctctactaaaaatacaaaaattagccgggcgtggtggcacatgcctgtaatcccagctactcgggaggctgaggcaggagaatggcttgaacctgggaggcggaggttgcggtgagccaagatggtgccattggactccagcctgggtgacgagagcaaaactccgtctcaaaaacaaaacaaaacaaaatgaaacaaaacaaaacaaaacaaaacaaaacaaaagagaaagaacccaggtttctgcaaatgatagacccgaggacgtgttcacctgggcccactagtcagcagtgctccagggcaactgtagctacgtgagcatgcccacgggcacagtcaccctgagggtgaaatggagctgctgtgcttctagctcaatgctgggttcgtggttgtttttaataagcagtatttttacttccctaagttgagtgtacagaatctgcctagcacttacttgactgcaacaaaatgctaaaatcctccagtcattaaaactagactaggtccccccaacctacccaccacccccgacaaaagcatgcaaatcatgcattcttctggaagccaggctcctcacatacagaggtctgatctgatgttcgtcttttctggatttcaaaccagaaggctttaactccaggctgattcctgcagcttttggagaaagcctggcctttccccgttacagctatctcaacgcaatggcacagagcactgtccttgtttattcagtgggtcagtgtaattcttgtttaacacaacaaaccagtttacacacattcttagaatacacactattcttcactccaatataggctagggatggaagattatgtttaaagtggcccggaatgatttatctcacagagcagcattgatacttatttcacatctacacagcactttccacagccccttggccccaaacactctcacacatgtatcatcacattaactccactttgtaggtgaggaaacaaaaatattggactaaatactttatcaaaggtttcagggtagcaggactggaaatgcgcacgtcactcactaaaaactacgcattctttcaaattctccatgacttcaagtacttttacgacggaagattgccagtgataactgcgggacttcacactggggaagaaacagggtgagcactgcctcactgaagacaagagccgatgcgtggtgtgccccaggccctccgctcaggagcagattcaggcactccgcgaccgtcgccaccttgcccatcaatgaagaaccgtgctgccatcaacactcccttgcccccaaccaaaatccattgtgactctacagcatcaaaaggaggactgccacactcatatggtgctgtgcaaagagcactcttgtggcagcaagagaaggagacctgggtcctgggttctgatttaccgtggcatctgagctactgctgtctatgcatccctgaacctcagcttctacacatggaaacaagtcactgactcatttttctctgtaacaaacaaatgttaacccttggctatacatttgggaaattaagtaaaaattacttaaaactccagcattggtgagtaatacttctctgagctgatggcataactcaaaactttacccatacaagcctgtctgaggctgctctctcatgatgccaacagtactgacttgagacacacacagctccaggatactgaggtatcaagaggcgagtgaccacacgaaccatgagctccaacattcaagtttgggaagaactgaacaatttcatactgctgggccatggtactcagttaaaaaggtggcagataaagcagggatataccccacagtctcaaagacaagcagtgacaactggaggtagaactggacctgtgaccaagtccaatgactcactaaagcacagcattgaaagcaagccagacatgctcaagtgctggtgcaaacctacactcttacctgtaacattcactctgtccccaggctggaccttgtcaacgagatcattgtgagcaaacaggataactgtgtgtggtgtctgccctgcaggcatgtcttccggagactcctgaagcttgatctgaaggtcagcaaacagagaacatgtgggccacaaagagagggcagggggacaaaatctgcatgtctttgtactgcttttgccatataaggctgcagtgcatatccccacataaatgattgtccatgtttctcattatttccttagaaattacttcttctaaagaagttgctgcaacagacagcaacaaaacaggggaaggaatgtagggagctgcggtgggggaagctgagatgcttttcataaagcagggtcgaggaaggcctttccaaaccaggtaccctctgagaggcctaaggatgctgggcttttctctaagccactttgggggcctgcatgattctgagaataggaggccatgtgctcctgcggagcaggtgcctgcctttctgtctccagctctccatcccatgcaacattaaagaaaccatgcacacgcagtcacagaaaaactcaaatcctgtcctcccacatctttacagtcacaatcacggtaaataagcaattttctaccttcccctcacttttttctgtcattttaataacttcatcttaaaatttcatgaatatagagaaaaaagaccaaacttcttagacagtaaaatttgtgaaaaaatttcagaaaaattcctcaatcctttaccaatggaaaaagcagaatgacatttaaccaagtattctcatctcaaacgtttgaagcattttaggccatgaaaatacagtgtctctaacaacagacagtgccactggcaacagcacagggacagtgccctgaagcaggggctttgcgtgctctgcatatttagcccataggccactaacgaaacccacaagaccagagagggatggatgccattcgggaagtgaggctcagggtccgagggacaagttatagttggccttttgaggatacagacaggcaaagcatagcctggggggccagggtggctgcgcaccatctgcttgtcagagaagagggagcggttgtggatgagtgccatgctgtgggtggtgtggcagcgcccgcacacactgggctctgcaatgcggccgcggtccatctccacccgggtcgtgtgggcacacacttggcactggaagaaggcctcctgcatctcgggaatcagctgggatgtcctgatcaccatgccgctgatggtgatgagctggtcaatgtctgtgaggggagaagagaggtcagcacacctgacctgaggtgtggaggtccaggaatagctgggatcacagacaggagctaggtgcccaagactctgcctagggcgacctttctgtgtccagtcatctgcaggctatgtcttcaggagactctcaagcccagcgaacctctggcccttcttcctcagggcccctgtccagcaggcatccctcgttcccttcttgtctgcctaccctgctccctgcctcctgcctcactcacctggcctcctgtatgacaccctgctgtgtcaggaaaaaagccagacagcctggactgagtcctgaccctagcctttctgtgtacattttgtgtcccctatagaatggggtggtatcagcacctatcccagagccaaggactgaacgtgccaatgtacttcaagcctagtaagagcacctggtagagaaaaagtcctctatactttaaagtcattattatccacacaggagaaccccttagatgctctgatctttcactcttgctcgtttcctctattatttgaacctttcctgacagacaactttttccctttgaaggtcccactgcccgcaactaatttcccctgctggtttcagacaagctaccctgttctggcctgtatttagccactgctagccgtgaagatcaccctatcctgccactgattcatgagacctctacaattttgttgttgttgagatggggtcttaacctgttgcccagactggagtacagtggtgcaatcactgctcactgaagcctcaacctgccaggctcaagtaagcccgtcacctcagcctcccagagtgctaggattacatgtgtgagccactgtgccttgctaatttcttcttaaaaagagatggagtctcttatgtcactcaagctggtctcaaactcctggcctcaagtgatcctcaaatctttaaaatctaatttttttttttttttgagacagggtctcattctgtcacccaggctggagtgcaatggcacagcctctgctcagtgcaacctccgcctcccgggttcaagcgtttctcctgcctcagcctcccgagagtagccgggactacaggcgtgtgccaccatgccctggtaatttttctatttttagtaaaggagttttgccatgttggccaggctggtctcaaactcctgacctcaggtgatccgcctgcctcggcctcctgaagtgctgggattataggcgtgagccactgtgcccggccaatagtcacatctcttatatcagaaacttcaattaaatttaaaaagtatagggggttcataagtatataggataactgaatctatattattgtcaatttataatccgtcaccttgactaccaccgccaattacttctttcataatttctcaatgaaaacaaggctattttcatgtaaggcattttccttcaacaaaagtaatcctatgaaaaatacattaccttctggattcaggtttctcatattcttagtcttcaatgcgttgaatggtcttacttgaatctgatgttctaagattgagtcagggtaacggtcaaagaagatttcattgacagccatgtcaaaagttggaataacttcctgtaaaaacaaatatgaagatgtatttgtattcatatctcagtgttaaatataataaaggcatgtcagattagcaaagtataaaaagacaacatgtcatgtccccaaagtattaccctacagaatcatgcacgtgctgttttcaaatttaggtatgctgaactatctatttctgcatattttcaattgggttaaatttcataatttatacgaaagtgccttcttgatgtatactggcatattctttgctttctattagaagggaaaaagattttgacctcacactttattttccttctataatgaagtgataccaaagtaagttttttatttatttatttttaatttttgaggcagagtttcactcttgttgcccaggctggagtgcaacagcatgatcttggctcactgcaacctctgcctctgggattcaagtaattctcctgcctcagcctcccgagtagctgggattacaggcatttgccaccacgcctgactaattttgtatttttaatagagacggggtttctccacgttggtcaggctggtcttgaactcccaacctcaggtgatctgcctgcctcggcctcccaaagtgctgggatcacaggcatgagccaccgtgcctggcgataccaaagtaagttaaatcatatttattcaaatttcttaacatatggttcccattttacagatgaggaaacagcttttggttggctaaggaacttgaccaaggttatgcagccagtaatcagcaaaaccaagattcaaaaaccaagtctgcttgcctccaaagactacacccagagtcaacagagctgatacttcattaatagaaactgacctgaggcttagaagtaaaagtctacagtacaatatattctttcaaagcagcaggaagtatgtaattcatttaaagtatttccatttaagataacttacttcatgaaacccaagaagctatcagttttaagattcatcatttttctacatgaaaaacactgccaagtaaaccataacctgtcattgatagtaatacaagtcccactttcaggaacattaaaatgtgaaaaaaaaatgttcatcttaaaggagatgatacatagtttttttttgtttgtttgagatggaatctcactgttgcccaggctggagagcagtggtgccatctcggctcactgcacctctgcctccggggttcaagtgattctatcgcttcagactcccgagtagctgggactacaggcatgcaccaccatgtctggctaatttttgtattttttagtacagatggggtttcactttgttgcccaggctggtctcaaacttccgacctcaagtgatccatttgcctcggcgtcctaaagtgctgggattataggtgtgagccaccacaccgggccaaaggagatgatactcagtttcttaaagtgtttgcgcatactatcttcattactgaagaatttctgttatctggaaacattctttctagactgttactaaaattcatcaaggtcaaagctaaattcttacctgtgggtaagagatgagttgtctgtacaaatttttgtcaaatgatttgatgtgttcacagttcacatttaaaaatggctcaccaataacattaatctagaaaataaaaatgaacaagttatattttgctaatttaactattttaaaacacgtaacttgaatttaaagagtatttgattacctccccaagtcgttgcatgtatagaggttcagtaatatctatgccaacattttcttcttctttagccagagggtcaataaaacgctgaagaaatctctttaagtggagagaaaactgtattaggcatatagcatttgggaacaggcaactactaaaaacacacaaagttatgagtatgtcactatcaggagacagaaataaataatatttttcttcctttttcttttctaaaatttaatttggagatggagtctcactatattggtcaggctgctatcaaactcctggcctcaagtgatcctcccaccttggcctcccaaagtactgggattataggtgtgagccaccacaggtggcccttctagtcattatggctacttagatatagattataaacacggtctcccaacattttcagagcccaaagtaagaattttaatacatgtagctcacctgaaagttttctttgcatgctgccacatttacatctgttccccagatcacaagtttttggcctagagactgctcacttgccactatatcttctgctgctgcctacacagaaaaacatgacagaatcatgaaaacagagttacccacatgatacccgccataagatggtttcaggagactgcatactcaccccgtcagactgcagatccacttgcaggcccttctgtgcagagcccaggtcaggcctctgtctcacaggtgtgcccctaacaccacttcttggggttccctctacccgagagctgggagtgccgtatgtcagtggtgaactaacatcaaagtcaagagggatagctataaaaacaaaattaggaaattctggtggcatatcaaacctgaaattacagcatgttgtctgttgatctataccatctaatcgcaacagcaaactgaatatttattgcaacctgcggtggctgagattctgagcactcttaaatgttctattaaaaaaaagcaccagagaagctgcttcctctgctcactaagccctaaaactactattttctgcactccgttcagctcctctggttaagaacatgctcagtcacgtgcagaggggatgctttaggcgttatgccaactgttataaagccagtaaacctgagcagataaagcatcagctgtgtatcaagcacagcaaaaccaagatcttcagacacgcacctgaagaatgcatttggggagggctggaaaacagcacgtcctgcgcagcagggctctgcaggtccactccaggcgaggttggcatcggctgcaactcccccgtggaggtggaatcctcgcctctacgtctctgagagggagatgacctggcatcctcactccgagcttgtgtcacacaaaacagaaaagacagccattaactttcagggccggccttcctggatttgtcttttccttggggcattatgactcaccactgaaccaaaccaaacagaggcaaatggcaatcgaattaagcagcacccaggccacagcctgctgtgggtgtctgtgcgcaccaagcggcagcgcccagcccgaggctgagcgcccgggtcccgcgcacccacccagcgctgccagctgcggcgagagggcagacggggcggcgccgggggctgtagtgggcccggctcgggggactcacgcgtctgggcgggggtggcccttccacgccggctgccgcggcggctcggggtcgacgccggggacgacatagtgctcggagtacctgcgcgacaaggacaagctcgggccgggcccgcctcccggcttccctgccctgctccgcagcgcggacgttcccgtcggctccgcgccacgccctccccgccggcgcgcggttaccgtggaaaggcggccgcttgccgacgacgctcgcggactccgagtccacctggcgagtagcgctcccaaaccgcgagacccagagttcccgccggcggcaaggtcgtctccgcccctggcggggcctcaccaatcacagcggcgctcgtacgtggctccgcctccgggaggcgccactgcgcatcggcagggggggacagtgccgcttctttcagcgcccgtgcgtaaaccagaagtaggcctcgctcggccccccttggtccagatggtctgaccccctgcgcggcagcgttttcgcgggaaaactgggtcctacagcaccagctctcggggtgtgttcctctagcgttggctagggagcgtgtgcttctttatcccttaggcgtttttggttaataaggacattacagatgcatttctcacttaaagattttttttattaaaaaaaattaaggacgggaggtggtggggatggtctcattatgttgcccagactggtctcgaactcctgcgatccccccgcctcagcttcctaaagtgttgggactgcaggcgggcatcaccgcccccgaccgcgtttgtcgttttttatcgaggaacaaacttggaactcttgacctaggcccctcgcttgttttatctgcctctggtatttatttagccaagtccaacaccaagtagccacccaaactacctccgcaggtcagacgtttttccttaggtttccatgttgattcgggccaaagaggcgcgcttactggccaggccttcccgcaggggtccccgggaaagttcctgccgccgcgccccgcagccccgcctccgcgcgtaggggcatttccgggtccgggccgagcgggcgcacgcgcgggagcgggactcggcggcatggcgggctccggagccggtgtgcgttgctccctgctgcggctgcaggagaccttgtccgctgcggaccgctgcggtgctgccctggccggtcatcaactgatccgcggcctggggcaggaatgcgtcctgagcagcagccccgcggtgctgggtgggtaccggcccgagctgggccgcgggtgggtcctggcttcccgagtcgttctggagccgggcagcccggcgcttctctgtgtttagatgacggtattttgaagtacagcaattagattcttgggggaatttctgtgtatgtgtataaagggatttgtcatactgctttttaccccctagtattagaggaaagatattttaaagccaaagttggtgaaaacgacccctaatatggcaatcattgctatgcagagtggggggcagggcaagagaaataattttttttttttttgagacggagtctcgctctgtcgcccaggctggagtgaagtggcgcgatctcggctcactgcaacctccgcctcccgggttcaagctattctcctgcctcagccccccgagtagctgggattacaggcgcgcgccaccacgcccggctaatttttttgtatttttagtagagatggggtttcaccatgttggtcaggctggtctcgaactcctgacctcgtgatccccccgcctcggcctcccaaagtgctgggattacagacgtgagccaccgggcccggccaagagaaagtattttctttcacctgaatctcgcctaatcccaccagtaccttttccaaacccctctatttgccgttcctactttgagaaaaattgaagaaatgtaattgaagtcatgttcttttaactctttagcaatgcctgggtgggaactttttcccctttgtagtaaaagtgcctctttttagcattttaaatattcaaatacttaattatgtggatctcctgtattccttctttaaaacacgagtatgcagaccttgatgttgtgccctattaaaaggtgagattttcttccggagggtctagtagtgaatatggtgtaggaataacttaaacagtttaaactagatgctatatgtggcacggtgcggtggctcatgcctgtaatcccagcactttgggaggctgtggcagctggatcacctgaggtcaggagatggagaccaacctgaccagtatggtgaaaccttgtctctactaaaaatacaaaaattaactgggcatggtggcgagcgcctgtagtcccagctattcgggaggctgagacaggagaatgtcttgaacccaggagaaggagattgcagtgagccgagattgtgccactgcactccagcctgggcaacagagcacgactccgtcccaaaaaaaaaaaaaaaagatgctatatacatgtatcctatatgtactctatctgttgtcaagaatatattaacaatggggaaatatcaaacaaaaaactaacattgcgtgattactttctcttctcagggtttcaaatttagaattcatttttgttcgtttagtaacttgtttctaaagcacttccaagtttaccttccatttatgccatatctcctttcacttgagagattccaggggaagtgtattagttccttattgctgctgtaacaattaccacaagcttagtggtttaaaacagcacaggtctgttactcttacagttcccactgtaagggggattctgtgagtcagaatcccacacaggtctcaccaagctagaaccaaagtaccagacagggctgctttctttctgaaggctcttggggaggatccattgccttattcattcaggttatataggattgaggtccctgacattccatacttcttgaagctgtcccctttccttggatcacagctcccttcccttggtcttcaaggccagcaacagcatgtcaagtccccctaactagaggtttggaatctcccgctttcccaacttcctgtctctctgacccactcttcttcatctccttactttaagggcctgtgtgattacattgggctctctggataatccagtatgatcttcccattttaaggtcagctgattagctaccttaattccatctgcaagctcaatttccttttgctatatacatttaacatattcacaagatgtgaccccagggattgggatgcaggcatctttggggccattattttgcgtactgcatccctgtggaacattgtctagaattttctgctttgttttaatacagcaaccttgggttagtgttttatatttataaggctgccttgaaaaccgttgcaaccttggccaggcgcggtggctcacgcctgtaatcccagcactttgggaggccgaggcgggctgatcgtgaggtcaggagatcgagaccatcctggctaacacggtgaaaccccgtctctactaaaaatacaaaaaaaaaattagccgggcatggtggtgggcacctttagtcccagctacttgggaggctgagataggagaatggcgtgaacccgggaggcggaggttgcagtgagccgagatcgcgccgctgcactccagcctgggcgacagagcgagactccatctcaaaaaaaataataagaaaatcattgcaacccctttaggagtggtttacatgatgctcttggcactctcttaacttgtttacttatttttttgaacagcattacagacatctttagttttttccagagatttcggtttgcttgtatttgtccggaagtcactcaacagtattgaagtaagttgacaattttggttttgcttttcttgtatattcctggagtgactcctcttacccatatttacaatatgtatctctttcattacagtttcgtgaatgtagagaagaaatcctaaagtttttatgtattttcttagaaaaaatgggccagaagatcgcaccttactctgttgaaattaaggtaagaattaaaaaacataccttattacattatatatcaacatctgttttaacttatggtgtgaggaacttggatttttattttaaagataaaacattttcctttctcattggggaatttgcttatttctgcttcattgtgttacaaatgaagtgggctcttcattaggttttttttttttttttttttttttgagatggagttttgctcttgttgcccattagttatttagatttagtaagctaaggcctttgtgagagaaactactttgataattttttttaataactatcttaatacttttttttcctgaggaggtggcagtggcaccctgggctccctggggccctgatggcctcttgataacttcactgcagcctgggcgacaagagcaaaactccatctcaaaaaataataatttttattttgtatttttttatttttattgtttatttgtttttattttgtgagacagggttttgctctgtcatccaggctggagtgcagtggtgcaatcatggctcactgcagcctccatctcgtgggctcaggtgattctcacacctcagcctcccaagttgctgggaccacaggatgtgccactatgtccagctaatttttgtatttttttttttttttgtagagacagggtttcgccttgttgcctaggctggtcttgaactcctgggcttaagtgatcttcccgtctccgcctcccaaattgcttacaggcacgaaccacactgtaatcctcaaagggattacaggcatgaaccacactgtaatcctcaaagggattataggcgtgaaccacagagtcccgtgaatactttcaggctggagtgcagtggcacagtcttggctcactgcaacctccgtctcccgggttcaagcgattctcctccctcagcctcctgagtagctgggattacaggcgtgcaccaccgtacctggctaatttttatatttttagtagagatagggtttcaccatgctggccaggctggtctcgaactcctgacctcaggtgatcgcctacctccgcctcccaaagtgttgggattataggcatgagccactatgcccggcctaatgttatattttccacagctaaatactgaattttggtattgctcctcttggagaagtagtttcaggtattgctgagtcttagtttttatatcttattgatgattttggttattttttttttaaaacctagaacacttgtaccagtgtttatacaaaagatagagctgctaaatgtaaaattccagccctggaccttcttattaaggtaattatgtttctaagtacacgtattttacattaaacatgtaacttttaaaagaaaatcagagttttgagttgtgttttgggtgatgtgtttggggaaggataggatctaatcacattgatgtgtgggtaagatgcacattctccaaccatcacctgacaataccctggctttttgttttcagactcttctgggtagtaaaagaagaattctgagttgtgaggagaatgaaggaggaaaatgactaaggaatttattgctctttcatttatcacccttactggctttggcaaaacctaatgctattaggaattgctgaaagatcaccttatatctctgaggtttttcctaaaaccttagcaatgggaaagagttcatatgttttcttttttttttttttttttttttttttgagacggagtctcgctctgtcgcccaggctggagtgcagtggcgggatctcggctcactgcaagctccgcctcccgggttcacgccattctcctgcctcagcctcccaagtagctgggactacaggcgcccgccactacgcccggctaattttttgtatttttagtagagacgaggtttcaccgttttagccgggatggtctcgatctcctgacctcgtgatccgcccgcctcggcctcccaaagtgctgggattacaggtgtgagccaccgcgcccggcccatatgttttcttttctttctttttttgagacagagtcttgttctgtcattcaggctggagtgcagtggcgcaatctcggctcactgcaacttctgtctcccaggttcaagcgattctcctgcctcagcctcctgagtagctgggattacaggcatgtgccaccatgcctggctaatttttgtatttttagtagagacggggttttactgtgttggtcacactggtctcgaactcctgacctcgtaatccgcctgcttgggcctcccaaagtgctatgattacaggcgtgagccactgtctggcgggaatcagttgatacgttgcagttaagtggttgttggggtcactgtgacctgtttctgttttttttgtatttgtattttagaattcctttgtttctggttgctccttggttttgtaggcttctgggagaaaggttctagtcatgttgttggtttcttgggaaggtaacacacctagagcattcttcccctgatgttcttccaccatacccatctcaacctctaattcccagataagctgggtggatgtgaatcctgtgagaccaagtgtaaatccttgagacacacctaattctgaacctttgctgtggacagatgcactgagatagaggaatcccgttatttccctctttagagagaatgctaatttgtattgtgttttttttcttgattcccgcactacattgatgtactaatttgtattcttttagttacttcagacttttagaagttctagactcatggatgaatttaaaattggagaattatttagtaaattctatggagaacttgcattgaaaaaaaaaataccagatacaggtgagatgcatttacatgttattttcaaatagtttagcaaattaatattaacaaattattagcataagacttaggttttctctaccaaggtcttattttacagtcgaatcctttttgctgaaaataaaccaaaatggaaccaaacaaaaacaacatgtgaagacttcccttcacaaaaatgttaatttttacaaaattattcctgtaaatagaaaactcacaagatatgacaaatatgattaatacatttgcataaaacttaggaaagaatgcagtcctaaaagctttatattttatatctcttactgtaaaatcaattttgaactttattttattttattttcttcatacattttggttagtttaacttatttaaatgtagtttgaggccttcacttgtctaaaattttcttttcagttttagaaaaagtatatgagctcctaggattattgggtgaagttcatcctagtgagatgataaataatgcagaaaacctgttccgcgcttttctgggtgaacttaagacccaggtatgatgaactttatgacattctgcttccatagatgtggttgtgtttttctcttgtaatgacatcttcttaaatcttttcttttagatgacatcagcagtaagagagcccaaactacctgttctggcaggatgtctgaaggggttgtcctcacttctgtgcaacttcactaagtccatggaagaaggtattgcttggcttcacttgattttctttattcaaaaactgtaagtctaaccagcaatgcctgattatttctttgaactcttaaccaatcctgaatttacatacagtagtgagaaataatctagagggacctgtgggccctcccgagttcccctgatgatgacatctttcccaactacagcacaacagcaaggtgggcattaacattgatgttgtccactgagctttgtcagatctcaccagtttaacgtgcacacatttgtgtatgtgtatttagttctgtgcagttgtttaaaattttatttattttttttgagacagaatcttgctctgtcgctcaggctggagtgcagtggtactttcttggctcactgcaacctctgcttcccaggttcaagcagttcttcacttcagcctcctgaatagctgggactataggcacgcaccaccacacctggcaaattactttctttttttttttaaacagagtctcgctccgtagcccagggtggagtgcagtggctcgatctcaggtcactgcagcctctgcctccctggttcaagtgattctcctgcctcagcctcccgagtacctgggattacaggcactcgccactaaatggcaaattttttttgtatttttagtagagatggggtttcaccatgttggccaggctggtttcgaactcctgacctcaaatgatctgcctgccttggcctcccaaagtgctgggattacaggcatgagccaccgcacccggcctaatttttgtatttttagtagagatggggtttcaccatgttggccaggctgttctcaaactcatgggctctggtgatccgcctgcctcaacttcctaaagttctgggattacaggcatgagccattgcacctggccctttttaattctttttttttctttttataattgagacagggtatcattatgttgcccaggctggtcttgaactcctgggctcaagtaatctgtccaccttgatctcccaaagtgctgggattataggcatgagccaccacacctagcgagttttgtgtaattctgtcacgtgtatgtaccattgtaatcaaggtattgaacagattgattagcacaagggtcccaatgtgctactgacttagagccatagttaatctcttcccccatcttggccacctgataacccttcatctgtctccatctgtggtttcgtcatttcaaaaagttacacagatgaactcatggtatgtagcttttcctgtgtggcttatttcacttagcatagtgtctttcaggtttgtccatatcctgatatgtcagcattgtctttttttttgaaggctgaatcatattcctgtgtgtatttactgcattttgttgattcattcatccgtatatgggcacttggtttgcctctacttactggttattctcagtagtattgccatgatcattgttgtacagaaatctgttggcagtccctgctgttgattcttttggatatatacttagaattgtgattgttgggttgtatggtaaccttagttttaattttctgagaaatcgtcatactgtttttcacagtagctgcagcattttacattcccaccaacagtgcacaagggttgcagcttctccacatccttactaacttgtcattttctgtgtttttggtagcagacatcctaatgcctaatggttgcgaagggatatctcgtggttttgatttccgtttccctgatgatgagtgacgttggttgtgcatcttttcatgtactcaccatttgtgtgcctttagagaaatgtctgttcagatcttttgcccattttttaggttaattggtttgtttgactttttgttgagttgtagatatcattttctttctttctttcctttttttttggagacagggtcttgctctgtcacccaggctggagagcagtggctcaaacatggctcactgcaccctcaacttcttgggctcaagggaacctcccacattagcctcccaagtagctaggaccacaggtgtatacctgatattaaaaaatgttttgtagagacacggtcttgccttattgcccaggctggtttcaagctcttgggctcaagtgatcctcctgccttggctccccagagtactagggttgcaggtgtgagccactgtgcctagccagataccagtttcttaacagatacatgatacatgagttgcaaatattttctgtctccctttttcttttcttttttttttctgagacagggtctcactctgttgcccaggctggagtgcagtgatgctagcatggctctctgcctgcctccacctcctgggctcaagtgatcctcctacctccgcctcccaagtagctgggaccacaggcatgtgccaccacagatgggtaatttttgtactttttgaagagacatggtttccccatgttgcccaggctggtctccaaccaagagatctgcccaccttggcctcccaaagtgctgggattacaggtgtgagccgctgcacctggcccttctctcattttttgagttgccttttcactgtgttgattatgtcctttggtacacaaaaatcccttgttttgctaaagttcagtttttttattttttttatttttttaagagatggggtctccccaggcaaaagtacagtggctactcacagatgcaatcatggctcactgcagtcttgaactcctgactcaagcagttctcccacctcagcatcaaaaatagctgagactataggcaccaccatgcctggctccttttatattttgcagagatggagtctcgctgtgttgcccaggctggtattgaactcctcccatcaagtgaccctcccacctcagtctccaaagcattgggattataggcatgacctgccacgcctggccaatgaaattcttttctttttttgaaaggacaaatataactttttatcctgaaataatcttttttttttttttttttccggagtcttgctctgtcgcccaggctggagtgcagtggcatgatcttggctcactgcaagctcccccttccgggttcacgccattctcccgcctaagcctcccgagtagctgggactacaggcacccgccaccacgcccagctaattttgtttttgtatttttagcagagacggggtttcaccgtgttagccaggatggtctcattctcctcacctcgtgatctgcccggctcggcctcccaaagtgctgggattacaggtgtgaaccactgtgcctggccgatcctaaaataatcttaaggggagggaaaaagctcctttgctcttccttatcacttttttttttttttttgagacagagtttcactcttgtcacccagcctggagtgcaatggcgcgatcttggctcactgcaacctctgcctcctgggttcaagcctttctcttgcctcagcctcccgagtagctgggattacaggcgtgtgccaccatgctcagcggatttttgtatttttagtaaagatggggtttcaccatgttggccaggctggtctccaactcctgacctcaggtgatccacctgcctcggcctcccaaagtgctgggattacaaggcatgagccaccacccctggcctccttatcactttatcttcaagtaattaccaaatgtttggacctactttgtttttcttccattaggttgaaacttacaaaattacttatatccaatgatttttttttaacctatgtaggcagcagtttcattttaagctaatgtttctacccatgccttcttccttgcttatcaagattgttagagtagccctgtgtaattttccttcgtgtcttctctctcctctctcctgtatcctatggctcccacttcctcagcttcttttcaactgtcacccctcttaggaagcatttatgattcccctgaggtgagcacttcctctggcctctgtactcccctctgtgacagcacttacggtcatattttaagtttgttaggtcatatgtttaattctctcctttgaccctgttggcaggtgatgttgcttatttgtctttatgtttacttggcttataaatcagcactcagtgaacatatatagtggaaggaaaatagtagcacttagtgctcatttattgtgtgttaaggactattctagacgtgttgcaaggcaagttcctgtaatgactcttcatggcaggtaaaatgtctctgttgtatagattagtaaactgccactcagacaggttaagtaacttgccccaagttacacagtgacttgcgtggttaggagaataatggccaccagggtgtcccatcctaatccctgttatgcttcatggcatagcggaattaaggttgctaatcagctgaccttgaactgaagagatgatcctggatcatccccatgggcttggtgtgatcacagggtccttaaatgtggaagagggaggcacagaggaggtcagaggaaggggatctggaaggcggcaggagccaaggcatgggggtgcctctggaggctggagaagtgagaaaagggttctcccctagagcctcttggaaggagcacagccctgctgatgccttaaatttagctcaatatgagaatcatttcagacttctcacctttagaattataggtaataaatctgtattgttttaaactattaagtttgtggtaagttgttatggcaacactaggaaactaatatagctaacaaatggcaagtctgggatttaagccttggtctgaggctaaaatttatactttttttgtgatgccatgatcatgtgacttcaagcactaaatactaattcatgggtacatatatataaggcacccagggccgggcgcggtggctcacgcctgtaatcccagcactttgggaggctgaggtgggcggatcacctgaggctgggagttcgagaccagcctgaccaacatggagaaaccccgtctctactaaaaaatacaaaaaattagctgggcgtggtggcgcatgcctgtaatcccagctactcaggaggctgaggcaggagaatcacttgaacctgggaggcggaggttgcagtgagctgagatcacgccattgcactccagcctgggcgacaagaacaaaactctgtctcaaaaaaaaaaaaaaaacaaggcacccaggaaatacagactgtatgaatgacttataaaaataattgtaaggccaggcaaggtggctcccgcctgtaatcccagcactttgggaggctgaggtgggcagatcacaaggtcaagagatcgagaccatcctggccaacgtggtgaaatcccgtctctactaaaaatacaaaaattagctgggcatggtggcacatgcctgtaatcttgaacctgggaggcagaggctgcagtgacccgagatcgcgccactgccctccagcctggcaacagagcaagactccatctcaaaaaaaatttttatatatatacatatatataaacgcgtgtgtgtgtgtgtgtgtgtgtgtgtgcaaatatattttttttgagacagggtctcactttgttatccaggctgtagtgcagtgctgtgatatgggctcactgcatcctcaacctcctgggctcaaatgatgctcccaccgtggtcctccccaagtagctggggactataggtgcatgccaccatgtcctgctaatttttattttatttttctttttgagacttgagtcttgccctgtcacctagactggagtgcagtggcgcgatcttggctcactgtaacctctgcctcccacgttcaagtgattcttgtgcctgagcctcccaagtagctgggattataggtgcgcaatgccatgtccagctaatttttgtgtttttagtagagacggggtttcaccatgttgcccaggctggtcttgaactcctgggctcaagcaatccacctgccttggcctccaaagtgccgggattacaggcataagccactgtacccggccccaactaatttttgtattttttgtagagatggggtttcaccatgtcggtcaggcttgtcttgaactcctgagccgaagcaatccacccgccttaccctcccaaaggtgctcagattacaggcttgaggcactgtgcctggccatgggtgccatctatctaaagagtgatgaacttggtgttaaaccagtaattgaaatcaccaagttcctaccatcatgagctcagtctagtggaggagacagatgaacaaataaagcagctctgctgattttggggttcagcagtgcccagaggtggggtgtagtgaagaggaatgccagaatttggagaggtggagcacacgacccacgggtactttctgaggatgtaacgcagaagtcgtgatcagaaggaggagagggagacagctggggaagtgctgggaagagcagtcattccaggcagcagctgctcagcacctggccccatgctcggccagtctctagccctgtgcttagcctgcgtgcagtggtccgagggtccacaagagctggtgtgtcaagagtgtggaggtacacaaagtgggccagggtgagatgggaaggacgcagggttggtgtttgacagttttctgagctgggatctcattccagatggaatgggagccagagcttttcaaaaaggagtggatgtgggccaagagatgtttcacaggggtctgcctgactgctgttgggtgtgggatgtgagttagtgtaggattgagagactgtgagtgagggactgagggctgtgcagtgactcctaagctgaatgggatgggagagaccgggttttttgtagaaacctggccttttgtgttggatatatttaactagagacacttaggaagcatccaggcttagatatcaggtgtgcagttgtgcgtgtaacaggggatcttgcagcagaaatcagacttcaggctatacatttggaggtcttcatcacgtaggtagtatttaaagttaggagtgtgagcaagatgaggagggggtgagagtgcagagaccaggcggagggtctcaagagagtgctgaggaggcagtgcagggctgcctcgcatccggtggagtttggggaggaggaggaactggcagtaagtggtgggttcagctccacgagaaccacatccattgaacattggagaaatgggacctctagagtgaagagcgggaggaagtggaggccatttgtagaaaacatgctagacaaatcttgtaatggaagagagcaaagaaatgggctgtggctgatgggagatgtgggggtaagagaggggtttttttttgaggcagagtcttgttggagtgcagtggcacgatcttggctcactgcagcctctgcctcccgagttcaagcaattctcatgcctcagcctaccaagtagctgggattaccggtatgcgccaccacacccagctaatttttcctatttttagtagagacggggtttcactgtgttggccaggctggtctcaaactcctgacctcaggtgatctgcccaccttggcctcccaaagtgctgggattacaggtgtgagccactgcacctggccaagagagggtttaaaaagtagaagtaggccgggcgtggtggctcacacctgtaatcccggcactttgggaggctgaggcaggtgtatcatgaggtcaggagttcaagaccagcttggccaagatagtgaaaccccatctctactaaaaatacaaaacaattagccgggcgtggtggcaggcgcctgtaatcccagctactcgggaggctgagacaggagaatagcttgaacccaggaagtggaggttgtggtgagctgagatcgtgccactgcactccagcctgggtgatagagtgaaactcggtgtcaaaaaaaaaggatagaattttcacacctatgttcctagcagcaagtccatagtgagccaaagggccagaaccacccaagtgttcatccagggatgaatggataagcaaaatatggcacgtagacacaatggaacattacttagacttaaaaaggcaggaaagtctgacacatgctgcagcatggatgaaccttgcagacaggatgctaagtggaataagccagccacgaaaggcaaacaatgtgtggtttcactcacacgaggtacttagagtagtcagattcacagagacaaagtaaaatagaggttactggggctgggggaggggaaatgggagttagtgtttgatgggcacccttctgttattgatggtgaaaacattttgggtatagacaatagtgatggttacacaacagtgtgaatatgtttagtgccaacgaattgtatctgtacacattgtttaaatgataaatatgtctgttttaccacattgaaaaaaacagatacaagaccatgcttctacagggagtgggccactagagggaggggctgcaggagagtggactgtggagggcagagcctggagaagtctgtccttgctaagtccccaccctaaacccactgtgtactgtgggtgtccttgtgtctgcacacttgcgtttattaacatgactattttctatctgaatgaccttttccccaactagtacctattctttcagtcttagaacaaatgctaccatatctggaaagcctttatagaatactcatagtcagaagaaatctgcttgtcatgaattccaaagtagctttttttgtatctcatttatgccaccattctgcaaccatacagatgtttctctgctttaaggcctctctgaccacattctctctccacctcctatcacatcatcatcagggctctgtctcaaatatgtcagtccttgcaatgaaaagcaaacagttcttgagtctctgctgattacaagtcactgttagaagggtagagaaattagtgatgaataaagcatgactctatagctacaatgaataatgtggtgggagacagttatgcaaataattgtgatgtcagtcaggccaggattagagcctcatgttatagttatgtgcctgttttatcttcccttttagttaataagtatgctgaggtcaaagatcataatttatttgtatttgtaattgtcataatatcttggcatgtactatgtttttttttctgttttttttttttttttaatttttttcttacatgtactaggtattgaataaatgcctgggtgtattggggagaatggtatgtttggccatgagtaagttactttatttaatcctccagactatcctaaaaggtatatacggtccctattgcaaataagaaaattgaggctctgagagattatctaacagagcttttaagtgatgagttggtgtttaaatctcttagagcttgtaagtgataggttggtgcttaaaccatgtctttgttattccagattttctttctgttttctcgcagtcataaccgtgcagcagtaataacttgcaactttagctggatggaatgatgaaagatgtttctcctgaattcacaagagattaatggggttaatataggtgtcaagctgtctgtaaagtgtgttatgtgatactgttattacgatttgtaacaggcttcttggtatttccctagatccccagacttcaagggagatttttaattttgtactaaaggcaattcgtcctcaggtaggattaatattactattaatattattctaatgcctttacagtgcagactttcaaatactgatggtgaatttttcttttctaaaatagattgatctgaagagatatgctgtgccctcaggtaggattctgtttataatgaggtataatattttagattactaaattaacatctcaagtaagcttttgcttaaactttgaatgaaagcaaatgtgataacatctgtgatgtttcacacacagttatttacagggaggctttcggtgacttagtaagctctggttgaaatgctgatactcaggttacatggttgaaagcactttattttagggtatctttcaggggatccaggctgtttgattctgactttgcctcaatgaatcctgattccacttctgacccttgttttgggatttgtcagccaagttatgggcctgttaattggtagtgttagagctctgacaggaatccctgggttactgtagtgtaatggtactagatcttcctgagcacagtgttgactttgacatatccctgcaggtttgttggttttctgttctgtgttatgtcgtctgattttaaatataatggcatttgcatttgcagctggcttgcgcctatttgccctgcatgcatctcagtttagcacctgccttctggacaactacgtgtctctatttgaagtcttgttaaagtggtgtgcccacacaaatgtagaattgaaaaaagctgcactttcagccctggaatcctttctgaaacaggtaccacaaattcaactgtcatttaacaatatttctttcacacacagaattaaattccctttgcatgcatgcatgtttgaaaataaatacaagttgatctgtagcttctgtagtatttaaagcagaaagatgttgatcagccagccatatgggaggcagccagactgaaagagagctagggagatgccagatttgattagggcctcagagcctagattgagacaagtgtaatggagcaaagacgtggtgaggtgatggccggaagggctgggaggtcagggctggagagtgggtggagggctgaggggagccccatctctcctggaagaggagggctagctgtctccaggggatagatgcttgtgtgtcaacttgaaaacaaggggtgcctctttgccattgtggattttccacctggataggaggtggttacagaatctgtacctgcgtatgtggaagcttgtctggtcggctgaggagaccgtgcttgtcattctgagcactggtctccaggatgtcctgggtgtccagaggtggctgcaggggcctggccattaaggaagtggacttctggggttgctctgagggaaaggactggagattcacaacaaatgttttcttaggggccctgctgtacatgggtaaacagtagctgcattcacagggtatccatgcaaacctgtgtgaacagtgtggcagttgtgttagcctgagagtcacagccgggatgtgtggaaggagaagagagagcactggcatccttttttcatgtctgggcctgccttccaaaaaactgagccgatgggcctcatctttggcctctgcctctgccgcctgtccctctcgcctccttagtctccctgctgtacttggccttcccgtcagacttgtgttccccctgaagtcactcttggctttgaggttaccttggtccttctcataaaactcctgttacgctgaacttggctggccttacttgctaagggaaataaaaatcagaggaattattttttactgattcatatgaatatgtttggatctcagtaaacatttactgcgataaacatcttgacagagagaatttcatgccttgttagcaaggaggagtgtccggaatgtgtgcagagggatcatccctggtggcaccctgggggccttgttccctagcgatgcctgcctttcctagcacagggctgggtggggcgtgggcctgcagggaagccggccagccctccctccactgcgctggttgtctttaatgagccacgcagacatctctgtttcacatccttgccagagacttttcagtcccccactccaattcttaatgaaaactacattgaatagattttagagtttcattgaggaaatatattctacctgctaatctctacctcgtgagaaagttatttgagcttagtcaggggagaagttcaagagaactatcctcaatgctgccctcagggctgatgcctgttgcaagtttgggagtttgcaatataccctcaaatttgatactcacatctatggtttattacagctaaagggcccagataaaaatcaaccgaaggaagcggcacacagtgcagagatgaagaaagtaccaaatgtggatcttccctggtcctctccccgcagagtcagggcagcattcctttcccagcatccatgtgtggagcattgactgggtgctcccccaaacctctgtgtttggggtttcccttggggccccaccctgtaggcatagtgggttgttgggtctcggcttccagggatgctgtgtgacccaaagctcccattccgagtcacattgttaccaggtgtggtcagctccaccctgagtcccattattagatcatcccttgtgacctgaggccccaggcaaggagaggcaccctctttccctccttcttcagaatagggagtgaggagagaggaagaaagagggaaagaggactttacataaaggatacataattttttggccttttttccactatgttgaatatattttcctcacagtgacatctatatgatgtgttttttttgttgctgtttttttggtttttttttttttttgagatggagttttgctctgtcacccaggctggagtgcagtagcgcaagcttgggttactgcaacctctgcctcctgcgtttaagcaattctcgtgcctcagcctcccaaatagttgggattataggcacctgccaccgtgcctggataatttttgtatttttgttagagacagggtttcaccatgttggccaggctgacctcaggtcatccacccttcttggcctcccaaagggctgggatgacaggcgtgagctactgcgcccggccaacatctgtgtgattaattttcagtggcagtgtaatatatgatatttatgagccatagtgttttaatctgtcctctgtctgctactgttgaataattattttcaagtctttaatactatatccaggaaatagttgaataaagatgcgttaaaaacatgcttactgggaatacaataatagaaaattagcattatagtatataatatttgctattctgtaattaagtaaaatgctgttgtttacttcttgagaaacatttatgatatgttttgtgaagaaggaaattatgaaacagtatatacaatgtttcattcttctaaaacaaataaggagcaaagttccccgaaggtcaggcgctaagacctagtggctttagggggattgggaagtgtatggataagttggcagtggaaggtggatttttttttctgcctttgataattgtctagatagatttcttccattcttattctgggcagtctttgtgctgaaatggggaatgctctttgaatacctgtattagttcttgcatttaggctcttgtctcttggtttggtaaataatgatctatttgcttctcagacgacattttccccttgcatcacttaatttaagctttatagtttgtagcttatttttttgaaaactgagatgctttgtctttctgattgttctgaactctatttattgatgacgtctgaagtcactggtcccctgacagctctctttcaccctgtgggtgacaggtgagattgttctgaactctgtttattgacgatgtctgaagtcactggtcccctgacagctctctttcaccctgtgggtgacaggtgagctctaaagactgctctttgcttcctcagagagccttaattcaaaacctgtttttggttttttttttttttttttttcagacttatgtgtatccttggtctcttagtcccttctctaggaaaaatgtatcacatagccttatttaagacacttttctgaacctgatagagactaagcaaaatggaagcaaagggtctttatgattaaaagcaattgcgtgtaactataacagtacattagtagcatctaaacagttctagtttttccatgtttgtatagattccattgctattaaatatttccaaaaaaataaatattatgtatttgcaggtttctaatatggtggcgaaaaatgcagaaatgcataaaaataaactgcagtactttatggagcagttttatggaatcatcagaaatgtggattcgaacaacaaggagttatctattgctatccgtggatatggactttttgcaggagtatgtctcattaacttactctattttgtcttggtttcacgtgattgtttaaaggaatctaattcattgcattttgaatagtgtctaatacttgtaacaatacagtagacccttgaataacatgggcgtgaactgcacaggctcacttacatgcagatgtttttctaccatacggatcaaaaatacagtgtgtgctggatgtgaaacttatatagagggctgaccttttgtatatgaggcttccacagggtgactgtgggacttgagtatgcatggatttaggtatactgaggaggcctggaaccaatccctcccgcatgtactgagggtcactgtattagtattgtttattaacagttaagatttcttcagtgtctgctgtgtactagaattctttacatgtggtatctcaaaatctcctaacccttaggagctcagtattactctgttttgcagattagcaaactgagatgcagagaaattaggaaacttgtcaagagactcagaattgacagaaccaaggcataagtccaagtgtgaagaatagaaacaccatgtttcccctctgtgctatgctgctccttattcctaaagtaaaattgtagttgatttcacaacgttttaggaagagaagttaaaaaaaaagtttatatgacagaaagagatatatttaagaatattagctaggtgtggcggcccacacctgtaatctcaccatctcaccgctttgggaggccgaggcgggcagattgcctgaggtcaggggtttgagaccagcctggccaaggtggtaaaaccctgtctgtactaaaaatacaaaaattagccgggcatggtagcacatacctgtaatcccaactgcttgggaggctgaggcaggagaatctcttaaactcaggaggcagaggtggcagtgagctgtgatcgagccactgcactccaatctgggcaacagagacactatctcttaaaaatttttttttaaagaaaaaatattgagaataaccctagttatttcctcttagtggaattctgtgacttctgctttgtagaaaaaacaactgatttcttttttcttcctacaatctctccctttttttcttctttctttttttctttcttttttttttttaatttttgagttggagtttcgcttttgttgcccaggctggagtgcgatggcatgacctcggctcaccacaacctccacctcccgggttcaagcaattctcctgcctcagcctcccaagtgctgggattacaggcatgctccaccacacctgggtatttttttttttgtatttttagtagagacggggtttctccatgttggtcaggctggtcccgaactcccgacctcaggtgatccgcccaccttggcctcccaaagtgctgggattacaggcatgagccaccgctcctggcctctccctttttcctttctttttcttttttgcctctcaggctggagtgtagtggtacaatcataactcactgtagccctgacctctagggctaagcaatcctgctgccttaacttcccgagtaactgggaccacagacatgagccaccatgcccagcaaattttttaatctttcgtagagacgatatctcacttcgttacacagactgttcatgaactcctggcttcaagcaaacctcccgcctcagtccccaaagcactggacttacagctgtaagccacagtgcccagcctttccctttttcttaatcttcatctccatttgtctctgttggcgactttaaatatgcttagggcagaagaaacagaatggcagaaggctctgagctaaaagattgcatgagattttccctttacacagtgatctatccccacttgagcttgtccctgtggctagagcatgataggcaggagaggggaaatggatctgaagaggtgcaccatcagatcctcggggagcctggactagattcagaagtcctagaaaagaagccttggaaaagtctgaaattgagcaattacattagcgcatttgtgagtctgaaaaaatggctctggtgtggtagggtgtgtgacatggagcatcttccagtcatgtatggactcctggcctctcctgtaggtggacagccttggggcagggactgcctctcatttgtcctcagtacccactgtctaaacagtgcctagaacatagctgacaaccaataaatgcttcctgtgtgaataaatatttaaaatgtggttacagattattatacaaagcatctttataatgagatatattttatttatttatttattttttgaggtggaacctcactgttgcccaggctggagtgcagtggcgcgatctcagctcaccgcaacctccgcttcctggattcaagtgattctcctgcctcagcctcttgagtagctgggattacagttgtgcgccaccatgcctggccaatttttttttttttttttttaagtagagacggggtttcaccatggtggtcaggctggtctcaaactcgtgacctcaagtgatctgcccgcctcggcctcccaaagtgctgggattacaggcatgggccgccgcacccggccagatactgtattttatatctgtatttcttcttaattaaaaagcttgtggctgggcacagtggctcccgcctgtaatcccagcactttgggaggctgaggtgggcagatcacctgaggtcgggagtttgagaccagcctgaccaacacggagaaaccctgtctctacttaatacaaaaaaaaaaaaaaaatagccaggcgtggtggcacatgcctgtaatcccagctactcgggaggctgaagcgggagaatcacttgaacctgggagttggaggttgtggtgagctgagatcacgccattgcactccagcctggacaagagcgaaacttcgtctcaaaaaaaaaagaagccttgttaaacttgtgtttataatcacatggcttaacatgacaccttaaatattattttgatcttgataagattgatgaagacttctgttttaccttttctaaagccgtgcaaggttataaacgcaaaagatgttgacttcatgtacgttgagctcattcagcgctgcaagcagatgttcctcacccagacagacactggtgacgaccgtgtttatcagatgccaagcttcctccagtctgttgcaagcgtcttgctgtaccttgacacagtaagtgaactaaactgagcacaattttaagtatttaatcttcatttcttcaaataatttgatggagtcatacaatacatttagtgtaggcactgttgggaacaacatgacagttttagttagtactttgtggcaatagaattattgtcatgaaactcgattttttgttatccagaacaggaaaaaaatatttgtttctccttccatctttctgaaagatttggaattgttgcttgggatagaattgcacctcaagacaatttttactctgagtgtgtgttttttttttaaggcaatcacagtaatacatgttaagcagcaggttagatgacaaaccatgtttttcttttaataagtatctaattcagttgtaattactttgaatatttgtattattcctgtattcattgattacctcctctaactcacggtttgctgattatttccggtaggttcctgaggtgtatactccagttctggagcacctcgtggtgatgcagatagacagtttcccacagtacagtccaaaaatgcagctggtgtgttgcagagccatagtgaaggtgttcctagctttggcagcaaaagggccagttctcaggaattgcattagtactgtgggtaagtttgcaatttattgtatttatgagtaatgatggataattaacacattatttgatataggtaaagagaatctggttaccaaattcttttgtatctttgacacaacttttgaactcctaaattttggtagaccaaaatcttttcctttttttcatcctattacctctgaattttaatagttctattaatagaactattaattttaatagttttttttcattttttttggtgacaagagtctcgctctgtcccccaggctggagtgcagtggcatgatcttggctcactgcaaccactgcctcctgggttcaagcgattctcttgcctcagcttccagagtagctgggactacaggcgcccgccaccatgcccggctaatttttgtagttttagtagagacagggtttcaccatattggctaggctggtctcgaactcctgaccttttgatccacctgcctcagcctcccaaagtgctgggattacaggcatgagccaccgcgcctggccaatagttttaagttttaaaattaaagccgtgaatgaacttagaaaataaattgagaggtaaagttgggttccaaaatataatgactgtttgtttttttttgtgagttttgattctgtttttcagtgtttccttcatttttgttttctttttcttttttcagtgcatcagggtttaatcagaatatgttctaaaccagtggtccttccaaaggtaaattctgaatttaatgtttagaaaattaatctgttatcactgaaagctaggaatgttgctgaggttttcgaatataattttgcaaaagtggccgttcttttcttagttattagcaatgccttacattttgaaaagtgtaggacataatacctctatattttgttaggtgaatacacttctaaggtatgaaacatctttaagcataactttaggttttatacatttttgtaaatcagaaatgttttctctcttgaaactctaggacaaattgctaagggaggcatatcttagttcccagaaattataggacatatgatgagatgaaagattgaactatgtacgaaagcaagataaatgatgatagcacattcagtggatattgtattgaagtacttgttggtgtatcacagttttagtcacagaagaatcacatatttttccgttatctatttatttatttatttattttttgagacagagtctcgctctgtcacccaggctggagtgcagtggcacgatcttggctcactgcaaccttcccctccaaggttcaagcgattctcctgtcttagcctcccaagtagctggtattacaggcgaccgccaccttgcccagccaatttttgtgtttagagtagagacattttgccatgttggccaggctggtttcaaactcttgacctcaggtgatccgcccaccttggcctcccagagtgctgggattacaggtgtgagccaccgcacctggccttagctttttaaattatgcttttttaatacgatgtcttccttaatcatatggtctcctatgggtggcagtttaatttagaaaattctgaaaaccagcatgttctggcagcagtgctgcttctgagaatccatcactacatattgtcatgctgtctttctggccagggccctgagtctgaatctgaagaccaccgtgcttcaggggaagtcagaactggcaaatggaaggtgcccacatacaaagactacgtggatctcttcagacatctcctgagctctgaccagatgatggtaacgtttaccattgaaagccataaatgtaccttacttcctttattagtctccatagtttagacataagacttatttcagaattatattttactaactttcaaaagtttaaaacagtgtacttcaaaaataaaaaattaaaaccgtatgaatcaggaagttagaatgagagtggaaataaatgaattgaaagaaacacagacatagaactcctttaacattagttactgtagctgagtcctcattttagctttaaatagcaggatggtatagctcatgctaagctgttcttcctaacaggtccagcctgaggatggatatatatgtatttgtacgtatgtatgtatgtgtacgtttatatttgtgtgcatatttagttatgtatgcacataagtatatgtgcatgtacttacatgtacacagacataaaagatatagtgtctatatatgcatattacacatatttgtgtttatacatacacatccacagattaattggggtaaatgctttgacaaggattggcctaaatcttctcacttactgctgtatacagagtaagtatttgttacatgactggataaatgacatctgactgaaatgatgctgttataataatttaggaaggtatcttgcaacttgaaaacttccaggtaaatctgctgcagtttatcatcactgtttccataatacccaaaccggcacatacatctgtgtatgtgtcttaatgcttataaaatactaatacatttttgcacaagattttgaagtttattgtttttctttatttaaaggattctattttagcagatgaagcatttttctctgtgaattcctccagtgaaagtctgaatcatttactttatgatgaatttgtaaaatccgttttgaagattgttgagaaattggatcttacacttgaaatacagactgttggggaacaagaggttagaaatttttatcagtagtaatttttcatcatttttgtatcagctgtctttgcatataaatatttaggggacaatagcacatttgtagaggagaactggagaaaatttggttcttcaggattattatgtgccactgatgcatttctgttggatgtaacctattgtatagaaaatgttgttactagatggttcaaaaagtaatttatatatgttaattttttttttgaaaaaattatttactaggttcatttgtttcttattccttagcaatagtaaagagtgacagaaatcttattttatgtagaaatgactttgtatgggatagggaaacctggggttgctcttgtttatagttaaggaaactccaaattgtggtacaaggtgttaaatgtgttcctgatataggaaaatatagataataggaagagaaataagaaaatgccctccctttttttcacacccaattttcctagcctgagttaaagataagtcatggcttaggcctggcgcggtagctgaaacctgtaatcccaggactttgggaggccgaggcaggcagatcacgaggtcaggagattgagaccatcctggctaacacgatgaaaccccgtctctactaaaaaatacaaaaaaaggccaggcgcggtggctcatgcctgtaatcccagcactttgggaggccgaggcaggcggatcacaaggtcaggagatcgagaccatcctggctaacacggtgaaacctcgtctctactaaaaatacaaaaaattagccaggcatggtggcgggcgcctgtagtcccagctgctcgggaggctgaggcaggagaatggcatgaacctgggaggtggaggttgcagtgagccgagattgcaccactgcactccagcctgggcgacagagcgagactctgtctcaaaacaaacaaacaaacaaacaaacaaacaaaatacaaaaaaaatgagccgggcgtggtggcgggcacctgtaatcccaggtactcaggaggcagaggcaggagaatggcgtgaacccgggaggcggagcttgcagtgagctgagattgcgccactgcactccagcctgggtgacagagtgagactccatctcaaaaaaacaaaaggataagtcatggcttaagtctggagctgccctgctctggtccgaggcattggtggtaactggactccatggtaatttggctggtgagaaagaactaagatcctgggaaggtgtcttgcttgctttcgactgcagtgattgtttcagaccagatggtgctgattcgagttcatgcgtcagtacctccactgcagtcctgagaagttagacaagaggcaatggggaggatgtgcagaggaaacatgaagggacacagtacaagccggtggtcacatcagctttattgcacttggagtattctgtttttcatgcgggatgataggtagcaacactgatgtgtggtttattgctctctgtgctttgcaaatgtctaaaataattttattaaaaaaaaaaaaaacttgcccaaagggacttcctggaactgtgtcagctgacagacctgcattttagaacatgtgtgttcattgctgtcttcagtggcttccctttctcctctgttccctgcccttccagcttcattccaacagatcaatgaccacctgttagcacttcccagatatatttggtctccagcctcctcctcccttgttggttcctgctctgtatttctaactacttgtgcaacattttaatttgaatacacagttgtgtttggtaacacaaatttggtgacacaaacttagcgtgtttaaaactgatcttcatgcacttccaaaataccacatttttcatttatctttcttactactgttaataatttctctatttctctttttcttcacttgaaatctctaggtcacctattaaaattctatctctgtcaaggcattattgctagctccctcaagaagtgctgcccacctctggcattttcctatttgtcccattctctcatcacttcctgtgagtccttttggttaacgctttctgcaagtcctgcccttcttatcagaccataggtcttgagcacccatcttggtctttctcgctgttgcaatctttcttcgtagcatcaggccttgaccatgaagtcagttggaaagttatttgttgagtgattcgtgattgaatggtacaatgtttctttgctacaattactctttaagaatggagatgaggcgcctggtgtttggatgatcccaacttcagatccagcggctaacttgcatccagctaaacctaaagatttttcggctttcattaacctggtggaattttgcaggtatttggtaaaattctaattatttaagaatgaaaatgattgttagttattggctgtaatataggaaattccttatatagatgtaagaaatgaaataataggccgggttcggtggctcacgcctgtaatcccagcactttgggaggccgaggcaggtggatcacgaggtcaggagatcaagactatcctggctaacatggtgaaaccccatctctactaaagatacaaaaaattcgccgggcatagtgtcaggcgcctgtagtcccagctactcgggaggctgaggcaggagaatggcatgaacccgggaggtggagcttgcagtgagccgagactgcgccactgcactccagcctgagcaacggagcgagactccgtctcaaaaaataaataaataacaaataataaaagacaaaatctgtaatcgattatatagatctttaaaatatatctaagtgtactaggttacagttttcattttttatatttaaaagatcctcaggtagagaaaaatggattatagatataactaaacattttaggatacctcaaaatgttacgtgatgggtttgtagcttagttgttcgattatgtcccttacaattttaagatcagaatgatacaaatttctaccttcaatttctaatttgtttttacagagagattctccctgagaaacaagcagaattttttgaaccatgggtgtactcattttcatatgaattaattttgcaatctacaaggttgcccctcatcagtggtttctacaaattgctttctattacagtaagaaatgccaagaaaataaaatatttcgaggtgagtctttcttgcaggatgttgaatcttgcgtttttttaggtcatgagtatatataaatgtatcataaaatatgtgattgtggcctatgcagttttaaagtctactaattttattctatgtgtttaaaaaaattgatatgtgaatggcagttggatagcactctaaaaagctagcagcattttttgccctgatgctcaaacacctggctaattatgtaagattaacaaggcctctcaaagtatggtcccaggaccggcagccttgagcattgctttctgcatcacaaaccttgggggcaggtctctgctgccctgctaagcaccaccaggtgattctggcacccagtgaagtttgagaacaactggattagcattctcgacgctccagtcagtcacatgaggagcccacctgggtaattacagggtgagatgaggaagagggaatggacttagctgtgtgcttggcttctcactagctgccaccttccctcctcttgttctgactagcctgtgccttgaaatgtctgcagagctgattctgcctcctgtcttcattagatgttggtaacttgaaatggattcacccctctgaagacaggctaggaactactggattgggatacagtctcccgattcttgttcagtgtactaacttgctgttttatttgacagggagttagtccaaagagtctgaaacactctcctgaagacccagaaaagtattcttgctttgctttatttgtgaaatttggcaaagaggtaatttttaaatgatttatcttagtgttatcatgaactgtttttaaatgaatatctattgaaaaaatcctagtgatcataaataattattttaagaattggggctgggtgcggtggctcatgcccttaatcccagcactttgggaggccgaggtgggaggatcacaaggtcagtagttcgagaccagcctgaccaatgtagtgaaaccgtgtctctactaaaaatacaaaaattagccaggcgtggtggtgcacgcctgtaatcccagctcctcagtaggctgtgaggctgaggcaggagaactgattgaaccctggaggcagaagttgcagtgagctgagattgcactactgtactccaggctgggtgacacagcgagactctgtctcaaaaaaaaacaattgtgtcaggttaggaggctgggggaggagaatcgcttgaacccgggagatggaggttgcagtgagccgagatagtgccactgcactccagcctggggaacagagcaagactgtgtctcaaaaaaaaaaataaataaataaataaataaaaataaaaatgtgtttgctaaatctggagcgggactaaggtcctaaaaaaactaattagaggaagttattgtgcttcaaaagtccctcagccaggcactttggttcgtgcctgtaatcctagcactttgggaggccaaggtgggtggatcacttgagggcaggagttcaagaccagcctggccaacatggcgaaatcccatctgtactaaaaatacaaaaaattagccaggtgtggttgtacatgcctgtaatcccacctacttgggatgccgaggcaggagaatcgcttgaaggatggcagaggttgcagtgagccgagattgcaccatgcactccagcctggctgacagcacgactctatcttacaaaaaaaaaaaaaaaaaaagtccctcaagctctcttaacataattcagttgagtgatgacaactcaagatgaaatagattcttgtttttccatgtagtaggtattaagcatttcgacaaattaactttcctggaggttagtgtgtaatttgtaagtgaatgtggtcatgtcaataaaggctacgtgccaatttttgtatttgagaatagggcaaatactttttagttgattttcaaatgtaggctctattcagatatacattactgtcttctttcttgttaaggtggcagttaaaatgaagcagtacaaagatgaacttttggcctcttgtttgacctttcttctgtccttgccacacaacatcattgaactcgatgttagagcctacgttcctgcactgcaggtaggcgttgtcttgaacagagccatctcttcatcgctgttgtgagtcccagagcacatagaaacaccatcctcttgccctggcagtcccagcaggcgtttcctcacaggcgtgcccgggtcagggtctgcttctgccacttactggctttgggacttagacccttggtgactctgaactgcacttggaggtcgatgtgagagttaaacctgtgtgccttgaaaggctgcggtataccacagccacagagacagctgcttgctttcctcctaattacctggactgaactctccagcggtgtcgggcatccagtaataaaaaggagtattaattagaaatcacaattacttggtgtttttttcctctaaatcttatatttcctgcgtttcagtttaacttgtttgtattaacatacagatggctttcaaactgggcctgagctatacccccttggcagaagtaggcctgaatgctctagaagaatggtcaatttatattgacagacatgtaatgcagccttattacaaagacattctcccctgcctggatggatacctgaagacttcagccttgtcaggtaatgtttagaagaattgtgatgtgtattgtaattaaaatggaaatggagtaactataataggtaggactgtatttttgtaacttctgaaatttaagcccagtgtgttcaaaatatgtttgattgctatttttgtaatttccctaatttatctgactctaattgtgataaagaaatatagttgaggtattaaaaaatttttcatttactcacttatagcttactaagatttataaaatcttcaaagacaagtactgtcttcaataccttgaaatttttatgactcctaatacactgctttgcaaaaaaaacttgttgaataaatcagtcaggaattaaacacttcagaaaattcaacagtaattttgtatttttactttcactagatttttattgctttttaaaacataactggtgaagcacactaatggtagctaagaattgcgaaaaaaatgtcatcatagaaaaaacaggtttgggaaaagagtcaaagaaaaaaattatctgcccaggtcaaaatattactagtcaagaaaagaaaaagtaggacttcagagttggggtggggcacagacttaaactggaatgaaaagagacattgtcatccgatgcaagcaaaaagattctgttgggagaaagactgaagtatttgtaagaatttaagctttactatcttcacagtagaagtcaagtattaatttataaggtttttttcttcatgaggccaaaaaaagaaatacagaaaaaaaattgtgaggttttacctgtgtaaatcattattttattgttaaatcttattggcttggaaacattaagtgaaagttgtgtgacagatttcatgcactgtgtctcctttttctgacatcctcagtgcatatgcagagttcatgaagaaagagtcacgatttttttacagattgtaataacaagcatattttagagaccaaaattacaaactagttaacctttatagcttttaaaattcacatttatataaggagtgccattatttgagtattcatgacaaatacatcacttagtaaaatgaatatatctgatagcatatatctttatagtatttaattttcttttttgagttctgttaactcattgaaaagttttagattagtaaaggaagttactgtgattgttttaaaggatttgcctgttaaacatgtaccctatctagatgattcgataattgagaaaagcagaaagtaagcaaaattaggtgacaaaacaaaatctatcatgttagagacagaagttagtgttttaataactttttttgatgtatcaaacttccagaacaattgcaggaacagtaaaaagaactccatgtgttctatctagattcaccagttattaagattttgtaccatttatgttgttgcatgtactttctctattgtgtgtttgtgcatgtttttatatttacatgggacattttttttggaaccgtttgtgaataagccgaaggtgtcatagatcttgaagacttcattgtatatttcttaagagtgaggacattcttttacgtaactacagtattattatcaaaatccagaaaaataacatggatacatattcttccaagtaacagtcaataggcacatttttcacttgccctattaatttctttttttagctgcatttttcctggtttagaattcagtgtaggatcatgtgttacttttagttgtaactctttagctttctttaatgtgggatagttcttcaacctttcttagttctcatgacttgacattttgaaggctgcaggccagttattttgtacagtgtccttctatgtgggtttgtctgatgtttcctcttgatgagttttgggctgtgcctttttgacagacgctgggttctcttcaggacacttggtgcctttgctggttgtttccactgtaaccatttggtcagtgtttgcatcatctttttgtggttgtcaggttactgtttttctctctgtgtgagttagtaatttgaggcattccatgctccactttctggagtgatcagtcctgaggcctttaggtggtacagaggaaggtagatgctgggcagggggaggtcccaggtgctcccaagggtgtgaggaggtcatcccccatggggtggcctggcatggggtttacccaagccagatgaggcacccacgtgttgggacagctgtctgggatgttggggtgcaggcagggtgagaagggcgatggaggtagtagtttggttacatacaggagattgaacaaatacataaattcattgagaataagggaaactaggtttctcatgttgaagtgagctacaaatacagaaagacaggaaactggaatggacactgtggagttgcattggaagtgggtatatcagtgtgaacccatggtcctccgtctccctctgcctctccccagttatatatgtgcattcacttatggatgcatctaaataaatgtgaaaatagaactgagagagagagagtgtgtgtttgtgtgttacatgtactctggccactgaagggacctctaggagtgtggtatctgaatagtaacaagcaaacctggcacccaggtcatggcctccaaatctcattttccttttttttattattattattattattttgagacagagtctcactctgtttcccaggcgggagagcagtggtgcaatcttggctcactgaaacctctgcctgctgggctcaagtggtccttccacctcagcctcccaagtagttgagactacaggcatgcaccaccacgcccagctaatttttgtatttttagtagagatgggggtctcactatgttgaccagactggtctcgaactcctgacctcaagtcatctgcccacctcggcctcccaaagtgctggggttacaggcatgagctaccatgcccagacccacacctcattttccattaatggaaccaggactccttggttccaacctggggccgggaaaatatattatgaacttagaatactgtattttatagaacatccggaaagtaaggacctattcaaagcatgatgggggaaatgtcacaggcaaaagtagtgatgacttgagcatcaaaataaataactttagaaacgttataacccaggtaatcaaataggaagcagtgagcatgtgcagatataaataagtaaaatgagtaagttaaagtttcctagtggttttttttgtttgattgtttggtgtgtaataagttcttataaacttagcttaaattagcacccattgattatttcgtagatttgtaggacacaagtccaaatgggctcagctgggttctctgttaagtcatgtgactgaattcaaggtgttggctagtccaggcttgttcactccccatctaggttgttggcaggattcagttccatgtgattggaggaccaaggttcctgtctccttgctgactgacggctggagcatgattctcaattcctggaggcctctgagtgtcctcctaggtggcccctacaccttcacagccagcatggcactttttgaagtaccatggttttaaagtacctcagccaaacacgtactaatgattgagagtgaaaatggtgattttacagcatagacacctggtagagcccttctttgcccactgactagcagtaggacttgtgggccacacgtgcatcctgatgtgacttgctgaggggaactcagtgccactctgggcctcttctgtcaaagacacatggcctgaatctcctttttcagacagtgaagtcagtgtaaagctcagaaaatttttctggtaagacagtgaatctttgctgtcttggcagattacatagaatgatttcttggctgcacacagtggctcacgcctgtaatcccataacttgggtggatcacctgaggtcaggagtttgagaccagcctggcaaacatggtgaaaccgtgtctctactaaaaagaaaaaaaattagcctggcatgatggcgcacacctgtaatcccagctacttgggaggctgagaccagagaaccacttgaacccgggaggcagaggttgcagtgagccgagatcacgccgttgcactccagcctgggcgacagagtgagacttcatctcaaaaaaaaaaaaaaagaatgacttctcatggtacaggcaaagtccttgatcagtaaaccaaagaagcaaacttttcaagattaagtgacctttgctaaaaatttaactcatctcatactatctttttaggctcagatagtcgctttccgagatttgtcctgtgttaatgtcctttcatattctgaaaccaattgacacaactttcaaacaccagttcccagggtgtctgggagatcagaactcttctcattgaaatacagagatgttatgcatgttaacatgacctccaaatcaatcaataagtctttaaaacattatttctgtttccaatatagtaactgctactagttctaacccacaaaacaaagatttatggggtcagtcctaattctggaaagagatccagacatgaaaatgtctgagattcactgttttatgaggaactaccctccttacttaaaaatgaaaagcaggctgggtgcagtggctcacacctgtaatcccacgtaccattttgattgaccgagggatgaggatcacttaaggccaggagttcgagaccagtctgggcaacataaggagaccttatctttacaatttttttttttttgagacgaaatatcgctctgttacccaggctggagtgcagttgcgtgatcttggctcactgcaacctccgcctcccgggttcaagcagttctcctgcctcagcttcccaagtggctgggattacaggtgcgcaccactgcacctggctaatttcgttacaaaaattttaaaaattagctggatgtggtggtatacgcctgtggtttcagctacttgggaggctgaggtgggaggattgctcaagcctgggaggtcaaggctgcaataagtcatgattgcaccactgcaccatagcctgggtgacagagtgagacccttctgaagaaagaaaaaagaaaaatcaggctgggtgctgtggctcacacctgtaatccaagaaaaatgaaaaatcaggctgggtgcagtggctcacgcctgtaatcccagcacttagggaggccgaggtaggcagatcacgtgaagtcatgagttcgagaccaacctggccaacatggcaaaaccctggctctactaaaaatacaaaaattatctgggtgtggtggcacacacctgtaatcccggctactcgggaggctgaggcagaattgtttgaacccaggaggtggaggttgcagtgagtggagattgtgccactgcactccagcctgggtgacagagcaagactctgtctcaaaaagaaaatcaaaagcatgcatgcaattgtatttctgtactattcttctaatatagccacacaaccacttgttaattatataattactaaactcatgtttcacgtagaaaactggagtgggaaattgagaattgccttacacaccagcagtatgtcagactcatggagctcacagataccactgtctgcagccccccaagagacagcatgcacgtgcctgttagcatgacccaaggctcctaccttcaacggcctataaaagcaaaaaggaaaagcacataaacacaaaaattgtgccttttcatcagtatttcagtattctattaatattttccttagaaattatcaaagtacccaaccatccaaagtatccattaactcagtcagtccaaggttgcaaattgcctaaagataatagagattatcttccagttggcatgctgcacaacgtaattacttgggaaataaaaagtttacccagataatgattcaatttagttggacataaacttattacatttttcatttttttttcttttttttttgagatggagtctcgctctgtcgcccaggctggagcgcagtggcgtgatcttggctcactgcaagctccacctcctgggttcacgccattctcctgccgcagcctcccgagtagctgggaatacaggtgcccgccaccacgcctggctaatttttttgtatttttagtagagatgggggtttcaccatgttatccaggatagtctagatctcctgacctcgtgatccgcccccctcggcctcccaaagtgctgggattacaggcgtgagccacccgtgcccagccacatttttcataatcttaaaagttgtatgggactgtttcagatgttgaaaaatttctggagatggatgtggtgatggttggacaacattgtgaatgtaattaatgccactcaattatatacctaaaaatggttaaaagagtacatttcatgttatgtatattacaccacagttttaaaaaacgttatgagaagtaatgttagcttattagccggaataactatagggaaaacaaacacaagtagaataaagtgcatgttcgtgttatatttaatactgatagataaaatacatttatttaaaccaaaatattaaacttgtctctttaccacagatgtgccttaattatgtgaatattcctaaatgatcccaaattgttttctgtacgatttttaaaatctagcacatttaaaacactgttagttcaacttccttatttttggagaattttaggaatactcaatttacatatctgtataaatcaggacagagctcctttaagagactttataatctaatttatcaataccccccaaatacaggagaacattatacacaaaattagatataggcctttgttaattatagacacatacttgcaaagacacatagagagcttagtaaatagtttcagttctgcaatttgagccaaaaaccaggagatacagacatagccgacaccagctcggtcatggagtccctaacccaggagcgctagaggaattaaagacacacacacagaaatatagagtgtggagtggtgaatcagggggctgacagccttcagagctgagagccaggaacagagatttacccacatatttattgacagcaagccagtgataagcatcgtttctatagattatagattaactaaaatgggaaacaaagggatgggctgaaacaaagggatgggctctggctagttatctgtagcaggagcatgtccttaaggcacagatgcctcatgctattgtttgtggttcaggaacgccttaagttattttctgccctgggtgggtcaggtgttccttgccctcattctaataaacccacaactttcagtgtggacatcatggccatcacgaacatgtcgcagtgctgcagagattttgtttatggccagatttgggggcctgttccccaacagacatagaaaatgctgaatagtccagatatcaaagatctgttttttccagtgaactaaaaattcttaacttattggagctcaaaaaaaaaaaaaaaaaaccactaaaaactggattctcttatcatctctggcccatcagagagtagaactctttaacatcttatagaaaggaaaagaactagctagagagagcagagctaagatcccactgccagggattcattctggaaccaagagaagacttgctggagttaaaccaccggcaggtgccctcccgcggcgcagctcacctggctgtgtcagtgaatgcactggacatctcagaacttttggaaatgactttatagttgtagaactatgactctgcagagaaaaaatgaacatgtgtcaaagtttaattcagcagttaataaaggaaatagtaaaatgttacaactggttcccataacctgagtctaatcatgagaaaacattagacaaatgcatatggagagaccacgtatgaaattactggcatatgattttttaaatgtccaaattatgaaatgcaaggtaatactgaagaacagcttcagtctaaaagagactaaagagataggtcaactaagtgcaatatgctgtcctgaattaaaaacattcttaggtgaatgctgaactcggagtggtgctgaggagtgaatgttgataatctggtttggatggttgtgtggcagttgtgtgggagactgtccttgtggaaaacacacattgaagcattcggggcagtggggtgttgagtcggtcacttaccctcagtgcttcaggaaagaagttatatactctccatcctctgtaagtttatgattgcttaaaaaaaaaaaggaatttattcggggtacttcaacactgtaaatagtcttgttcctcatcaagctcaccataatagttttagtatccactgactattcttctgaatcaggtattactttgatggttgcaaaatggtgattttctacccccatcatttctttcatcctagttgatgttctactgcaagaaacaattttccccgttatttatttatctgtattagtaagatttgtggattcttattttttcagtgggtctaatcttttgccatcatgattggttttgaagcccacattgtcccagatttggcccgagtgtgatgcgtgggagccactcctgctccatgagatgattcatgctcttctcgaccctggagtcagacacttcccaaggagccatgttccttttggcagacagtgatgtttaaaagcaaccaccatttatattttttgttttagaaacttaatttttttaaatcataatttaggattttaatgtttctatttgacaatatagtttgttgcctctaatgtacattaaatgaatgaatgagtgctattttaaatttattttcgtttactattgatagatgagaccaagaataactgggaagtgtcagctctttctcgggctgcccagaaaggatttaataaagtggtgttaaagcatctgaagaagacaaagaacctttcatcagtaagaagtcctttgtattttctgtaccttacataatgcagagatcagattctaacacttgtgaaaagtaaaaatcttcatttaaaatgttagttgtttttgtatacaaagtagagtacaatataaaaataattttaatatattgaccaggcatggtggcgcacacctgtaatcccagcactttaggagggtgaggtgggtggatcgcttgagctcagcctgggcaacataggaagaccctgtctctattaaaaaatacaaaaaattagctgggtgtggtggcgcatgcctgtggccccagctacttgggaggctgaggtgggagaatcacctgtgcccaggaagttgaggctgtagtgagcaagatcacaccactgcactccagcctgggcaatgggagtggcctgacaaaaaaaattaatatatttttagctatgaaaatataaactatattaactgttttgtttatttttttggtcttgtttttctgttcattcctgccctcaaatgtatttagtggataataaaaggtaaactggttcatattaaataagcaagtcagaatactgataccagggatatgtaagactttcatttatgcttagatcttaaatatgtcatattatcaggttcagtttgttccagttttcttttttgttcttttatggctttttggtgataattccttggggcaagttttctcgagatgagccatacgatgtgatagtaaaatatgacgtaaatagagaaaattgagttagaatagggaaaatagctatttttggaatgaagtaagaattaaaatttgaaaaacttttaacatctaaaactgataatgcaaactctagggtcagttcttctcacctcattattttgggcatcttttgattgagagactagaatgaaactagaaatggcggcataaaagtttttataattttatggcacagcaggataaaataaatatatctctagttttacaaataaaatttctttttttcttatcgatttaatttttttttgaggcaggatctcatgttgtcacccagggtggagtgcattggtgtgatctcagctcactgcagcttcaacctcccaggctcaagtgatcctcccgcctcagccacccgagtagctgggaccacaggcatgtgccactatgcccagctaatttttgtatttttcgtagagatgggttttgcattgttgcccaggctggtcttgaactcctggggttaagcaatccgcccacctcagcctctcaaatgctgggattacagacgtgtgccactgtgctttgccaaaatttttgtacagatacacaatgcctgttccttagcactatggttctctaactgtgacccctgggggatccagggtgcaaggccaaagctatttttactccgttaatttgcaccacggtattatgatggagaacactgttgattctctagcgttgactctgagcacagatttttaaaaatactccgtgtgtgaggcaggaggtgcacctgaagcaggcctgcgtagaaaagtgtgacagctatctggagaaaaagcactgtgtggtgctttgaactgggagctgaagtagccactgctttgtggacacaatttttattgaaatgacaactgaaaggcacactgaggttattcataggtggatatatgcagacattttctctaaaatgaaccgagcctgccactttgaggaaaacttctgaaaatctgttgccaatgataaaatttaagcttttaagtgaactgtaaagttttggagaacttgtaactattgcagtaagtttgatagcttctcattacttaaagatttttttttttttattttgagatggagtctcgctacgttgcccaggctggagtgctcactgcaacctccacctcctgggttcaagcgattctcctgcctcagccttctgaggagctgggattacaggtgcgtgccaccacgcctggctaattgttttatttttagtagagacgggctttcaccatgttggtgaaaggctggtctcgaactcctgacctcgtgatctgcccaccttggcctcccaaaatgctgggatacaggtgtgagccactgcgcccagcctaagatttttttctaataagattggtggtgatatttgcttatgtgattttttgcatatataatgaaatgtgtcaacatttggaatatctgcacaatccagtgaaccagtattttcagatgaggaatacatgatgtttccaaattatacatggatgaaaaatccactcaaagtgcaagatcagccactggattttaacatagtagagtacgtagagttcatgataagaattcagattcgacattgtaactaacctttaagaaactacgctggttcagttttggtgtgatatcaaagaagaataactacagttagctaaaaagactatttaaaatttcttgcctggttttccaactgcaatatcggtgtgaggaccaaactgtctcccagtgagctacactgtaaacggatctgcactactgtggaatggccactttgcccagagtttcatttgtttgaaaaatatagttactttttataacatgtaatgggtttagtagtttaactatttacatagtttctgtgtttcaatttctaatgtcattaatactgataaacaggacctacataaaacagctctttgggggtccttgatatttcttaagagtggaaaggatcctgccaaaaagtttggaactgcggttctaggaaatggacatccaagtgggtggcaaagagttttttcctatgtcttctatttaatctttaacccatttgtaatcacatatatacaattgttcaaatttacagaacgaagcaatatccttagaagaaataagaattagagtagtacaaatgcttggatctctaggaggacaaataaacaaaaatcttctgacaggtaaacttcttttaaaataaataacctctgtagatatatttgtgcttttatttggatgtatccaggtcataatatattctgaatatttgctcctatatgtgatttatatatttctaaataagattataaagaataatatcttgcctaatggtttgactgtatccgtaaaattggaataattcagtatactggtagaacatatgttctagcttgacttgttaagcatgttatccagtttgaaacaatgtaatttgatactcttttccatattagtgtcgggaattccaagttaatctctttgagatccaatattgttaatattatgatatttttagaaatttttccaaatgagaattaccatttttgattagtaggctgcgtgtggtggctcacgcctgtaattccagcactttgggaggctgaggtgggaagattgcctgcgctcaggagtttgagactagcttgggcaacaacatggcaagaagctgtctctattattttaatttaaaagaatcagcttttttttttttttttcccctcgctctgttgcccaagctggaatgcagtggcacaatcttggctcactgcaacctccgcctcccaggttcaagcgattctcctgcctcaggctcctgaatagctgggattacagacagacgccaccatgcctggctaattttttgtatttttagtagagatggggtttcaccatgttggccaggctggtcttcaactcctgacctcaggtgatccaccagcctcggcctcccaaagtgctgggatcactggtgtgagctaccatgccccactgtgcctggccaaaagtctacatttttgattagtaaaaattcctctgtatttttacttttgaaatttggtgttaaatataccagtgacttttggttatttagggagttagagcctgtatttggaaagtgtttcaaagagattttttttttaagtaaaaattttgttcattgactttcttctacaaaatactttaagtaactcttactgaatttggatattaaacatttgagactattaggcttgtttaaaagtaattttactttaaattaaatcgagtgatttctgatgttgtaattacatatctgaggcaaaagaaaagggaaagatgaatgaagtgcttcactttaatagaatgtagaacagctggcattagaaatgttttgatttgtgaataattctgacactaataaaaagaaaaaaagtgtttcattcttcttaaatcttttctaacagtcacgtcctcagatgagatgatgaagagctatgtggcctgggacagagagaagcggctgagctttgcagtgccctttagagagatgaaacctgtcattttcctggatgtgttcctgcctcgagtcacagaattagcgctcacagccagtgacagacaaactaaagtacttctatttttcatttcacccattatttagatcctattgctttaaaaatacatattgcttaggatatagagaacatgtttcagccattccaatattagtaattttgtattttctgtaatatagtaattagaaaactacttacttattagaagtcagtgtcattgataaatgtaagttaagtataaatcatcttaataggtaattgggctgggcatggtggctcatgcctgtaatcccagcactttgggaggccgaggcaggcagatcacttgaggtcaggagtttgagaccagcctggccaacatggtaaaacctgatctttactaaaaatacaaaaattaggtgtgctggcatgcgagtgtagtctcagctactcggtaggctgaggcaggagaatcgtttgaacctgggaggcagtggttgcagcaagccgagattacgccactggattccagcctgggagacagagcgagactccgtctcaaaaaaaaaaaattgcctttcaaaacgttaatataccaaaagctcttcattatataaaatggaacataaagggcatttgagagtgatattcgggctatgcttggttatccccttaactctgggagattagaaacagataatctcaaattttcatacaggcatagcataccttggtgatactgcaggttcagctccagaccaaagcaataaagttaatatctcagtgtagcaaatcacactagttttttggtttttcagtacatgtaaaagttatgtttacactatactctggtctatttagtgtgcaatagcattagaactttatatacatactttaaaatgctttattgcttaaaaatgctaacaaagtgagcacatgctgttggaagaattgagccaatagaatttctcaatgcagggttgccacagaccttcaatttgttaaaaaacacattgtgtccaaagctccataaaatgaggtatgcgtgtattaatttgtaaattttctatagtgcttcaaaaaatatttttacttaaagtgatagttgaaaatgtgctaacagatgaagcaaagttatatagttctttaatatggcaacagtgaaatatacttcccagtttctaaagcttttacattttaattctttgttcttggataaaaaaacaaagtgaacagaatcattagttttatagaacaagaaatgttaattccagttaatttatatttgggttacatgatagttatgtgcaatgaaatttttcttcttaaaggctaaattgagtgacatttcaaatattctcttgtcatcaacgtgataacttaaacattgctgacctcctggtctgttttaggttgcagcctgtgaacttttacatagcatggttatgtttatgttgggcaaagccacgcagatgccagaagggggacagggagccccacccatgtaccagctctataagcggacgtttcctgtgctgcttcgacttgcgtgtgatgttgatcaggtaagggctttgaatctgaaatagttgtaaaatttctaaaagtttggtttgtctaattcagtggtcagcagagcagtggaattacctggagatggttaggaacgatactgctccctgactgctaccccaggtgctctggtttaattggtcatgggcatgacctgggcaccaggacttctaaaagctctcccctccactttcagtgtgtctcggagtttgggaatcgctgttgtagttaaaagttactgagagtccaggcatctaaaggtgaattagctgtcacccctctcatggacaaacgtagtctttcacaaagggaagaagagagaaataaccatgggccgcgcgcggtggctcacatctgtaatcccagcactttgggaggctgaggtaggcggatcacctgaggtcaggagttgaagaccagcctggccaacatgataaaacccccgtctctactaaaaatacaaaatttatctaggcgtggtggtgcgcatctgtaatcccagctacttgagaggctgaggcatgagaatcacttgaacccaggaggtggagattgcagtgctctgagatcacgccactgcactctagtttgggagacagagtgagactcattctcaaaaaaaaaaataaataaataaataaaaaatagctatggctggcaagtggcctatactatgactttatggacaaatccttcactgctgccatgaagcagaaaaaggtaagaaatcttctcagttcattttatgaatctagcatgacctggatatcagggtacacacttaaaaaagaaaatgaaatgcaaaactcattcaaaatgcagctggaaaattctgcagtatacatgagtggatatagtccagcagtatgttcagatgcactgtgattaaatagagctcatagtgaaaactggaaacttaccacagaaatagatttaacgtagcaatgaacctctccatggaagcctggaaggcatttggcagctcctgataaactaggagtagtttcacatgatgtttaatgtgatagaatgtctgcctgaatcttgcagccaggtcatcctctgtgtgaagcactgacactcccttgtgcttccacccagcatgggagcatggcctgtttctgggagtggtcagtgctttacttggagttagttaaactctgcatggacagagcctggtgttccttgcttcctctccagcatctaccccagcacttggcacttggcaatcaaaagacacttgtcagcgggccagtaaggctaggatatcagccccactaactatttgggagattctattcaatactgtaagataagaaaatcatagaaggactattaagaaggagaaaagattattataattgttttcaaaatctggaaggcccaagagtaagcatatcagctgataaactctaagaattaataaaggaaaaagctgatgaattataaacacataattctcatatatcttttttcatatattattctcatatatttcatatattagtattgaccacttggaaaatatgtctataaacatcttattcataacagcatcaaaaaaaaaatgtctaggaataaacttcaatgtgccaggcaaacatattttatgactatagaagatgaatagcttatgtacctgaggtagaagtcattattgaaaaaaacgtcgtttccccaaatcaattgataactctggtgtaattccagtaaaaaatccagaattaattttatttttgaacttaaaagaataatctgaaggagtaattgcttgagcctaataagcaagacacattttgaaagggttgcacgctggagggagtcttgtgtagtagatgttgaaaagtggccttatggagtataagaggctgaaccagcgcacagatggctcagtgggagagctaggtgctgggaaatggccccttgtgtgtatatgaaaattgtgtctatggtagggggttatttaagtgggaaatgggtcatttaataaatggtattaggtcaaatgactaacatgttaaagaaaaagttattcatgacattcgttaagatgttaaggaaaactattaaaggggaggctactccagtgggcctttacactgctgtagagggattgggctctactccaaatacttattgaccagggggattgatagccaaggagcagggtcagggtcagtggatggaaaataactaagaggaatattgggggaaccagcccccagtatttcaacgtaggttcttttctattttccctaagtgtcggccggtctgagaaataaagagaaagagtacaaagagagaaatgttacacccgggaccgtgatgacaaccccgagccgcaaaaccagcagatttttattagggattttaaaagaggagcgggtatatgaactgggagtaggtcacaaagatcacgtgcttcagagggcaataaaggtcacaaggcaaggcaaaattagaattactgatgagggcctatgtcccactgtggattgtcttgataaacatcttaacaggaaacagggttcgagggcagacaaccaatctgactagaatttaccaggctggaatttcccaatcctggtaagcctgagggtactgcaggagacaaggccatatttcagtccttatctcaactgcataagacagacactcccagagcagctgtctatagacctacccctaggaatgcattccttccccagggtcattccttgctgggaaaagaattcagcgatatttctcctacttgcacatccgtctataggctttctatgagaagaaaactgtggctgtgttctgcctgaccctgtaggcagtcagaccttatggttatcttcccttgcttgttacctgaaaatcgctgttattctgttctttttcagtgtgcactgatttcatattgttcaagcacacatattttacaatcaatttgtacggtagtggtcctgaggtgatgtacattctcagcttacgaagataacaggattaagagattaaagacaggcataagaaattataagagtattgattggggaagtgatgaatgtccatgaaatcttcacaatttatgttcagagactgcagtaaagagaggtgtaagaaattataaaagtattaattttgggaactgataaatgtccatgaaatcttcacaatttacgttcttctgcctcggctccaaccggtccctccgtgtggggtccctgacttcccacaacagaagaaacatcaggcataaagaggattgtggctaaaccaatcctaagagtgttatggctgaagatgggccagggtgaccagacactgcctgggggctggggggagatgaggaattagattatatatcaaggggaggagttttcactgaactgactcagcggagttcttggtgaaactggactaatagagatgaacatggaagcccagaaatcaaggcctagttgagaagagttcagaggagcctgactagagttagggtaaggaagaggggctttgtcacaagtgaagaaactaactgtaaatcaataagatttagaaggaaaaacgaactataaataaattacagaaaaatgtaatgaccacatagcatatctgtctgtgtatatctttaggtcttttttgttgataacacatcagtttataatattaaaatgttcaaagataaaaatgaacgttcacgtcacccctttcacctgcttgttccctgggaaaagatgttagatcctctgtaaagtctggagaatgtctttataataacacatcttgacatgtgcatagatgttttgttaacaaaaagtagactcgtagcatttcaaaacgttttcttctgtgtgcagtgtgatttctgctccttggatggatttcattacttttctataatcagcatccttctgtgtctttctataaagtttgtacagatagggagacacataaaagtgttaatgtattgatagttttgaccttataaatgtttaagactactgaatggcacaaaaccaacattgtaacatgtataatgtgcaacatactactgaagagatcagattttaaaatggacaaatgtataaagaaaaaaataggcagctcataaaagaagaaatgtaaatggccgatggaatgtatcttaaaatagtcaaccgttttgtaaacaaggaacttcaaattaaaatgatattggctactgtcaaatatttaaaagatgaacaatgtttggtgttgccaagggcacaaggaaaggaccctgcgtgtcatggttggtggggcgacacaggcacagtgctctgcagctgggctcggattgagtgaccacagtcctggcctagcagcttccttacaagagagctgcttaaacagtgtgctcaggactctccactctgtatggtagtcataatttagaaatacttgcatttctagctgtagggttctggtagcttggttgtggtccatagttgaggtactgggtggctactgaaaacattggtagagtgcatatgtttacgtggaaagtactctaagaagaaaccagttactggtttcttccaggaagacaggagctctgcctccttggcagatttatttttatttttacacgtgtatatacacatatttaaatgtatataaattggccgggggtcaggagtttgagaccagcccggccaacatggtgaaaccctgttgctactaaaaatacaaaaattagccgggcgtggtggtggacgcctgtaatcccagctacttgggaggctgagacaggagaatcacttgaacccgggagtcagaggtcgcagtgagcccagatttcaccactgcgctctagcctgggtgacagagtaagactctgtctcaaaaaaaaaaaaaaaaaaaggtatataaataaaatattttgaaagtcgacagtggttacctttgggatgtaggattgtagagggatgattttctataaaggggtatgtctgtattgtgtgtgtgtgtgtgtgtgtgtgtatatatatatatatatagctatgtatacatgtattaaaaaacttatgtactaagaataaaacagtatgattcttggccaggcgcggtggctcacgcctgtaatcccagcactttgggaggccgaggtgggtggatcacaaggtcaggagatcaagaccatcctggctaacacggtgaaaccctgtctctactaaaggtacagaaaattagccgggcgtggtggcgggtgcctgtagtcccagctactcgggaggctgaggcaggagaatggcgtggacccgggaggcggagcttgcagtgagcagagactgcgcgccactgcactccagcctgggcgacagagcgagactccgtctcaaaaaaaaaacaccagtatgattcttttgtggaaaaaaaagtgatgctttaagaccaggttaaactttcaaactgaaagttaagacccttttatattgattaattttaaaaattgcttcatagaggccagtgaaggtattaggggaaaaaaatagcttcaaagactagaaagactgtttggaagagtctctgtgttgtttagtctgagccctgggacattttgcatcatttttgaggtgatattaactacagtatggacctctaatatcaaagtacttaattgttgagctcaataaccgtggggaataaaggtctcctggatggctcagtactcctataaaagccctggcctctgaggcagaaatgtacaggatatcagtgtagggagtgttcaccttaacttccaccacaagcattttactttttttttttttgacggaatctcactgtgtctggagtgcagtgggacgatctcggctcactgcaacctccacctcccagttcaagcgattttcctgctttagcctcccaagtagctggggttacaggtgaccaccaccacacccggctaatttttggatttttattagtgaagaggtttcactgttttggccagagtggtcacaaactcctgacctcaagtgatccgccctcctcagcctcccaaagtgctgggattacatcgtgcctggccattttaattttttttttagacacggtgtccctctgtcactcatgctggagtgcagtagtgcagtcatagttccctaaagcctccacctcctgggcccaagccatccacccatctcagcctcctgagtagctgggactacaggcacgcaccaccgtgcctagctagttaaaaaataattttttgagagacaaggtcttcctatgttgcccaggatggtcttgaagtggcttcaaaagaccctcccgacttggcctctcaaaatgctgggattatgggcatgaaccactgcgcctggccagcattttactctcatgtataatgagggttagatctgtagcagtttatctagctaattgctctgatccacttctctttttgctccaagatggccacatggtcacacctccaccaggccactaggttacacttccaagcctccaggaagacaggagctctgccttcttgggtatggatttacttgtcataagggaggagcccagacctggagacatcttggattttacaaagccagggagcacggggctacctggcccctggagaggctttatttatgttccagaagattagacctaggatccttttcatcctatctccatagaggttttcctccctccttttggcagcagtgggagaggcagcttcctctttgtcctgtatataaacagattaaatctgtttttctatgttcctcccctgtggtactggctttgaatttgtgtatataggacattgattgggtttcattttgtcaccacaaggggagacagttaggctgtggggaaccacagggttgttatttgctttgtacaatagttgaatagcgactagattgtctgtaatccaggatatcttgtgtgcacgttcaagatcaaatgaataaagatgagtattacaaagccaacaatatgtatcctaaattgccctcccaatcagaggaacaatgagcttttgttgcatatttttctttgctggactcttcatcatggaatttaactggaaaaggaaactaatggggctggggatggtggctcatacctgtaatccctgcacgttgggaggctgaggcaggaggatcacttgaggccaggagttcaaggccaacctaggcaacatagtggaaccctgtctctacaaaaaaaaaattttaagttaactgggtgtggtggtacatgcctgtagtccagctattctggaggttgaggtgggaggggaccacttgagcctgaactaaaaaaggaaactaatacaaccatggtagtagtattacttaattttatactgcaaatggcatttaaatggaaccctttacagcgtaacatttctttaacatgaagggaattaactttaatggtattgtttcttcaggtgacaaggcaactgtatgagccactagttatgcagctgattcactggttcactaacaacaagaaatttgaaagtcaggatactgttgccttactagaagctatattggtaagtaatagttgattcttttcctcttactcccatcgattagttgtatttgatgtttgtttatttatttatgtttttgagacagtcttgctccgtcgcccaggctggaatgcagtggcacgatcttggctcactgcaacctgcgcctcccaggatcaagcaattctcctgtctcagcctcctgaatagctgggactacaggtgcacaccaccatgcctgcctaattttttgtatttcaatcagagacagcgtttcactttgttggccaggctggtcttagtcctgacctcaagtgatccgcccaccttggcagtgagccaggcacagtggctcaggcctgtaatccaacactttgggaggccgaggcatgcagattgcatgagcccaggagttggaaaccaaccaggccaacatggagaaaccctgtctctactaaaaatagaaaaattagctggcatggtgttacacacctgtagtgccagctcgccaggtggcttaggcatgagaattgcttcaacctgggagacaaaggttgcagtgagctgagattgcgctactgcactccagtctgggcgacagagtgagactctgtctcaaaaacaaagaataagaagaatttctgagtatatccaattttctcctatactcagattcaataactaaagggccctggaaacagcagttcaccttttacacagaactctcctgacacggagaagcattgtcttagaatttggtcgccagctcactgagggcagaggcagtgaggccagctaaattgtagtttttttttgatgcttattttactataaattttgaacctgtgcaaataagtttatgtctcctgcacagccctggttatgctgctggcagtgtactctgagtgtgatctttcttagtcatgttacgggtaggggagagtgactgaacattcgttagggtggtgacataattaaacctgtagtttaattccctgcagtgtctaccagtgaatcctacctataataaatacagttagctaaagttaatttatggcttatttacattcagatgttttcattataatgtttctgttaaaaagtttttattttagttgttttctgtttcttttctcccttttgatccttgaaggtagattaagtaagagattaagaaagaaatctgataagtaaaacgagatagttgaggaaagaaaaggtaaagaagcagcatgaactcggtagcacggcactcaagtgaaggagggccgtgggtttcctggtgagagctgctcttccctgcatcaccacttggcgctggtgacctctgctctgaaaagcaggaagcaccctctcctcccattaccatggcttgtgttacctttttggattctaattacctctgcaagaaaggattttatatgtagcagataactggaagtgttaggcagaactctcttaattcattgttgagtgtacgttttcaagttaaacttttcctttgtagatctgagacagcgtcatgactagaaggcaacaaagcataaagtagaatacatctctgtgtggtcgttggtcaaatgtccatagctgttttcggcagggcctttatggggtctgctcttcatgcctccataggattttcctttatggagcagtacagtttctttggaacttcaaagggtcttattctctttgacttcaatatgcaaagtgtctcaaaagctgttatggggtaaaatcaacaatcaaaattcctctggaattcttaggatatagccattttcttttttttcagggaagggaaagattgttttgttataattaaagttttctctcccctcttcatggcttttcagtttattaatttgtttaaaagaaaatgttttcattatatcagaaggaaatagttattcaagcctagattctggatacactatggagattggttttactaatgtttatttttttcttgactagtgctataaattaatttttaacatactttagttatgctcagagatagaccaagggtattcagttgtcagtggttataaaaattagtacaatcaaggtctctttgttttgtttcaggatggaattgtggaccctgttgacagtactttaagagatttttgtggtcggtgtattcgagaattccttaaatggtccattaagcaaataacaccacagcagcaggagaagagtccagtaaacaccaaatcgcttttcaagcgactttatagccttgcgcttcaccccaatgctttcaagaggctgggagcatcacttgcctttaataatatctacagggaattcaggtttgtaagctacacaacagagaagagaaacttgtggttttgaaaggtgacttggagtttcactctgtgtatccgtgtgtcatatttcctgcatttagtaagtaattatgtgctggatgctgtgctgtcttctggaaattaaaaagtgaattaaaattcagtttgcactccagaagcttggaaactgctgagaaatgcatgtaaacactgtctcagccattttggaaatgcaacaaaagacacatatacaggggctttgggtgcacagaggaggagtagctgatccagggtgagcaagtttgctgtggcctcttgctagggtttatattggagatgagacttgaaggataaatggaagtcagccaaggcattttagatcaaagttagtgggtggtgggggggtagagataagaaataggaaggtgtctgaggcgataaagtcctttgaggtttggaggcaggtgtcgtgaggctggcgaggagggctctgcttgctgtagtaaggagcgtaggtcaccgctagtgacagaggatctgtggagtagtgggtgcagggagagatgcatttagatttcctcctaaaatccacttgctggtagctgtgtagagagtgggtctgagtagactgaagactggaacaccagtgaacaggccatttcagaggtccaaggtaaaagacaagtggtcactgacctaaggtagtggtgttcattcattcatccagcattccttattaggaatattgtgtaccacatttacctgtgtaacctcacatcctgcacatgtacccctgaacttaaaagatgaagaaaaaaaaatgatgtgccagacctgtgtctatgttggaggtataacgatacagcccttcgtgagggttacatttcagaaggacacatagataataattagccacataggcaaatgagcagttctgcagatgcaagggacagaggcacttgtgtggaaacagagcgtgtgctgcctctttggctcatgtagctttcctctagtctgctcttgaggaagtatctttgagaagtgttttaggttgtttcatggtttttcttttctatttttttttgtttttgtttttggagacagagtcttgctctgtcacccaggctggagtgcagtggtgcgatctcggctcactgcaacctctgcttcccaggttcaagcgatttgcctgcctcagtcttccaagtaggtgggattacaggcgcccgccactacgcatggctaatttttgtgtttttagtagagactgggtttcaccatgttagtcaagctggtcttgaactcctgacctcaggtgatccctgcctcagcctcccaaagttctaggattacaggtgtgagccactgcacctgtttcatgttttaagacagagcccccccaccccgccctttttttcgtctgagacagggtcttgctctgttgctcaggctggagtgcagtggggggatcatgactcaacctcaacctcctgagctcaagtggtcctcctgcctcagcctcccaggtagctgggaccacaggtgtgcaccactgcacccaactaattttttttttttaattttttgtagagacagggtgtcactttgttgcccaggctggtctcgaactccagggctcaagtgatctttataggcatgcaccaccacacccagctgagcctttaaaaaaacaacaacaaaaaaacaattttttttttttttgagctggagtcttgctctgttgcccaggctggagtgcagtggcaggatctcggctcactgcaagctccacctcccgggttcatgccattttcttgcctcagcctcccgagtagctggggctacaggcgcctgccaccgcgcccagctaattttttgtatttttagtagagacggggtttcactgtggtctcgatctcctgacctcgtgatccacctgcctcggcctcccaaagtgctgggattacaggcgtgagccaccgcacccggccacaaaaaacaaatttaattaatgtgtgccttctttaattccattccttcttttctttgtcctttctgctttattgttttcttaggtgaggtttcctattctttattttacagggaagaagagtctctggtggaacagtttgtgtttgaagccttggtgatatacatggagagtctggccttagcacatgcagatgagaagtccttaggtacgttttgcttcagtgttctgtgtgcgttacaggtctgaagagtttccccaatgaggagttaaggctcgtgtgattctcttataaggttttttttttcccaagagttctataaattaataaatgtgaagagaatccccttcagtgcctcaaacccagcttgttaataattttttcatgcccttattttctttgactcaccatgtactcctggtggccattgaggttgaccctggttggttgcagattctgcccagggcaggggagacaacgaagccagtcagacactatgatgctgtgatgacagaacatgaaactgtgcagatatggtgctgaagaaactggatgtggtaaccactgagatgtggtcagtgcctctgcactcactcgtgatcatttagaaagtagaaagtggatctcattacaggactgtgatagagttgtttcatccatgatgaaggaatattataaagatattaagtcagaagtaggctaaaatagctaagagagtaataaatgattacaattaaattctatgcaagaagctattaggaactacatagagttgttgagctagaagacttcttaactccccgttggtcccagcacatgatgtagttggggcacagaggctcaggcgtgtcattgactgagacggccacacagctgtggcaggagtttatcactgatacgggtcttgacttattttattttatttgtttattttttgtgatggggttttgctcttgtcacccaggctggagtgcagtggtgcgatctcagctcactgcaacctccgcctcctgggttcaagcgattctcctgcctcagcctcccgagtagctgagactacagggacctgccaccacgcctggctaatttttgtatttttagtagagatgtttctccatgttagcctggctggtctataactcctgaccttacgtgatccacctgcctcagcctcccaaaatgctgggattacaggcatgagccactgcgcctggcaactttgtttattttttaaaaagacagactgagctctgttatccttcatgttgatagtctactgtgggcaaaaatgtgtaaaatttagtcctcattgtcaaattgcttaaatttgctttgtttatcttgatttcccatatgggtgaattttttcaacgagtgaaactttttttgtgatcacggacatatttaaaaaacatagaaaactttttcttggtgacacaggtcaaaataagatgtataaggctcctttcctaaataattccagacttctgtgagtgacttcaccatcttacctctgttgtacttctccagaggctgtattaccaaacgataccgtagtttatcctgcataggaagggaggtcaagggatttacacccctttaaaatagccacattgaagtccacaggctctggcctggtatgtgggttttgtaatacctgcaaagtctcttccatctcaggtccattaggagaggctgtgctttgggtggccgtggtgttggtggtacagtttctagttaggtatggcattgctctgagtgtgtgcatgtgtttgtgcgtgcacgcaccatgctatcctgcagtcttaaataggggttttgtgttcatttttgaatatgcagtgtgaatcatttatctaattttattattcttagggatgaaaacatattaaatctatagtaaaattaccttttcagttaaaaattaggccaacacatttataatacaaatttaataataatcagctatatatgccttctttggaaatatgtctctgtacttgagaacaggtacaattcaacagtgttgtgatgccattgatcacctatgccgcatcattgaaaagaagcatgtttctttaaataaagcaaagaaacgacgtttgccgcggtaggtgatcttgcttccttttccgtcttttcccacaacataaaactaattcacagctaatgaaggacaacctgggatggatctgtggaagtataaggaattacttcctaaacaaggaatgtgtggaagtctgaagagttcgttttccaaaaacgttaaaaagctttgtgtttgaaaatacttggtttaagggataaggtataaggtatttgatctgggttgagatagtacatacaaattgaaaattagttttgtaacagacgttttatttaatatgcactaattttgaacatgttttgatgtggatgatttgactagaatatgcatgaaccattattccgtaaattttgaagtgtatgaactgaatgttcaaatagtaacattttgacagacatggaattataaaattaggaaatgaaactgcttagagccaaccaaggctgggatgttggccagtggtttccagtttttgcccttattccatcctagtggtgttgccttctccagtagggtgagtgccctccataagcccctccagatctctgcagggtatctggggacatctgttatccatgctagtgaccgccactctggagaagcacagtcccatgtggactggattattaatattttctcagttgttttaaaagttgattcttccagattctactattaacttacgatatcagtttagttcattggttctaactttagcatacattagaattgcctggagatctagttaaaacacagattgctgggctggccccaccctcaatttctgtgtacccctggggtagggccagataatttggatttataacaagtgcacaggtaatgttggaacagctgtccagggaccacactttgagaagcactgctttacaaggtatattgcaaaggaaacatgaaaatacttagtgctgttcttttaaggagaactttttaatttttccccacatgaaaaaatgaacatgagcagcatttaggacccatttcacctatgttattttgattgcatctaattataatacattaaaaataagtcgaatgccttttagtgagatttctacatatatctgtgtgataaagatgagtttatgatttctagagccttggtagctgaatgttgcatgttggagagggactaatgacagtatgctgtctctgtgcagaggatttccaccttccgcatcattgtgtttattggatctggtcaagtggcttttagctcattgtgggaggccccagacagaatgtcgacacaaatccattgaactcttttataaattcgttcctttattgccaggtatggtaatctgtatatctttaatttcaccacggtgctttattatcccatttaaaagaagtaaagaagaattgagtaattgggtatcattgcagttaacatggtattcagttaagattcagaatattaacagttgatgaggtaatgcagttctgtttcagcatgtgattaataagaaattgccagcatcctaagtctgaatgatctcaaatcatattaaaggaaagcagtgaacctgtgcttttcagtaattactaaaccattaaactgcttatggactgaaataatgacaagtttctcaggaataaatgtattgctcagttttgtccattaagtccaaacctaggtttgatagcttgggagtggggaagctgtgctcaggacagatcaagccctgccttcccccattgtgggctgtcacagccctgtgccatgtgtggagagtgcctcaggttagatgggtgtgctggttccttggcaaaagttggggtggagtttttttttttttttttttgagacggagtctcgctcttttgcccaggctggactgcagtggcgctatctcagctcactgcaagctccacctcctgggttcacgccgttctcttgcctcatcctcccaagtagctgggactacaggcacccgccaccgcgtccggctaattttttgtatttttagtagagacggggtttcaccgtgttagccaggatggtctctatctgctgacctcgtgatccacccgccttggcctcccaaagtgctgggattacaggcgtcagccactgcacctggcctggggtggagttctgtctgggctttttcttcatggaacaagaggaaaaaagttactttatatatttccaggcttctaaaactaaaaaggactttacattttgtcatactataggatatattataatgttatatactacatattatatactatagagtatgtataaatacatactataactgaattagattattttatatatgctatataaataatgaagtataaatttactatatcattttacatgtataatagaaatgtatatctgtgttttaatttagataattgtttaaaaaacattagcatttaaaaaaattttttttcccccgagacagagtcttgctctgtcgcctgggctagagtgcaatggcacgatcttggctcactgcagcctctgcgccctgggttcaagcaattctcctgcctcatcctccagagtagctgggattacaggcgtgtgctaccacgcccggctaatttttgtgtttttagtagagacggggtttcaccatgttggccagtctggtctcaaactcctgacctcgtaatctgccagcctctgcctcccaaagtgctgggattgcaggtgtgagctaccacgcctggcctagcattttcagtttgcttaatgtgtttagctaacaacttttttttttatatgttaagtcattctcacagcaaccttgtgaaattagtcattgaagagtggaccagtggctggggaagggctggagggcagtgggcagcatttttcctatatttagtagaaaccgagaccctgatagcatgttggtagagctgcttatgggcagaccactatctcacattgagtctgtgactctggtagcacataggatttcttgtgacctcagctgtactgatctcaggcatttctagtgctgttctcttctcagttgcctgtgatacggacctcatgtattctgaactaaatagagttccacctctcagcattgtgttttgttggacaaaggctgctaggtagtaggtgagccttgcccttcttccaacaggtaatttgtataacattaaggagccttccttgatttatctcttctgtggccttgcagggtgtagccacctttctcctttggtatctttatcctccagtggctatttttgttttcttttatttttttccttttcagttttagagacaaagtctcactatgttgtccgggctggacacgaactcctaggctcatgtgatcctcttgcctcaacctccttagtagctgggactgcaggtgtgcagcacctgtttgtttttaagagacagggtctcactctgttgcccaggctaggtaggttgcagtgacatgattatagttcactgcagccataaactgagcttaagtgatcctcctgccccagcctcatgagtagctgggaacacaggcatgtgctaccaggcctggctcatttttaagtttttttgtagagatagggtcttggtattaatatgttgcccaggctagtcttgagtcctgaccccaagcagtcctcctgccttggcttcccaaagtgctggaattacaggtacaagccattgcatctagcttccttcagtggtttttaagcgtctgtgtcaggtgtctctttagctcactgtgtagcagcagtcctgggtacaggaacacccagatcagtagggcttgacgacaggtgcagggttgtccctctgacatgtgtccaagagagacagctcctggcggcttctgaatactgagactcagcgtggtccaggcccagaaacagacagcaggtcctcggtggagaccaaggaagaagtagggctgggcaggctccccaaccccaagcgtgcttgtctgcgtcttcagcttctctgtcttcttgtgatgtacccttgtctgctctctctcgatctgcctttttgtgtcctttctttctatcatttttcttctgtcactcttgatgtagaatttaaatatcttactatttattttttgctcattattatacatttctttgtctcttagtgaaagtaacagaacattacagaatattcctcctcttaatatacaaaatgttctctctttctttcttttttttataccgagtctcactctgtagctgaggatgtaatgcagtggcgtgatcttggctcactgcaacctccccctcgtttaagcgattctcctgcctcagcctcctgagtagctgagaccacaggcgcgcaccaccacgcctggctgatttttgtatttttagtagagatggggtttcaccatgttggccaggctggtcatgaactcttgacctcaagtgatccgcccatctcagccccccaaagtgctgggattacagacctgagccaccacccccggctgaatgttctgtttttaatacatcagagatacatgttttgaattcttcattagagtcagaatgatttgacattttcagtgctactgatttcagagcatacaaaatgcagttttatgtatttatctttttaatttagaagaagtttaatatttaaaagaaaatttcctggaaaaaacggctcattcgattctcttatttaacaaacactgcacttactgtgtggtagacgttattctaagcacatgttcaaatattaactactttaattcagctaatttttgtaacagccccagaggtagatattattgttctcatttgcaaatgctgttttgtgacttaaaggaataataatttttaaataaaaaggcaggggaaagagtattagtatgcagctactccaaatggtgtccaactatttttataatgtttgaggaacctgaagagaatggctgtggtggaaataccttcttggaagtaattacagtgaaacaagttgaatgcgtagtaaaatgaaaaaagattgtcccataacattttgaaattttaggtacaaagattagattaaagaaatgtaggtatatgtgtgcattttaattttgtttctttttaaaggcaacagatcccctaatttgtggctgaaagatgttctcaaggaagaaggtgtctcttttctcatcaacacctttgaggggggtggctgtggccagccctcgggcatcctggcccagcccaccctcttgtaccttcgggggccattcagcctgcaggccacgctatgctggctggacctgctcctggccgcgttggagtgctacaacacgttcattggcgagagaactgtaggagcgctccaggtcctaggtaggtcacccttgccttattctggtgtgtgtcgtgctgccagagtcaccctgggcagtggctctgccaggtcagaatcccagcgacatgatggtaggtgctgtgcaccaccttgcccgtgctttcatgtcacttctctgcaagggttccattcttcacacttcaaagttgacaaatacagtgttctcatagctttatataattgaaaaagttacactttctggtgtattgtaaatgttgacattttaaatacacaaaactgttaatattacttaaaaaaaacgtattccatgaacaatgaatactgtagcagttttatgtacagcatcattggctttaaaatatagctgctttattggaaattttgcagagtcccttaattcatattctcatttcctacccttcaaatgattttatcctaaagtattaagttttttttgcttaagattttactatatccctatctacgtctttttaatgaaaagatgtacatatttaaagattccttggctgggtgcagaggctctctcctgtaatcccagcactttgggaagccgaggcaggaggaccacttgagcccaggaggttgagaccagcctgggcaacacggcgagacactatctgtacaaaaaatactaaagttagtcaggcgtggtgatgcacatctgtgatcccagctactggggagtctgaggtgggaggatcgcttgagcctggaaggttgaggctacagtgagccgtgattgtgccactgtactctagcctgggcgatagagtgagaccgtgtctcaaaaaaaattttcttctgtgttactattatatttgttattagtgcacattacattttttactgccacaacaacaaatataataaaaattttggtaattattacacataaaatgtaaaattatgcggttggaattttatttttgtacgtatagattttagtattaaaaaaacttgttcatggccggacgcggtggctcacacctgtaatcccagcaatttgggaggccgagatgggcacatcacctgaggtgaggagttcgaaaccagtctggccaacatggcgaaatcccgtatctaccaaaaatacaaaaattagtcaggcatggtggcaggtccctgttaatcccagctactcgggaggctgaggcacaagaattgtttgaaccccggaggcggaggttgcagtgagctgagatcgcaccagagcactccagcctgggtgacaccgtctcagaaaataaaaccaaaacaaaaaaaacttgttcacataaataagtgccatatttggtttattctaaaatgtacattttcccatatttaacagatccatggttgcagtgtgtcttacaatccaatattctattggattcaaggatatttggtttttgagaataattagtttttttcttttttgaaatggagtctccgtcgcccaggctggagtgcagtggcgcgatcttggctcactgcaagctcatcctcccgggatcatgccattctcctgcctcagcctccctagtagctgggactacaggtgcccgccaccacgcccagctaattttttgtatttttagtagagacggggtttcactgtgttagccaggatggtctcgatctcctgacctcgtgatccgcctgcctcggcctcccaaagtgctgggattacaggtgtgagccaccgcgcccggctgagaataattcttaatataagttatctcagttcttggaatacatcaaaatacatgttatcaaaattatttttaacgaggtcagttgacagtttggattgactttccttaaattatgttggaaacaaagaattagaaaccatgagacttacaaaaaggctttcctactcaattgttgcctttactctttcaacagtgtacaagtattttaaattgtcccttggcactctaaagggctgtgcaccttggagtaataaactacagttagactggagagaggtgagggtgggtctgtctttcattaagcaggagagtcctgatgaacaacctgagatgggaaaggagaacaagctccagggtgttttcagacaaacgagttttatgacaaagcccgtttgaggattgatctgaaagttgattccataagatgactggtgcctgtccacacctgcttgaagactgctccataatttgtctctgtcctttgaaggacaggattttttattttttcattattaataacattcattattgataacagtgctaaaaagaagattcttacaaccacatctcttcaattctgcagtcatttcattaggttaaaatttcagtgctggatcaaagcataatgagtttttaaacatttgatagaaattggcatgcatatttttaaaaacttggtacgaattgccaaattgccctttaaaatgagcatattaatttatcttctcacatgtaatgtttgggaataaagacctgactttccatcaatgtgtcctttgatatgagaaaaaataaatgccactttattcagctattattaagctgtttgtttcttttgaaaaattttgaatttttgctgaacgtataccatgcctatacttacagaagcaattttatgttaatcttagtggagttgaaaggaagcatatattaatactttaatataattgcttctaggtactgaagcccagtcttcacttttgaaagcagtggctttcttcttagaaagcattgccatgcatgacattatagcagcagaaaagtgctttggcactggggcagcaggtaacagaacaagcccacaagagggagaaaggtacaactacagcaaatgcaccgttgtggtccggattatggagtttaccacgactctgctaaacacctccccggaaggatggaaggtaggctgctctgttaatttgaggtcagtttttggtactggaaaactacttcaaaggtttctgttagaaggggttttggcttttaataaaaatttatcattattattattattattattattattatatttcatcctctcaacccagcttttcctgacttcaggaagaaccaggaagagaaggctaggttttggcttttctaaaactttgcattgtcagaagttatatgtcaaaatcaatttgtcaatttgttttagttgacaaaaactgtatttatggtatacagcatgatgttttgatatgctctgccttgtggtatggctaaatcaagctaattaacgtatctgttacctcatatatgtaacattttttctgatgggaacttttcaatctattttcttagcaatttgcaaaattacaatgcatcgttattaactacagtcatcatgatgaatgatctattgaaaatcatgaaactttgcatgtccttcagagtttcactgtgtgaataaaatataaaatagttttttctaattgttttattggatgctgtattttatgctatgatcaaacatctaccttaggaaacacacactcgcaaatatttatagatgtatccatgaggcttattgtataaacaaactccagtcagttcattcagggaatctctgccaggtgcctgtggcacgccaggccctgggatgcagcagtgtcctgagtcaggggcggggaaaccctgtccatggacacaacctcacctgctgcctgctccgtagataaagctaaataggagcatggctgtgcgcctctgtccacctgttgtctgtgctgctttcttatcagacgcgtaaggagttgaagcagagactgtctagcccacaaacctcaagtgtttactgtgcccccgttttacagagaaactctgcccacctctcccttagtcaggcagaagttcccaaccttgtgggccctgcactttggtgaaaatagaagtgctggctgacgaagtgtttttatcaaacaatctgttacagctcctgaagaaggacttgtgtaatacacacctgatgagagtcctggtgcagacgctgtgtgagcccgcaagcataggtttcaacatcggagacgtccaggttatggctcatcttcctgatgtttgtgtgaatctgatgaaagctctaaagatgtccccatacaaagatatcctagagacccatctgagagagaaaataacagcacagaggtgggtacttgggtcacaatcggggacatgttgtcctggaatttcaggccctagtatgttgccgtgctcctgcagctgctcctgcttcctcagggaaggcttatatcagtgggatgtttgctgccagtgacctcaatagttgtttagaaaacacatttaactagtgccttccctgtaccaaacttaagcaaacttcagacatggttagcgccatgtttgatctccatgctagcttagtgcgtgtggatcctgttagatgttgcctctgtttgcttcataacagtgcaaacatttttttcagtgtatcttgataatttaacgagatcagagctcacctaatttactgttttgtcacatggccagcattgaggagctttgtgccgtcaacttgtatggccctgacgcgcaagtggacaggagcaggctggctgctgttgtgtctgcctgtaaacagcttcacagagctgggcttctgcataatatattaccgtctcaggtaactataacttattgtttttacatttattttagctttagtatgataattagtgtatttatttatattatttcttaaaagtcctttatgtattgagcatgctgaaatgggaattatagaaatacttgctcaagacatgtagatattatgtatctgtatatctatgatatatcaatataaatatgaaagcaaatgtaaaaatttataaatataaaatgaaagtaaaataaaggacatttaggtatttacagagcagctttctgaaaaactttaggaactgctgttgtgcctttgtggcaagacaacacaaatgaagaatctagcatagaaagcaaggttgagccagatacagtggctcatacttgtaatcccagcactttgggaggctcagataggaggattgcttgaggccagaagtttgagaccgacccaggcaacatggcaggaattcatctctacaaacaattaaaaaacaacaacaacaaaaaaaaacattgtccaggagtgggtgccgcggacccgtagtcccagctactcaggaggctgaggtgggaggattgcttgagcttggaagcctgagaatgcagtgagccacgattgtgtcactgcactccagcctgggcgacagagcaagaccctgtctcacaatagcaagaacaacaaaagcaaagttgaattaaaatttttctgaatattggaaggtagttgtcagtgctatctgaagtgggttttttatttaatgagaggagtgaagttgtttttttctaagaaatatctttttgctaggcatttcagtgttggcttccttttagtccacagatttgcatcattctgttggcacagaacttctttccctggtttataaaggcattgcccctggagatgagagacagtgtctgccttctctagacctcagttgtaagcagctggccagcggacttctggagttagcctttgcttttggaggactggtaggaaaaacgcctctgcatgctgcactcccctaataatagaaatacatatgtcacttgcaggtgtctctagaaactgtggaatttgggtagtaaggttttagctggacaagtattgtatgatttgcatgagccaactttctaaaagattattttctcaatagttaaaaaaaaaaagaacggaatagaacaacattctttttaaatagaggttttgtctatcccactttgtttccaaaaggaattagctagagaacgttttgtgactatgaagctgagtcatgttgacatgtggcctcttctcctctccttggtggtccttcacatggatgattgggagggcctctgaaggataatcccagaggaaccagagtctccaaaaaaatattctcatggctctttgaaccatgcagggctggccttaaatagtccctgctgtagctgaaatctgcagccagccctctgtgttcactccatcccaactttctttcttctgtagcagaaacccctttttcacccctttgtccgattaatgtaaacaattacatatttaaattgtctaaaaatactcacccttaatagactatcctcaaagcaacaacactggggtaggcagatggcttgagcccaggagtttgagaccatcctggacaacatagcgagaccctgtttctacaaaaaaatttaaaaaattagccaggtatggtggcacatgcttgtagtcccagctacacaagaggctgaggtgggaagatcgcttgagcccaggaagtcaaggctgtagtgagtcatgatcatgccactgcactccagcctgggcaacagagtgacaccctgtctttaaaaaacaacaaggctgggcagggtgacttattgcctgtaatcctagcactttgagaggccaaggcgggtgaattgcttgaggtcaggagttcgagaccagcctgaactacatggtgaaatgctgtctctactaaaaatacaaaaattagccaggtgtggtagaacgcacttgtaattccagatactcgggggtgctgaggccggagaattgcttgaacctaggaggtggaggtttgcagtgagccgagatcgtgccactgtactccagcctgggcaacagagcgagaccctgtctcaaaaaataaaacacaacaacaagacttttggacatttggaagaaatatgggtcaaggaagatttctttcccaaaatgaaacctagaaaatggaggctagttgaaatatatacaatttcagcttgaatccaggcttcacatatcaggctctttttagacctgtgtcattttccaatttcaaagttatcagttgcccaagggtctttctgtgccatgcaaagatgtgccccagttatggtacttctcctttctttttcccagtgtgagcgccttgtgagtcttctcctgaacccagcggtgctgtccacggcgtccttgggcagctcacagggcagcgtcatccacttctcccatggggagtatttctatagcttgttctcagaaacgatcaacacggaattattgaaaaatctggatcttgctgtattggagctcatgcagtcttcagtggataataccaaaatggtaacaaagtttccctttaaataaactgttttttttgtttgtttgtttgtttgagacagagtcttgcactttcgcccaggctggagtgcagtggcacgatctctgctgactgcaacctctgcatcccagattgaagcgattctcctgcctcagcctcccgagtagctgggattacaggcacccgccaccacacctagctaattttttgtatttttagtagagacggagtttcactatgttggccaggctggtcttgaactcctgacctcgtgatccgcccagtttggcctcccgaagtgctgggattacaggcgtgagccactgcacccggtcaatattttcttatataatccttataaaagggttgccatattcctgaaatatttcattaaagtatgacaagactttttcctataaggttgaaagctcttgcttttaacaaactcagaaaaacccaaaacataccccttatcaatagttaatgaatattaggccaggcatggtggctcatgcctgtaatcccagcactttgggaggtggaggtgagcggatcatcagaggtcaggaattcaagcccagcctggcgaacatggcaaaaccttgtttctactaaaaatacaaaaaattagccaggcatggtggtgtgtgcctgtaatcccagctactcaggaggctgaggcaggagaatttcttgaacctgagaggcggaggttgcagtgagctgagatcatgcccactgcactccagcctgagtaatgaagcgagactctgtcttaaaaaagtaagaaatagctaatgagtgttattggatgttaaaacattgattgttttttctattcccttatgctttgcaaatttctaagcctaaatattataaggcacagctatgcagggtattgacatttgccaagatgtggctttggagcttacaaacccgtcctggggcccagagctggctttgcattcataccagctgcaggcaggtctctgcaccccggtagacctctctgttctcagagttctcttgtggcctcgatgctgagttatcatttctggcatgttcctgctgtgtccccctttctccctggagatcagtatttaatatatagttgactttcgtttgctaaacctctgggattttgaaatttaacttgttctgtggacagaaactgttaactgttgatatgaccattttaagggagagtacatgatttcctaagttgagcttttattgcaaacagtgcttttctgttgtaggggaatcttttgtggtagattgcagtaggaatttgtattctttaaaattagaaataaaatcgtagtagatgacactcagatttaacattctgatttcttaaactatgacctctgatggaaatgatagaaaaaacatacgcctttgacctctattccttccctaaattcctctaaagtaacagaatgagatttttaaaacacctctacaatctcaaaggacacagagaaaaggacttccaagagtgacaagagttgtaaatcaaaaggacaggtgtggcagactgcatgcagagtttgagatagcagcgaggtgatgcagccttcggaagttggggtccacacgtgctgagccccagcagggcagacatgcgagcaggggtgagcagaggctgagaagagaggattgggcaaaggccagctctcccctgcagggcagcctcctgtctctgctgctgggggtctgatcctccccacttgaggagaaggcaggaggcagtgactccctggagaggatagagacctccagactgggggctctggcatggctgaatatgtggataccatcaggaaaagaggaaagttaagtactaacctacctaaattctagactttcaggctgtctgccctttccctctgaatactttcagttcagcatctgcccttggcagggcaccagaatatcctgacaagccctaagagaaaataaagatgcaggcatcatagccagctgggtcagtgacagtgatcctccccaccagcgagccctgcacgctgcacagcgcttccaggcaggtgatacctgtgagccggcagcccaggggctcaggcacctgaggaaagggacgccagagggcgtagcgggacacaggcaactgtggcaaggcctgttcagtgagatggaaatgtaagctggagaaaaaaaactgaaagatgagagacaaaactgtgaaataagaattgctatggagaatgaacatcagagaacaaaaaaggctcttgggaattaagcataggcatcagaaattaaaaatgaaatgagtttggaaggtaaacttgagtaactctcacagagagtagagtgaaagacaaaacagaaaacacgagagaaaagaggaggagactagggattcatgcatgaggttgagcagcagggccttggctccggagggcaggggtcaggagtggcatttgctgaggacacagctccagaggagcccagaagcaaaggctttgagtttccaggtagaagagggccatggagtgtccagcatggtgcacagaaacagctccacgtggagcacatttcttgagaattcagaaccgtggggtttcactacaataaaagattctcaggtttccactggagaaaaagcagttatgtgtgaaaggatctagaaattgaatgacatatgtcttctcagcggcagtgtggacattgcaagacttgaaccagatttcttccatagttcataagagaaatcttcagcctagagttctgaatccagctggattatccattatgtgagagtggaatacagatgttttagacatgccagatccccaagaggtccctgtgcactctcatcacgatgctgctgggtagagagtgatcaggcagtgagccaagacaggggaaggtgctggatacagtatgtcggccccgcacagaggcgtggatggcccagcaccaggtccagcaccagcattgcagatcaagagctgagttgccacagaaatggggcagatagacctgataggcttagagggcttgcagcaatttcataacttgggagagtttgatgacgaattaatgacagacacattgaaaagagcaatgaaagcaaacaaggttagcttcagagagtacaaaatgtgcaaaaagggaaaagcattgtttctacttggaacatctgtgaaaaatgtttgcatagtcagaatgacaggaatagtgcatgttaatctgaccaaaattagcctgtcactctgttgcaggagtggtggtgagacagaaaatgtgggtgtgcatgtatgatggtagttgaacaagaagtgtgcgtttgcgtgtgtgcatgtttgcttgtgtgtgtacacctgtgtgtgctagtgtgtgcctgtatggtggtggtgggaccggaagtatgtgcttgggtgcatgtttgcttatgtgtgtacatctgtgtgcttgtgcatgcatgtacagtggtggtgggataggaagtgtgcatttgtgcatatgtgcatatttgtgtgcttgtgcgtgtacacctgtgtgtgcttgtgcatgcatgtacagtggtggtggtggtgacagaagagagctgactcctttttcctagactgcgcagactaggaaagccaggagaagctggatgagcctgatgacatagctaaggccaccctgtactttgtggaaaaactatggttaaagtgtacctcaaatcaaactcgaggagttttgaagtagataaacatctattatagaaatagcttatttattttccaagaatagctttgaaataaaggtaaattttgttttctgtcattctcaaaattaagaatttttcttcactcacaacgaaattgtctcaggtgagtgccgttttgaacggcatgttagaccagagcttcagggagcgagcaaaccagaaacaccaaggactgaaacttgcgactacaattctgcaacactggaagaagtgtgattcatggtgggccaaagattcccctctcgaaactaaaatggcagtgctggccttactggcaaaaattttacaggtattcaattcctttaaaaagcagtcatgtttattcttctgaactctgtaacttgtgtctttaaaatttgatggaggttgctccaaaagctcattggtttgacaaataagaaaatattttgacaggatggttgcttatatttacctttttaaactttttccattatttattagacttactatttcttatgctatatctttttaaagtacctttgcatgtattgtcctaacagatagtattacaatgttttacaataagattgtgaaaatattattgaagcccaaaattaaattaacaattcatttctggaatttaaacatttgagcaatgggctaaaggaaatagagatgtaatatacaaatgtgtcctgtttttcttttccttcctttagattgattcatctgtatcttttaatacaagtcatggttcattccctgaagtctttacaacatatattagtctacttgctgacacaaagctggatctacatttaaaggtaaacagtgaaatatttatttttttggattacattctcttctgttttcgtattttttatttgtgatgttttttattttttattatggaaaatttcaaacgtgttcaaatgtagggagactagcacagtaatcccccgtacttattagccagtctcgataaccatcctgtgtgggtgtgtttgtttcacctgtgcggtcaacccacccgtcagcaggcaaggaaggccaagcaggccgggtgtgttatctgacctgtatctgcttcagttcagtgtgcctctccaagacatgagaacatttctttctttcttgcttgcttgcttgctttcttgctttcttgctttcttgctttcttttttttttttttttttagacagtctcgctctgtcacccaggctgaagtacagtggcacaatcatggctcactgcaacctccgcctcttgggttcaagtgattcttgtgcctcagcctcccaagtagctgggatcacaggtgtgcgccaccaggcctggctaatgtttttatttttagtatatttcaccatagtggccaggctggtctcaaactcctgacttcaagtgatctgcctgcctcggcctcccaaagtgctggggttacaggtgtgagccaccacacccggcctagaacatttcttttaaagtataagattatcatatttggatgaattaacatttgtgtttgcatacatattatttaaattggctttttgtgctataatgactttattactcagtcatttttctattaaaataatataaaaatttttggtgatttttagggtcaagaattaataaatactgtcattttaagggttactaattttaaagtcctagaacaattagattttaaaccctactgaaaagtggccttaattcaagggacctttttactggataaaggggataattctttggaattttctgctgtgtgattaatcaagtttcccatttctccatagacagtcttggaattttctgccatgcgagggagaacaggagtcaactcctagttcttgttaagctcagtatgaagttcttctgtagttctgcaatgtgtagttgtaaactcctccttaggttattcaaaatgttctttctacacaaagctt

SEQ ID NO: 2090 - protein, 712 aa, Homo sapiens
MSSPASTPSRRGSRRGRATPAQTPRSEDARSSPSQRRRGEDSTSTGELQPMPTSPGVDLQSPAAQDVLFSSPPQMHSSAIPLDFDVSSPLTYGTPSSRVEGTPRSGVRGTPVRQRPDLGSAQKGLQVDLQSDGAAAEDIVASEQSLGQKLVIWGTDVNVAACKENFQRFLQRFIDPLAKEEENVGIDITEPLYMQRLGEINVIGEPFLNVNCEHIKSFDKNLYRQLISYPQEVIPTFDMAVNEIFFDRYPDSILEHQIQVRPFNALKTKNMRNLNPEDIDQLITISGMVIRTSQLIPEMQEAFFQCQVCAHTTRVEMDRGRIAEPSVCGRCHTTHSMALIHNRSLFSDKQMIKLQESPEDMPAGQTPHTVILFAHNDLVDKVQPGDRVNVTGIYRAVPIRVNPRVSNVKSVYKTHIDVIHYRKTDAKRLHGLDEEAEQKLFSEKRVELLKELSRKPDIYERLASALAPSIYEHEDIKKGILLQLFGGTRKDFSHTGRGKFRAEINILLCGDPGTSKSQLLQYVYNLVPRGQYTSGKGSSAVGLTAYVMKDPETRQLVLQTGALVLSDNGICCIDEFDKMNESTRSVLHEVMEQQTLSIAKAGIICQLNARTSVLAAANPIESQWNPKKTTIENIQLPHTLLSRFDLIFLLLDPQDEAYDRRLAHHLVALYYQSEEQAEEELLDMAVLKDYIAYAHSTIMPRLSEEASQALIE

SEQ ID NO: 2091 - DNA, 2014 bp, Homo sapiens
atgaatattgtatgcacttggtattgttccattcattctgcaacattgttttctacctgtacattacatgcatatttcatgtgtttcttgtgcatgctatatgcttcatgtggcatccatgcccatgcaccacatatgttacgtgtaaactgtgtggtgtgtgtgtggcgtgtatgttttggtgttctgccttcagacagttctgcacaggcctcgcgcgtgcaagtggccatccagaccctggatgagaatgacaatgctccccagctggctgagccctacgatacttttgtgtgtgactctgcagctcctggccagctgattcaggtcatccgggccctggacagggatgaagttggcaacagtagccatgtctcctttcaaggtcctctgggccctgatgccaactttactgtccaggacaaccgagatggctccgccagcctgctgctgccctcccgccctgctccaccccgccatgccccctacttggttcccatagaactgtgggactgggggcagccggcgctgagcagcactgccacagtgactgttagtgtgtgccgctgccagcctgacggctctgtggcatcctgctggcctgaggctcacctctcagctgctgggctcagcaccggcgccctgcttgccatcatcacctgtgtgggtgccctgcttgccctggtggtgctcttcgtggccctgcggcggcagaagcaagaagcactgatggtactggaggaggaggacgtccgagagaacatcatcacctacgacgacgagggcggcggcgaggaggacaccgaggccttcgacatcacggccttgcagaacccggacggggcggcccccccggcgcccggccctcccgcgcgccgagacgtgttgccccgggcccgggtgtcgcgccagcccagaccccccggccccgccgacgtggcgcagctcctggcgctgcggctccgcgaggcggacgaggaccccggcgtacccccgtacgactcggtgcaggtgtacggctacgagggccgcggctcctcttgcggctccctcagctccctgggctccggcagcgaagccggcggcgcccccggccccgcggagccgctggacgactggggtccgctcttccgcaccctggccgagctgtatggggccaaggagcccccggccccctgagcgcccgggctggcccggcccaccgcggggggggggcagcgggcacaggccctctgagtgagccccacggggtccaggcgggcggcagcagcccaggggccccaggcctcctccctgtccttgtgtccctccttgcttccccggggcaccctcgctctcacctccctcctcctgagtcggtgtgtgtgtctctctccaggaatctttgtctctatctgtgacacgctcctctgtccgggcctgggtttcctgccctggccctggccctgcgatctctcactgtgattcctctccttcctccgtggcgttttgtctctgcagttctgaagctcacacatagtctccctgcgtcttccttgcccatacacatgctctgtgtctgtctcctgcccacatctcccttccttctctctgggtccctgtgactggctttttgtttttttctgttgtccatcccaaaatcaagagaaacttccagccactgctgcccaccctcctgcaggggatgttgtgccccagacctgcctgcatggttccatccattactcatggcctcagcctcatcctggctccactggcctccagctgagagagggaaccagcctgcctcccagggcaagagctccagcctcccgtgtggccgcctccctggagctctgcccagctgccagcttcccctgggcatcccagccctgggcattgtcttgtgtgcttcctgagggagtagggaaaggaaagggggaggcggctggggaaggggaaagagggaggaaggggaggggcctccatctctaatttcataataaacaaacactttattttgtaaaaaaaaaaa

SEQ ID NO: 2092 - protein, 392 aa, Homo sapiens
MNIVCTWYCSIHSATLFSTCTLHAYFMCFLCMLYASCGIHAHAPHMLRVNCVVCVWRVCFGVLPSDSSAQASRVQVAIQTLDENDNAPQLAEPYDTFVCDSAAPGQLIQVIRALDRDEVGNSSHVSFQGPLGPDANFTVQDNRDGSASLLLPSRPAPPRHAPYLVPIELWDWGQPALSSTATVTVSVCRCQPDGSVASCWPEAHLSAAGLSTGALLAIITCVGALLALVVLFVALRRQKQEALMVLEEEDVRENIITYDDEGGGEEDTEAFDITALQNPDGAAPPAPGPPARRDVLPRARVSRQPRPPGPADVAQLLALRLREADEDPGVPPYDSVQVYGYEGRGSSCGSLSSLGSGSEAGGAPGPAEPLDDWGPLFRTLAELYGAKEPPAP

SEQ ID NO: 2093 - DNA, 2040 bp, Homo sapiens
cacgaggagaacagaagaagagaaagctcagcaaattttcttgccatacttcatgacttcactgtggctaagtgtggggaccagacaggactcgtggagacatccaggtgctgaagccttcagctactgtctcagttttttgaagtttagcaatggcgtctttctctgctgagaccaattcaactgacctactctcacagccatggaatgagcccccagtaattctctccatggtcattctcagccttacttttttactgggattgccaggcaatgggctggtgctgtgggtggctggcctgaagatgcagcggacagtgaacacaatttggttcctccacctcaccttggcggacctcctctgctgcctctccttgcccttctcgctggctcacttggctctccagggacagtggccctacggcaggttcctatgcaagctcatcccctccatcattgtcctcaacatgtttgccagtgtcttcctgcttactgccattagcctggatcgctgtcttgtggtattcaagccaatctggtgtcagaatcatcgcaatgtagggatggcctgctctatctgtggatgtatctgggtggtggcttgtgtgatgtgcattcctgtgttcgtgtaccgggaaatcttcactacagacaaccataatagatgtggctacaaatttggtctctccagctcattagattatccagacttttatggagatccactagaaaacaggtctcttgaaaacattgttcagccgcctggagaaatgaatgataggttagatccttcctctttccaaacaaatgatcatccttggacagtccccactgtcttccaacctcaaacatttcaaagaccttctgcagattcactccctaggggttctgctaggttaacaagtcaaaatctgtattctaatgtatttaaacctgctgatgtggtctcacctaaaatccccagtgggtttcctattgaagatcacgaaaccagcccactggataactctgatgcttttctctctactcatttaaagctgttccctagcgcttctagcaattccttctacgagtctgagctaccacaaggtttccaggattattacaatttaggccaattcacagatgacgatcaagtgccaacacccctcgtggcaataacgatcactaggctagtggtgggtttcctgctgccctctgttatcatgatagcctgttacagcttcattgtcttccgaatgcaaaggggccgcttcgccaagtctcagagcaaaacctttcgagtggccgtggtggtggtggctgtctttcttgtctgctggactccataccacatttttggagtcctgtcattgcttactgacccagaaactcccttggggaaaactctgatgtcctgggatcatgtatgcattgctctagcatctgccaatagttgctttaatcccttcctttatgccctcttggggaaagattttaggaagaaagcaaggcagtccattcagggaattctggaggcagccttcagtgaggagctcacacgttccacccactgtccctcaaacaatgtcatttcagaaagaaatagtacaactgtgtgaaaatgtggagcagccaacaagcaggggctcttaggcaatcacatagtgaaagtttataagaggatgaagtgatatggtgagcagcggacttcaaaaactgtcaaagaatcaatccagcggttctcaaacggtacacagactattgacatcagcatcacctagaaacttgttagaaatgcaaattctcaagccgcatcccagacttgctgaatcggaatctctgggggttgggacccagcaagggcacttaacaaacccccgtttctgattaatgctaaatgtaagaatcattgtaaacattagttctatttctatcccaaactaagctatgtgaaataagagaagctactttgtttttaaatgatgttgaatatttgtcgatatttccatcattaaatttttccttagcattgtctaagtcaaaaaaaaaaaaaaaaaa

SEQ ID NO: 2094 - protein, 482 aa, Homo sapiens [sequence omitted]

SEQ ID NO: 2095 - DNA, 737 bp, Homo sapiens
tcgctaggtagagcatgggtttacacagccagagctggaggttggtccctgtgcctggagtgtgcctgcggaccaatggctctgccctgcaccttagggctcgggatgctgctggccctgccaggtgccttgtggctcgggtgggcagcgcggaggacagcgtgggctccagctctgtcacctgttgtcctgctgctgctgctgctcctactgctggccactggcctagcactggcctggcgccgcctcagccgtgactcatgggtgtgctactaccacccggcccgcctaggtgccgctgctgtgtgtggcctgcacgcggcgcctgctctgggccagccccccaggtcgctggctgcaggcccgagctgagctggggtccacagacaatgaccttgagcgacaggaggatgagcaggacacagactatgaccacgtcgcggatggtggcctgcaggctgaccctggggaaggcgagcagcaatgtggagaggcgtccagcccagagcaggtccccgtgcgggctgaggaagccagagacagtgacacggagggcgactggtcctcggctccccaggaccagcgagcgcagggggcagtgctgaggccctgctgagtgacctgcacgcctttgctggcagcgcagcctgggatgacagcgccagggcagctgggggccagggcctccatgtcaccgcactgtagaggccggtcttggtgtcccatccctgtcacag

SEQ ID NO: 2096 - DNA, 4490 bp, Homo sapiens
aagatggctgaggaatcctcctcctcctcctcctcatcttcaccaactgctgcaacatctcagcagcagcaacttaaaaataagagtatattaatctcttctgtggcttcggtgcatcatgcaaacggcctagccaaatcttctaccaccgtctctagctttgctaacagcaaacctggctctgctaagaagttagtgatcaagaactttaaagataagcctaaattaccagaaaactacacagatgaaacctggcaaaaactgaaagaagcagtggaagctattcagaatagtacttcaattaagtacaatttagaagaactctaccaggctgtagaaaatctctgttcttacaagatttctgcaaacttgtacaaacagctgagacagatctgcgaagatcacatcaaagcacagattcatcaattcagagaggattcattggatagcgttctttttttaaagaagattgatagatgctggcaaaaccattgcagacaaatgatcatgatcaggagcatttttttgtttctggatagaacttacgttcttcagaattcaatgctaccctccatttgggacatgggactggagttatttagggctcatattataagtgatcagaaagtgcagaataagacaattgatggcattcttctcttgattgagagggaaaggaatggtgaagcaattgatagaagtttacttcgaagccttttaagcatgctgtctgatttgcaaatttatcaagattcttttgaacaacgatttttggaagaaactaaccggctctatgcagctgaaggccaaaaattaatgcaagaaagagaggttcctgaatatctacatcatgttaacaaacgtctagaagaagaagcagacagacttattacttacttagatcagaccacccagaagtcattaattgctactgtagaaaaacaacttctaggtgaacacttaacagcaattcttcagaaaggtttaaataacctccttgatgaaaaccgaattcaagatttgtctcttctgtatcagctcttcagtagagttcgaggtggagttcaggttcttttgcagcagtggatcgaatatatcaaggcatttggcagcactattgtaattaatcctgaaaaagataaaaccatggttcaagaattgctggattttaaagataaggttgaccatataattgatatctgctttctgaagaatgagaaatttatcaatgccatgaaagaagcatttgaaacgttcattaacaaaagaccaaataaaccagctgaacttatagctaagtatgtagattcaaaacttcgtgcaggcaacaaagaagctacagatgaagaacttgagaaaatgttggataaaattatgatcatatttagatttatctatggcaaggatgtttttgaggccttctataagaaagatttagccaagcgcctgttagtcggaaagagtgcatctgtagatgctgaaaaatcaatgctgtccaaacttaaacatgaatgcggagctgctttcaccagcaaacttgaaggaatgtttaaagacatggaactttctaaagacatcatgattcagttcaaacagtatatgcagaatcagaatgttccgggaaatattgagttaactgtgaatatcctgacaatgggctattggccgacatatgtgcctatggaagttcatttaccaccagagatggtaaaacttcaggagattttcaagacattttacctaggcaaacatagtggcaggaaacttcagtggcagtcaaccctaggacactgtgtgttaaaagcagaatttaaagagggtaaaaaggaactccaggtctctctttttcaaacactggtgctgctaatgtttaatgagggagaggagttcagtttagaagagatcaagcaggcaactggaatagaggatggagagttaaggagaacactgcagtcattagcctgtggcaaagctagagttctggcgaaaaatccaaagggcaaagacattgaagatggtgacaagttcatttgtaatgatgatttcaaacataaacttttcaggataaagatcaatcaaatccagatgaaagaaacggttgaagaacaagcaagcactacagaaagagtatttcaagacagacagtatcaaattgatgctgcaattgttcgaattatgaagatgagaaagacacttagccacaatctccttgtttcagaagtgtacaaccagttgaaatttccagtaaagcctgctgatcttaagaagagaatagaatctttaattgaccgggactacatggaaagagataaagaaaatccaaaccagtacaactatattgcatagaatgttggccttgcagcatttggtgtcatatgcagtagccagtggataaactaacctgttgattcaatattatttgactccttttttactaccgatgaccaaatgaagcagtgtaattaatggaaatagttgagtggactttttctcagtggttaacatgcccattttaaagagtaatacttacctttaagaagaatgttgttgaactctttgcatgttatttagtatgatgtgcagaaaacacttaagaacgtacctggtcttcatgaattcctctttggaactgggaaagagatccctgtggctattaaaaaggggggagggttcttacacaccattaattatgaagcaaaaggtttatttgcttaaaatgtcatttaaagatacttaaactgcatgcaaactttatttactgtacagagttctggatgtatttatcaaatagaaaaaccacccttgacttggttgttcacccgttttgtgatttcccttgaaaagagaaatgaattgtcatagctattgatattttactaggtgatgttctgttacactgaaagggatgttttttaaaaaaaaaattatttggaaacaagttttcaagtagggggacagttgcttacataatatcttgtatattcacatcctaaaaattttcatttatgagtatgggatgtgtgtatatggcttagccccaagttaactgtgctgattaacaagtacttataaaaatagctaaagtagaaaattaatgatcagttgtactagaggaacatcatagaagagaaaaatccaactctttatattaaaaatgaatacaataagaaaattgcaaaagagaccaaaatgaacgtgttttgtaaattgttacaggagcaaaaactttgcaactagttttcaacatactttagactttaaatgttgtttggacagttttgtcttcaacttggaccaattgtagattgttacaggcttcctaggatttagcattcctattttctctaccaaagttttttttagaagcatcccaactcttctctttgttgataaataagcctttcctgtcatcttcattttaacttgctaaaaccctagatacaaaggtcctccctcatttttcccacagagcccctgtttgggaatttgagattctgtgtcatgctggttttcctttcagaattgcttgaaatcgagttctcttagccactggacacctagttttcaggagaatgtcccaagattgtttatatatacaaaatggcaaaagtactgtttttcgaattgataattcaagcaaaggcttctctttactgtcactgatttttttttgtttttattttgtttccttgtttctatttccttgaagctttgaagggaggagaagcagaaaattttgtttatgtttgttaaaaatcagaactacttaatgctttttgccacagcatatttccttgcctgttggagccgttaggaagattacctatgtcctaatcttcaacctgagaagatttttgactcttgtgtctactgttgattgtttgcttgagttctcaaagacctgtggccaggtattttaaaaagtcgtctatttctttctagttgcatcaacttgcacactggtgtctaactatatgtggtattcggaacttgtaattcttattgagcagccattgcctatattttctcagctcctcactgatttctttatatgagctcagctgacaagcaaatgcagctattttgtttaccctctcttcataccggaccatcaacaacagtgttctaactcatccctgatggtctgtgagatgtagactattacacaagattcaagttactcgtaagcaacttttagatagagttggtcctgttaggaggagactcttgatgtcaccttcagtatcttgaaagcgggtcccctccccgaggctcttaattctttgaaaacttgatgctgtttcagctgaaaaattagcaagactgttaaaaaaaaaaagttgaggggagctgtttaagaaactgaaaagtaattgcaaactacattggataattgtgactttcagttgttgttctgtatcagttgaatttttgtgctcttttccctgtgtacgtggtggttctatttttctccaataaaacttttattt

SEQ ID NO: 2097 - protein, 781 aa, Homo sapiens
KMAEESSSSSSSSSPTAATSQQQQLKNKSILISSVASVHHANGLAKSSTTVSSFANSKPGSAKKLVIKNFKDKPKLPENYTDETWQKLKEAVEAIQNSTSIKYNLEELYQAVENLCSYKISANLYKQLRQICEDHIKAQIHQFREDSLDSVLFLKKIDRCWQNHCRQMIMIRSIFLFLDRTYVLQNSMLPSIWDMGLELFRAHIISDQKVQNKTIDGILLLIERERNGEAIDRSLLRSLLSMLSDLQIYQDSFEQRFLEETNRLYAAEGQKLMQEREVPEYLHHVNKRLEEEADRLITYLDQTTQKSLIATVEKQLLGEHLTAILQKGLNNLLDENRIQDLSLLYQLFSRVRGGVQVLLQQWIEYIKAFGSTIVINPEKDKTMVQELLDFKDKVDHIIDICFLKNEKFINAMKEAFETFINKRPNKPAELIAKYVDSKLRAGNKEATDEELEKMLDKIMIIFRFIYGKDVFEAFYKKDLAKRLLVGKSASVDAEKSMLSKLKHECGAAFTSKLEGMFKDMELSKDIMIQFKQYMQNQNVPGNIELTVNILTMGYWPTYVPMEVHLPPEMVKLQEIFKTFYLGKHSGRKLQWQSTLGHCVLKAEFKEGKKELQVSLFQTLVLLMFNEGEEFSLEEIKQATGIEDGELRRTLQSLACGKARVLAKNPKGKDIEDGDKFICNDDFKHKLFRIKINQIQMKETVEEQASTTERVFQDRQYQIDAAIVRIMKMRKTLSHNLLVSEVYNQLKFPVKPADLKKRIESLIDRDYMERDKENPNQYNYIA

SEQ ID NO: 2098 - DNA, 494 bp, Homo sapiens
gcggccgctccaggcgcccgttccggagtcggggggaggcccagccgggaggggggaagggggggagccttagtcatttccccgctccagcctgctcccgcccgagcgcgcactcacggccgctctccctcctcgctccgcagccgcggcccatggagcccgccggcccggcccccggccgcctcgggccgctgctctgcctgctgctcgccgcgtcctgcgcctggtcaggagtggcgggtgaggaggagctgcaggtgattcagcctgacaagtccgtgttggttgcagctggagagacagccactctgcgctgcactgcgacctctctgatccctgtggggcccatccagtggttcagaggagctggaccaggccgggaattaatctacaatcaaaaagaaggccacttcccccgggtaacaactgtttcagacctcacaaagagaaacaacatggacttttccatccgcatcggaaacatcaccccagca

SEQ ID NO: 2099 - DNA, 4792 bp, Homo sapiens
ggaccacccagtaccgatcccttcacgaccgtcaccatggaagtgtcaccattgcagcctgtaaatgaaaatatgcaagtcaacaaaataaagaaaaatgaagatgctaagaaaagactgtctgttgaaagaatctatcaaaagaaaacacaattggaacatattttgctccgcccagacacctacattggttctgtggaattagtgacccagcaaatgtgggtttacgatgaagatgttggcattaactatagggaagtcacttttgttcctggtttgtacaaaatctttgatgagattctagttaatgctgcggacaacaaacaaagggacccaaaaatgtcttgtattagagtcacaattgatccggaaaacaatttaattagtatatggaataatggaaaaggtattcctgttgttgaacacaaagttgaaaagatgtatgtcccagctctcatatttggacagctcctaacttctagtaactatgatgatgatgaaaagaaagtgacaggtggtcgaaatggctatggagccaaattgtgtaacatattcagtaccaaatttactgtggaaacagccagtagagaatacaagaaaatgttcaaacagacatggatggataatatgggaagagctggtgagatggaactcaagcccttcaatggagaagattatacatgtatcacctttcagcctgatttgtctaagtttaaaatgcaaagcctggacaaagatattgttgcactaatggtcagaagagcatatgatattgctggatccaccaaagatgtcaaagtctttcttaatggaaataaactgccagtaaaaggatttcgtagttatgtggacatgtatttgaaggacaagttggatgaaactggtaactccttgaaagtaatacatgaacaagtaaaccacaggtgggaagtgtgtttaactatgagtgaaaaaggctttcagcaaattagctttgtcaacagcattgctacatccaagggtggcagacatgttgattatgtagctgatcagattgtgactaaacttgttgatgttgtgaagaagaagaacaagggtggtgttgcagtaaaagcacatcaggtgaaaaatcacatgtggatttttgtaaatgccttaattgaaaacccaacctttgactctcagacaaaagaaaacatgactttacaacccaagagctttggatcaacatgccaattgagtgaaaaatttatcaaagctgccattggctgtggtattgtagaaagcatactaaactgggtgaagtttaaggcccaagtccagttaaacaagaagtgttcagctgtaaaacataatagaatcaagggaattcccaaactcgatgatgccaatgatgcagggggccgaaactccactgagtgtacgcttatcctgactgagggagattcagccaaaactttggctgtttcaggccttggtgtggttgggagagacaaatatggggttttccctcttagaggaaaaatactcaatgttcgagaagcttctcataagcagatcatggaaaatgctgagattaacaatatcatcaagattgtgggtcttcagtacaagaaaaactatgaagatgaagattcattgaagacgcttcgttatgggaagataatgattatgacagatcaggaccaagatggttcccacatcaaaggcttgctgattaattttatccatcacaactggccctctcttctgcgacatcgttttctggaggaatttatcactcccattgtaaaggtatctaaaaacaagcaagaaatggcattttacagccttcctgaatttgaagagtggaagagttctactccaaatcataaaaaatggaaagtcaaatattacaaaggtttgggcaccagcacatcaaaggaagctaaagaatactttgcagatatgaaaagacatcgtatccagttcaaatattctggtcctgaagatgatgctgctatcagcctggcctttagcaaaaaacagatagatgatcgaaaggaatggttaactaatttcatggaggatagaagacaacgaaagttacttgggcttcctgaggattacttgtatggacaaactaccacatatctgacatataatgacttcatcaacaaggaacttatcttgttctcaaattctgataacgagagatctatcccttctatggtggatggtttgaaaccaggtcagagaaaggttttgtttacttgcttcaaacggaatgacaagcgagaagtaaaggttgcccaattagctggatcagtggctgaaatgtcttcttatcatcatggtgagatgtcactaatgatgaccattatcaatttggctcagaattttgtgggtagcaataatctaaacctcttgcagcccattggtcagtttggtaccaggctacatggtggcaaggattctgctagtccacgatacatctttacaatgctcagctctttggctcgattgttatttccaccaaaagatgatcacacgttgaagtttttatatgatgacaaccagcgtgttgagcctgaatggtacattcctattattcccatggtgctgataaatggtgctgaaggaatcggtactgggtggtcctgcaaaatccccaactttgatgtgcgtgaaattgtaaataacatcaggcgtttgatggatggagaagaacctttgccaatgcttccaagttacaagaacttcaagggtactattgaagaactggctccaaatcaatatgtgattagtggtgaagtagctattcttaattctacaaccattgaaatctcagagcttcccgtcagaacatggacccagacatacaaagaacaagttctagaacccatgttgaatggcaccgagaagacacctcctctcataacagactatagggaataccatacagataccactgtgaaatttgttgtgaagatgactgaagaaaaactggcagaggcagagagagttggactacacaaagtcttcaaactccaaactagtctcacatgcaactctatggtgctttttgaccacgtaggctgtttaaagaaatatgacacggtgttggatattctaagagacttttttgaactcagacttaaatattatggattaagaaaagaatggctcctaggaatgcttggtgctgaatctgctaaactgaataatcaggctcgctttatcttagagaaaatagatggcaaaataatcattgaaaataagcctaagaaagaattaattaaagttctgattcagaggggatatgattcggatcctgtgaaggcctggaaagaagcccagcaaaaggttccagatgaagaagaaaatgaagagagtgacaacgaaaaggaaactgaaaagagtgactccgtaacagattctggaccaaccttcaactatcttcttgatatgcccctttggtatttaaccaaggaaaagaaagatgaactctgcaggctaagaaatgaaaaagaacaagagctggacacattaaaaagaaagagtccatcagatttgtggaaagaagacttggctacatttattgaagaattggaggctgttgaagccaaggaaaaacaagatgaacaagtcggacttcctgggaaaggggggaaggccaaggggaaaaaaacacaaatggctgaagttttgccttctccgcgtggtcaaagagtcattccacgaataaccatagaaatgaaagcagaggcagaaaagaaaaataaaaagaaaattaagaatgaaaatactgaaggaagccctcaagaagatggtgtggaactagaaggcctaaaacaaagattagaaaagaaacagaaaagagaaccaggtacaaagacaaagaaacaaactacattggcatttaagccaatcaaaaaaggaaagaagagaaatccctggcctgattcagaatcagataggagcagtgacgaaagtaattttgatgtccctccacgagaaacagagccacggagagcagcaacaaaaacaaaattcacaatggatttggattcagatgaagatttctcagattttgatgaaaaaactgatgatgaagattttgtcccatcagatgctagtccacctaagaccaaaacttccccaaaacttagtaacaaagaactgaaaccacagaaaagtgtcgtgtcagaccttgaagctgatgatgttaagggcagtgtaccactgtcttcaagccctcctgctacacatttcccagatgaaactgaaattacaaacccagttcctaaaaagaatgtgacagtgaagaagacagcagcaaaaagtcagtcttccacctccactaccggtgccaaaaaaagggctgccccaaaaggaactaaaagggatccagctttgaattctggtgtctctcaaaagcctgatcctgccaaaaccaagaatcgccgcaaaaggaagccatccacttctgatgattctgactctaattttgagaaaattgtttcgaaagcagtcacaagcaagaaatccaagggggagagtgatgacttccatatggactttgactcagctgtggctcctcgggcaaaatctgtacgggcaaagaaacctataaagtacctggaagagtcagatgaagatgatctgttttaaaatgtgaggcgattattttaagtaattatcttaccaagcccaagactggttttaaagttacctgaagctcttaacttcctcccctctgaatttagtttggggaaggtgtttttagtacaagacatcaaagtgaagtaaagcccaagtgttctttagcttt

SEQ ID NO: 2100 - protein, 1531 aa, Homo sapiens [sequence omitted]

SEQ ID NO: 2101 - DNA, 4750 bp, Homo sapiens
atgttccgcttccctatggggctcctgcttggctctgtgctcctggtggcttcggccccagccactctggagcctcccggctgcagcaacaaggagcaacaggtcactgtcagccacacctacaagatcgatgtgcccaagtctgccttggttcaggttgacgctgaccctcagcccctcagtgacgatggggcttcgctcttggccctgggggaggccagggaggaacagaacatcatcttcaggcacaacatccgccttcagacgccacagaaggactgcgagttggcaggcagtgtccaggacctcctggcccgggtgaagaagctggaggaagagatggtggagatgaaggaacagtgtagtgcccagcgctgctgccagggagtcactgatctaagccgccactgcagcggccacgggaccttctccctggagacctgcagctgccactgcgaagagggcagggagggccccgcctgcgagcggctggcctgccccggggcgtgcagcggccacgggcgttgcgtggacgggcgctgcctgtgccatgagccctacgtgggtgccgactgcggctacccggcctgccctgagaactgcagcggacacggcgagtgcgtgcgcggcgtgtgccagtgccacgaagacttcatgtcggaggactgcagcgagaagcgctgtcccggcgactgcagcggccacggcttctgtgacacgggcgagtgctactgcgaggagggcttcacaggcctggactgtgcccaggtggtcaccccacagggcctgcagctgctcaagaacacggaggattctctgctggtgagctgggagccctccagccaggtggatcactacctcctcagctactaccccctggggaaggagctctctgggaagcagatccaagtgcccaaggagcagcacagctatgagattcttggtttgctgcctggaaccaagtacatagtcaccctgcgtaacgtcaagaatgaagtttctagcagcccacagcatctacttgccaccacagaccttgctgtgcttggcactgcctgggtgacagatgagactgagaactcccttgacgtggagtgggaaaacccctcaactgaggtggactactacaagctgcgatatggccccatgacaggacaggaggtagctgaggtcactgtgcccaagagcagtgaccccaagagccgatatgacatcactggtctgcacccggggactgagtataagatcacggtggtgcccatgagaggagagctggagggcaagccgatcctcctgaatggcaggacagaaattgacagtccaaccaatgttgtcactgatcgagtgactgaagacacagcaactgtctcctgggacccagtgcaggctgtcatagacaagtatgtagtgcgctacacttctgctgatggggacaccaaggaaatggcagtgcacaaggatgagagcagcactgtcctgacgggcctgaagccaggagaggcatacaaggtctacgtgtgggctgaaaggggcaaccaggggagcaagaaagctgacaccaatgccctcacagaaattgacagcccagcaaacctggtgactgaccgggtgactgagaataccgccaccatctcctgggacccggtacaggccaccattgacaagtacgtggtgcgctacacctctgctgacgaccaagagaccagagaggttctggtggggaaggagcagagcagcactgtcctgacaggcctgaggccaggtgtggagtacacagtgcatgtctgggcccagaagggggaccgagagagcaagaaggctgacaccaacgccccgacagatattgacagccccaaaaacctggtgactgaccgggtgacagagaatatggccacggtctcctgggacccggtgcaggccgccattgacaagtacgtggtgcgctacacctctgctggtggagagaccagggaggttccggtggggaaggagcagagcagcacagtcctgacaggcctgagaccgggtatggagtacatggtgcacgtgtgggcccagaagggggaccaggagagcaagaaggccgacaccaaggcccagacagacattgacagcccccaaaacctggtgaccgaccgggtgacagagaatatggccactgtctcctgggacccggtgcgggccaccattgacaggtatgtggtgcgctacacctctgccaaggacggagagaccagggaggttccggtggggaaggagcagagtagcactgtcctgacgggcctgaggccgggtgtggagtacacggtgcacgtgtgggcccagaagggggcccaggagagcaagaaggctgacaccaaggcccagacagacattgacagcccccaaaacctggtcactgactgggtgacagagaatacagccactgtctcctgggacccggtgcaggccaccattgacaggtatgtggtgcactacacgtctgccaacggagagaccagggaggttccagtggggaaggagcagagcagcactgtcctgacgggcctgaggccgggcatggagtacacggtgcacgtgtgggcccagaaggggaaccaggagagcaagaaggctgacaccaaggcccagacagaaattgacggccccaaaaacctagtgactgactgggtgacggagaatatggccactgtctcctgggacccggttcaggccaccattgacaagtacatggtgcgctacacctctgctgacggagagaccagggaggttccggtggggaaggagcacagcagcactgtcctgacgggcctgagaccaggcatggagtacatggtgcacgtgtgggcccagaagggggcccaggagagcaagaaggctgacaccaaggcccagacagaactcgaccctcccagaaaccttcgtccatctgctgtaacgcagtctggtggcatattgacctggacgcccccctctgctcagatccacggctacattctgacttaccagttcccagatggcacagttaaggagatgcagctgggacgggaagaccagaggtttgcgttgcaaggccttgagcaaggcgccacctaccctgtctcccttgttgcctttaagggtggtcgccggagcagaaatgtatccaccaccctctccacagttggtgcccgtttcccacacccttcggactgcagtcaggttcagcagaacagcaatgccgccagtggtctgtacaccatctacctgcatggcgatgccagccggcccctgcaggtgtactgtgacatggaaacggacggaggtggctggattgtcttccagaggcggaacactgggcagctggatttcttcaagcgatggaggagctatgtggaaggctttggggaccccatgaaggagttctggcttggacttgacaagctacacaacctcaccaccggcactccagcgcggtatgaggtgagagtggatttacagactgccaatgaatctgcctatgctatatatgatttcttccaagtggcctccagcaaggagcggtataagctgacagttgggaaatacagaggcacggcaggggatgctcttacttaccacaatggatggaagtttacaacttttgacagagacaatgatatcgcactcagcaactgtgccctgacacatcatggtggctggtggtataagaactgccacttggccaaccctaatggcagatatggggagaccaagcacagtgagggggtgaactgggagccttggaaaggacatgaattctccattccttacgtggagttgaaaatccgccctcatggctacagcagggagcctgtcctgggcagaaagaagcggacgctgagaggaaggctgcgaacgttctgatggcccgtgtgagcagtcctcgcaggagacaccaccagctgtggcagcttggggcggggtgggtagtggtcactgcggtctgggagtgctcagatagcccgcagaacaaatcatgtcaccaagcttcaagccatggaggttccttccctctcacctgcatttttgcccgtctttatgagggtcttgaaaatcaaaatagtagttgcacagtatgtgtaggaaagacagtactggaacggcaaggtttctcagcttatcttcagcaacatatatactggattagggcaagagaaggaatcacccagcacttcaccagttggaaatctctggaaatttacatctatgtatttaaagttctgctaatgcaaatcttttctctggaaagaagcacagaggaggagttctgatgacccaggggttagggctgagacaaccggacgtttgtcacctcctttcccattgggtttttaggaaaacagtgtgaacctcccccttttaatttctggtgttatgaggaagaataaaggggataaaaggggctaagatggactcatgtttagctaagttctgacttgtatccagcatgctggagaccaaagctgccgccttactgctatttttaagtgccctcttttcagtcatttgcataattgcgtccatagagctgcatatgttgtgaataaattctcactcatttcaactttgaataatttgactgtcttgataattggttcctcccaaagactcttctgcaactcccattcatgcccaccaggcctcagactccctcttttccccgccctgcactattggagccctgggttttgtgggagtgctcagcaccgtgagtcttactgtttgatcg

SEQ ID NO: 2102 - protein, 1294 aa, Homo sapiens
MFRFPMGLLLGSVLLVASAPATLEPPGCSNKEQQVTVSHTYKIDVPKSALVQVDADPQPLSDDGASLLALGEAREEQNIIFRHNIRLQTPQKDCELAGSVQDLLARVKKLEEEMVEMKEQCSAQRCCQGVTDLSRHCSGHGTFSLETCSCHCEEGREGPACERLACPGACSGHGRCVDGRCLCHEPYVGADCGYPACPENCSGHGECVRGVCQCHEDFMSEDCSEKRCPGDCSGHGFCDTGECYCEEGFTGLDCAQVVTPQGLQLLKNTEDSLLVSWEPSSQVDHYLLSYYPLGKELSGKQIQVPKEQHSYEILGLLPGTKYIVTLRNVKNEVSSSPQHLLATTDLAVLGTAWVTDETENSLDVEWENPSTEVDYYKLRYGPMTGQEVAEVTVPKSSDPKSRYDITGLHPGTEYKITVVPMRGELEGKPILLNGRTEIDSPTNVVTDRVTEDTATVSWDPVQAVIDKYVVRYTSADGDTKEMAVHKDESSTVLTGLKPGEAYKVYVWAERGNQGSKKADTNALTEIDSPANLVTDRVTENTATISWDPVQATIDKYVVRYTSADDQETREVLVGKEQSSTVLTGLRPGVEYTVHVWAQKGDRESKKADTNAPTDIDSPKNLVTDRVTENMATVSWDPVQAAIDKYVVRYTSAGGETREVPVGKEQSSTVLTGLRPGMEYMVHVWAQKGDQESKKADTKAQTDIDSPQNLVTDRVTENMATVSWDPVRATIDRYVVRYTSAKDGETREVPVGKEQSSTVLTGLRPGVEYTVHVWAQKGAQESKKADTKAQTDIDSPQNLVTDWVTENTATVSWDPVQATIDRYVVHYTSANGETREVPVGKEQSSTVLTGLRPGMEYTVHVWAQKGNQESKKADTKAQTEIDGPKNLVTDWVTENMATVSWDPVQATIDKYMVRYTSADGETREVPVGKEHSSTVLTGLRPGMEYMVHVWAQKGAQESKKADTKAQTELDPPRNLRPSAVTQSGGILTWTPPSAQIHGYILTYQFPDGTVKEMQLGREDQRFALQGLEQGATYPVSLVAFKGGRRSRNVSTTLSTVGARFPHPSDCSQVQQNSNAASGLYTIYLHGDASRPLQVYCDMETDGGGWIVFQRRNTGQLDFFKRWRSYVEGFGDPMKEFWLGLDKLHNLTTGTPARYEVRVDLQTANESAYAIYDFFQVASSKERYKLTVGKYRGTAGDALTYHNGWKFTTFDRDNDIALSNCALTHHGGWWYKNCHLANPNGRYGETKHSEGVNWEPWKGHEFSIPYVELKIRPHGYSREPVLGRKKRTLRGRLRTF

SEQ ID NO: 2103 - DNA, 32993 bp, Homo sapiens
gccacaggaagggcagggggtggggccaatgaagatcctcttgggctgcctgacttccctcagtgtacacatcagctcagcccgaagtggggtgaagatctcccaattgacacgaaccaaggaattcaaactctcctcaggggcaggatacgtctccaggcttaacttgctcagcccactggtgtggcgcagcaggtccttcagggcgtcaatagacatgcaatttctgccaaagtagaaggtggtgagctgggagcaccggctcagggcaggcaggatggcactgagttgggagtagtggatctgacagccctccaagatgagggttttgagagaggcagcaattttctccagcagagctccgaggggttcaagactgatgcggaacagcagcacgtagctgagattcagatgctttaggtaaccgaggcttgggtactgggagagacacttcatgtcttcttccaataggtagccataagttaattccaagttctccaaggggttctggaggcacctgtggagatcaagaagttagttctgggcagtgataccagttagatgaaggtagtgccttcatctaggaaaatgcctgcgtcaaacaaacacaagtttgttcccaccatctgatgatggtcctcatggaagttgctgcatgatgaggaccctgatcgttcaggggctgtcccattttagcctcagccctttcaccattgcttgtgtgattggttcaaggccataaaatctctaaagccttttttttttcatcttttagcagaaaacttcatctctgggccacaggtacccggtgggagatgtgaacaaagaactcaactgagcaaggtctagggacatcagctagagctacatgtcagcaggggctccctgacatgcctgcatctgcaaaccaactgtcactttttaccactctcacgcctactccctcacctccatcccggaagcacgcatttcccatgtcaattacctttcctggagttcaaaacaaccttttacaaacagggaatcagagacaggatcattcgtgatcactaagccggtgaggacagacgttctattgtgaaatggacaggtttgatgcgctttccctcctttcataccctcctctattatctctttgacatcatatcaacttgaaacacactttgtaacaggaaattcacacgtgcacccccaatagagctgaaacccccactaactagcttgtacatgatgtccctctctagcttctaccccaggtgacccctctccccttattggagcgatcctgtgatagccactccaggacatggaacactgaatgggacaatgtgttgacattctgatgtccccttcactgtgacgttgccactggctggcacacagtacatgccttctaatgtttgctgttacagaacaaggctatgctgtggtctgcatacaaagtgcatgatcctttctcacctgatcagctgttccaggtgcccactgaagaaggtgatcaattttattttaagcaactgaaggtgttccagcctgaggaacacagagctgaatttggcaactaaccgtccttggagttcattatctgacgtgtaatgatggcacctggagaaaacgagtttgcgaagattcttcatctccttcaggtaacaacgaagctttcttatcagacgtggccaggacatgttgcgaatttccagctcttgaatactattcaggtatattattttcaatgactttctgagatatttaatcggcgttagataattgaccagcttactacagcacaggtgtactaaacctctcctttggtaaacccactggaagaggtatctcaggcattcatcctggggtatttccttgaggcagatgtctatgaacacctttaagggctggtgctctcccatccttggacagtcctctgctgtctgcctcttactcgtggtctctgggaagcaggacagggcccaggctccaggccatctggcccagaaattctcgtcaacatcccgcaaatccagcacttgaagtttccacctcctgtgggtaaagtaagggagagactcagaatttagaaggactcatccctgacctttgctttcattgtcatcccataaatcagctgctcctgtcctcagtgctccctgttctctttgtcttttctcaatccctgttcccttttgattctgacttttgattccccacttctattccctttaccttccactgagtaaaggcaggtttctgttcccacagtggaccctgtatggtgagcagtcctttctctgaggatctggaaaatggccaaagcctccctgatcttcctcgccaacaccatcagaagactctgggccacacttgggctacttctctgcctgaccctgctgttctttccctggacacctgagccctatctaccagccctcctgggtcacctcacctggggcgatccttctgtgtaagcagcatatgaagcccttccagcaatgcttttaaggtctccaaatgaagcgtcttcatcagtgatcccagagggaggcaggtgaagggccaggcctgaaccatcaccgtcagagtctggaagtgtctcctgctgaaggcctccatgaagagtgggagatagagcaccctgggcagctcctccatggcagagatggacaaggcctggtctctcagcaggctctgccctgccagctccagtagtctgggtggggcctggatgctcatcctgatagatctgcaaggaaaatctctagaagacaaatccagggaaaatgtgtcactctcagggcaaagacaatcatctgcttctactggtaccaggaagaatgtcttccaaacaccaaggagggaggggtcatggagaccactgacttattaattttcttccattgctccactgaatcccagaaccaccggacagtgccactgaggatcctgaaagccaagctctacctctttgaagaaaaatttcttgtcacttaccaccctaaagcaatgagaatgagagtgtcctgtggccccagacagcctccattctcagtttacaccataaacatgctgggggaacactaaagggactccctaaaatcgatgccattattttttattttgaaaattttctaccagaaatggaccaggtgctgtggctcatgtctgtaatcccaacactgctggacaccaaggaggcagatcacttgaggtccgtaatttgagaacagcctggcctacgtaatgaaaccatgtctctactaaatataaaaaaattaagaatcatttgactccagaaggcagaagttgcaatgagccaagatcgcaccactgctctccagcctgggtgacagacttggactctgactcaaacaaaaacaaattgataaataagttaattaaaatgttagccaggtgtggtcatgcatgactgtaatcctagctactctggaggcagagaaaggagaatcacttgaagcccagaggcagagtttccagggagcccagctcagggccctgcactccagtctgggtgacacactcagagtacatcacagaaaaaaacaaaattcactggaactgtaaaagtggtgtgatggtattccacagcatttggaaggtatgtatagaaatgctaactgtagctgggcgcggtggctcactcatgtaatcccagcactttgggagtctgaggtgggcagatctcctgaggtcaggagtttgaggacagcatggccaacatggcaaaaccctgtgtctactaaaaatacaaaaattagctgggcatggtggtgagtgcctgtaatccaagctactcaggaggctgaagcaggagaatcgcatgtaactaggaggcagaaatttcagtgagccaaatcacaccatggcactgcagcctgggcaacaatagggaaactccatctgaaaaaaaaaattaaccagaaaccgtaaaagtgctaccatgctattctagagcactgtaactctaagatgaaggttcctatagacatcacttccacatactcacaattacccacttttggacagatcctaggggcaaagatgaatcccatgatctgagcaaaactgcactcttgagattgctgtgtgggatacctttaaggattttatgaaaatgaaagcatacttggagaatcacaataacaccaagtctatgaactgtaattgaagggcacaaaaacaaataacttcaaatgtcaagaaataaaaattcatgtcactgtaaatttttaatatatttttaaaaaacctgcttcgataagaattttaaaatgacaaaaaccaagcacaaatcacaatttgatggatgaagacaaaactacatttagaggaaaaatgaaagcctaaatctgttcatctcacgaaacagacagaaaaatattgtgtgccactttgggatgtgtgtcaccgtccctgactggctggctgctgatcagatgggcatgaccctaagcaggtggtgacttaccagcgctggactcacttcgcagagttctgggacctctcagggaaccaaccagtagcttcaggaatgagtgctgtgggtctcttctgggtaccctcaggagcttttatagacctttctaaccccacccttcccttctcaatcaccagcttccaatcagaaagtgatacctgattagatcttgcagtcacacccagttaatcctgattgagttttcagctttcttctgactaattgatcgaattagatacacatttatggaagtaaaagaataaataatagggtgaaagtccaaaactcattcattcatttattcctcaaatactgatgaagtttcgctaatacacgactttcatagtgatacagggaagggattaatctgttcctgatattagaccaaaaaaaaaaaaaccttaaggtgtccttattggaggatgtttggccacatcaaaattgtcaaaatgtttcagagctacaacagcctgaagaagatagtgatgtcattcccaagaaaacagaataaaaagctgtgtatatcgaatggtcacctgtgttttatgctatctaacatagcagatcatatgcacattcaggtagaagaaaggaaccactgagggtgtgatctatctcaagactaagtcaaggcttcactgaaggaaatcaggacaaagtgaccaagtgaggtggggactgagcggaatgagactaggtgttctaatgggaacctgcaaaggaaacaagacaatgtaaaacatggcggttatcttgtgggcatctagatgtcaggactcaaagtcctttgtcaagattgagtttatttattgattgtttgattttcagactgggcctacatctgtcactcaggctggagtacagtggcacgatttcagctcactgcagcctcaaccttctgggttcaagcaattctctcacttctgcctcccaagtagctgggaattacgggtgcactccaacaagccctactaatttttgtattttagtcgagatggggtttcaccatgttggcccggctggtctcaaactcctgacctcaagtgatctcctcacctcagcctcccaaaatgctgggataacatgcatcagccatctcacccaccctagattgagttcagaaattaaaaggagaatcatcaaaagagatagggcagacttaaaccataacattcactttgaaaacacagggggcaggtatagtcttggccctactagaaggtaaagggtgtttacccacaaaaatgatgggctcctctcagaaaaccagcttgcaaagatggaatctgagaatgtgagctggagcagaggccagagagaagattgtggctacacctgggaagggtggctgtcccaagctggaagccacccaggtagaaactgtgggctctacaggatgtgagagagaaatgaacgagggtccatatgtccgtcattgttctatcatctggaaacctttcctttagactctgggatcttcccacagtggaacatttcccagcaaccattggccccagtcattttccaggacccttcatccaaatcttaatctcacccactcccttcctactctaatttgataattcatgtttcctccttcttagagtcctttcctgtcactaatattgaacatagagattcttatcagagcatcaacattaggcctacaaagaaagctcagacccaggcacagtggctcatgcctgtaacatcagcactttgagaggccaaggtgggctgatcatgaggtcagtatatcaagaccattctagctaacacggtgaaactccgtctctactaaaaatacaaaaaattagccgagcatagtggcagatgtctgcactcccagctactcagaaggctgaggcaggagaatcgcttaaacccaggatgcgaagttgcagtgagctgagatggcgccactgccttccatcctgggtgacggcatgacactgtcaaaaaggaacaaaagaaaaagcaagcaagcaagcaagcaagcaagcaagcaagcaagaaagaaagaaagaaagaaagaaagaaagaaagaaagaaagaaagaaagaaagagggaaggaaggaaggaaggaaggaaggaaggaaggaaggaaggaaggaaggaaggaaggaaggaaaagaaagaaagacctcaggcctctaatcccagccctttgggaagccaagaaaggcagagtgctagagctcaggagtttgtgaggaatatgggcaatgtgatgaaaccctgtctctaatacaaatacaagatattagctggggggaggcagtgtgcacctgtaggccaagctgcccaagaagttgaggtgggaggatcacctgagcccagtgaggcttctacttcccatgccccactttgtaaacctgaggctgagggtgagctcagcaccaataatggttgttagaatctgtgttcactgagcatccacgaggcacaacagatggctggtaccgatcatctcggacctcagctcttcttcatggagaatctaaggcacgttgctattttccccatttctaacctgataaacctgagatttggccagagaaaaacctgcccatgttctggtagcaaatgattggcaaacccctcaggtgaggggctcagtggaacgcctaaggtgttcaataagctaaatattggaaagaactggctgactgactccctcttcctgcccatttcaaggggtgcagtagcacccccaggaccccagtgagaatcctgcacttggggtcttttctaccatgttctgtcgccaggtcttctcgaggtgctcatctgctgccaagctcagagcaagcttcaaaacccatctcaggtaacgacctgacctattctccaatcccagaatccacactgggattccaaagctcctatgaggcccttgcttaggctctctagaatattcctgagcctctgttttctcccccagcctgagctgatggggccggcgtcactttatgcatcccaaggccatcagcccatctctcctggacttcagaacatggccacaatgcagagagacccagcagtaattaagaaattttccccaatttatattgagtgatgttggtgaacatggcaaggcacaaagcaggaaactccacagctgctgctctggacctaaagaggcaccctggacttctgggtggtgacactgcctggcttgcagaggaagacctgacccctctagtcttccaaggctgccaggatgatgacagagccttcgacaggtcccagcacaggggccatcccttcccaggttcccctggtccagccttagagctgataaagatgcacctggaatgcagtaagtatttttttgtccaagccatgtctcttcttagccttaggtgaggcttttttcagctgggtgctatggaagaacccgaagcccagtgggcatcactgcaatggccacatggtaagtatgtgtgtgtgtgtgtgtgtgtgtgtgcggccacctagaaaggcacaactctacctgacagagatggttccatggaagagaaaagtaaaacatcccatgtccctggtaggacaacttcctctgggagtccagcaagaagacgtgggatctgcggacaagagatccctgggtaaaagccctcatttgaggataagagtaaagttgaaccttagaccctgagggatctatgcccttcccacagggctgcagcggagccagccttgactcccaggcacaatagcccagagagatcttcggagggaagtaaacctgctggggcctcagggctcagaaaaagccctggacctatctcccagtcatgcctctcccactcccaagtgcctctggccctggaactgtcagagacccctgtgtcttttccatgtgctcttcttctcctttcactcagccctgcctttgccaatgctccctgcatttgcctccatgtagggcccccaaccccaagctctggcagtggctggggagctaggggtttttgtgcccacctggagaaagcctcactcagcatgggcccgtgtgggttctgcaatcttttcctacacagggtcacctacaggtgttatagatgcatctcccctagaagagccaacggggatgggtgaggaatctgaaatcactcaggcaccccacatacaaatgagagccagggtccctgcaagcacaggccccggggtaggtcctggcccttgttgttgccttctgatcccagaggccttgggtttgtggtcacaggagccctacctacttcccatgcacccccagcccaagataaacaaattcctgcagcctccccggtccatgtacttgagatctccagatcgtgccacttcactccaacctggacgacagggcgagactcggggccaaaaaaaaaattagctgagcatggtggcaggcacttgtagtccgagctatttgggaggctgaggtaggagaatcgcttgaagccaggaggcagaggtttcagtgagctgagatagagccactacactgcagcctgggaaatagagcaagactccgtctcaggaaaaagagacaagaaaaagagaaaatcagaagcaccgagctgtgtttttaatgaggtcctgccccaggaagtcaggcatccaaatgaaatttcctcatttttatcaattcccttctgttctttacttctctttataaatctattacctacttgctttgttctgtggctgatcagtgggtgaatacccacaagatgcacacacagggccgggaacattctatgtgggcaaagagtgtgagtcactcaagtaaagccccttctcagggtccctccctgctaaccagatgctgagaccctgttcagtcctaacgggcagattgagaagaatccatttctgaccattagctgtgctgggacagagattcactgcacaaggcatggcccctgctttggaaggggacattcacatcattgattacctggagcttcagggcatcaccaacccatacctgtcatcatggtgggcagtgctccttccttaattaaactagttgtgtcttataaagatatcaaaattcccttttagcaaaatactacctataatatataaatatggccaggcgtgttggcttatacatataatagtagcactttgagaggctgaggcaggagaatcacaagatcaagagatcgagaccatcctagccaacatggtgaaaccctgtctctactaaaactacaaaaattagctggacatgttggcacatgcctgtactcccagctgaggcaggagaattgcttgaactcaggaggtgtaggttgctgtgagctgagattgtgccaccacacttcagcctcatgacagagtgagactccatctcaaaaacaaaacaaaacaaaacaatataaaaatactaataatcatatagacataaaacatggtttaaatatttctttaccacattcaaaaatcaagcatgctttttgggggccaggtcatattgatgagagatcccttcttaacacccttcccatatctagcagactaaagaagaagaatagtgtatgcagggaaaagaaagagagatcagacggttactgtgtctatgtagaaaaggaagacataagaaacatcattttgatctgtaccctgactttgccctgagatgctgttaatctgtaactttagccccaactttgagctcacagcagcatgtgttgtatagaatcaaggtttaaggggtccagggctgtgcaggatgtgctttgctagcaaaaggtttacaggcagtatgcttgataaaagtcatcaccattctccattctcaagtaaccaggggtgcaatacactgtgaaaaacttcagggacccctgccctggaaagccaggtattgtccaaggtttctcctcatgtgatagtctgaaatatgacctcattgaatgggaaagacctgaccttccacccagcttgacacccattaagggtctgtgctgaggaggattagtaaaggaggaaggcctcttgcagttaagaggaaggcttctgtctcctgcctgcccctgggaactgaatgcctcagtataaaacctgattatacatttgttctattctgagataggagaaaaactgcctgtggtgggaggcgagacatgttggcagcaatgctgctttgttactctttactccactgagatgtttgggtggagaaaagcataaatctggcctatgtgcacatccaggcatagtaccatcccttaaacttatttgtgacacagattcctctgctcacatgttttcttgctgattttctccccactatcaccctgctctcctgccacttttcccttactgagttagtgaaaatagtaatcaataaatactgagggaactcagagaccagtggcggtgtgggtcctccgcatgctgagcaccagtcccctgggcccatttttctttctctatactttgtctctgtgtcttatttcttttctcagtctcttgtcctgcctgatgagaaatacccacaggtgtggagtggctgacccccttcatatggcgcccaacatgggcctttctctagggtgaaggtacactaaaaacgtgagcattgaagacagtcaacgagagattcccaagtacttccatggtcagccatgcggtaagcttgtgcgctcagtggaactcagggtaacaatgggacaaactgaaggtaaatatgcctcttatctcagcttcattaaaattcttctaagaagatggggagttagagcttctacagaaaatctaattatgttatttcaaacaatagaacaattctgcccatggtttccaaaacagggaactttagatctaaaagattgggggaaaattggcaaagaattaaaacaagcaaatagggaaggtaaaatcatcccacttacagtatggaatgattggcccattattaaagcaactttagaaccgtttcaaatagaaaaagacagcctttcaatttctgatgcccctgaaagatgtgtagtagattgtgaagaagaggcagagacaaaatcccggaaattaatggaaagttcacattgtaaaaatgtagcagagtctgtaatggctcagtcaacgcaaaatgttgactacaatcagttacaggaggtagtatatcctgaatcatcaaaactggtggaaggaggtccagaattattggggctaccagagcctaaaccaccatggccatcaactcctcctccagtggttcagatgcctgtaacattacaacctcaaatgcaggttagacaagtgcaaaccccaagagaatatcaagtagaaaaggatagagtctctatcccagcaatgccaattcagatacagtatccacaatatcagctggtagaaaataagacccaaccaccggtagtttatcaatactggccgccagctgagcttcagtatgggctgtctccggaggttcaatacagacctcaagctgtgtgtcccgtgccacatagcacggcacctcaccagcaacccagtggtgtttaatcctacatcaccacctagtggacaaggtagtacactgcatgaaatcattgataaagccagaaaacagggagatcgtgaggcatggcagttccttgtaattttacaaccaataccagctgggaaaggggggcaagctggagcgtctgtccaaactgaggctagatatgaatctttcaccatgaaaatgttaaaagatatgaaggaaggagttaaacaatatggacccaactccccttatatgagaactttattagattccattgctcatggaaatagacttattccctatgattgggaaacgttggctaaatcttccctttcaccctctcagttcctacaatttaaaacctggtggattgatggagtacaagaacaggcatgaaaaaatcaggctatttatcccgctgttaatatagatgcagatcaattgctaggaacaggtccaaattggagcacaattggccaacaatcagtaatgcagaatgagggtattgaacatctaaaggctctttgcctcagggactgggaaaaaattcaggacccaggcacctgggtgccccacgcaccgcttgcccaggcatcgcttgcccaggcactgcttgcccttcttctaattcaattagacaaggctgtaaagagccatatccagacttcgtggcaaggttgcaagatgcctctgaaaaatctgtttcagatgataatgcccaaaaagttattgtagaaataatggcttttcaaaagtcaaatccagaatttcaaccagccataaagccattaaaaggaaaaggtccagcaggagttgatgtaattacagaatatgtgaaagcttgtgatgggattggaggagctatgcgtaaggcaatgctaatggctcaagcaatgaccggagtcactttaggaggatagttagagcatttggggggaaatgttataattgtggtcaaatcggtcatctaaaaaagaactgcccagtcttaaataaacagagtaaaaataaagagccacctggcctgtgtccaagacatggaaaaggaaaacattgggctaatcaatgtcgttctaaatatgataaaaatgggcaactattgtcagaaaaaggggtgaggggccagcctcagtcccaacaacaaactggggcattcccgattcagccgtttgttcttcagggttttcagggacagcaacccccacagcaaataccaccacttcagggaatcagccaattacaacaatacaacagctgtcccccgccacagcaggcagcacagcagtagatttatgttccactcaaaaggtttctttactccctggagagaccccgcaaaagattcctacaggggtatatggcccactgccaggagggacagtaggcctcattttagggagatgaagtctaaatttgaagggagtccaaattcatactggggtaattgattcagattataaaggggaaattcagttagtgatcagctccactgttccctggagtgccaatccaggtaatagaattgctcaattattgcttttgccttatattaaaattgggaaaacaaaacggaaaggacaggagggtttggaagtaccaactctgccagaaaagccactcaatgggctcgtcatgtctcagagaatagacctgtgtgtacagtcactattcagggaaagcagtttataggattattggataccgatgctgatgtttcccttatcgccttaaatcaatggccaaaaaattggcctaaacaaaagcctgttacaggacttgtcggtgtgggcagcgcctcaaaagtgtatcaaagcaccatgattttacattgtctaggacctgataatcaagaaagtacagttcaacctatgattacttttattccaaataattttttgggccgagacttgttacaacaatgacatgcagagattactatcccagcctccttatacagccccacgagtcaaaaaatcatgactaaaatgagatgtctccctggcaaaggactagggaaaaatggagatggcattaaaatcccaattgaggctgagggaaatcaagaaagaaaaagaataggatatcctttttaggagtggccactgtagagcctccaaaacccattccattaacttggaaaacagaaaaacctgtatgggtaaatcagtggctgctaccaaaacaaaagctggaggctttacacttacgggcaaaagaacaattagcaaagggacatattgagccttcattttcgccttgaattctcctgtgtttgtaactcagaaaaaatccggcagatggcacatgttgaccgacttaagagccgtcaatgctgtaattcaacctatgggggctctccaacctgggttgccctctctggccatgatccccaaagattggcctttaattataattgatctgaaggattgcttttttaccattcctctagcaaaacaggattttgaaaaatttgcttttactataccagccataaataataaagaaccagccaccaggtttcagtggaaagtgttgcccagggaatgcttaatagtccaactatttgtcagatttttgtagctgaagctcttcaaccagttagagacaagttttcagactacgtctttcattatgttgatgatcttttgtgtgctgcagaaacgagagacacattaattgactgttacacatttctgcagacagaggttgcaaacgcaggactgacaatagcatctgataagattcaaacctctactcctgtccattacttgggaatgcaggtagaggaaagaaaatttaaacaacaaaaaatagaaataagaaaagacacattaaaaacattaaacgactttcataaattgctaggagatattaattggatttggccaactctaggcatccttacttatgccatgtcaaatttgttctctatcttgagtggggatccagaattgaatagtaaaagaacattaactccagaagcaactaaagaaattgaattaattgaagaaaaaattcggtcagcacaagtaaatagaatagatcacttcgccccactccaacttttgatttttgctactgcacattctcaacaggcattattgttcaaaatacagatcttgtggagtgatctttccttcctcacagtacgattaagacttttacattgtacttggatcaaatggctacattaattggtcaggcaagattacaaataataaaattgtgtggaagtgacccagataaaatcattgttcctttaaacaaggaagagtttagacaaggctttatcaattctgctgcatggcagattggtcttgctgattttgtgagaattactgataagcattacccaaaaacaaaaatcttccagtttttaaaattgactacttgaattttacctaaaattaccagacataaacctttagaaaatgctctgatggtgtttactgatggttccagcaatggaaaagtggttcacaccaggccgaaagaacgagtcattgaaaatcagattctgcatatgtagcacagctacaaagtatgttgagacagccctaatcaaatatagtatggatgatcagttaaacaagccctttaatttgttacaacaaattgtaagaaaaagaaatttcccattttatattactcatatctgagcacgtactaatttaccaaggcctttaactaaagcaaatgaacaagctgacttgctagcatcatctgcattcatagaagcacaagaacttcatgctttgactcatgtaaatgcaacaggactaaaaaataaatttgatatcacatggaaagaggcaaaaaatattgtataacattgcacccagtgtcaagtcctacacctgcccactcaggcgcactgggacaaagtttttctgtgagttcattataagaatgatgccagcagagagaaatttgggaaccaacagctacaatgtctcacatgtaagagggcacctcctcattgttacgggactagggaaaccgtggattgtctttattatttcagatgagatggaagctttccctgcacttggattatgtcctaagtaaggaccttttctctagagaatggaaaagttttcatggaggtcttagggcccttgtaagcttactgctctaaaagataaatggaatctattagagtgtcccttggtaagagaacataactgcacacctactgcatattgaatgagagtggaatttctagggaatggtaaggttaacaggtcctggtgttatccctgcgagaactatgatgggactccagtgaacccctgtggcgttacaacccaggcgtgttgctgaatttttcaagtaaaggccaacaagtattggctctcctcatcaacaggaatcctaaggaaggcagaggagaaatctctcactgggtaccatttagagtctgtagtcaccttacataacaagatatttcatgtgaagccacagtatatctcactattacaattttctttattgcatgtaagtcttgcacaaatcattaaccttgtcagttaggttttatatctggcaggatggaagggttacatggattgggacaaggaattgtaagtccttgttctattaaatcttctccaattggggaaagtctttggattacctctgactttaaggggtattggggcaacatggccaattatttagaatagccaacaaatgaatagtgacactccataaacatttacataatagcagatttttggaagtaccacttaatatactcctgctttcatcactaaattacaccagacggtctaactaaattacagcagatggcacatgagtcccgtggtttggaaatttttatctcatgatcactagagatgaattcagtcctgcactgcccaccccgttctttgctggttgttgaggtcctgctgtttacaggaatcatgattaagcggtggcggcgtgtagaagctgagtcccattgcatgccctgggtccctactgcctccctgttatgaggaataggaggtgagattgaaggatgaagaatgctgagacttttattaggaggaaaaaagaaagacaggatgcatgtattaagcttttactgtatgaaaggccccattccaagtcataaccatgtaccatctcactgtgtcctaagagggtcccacaggctggtgggcataatccttctcattctacaggaaaattgaggctctttcctcagcttcctgcccaacagcaccagcccctgtgtcctcagcagggtcccacactcgggagccttttgtgtagggtccctcagcacagcgaaggtcactcatcacccacaggcacttgatcattatccaccctctgatgacgtgtgatacccaaacacactgcactagtcttccttgagagggagagaaggcaagtgttatgggaaaatctcatcaatatgacctagctccccaaaaggataaaatgtttgttaaatgtgggctagaaatgtttaaaatgtactatatgcctgcataatttaagcattttcccaaaaagggaatttggatgtctttattggccacaactattttaatattgcaagggtcactaccctccatgagaacaagcatgggttggtgatgccctgaggctcctgctcatacagtgtggagctccccttccagggcagaggccacaccttgtgcagtgaaatcctttcccagcacaggtaatggtcagcaactgagcgttctgaatccacccatcaggagtaaacagggtctaagcatctggacaaaagtgagggccctgcgaagaaggggctgaacttcagtgactgaccctcactgcccacctagaatggtccaggccccgtaagtgcatctcacgtgtattaacccactaaatagacacatgcccagagagaaattaaaaaaaaaggaattgagcaaaacgatcacattccactttgatgcctttatttccttgggctgaacctcattaattttagagaacttagtgccttttgtcccccatgagtaacttgagattccttaggttaaaattgttaagccaggtgaagcaatcatggaggacaccagacagtttccactcagcttccctttatttctgactgtttctttacaaccatccgtgcaggggtaactgtctcatgtgtctctcctacctgattctcattctagcaattcagattcccatttctgattctctgggacacaggtctctaaagctcctattgactccaactcaacttttcccccagtccctcccttcctgcatcccctttcctttcccgttcacattgagcaggcatatgaaacgatgggtctgtgctccctttgacatacactcatggcctaggattcagttgccaaatgaccagaagaaagctttaaataaatccaccctgacagcaggcattcaacagacagtgactgggctccaggtcataggaggccctgatgccacagcgagggcaggggacagtgctgaacacaataatcttgggctgccttaagtccctcagtgtcttcatcagctcagccccaagttgagaaaatcttccccagcagagagcaccctgggcatcataactctccagaggggcaggatacagctccaggcttagcttgctcagcccgacggtgtggcgcagcaggttctccagggcggccatggagatgaggttcccacagaagctgaaggtgctgagctgggagcagcggctcagggcaggcaggatggcgctgagttgggaatccacgatcccacagtcctctaagtccagggtctgcagggtggcctcagcttgctccagcagaactgagaggggctcaggactgaaatgggtcagtgtgatgcccctcaggtctagctcttttagctgacggatgctcgggcaccaagagagatgcttcaggtccgactctgacagcaggcattcggtcattacgactgtctccaagggggcctggagacacctgggagagaacaagaaggagttagaggagagtggtggggaagacctcaaggtgagagatgacacttttcacaacccaaggctgttctgcttatctgaggataatcagcacctggggtgtgggaatggagactctgctcattcagggcagacccaatcgaggctcagtccttcaccatcactcgggtgactgggtcaagtccatgaactctaatgctccctttcctcatgtgtcaggtagaaaaccacatctctgggccacaggagcccgatggagacacaggcataaatgacaaacccaggcaagatcctgcaacctcagctggggtggccaggctgcaggagaccctgacatgcccgtatcatcagcaaaccatctatcactttcaccattcttcactcctgctccctcaccctctattccatcatgttttggagctcaaaacattttactgacagagggagacacaggattttacctgttcactaggcaggtgaggacagaccttatattttaaaatggaggggtgtgatggacattctcttctttagtgccctcttcaactccccatttcccatcgtcttaacttagacacacatcctcgggaggaattcacgaatgcaccctcactagatctaaaccctgcagtaccttcctagcatggcagcctctctatagcatctagcccaggagatcccgctggcttattgggatggatgtgtgacacctatttcaggacagagctgccaacaggacaatgcatggacattctagtgtccccttcgctgttacctcctcacaagctggctcacagtagataccccctggtgtttacagtaataaagaaagtctttgctgcggtctgcagagaaagctcaccatacttcctcacctgagcagctggtccaggtggccttcgaggaaagagacagagtgcatgtaaagcttctggaagtagtccagcttgaggaactgagaggtgaactggatgacaaactgctccttcctgtctaggggaatgcaggcagagacatggatgttgaagagaacaagtttgcggagattcctcatctggcccaggtaaggggcgaaccttataagaatggacagctcccacgggcagcacacttccacctcctggatacagtctagctccaccgtgttcaggacctctatgatcctgtggatggctattccaaaaatctgcagctccttgcaacacacgtgcagtaagccttttctctgcttgccccactctaagaagtgggtgaggcattcatccagcatcccattcttgaagcaaaggtctaggatcaccatcaagggctgctgcccacccggccttggacagttccctgctgttcgtctcttactcagggcctctggggagagtgcagaagctccagaccatatgccccagaagttctcatccacattccgcaagtccaacacttgaagtttccaccgcctgtgggtaaaagagaagagaggctccaaatttaggaaggatttgagcttttatccacatcccggacatcagcgactctcctccctgctgcttctcccactctctgtcttttctccatccctctttctccttgaaacctgcctggtccccactgctagtgtcttcaattgccactggcaggaggcaggttcctgatccttcagtggaccctgcatggtgagcagtcctttcccagaggagctggacaatggccaaggcctctctgagcttcctccccagccccatcagaagtctctgggccacccttgggcctcccactccttctgacccagctaaccctaccctggatgcctgagccctccccacctggttagctgggtcacctcacctggggcgaaccttctgggcaagcagtgcatcaagcccctccagcacagctcgaaagatctctagattacatgacttcatcagggaccctagaggaaggcaggtgaagggccaggcctgcaccatagttgtcagggtctcgcagcatctcctggtaaaggcctccatgaacagtgggggaaagagctccctgggcagctcctccagggtggggatggccaaggcccggtctctcagcagactctgctcagccagctccaggagtctaggtggggcctggaggctcatcctgatgaatctagagaaaaaaacatcattcttacggcaaatcacatcacttcatcatctcctagtgccaatgtcattgctctggtagaggtggaaaggtaattagttcaccccaattccactctgcactttctggacacaaatctgtaattctgcccttgctggtaccataaagaatgtcttccaaacaatgaggagagggcaaggtaaccactggcccattcattttcaaccattgctgcactaaatctcagtaacactgggaagcgttgctgaggatcctgaaagctaagctccacctttttgagaaaatatttcttgtcacttaccaccctaaaacaatgggaacgagaatgtcctgtggccccacacagcctacattctcagttcccacaattgacatgcttgcagaagactaaagggactccttggaatcagcgccattattttttattttgaaaaattgtaacaagaaattgtaaaaacagcatgacagtgttctagagcctgtgaaagttagggataaaaacactaactctcagatgaaggttccaatgttgatctcttacacagactcacaatgacccactttgggatggaatctaggggaaaaaaatgggtcccatgttcagaacaaagactccactcttgagaatggcctatggaatatctttaaggtattagtaaaaactaaggcctaacatgtaaaatcacgatgccaccaagtctatgaactataatttaagggcacaaaaactaattatttcaaatgtcacgaaataaaaattcaaccagttgtaactttttaatatctcttgttaaaaaaaaaactgcttcaataagaattttgaaatgacaaaaaccaagcacaaatccaattttgggggatgaagacaaaactacatttagaggaaaaatcaaagcctaaatttgttcttctgaaaacagacaagaaaattctctctgccaccttgggctgcatgtcaccatccctgactggctggctggctgcagatcagatgggcatgaccctaaggaggtggtgacttaccagatctggactcagtttgcagggtgctgcaacctctcagagaaccgagcagtagctccaggtgtcagcgccttggattctctcctgtgcaccttcgggagcttttatggacctttctaaccacaccctccccatctcaacaaccaacttccaatcagaaaatgatgtctgattagattctgaagttccacccagttaatcctgattgagtttgcgactttcttctgattaattgattggatcagatatacgtttatgaaagtgaaagatataaataatagggtgaaagtccacaactcattcattcctttattccacaaacactgatggagtttgactgacatgagagcttcatagtgatgcaggaaagggttgaatctgtttctggcatttgacagaaaaaacaaaacctgaaggtatctttgctgggggatctttggccacataaacattatcaaaatgtctcagagctaaaacagctctaagaagacagtaatttcatccctaagaaagcagaataaatatctctgcatatccagtggtcagctgggatttacgctttctaacatggtagatcatatgcccattcaggtggcagaggggaaccactgagggtgtgattgatctcaagacgaaggttcaggcttctccggaggaaattaaaccaaaattacaaagtgaggtgggggctgggcaggatgggaccgggtgttctaatggaaccctgggaaggaaccaagacagcataaaacatggtgggtattttgtgggagaggagacggaaggattgaaagactccatttagattgaattcaaaaactgaaaaggaaataattacaaaagagacactgtagactcaaaacacaatattgcctttgagggcatgggacgagatacagtcttggtcacctctagaaggtaaagcgtgtttactcacaaaaatgatgggcacccctcagaaaaccagcttcgggagattgaatctgagaatgtgagctgggacagaggccagacagaagcacagtggccaggcctaagaagggagactcccccaagctggaagccacagagggtggaagctgtgggctctgcaggacatgggggagaaatgcacaagggtccgtgtctccctgtcatggcgctatggtctggaaatctttcctttagactcagggatcttcccacagtggaacatttcccagcaaccctcaggtccaggcatttcccagggcccttcatcctcatcaatcccatcggcccctttccaggtatattttgatcattaatgttttctcatccttaaagtcctctcttgtccctaatattgaacatagagattctgatcagaacaacaacattaggcatatgaagaaaactcaggccaggcacggtggtcactggagtccaggagtttgagacctgcctgggtaacatggtgaaacactgtctctgtaaaaaaaaaaaaaatctacctagacatggtcatgtgcacctgtattcccagtgaccccataagcagagatgggaggattccctgagcccaggaggtcagtactgcagtgagccatgatcgtgctgctgcactccagccttgagaccttgtctcaacagagggaaacccaacagagtgagaccttgtccccaggaaaaaaaaaagagaaacaaagaaaataagagaactcagtttttctctctttaagcacagtgcacacatcctagtacatttccccacaaaacccagagctccgtatcacgctgcaagctttgtaagcttaggggtggctcccatcctgggcagaatcacaccgtgattcttctgatgttttgggatacaaagtagcaagagcctcccccaccccagagaatcctccaggcctttctctcccattttttatgacacccaaacagctctgagatgccactggcccaccaaagctggagttcttcgaaggatgttctccatctcggaatctttctggaaatgttttctctccacatttctgacctcactatcaatgccttatgtgtgcaatcaagttaaactgaaatgtactcagtgaggcttctacttcccagccccttgctttgtgaacctgaggctgagggtgagctcagcaccaaggatggtcgtgagcatctctgttgactgagcatccacgaggcacagcaggggctgagtacttttcacccagctctccctcacagagacctcacctctccctcccagtgaacctaaggtatgttgctctttcccgcatttttaacctggtgaccctgagactcggccagggagaggaatctgcccatgttcaggccgcaaatgattggcagatccctcaggtgagggctcagaggatcccccaaggggttcaataacctaaatgttacaaagaactgattgacagccttttccttcctacccaattcagggagtcttgcaccacccccaggaccctggtgagaatcctgcacttggggccttttctaccatatcctgtcgcctgttcttctcaaggtgcttgtctgctgcccaggtcagagcagccttcgcagttcatctcaaggaaccacctgaccccttctccactcatggaatccccactgggatctcaaagtttcccccaggcccttgctcagggtctctagaatatttctgagcttctgttttcctctccaggtgcagccttttcagctctaaggctgggccaggggcgcctggaaagggtcagggcagcccacactctgcatctcaggaatatcagcccatctctcctggagcttggaacatggccatgatgcttgaagaccctttccctgtcatcagcagtaatgaaggaattctccccaagttctactgaggtattctggtgaacatagcaaggcacaaagcagggagctcctcagctgctgctgtggacctaaagaggcacctgggactgttgcagggtgactgaccttgcctggcttgcagaggaagacctgactcctctggttctcctagggattccaggctgatgggaatccctgggagaggttcccgggcaggggccttccctttccaagctcccctggcccagcctgaaagctgacaagctgcacctgggatgcgataagtctgttttctgtctgagtcagatcacttcttgccctaccaggggctgctccttttttcctctaataaggatctgaggagagggtcaccctcagagcagagagttgatgctagggaggtgctcgtagcaccctgggagtaggggacgttcttgggacttgttgcaggctggacagagccagaggaactaagggaaagagcaaagccaagtcagggagtgagtggccagaggagcttctgaggctggaataagggaggaggagggaagtggcagcagggcaggggccaggttctctggctctcacagagccatgtccctgaacggctgcagacttgtgtctgagaccctggggggactggggcctggatatgacactgtgagttcccaaggccgtttgtgtgccctggtctgcatgaggttccaggggctgccccaccgtgccccaggagcacagagtcaggccagtgaggagtcctggggagggagagtaggtggtgagtgtccatcctgaatgcaaagacaagggacaggtcagagggaagcaggcttggcgtgtggccaggggaagggatgctctctgaaaattgtgcatttctgtctcctcactcatcacagcctcgtggaacagggaggattaggcttttcaggagggaatgaggcagaacggtgtcgggcccagagtccctgtcatccaagagaccccacatctcctcctgcaagccagaagaatgtcttggggcatggaagtcaaaccagggcccatcagcctgcccagcacctccctgtggaaggagaaggtgcacattgattcttggtcagaaaaatcctgccacgtccagtgctgaggagcatcacgaggccctggaggggagactctgggtcaagttttcaaggaatattctggcacattggaccccccaacacgcagtgccttcctctccctcctttcccctcaaaaacctttactgagtgcctgggatgtgccatctactattctcggtgctactgacaaagacaaacaaaaagcaaagaatctggaaaatgaacccaacacagtacacgtggctcagcactgcagcccaggtcagaaaaaaatgactgtgcaagatgaaatgtgcagagtgatcttaataatccatggggaaaatgacagatgtcctatgtcctttaatcactttttgttgaagatgaagaactctcactgctgaatataaacagacaggtaagtggaaaacattagtaaaactaatgtttattaagtgcaatgtgattcagaacactgagaatccaagggctttatttctttgaaacaacttgccagggcagtttgaacagtgatcatcttcctcctgggcacagcactgcagaggcagctggtgtcttctcccccttggagaattctcctaatttctttaagttggggtgggccagggagtctggaggagtttgttcagcttgggttgggggtgcaggaggagttggtggagtgcctgtggccacacccctggcctctgggatcaggaggagacagtggggccaggacccaacccctggtctgtgcttcaggtgatccctctctctcctttggatgtggggtttgggagcaggttaggggtcctcgcccatcaccactggctcttctagggaagatacatctgtgggacctgcaggtggccctgtgcaggaagggatcccagaacccacacaggcccatttagagcaaggtttcctcctgcagactgcaggaaccctgagcctcttcacagctcccagagcctggggttggggacccacttggaggcaaatgcatggagctttggcaaaggcagggctgcaggaaggaaaggatgcaggggtccctggaagctccagggccagaggaacttgacagtaggggaggcatcactgggagaaaggtccagggctccttccatgccctgaggtcccagcaggttttcctctctcccaactcctccctgggctcttgcatctgggagtcagggctggctcagcaggagccctgtgggggagtgggaaggacataaggcctcaggatcttgagttcaacttttcacatcaacctcaaatgaaggattttaccaagtgccctcctgtccacagatcccaagtcttcttgctgaactcatgggagatttgtcctaccagggatatgggggttttacttttctctgctatggggccagctcatcctggagagctgtgactttctaggtggtcacacacatacacacatacataccatgaggtcattgcagcaatgcccactgggcctggggttctcccatagctcccagctgataaaagcctcctttctactcatttgggacttggggtcatcggcctccttctgtctcatttcacccaacatttgtcctagtccctgccaaagtgctgtttattttaatgctttgtaataaaattccacagtcagaggcttgtgtgagagctggggtccagagcatcaggtctaatgtttactatgtttattttcactgcacaatctgttattccaaagaaattttacaaataaaatagaaacacacgatctgccagcattactctgataccaaaaccagacaaggatacaaccaaaaaagaaaactacaggccagtatccctgatcaacacacatgcaaacatcctctaaaaatactagctatccaaaatcagtaacacattaaaaaggtcatttacactcatcaagtaagactcatctcagtggtgcaaggatggttcaacatatgacaataaataaatgtgatttatcatgttagcagaaccaagaaccgaaatgatatgatcatttcaatagatgctgaaaaatcattcaataaaatccaacaactctttatgataaaagctttccacaaagtgggtatagaggaacacaattcaaaataatgaagggcatttttgacagacccacagccaacatcatactgaatgaggaaaaattgaaagcctttcttctgaaatctggaacaagactgggatgctcactttcaccactttttttcaacataataccggaagtcctgggcagagcaataaggcaagagaaagaaataaaggacatcctagttggaaaggaagaagtcaaattaaccttgtacacagatgacatgatcttatatttataaaaacctaaagactttaacaaaaagtctgtttcagtaaaattgtaggatacaaagtcaacgtacaaaaggcaatagcactcatatatgccaacagcaaacaatcttaaagattgttaaagaaatcaagaaatcccttccattatcaatagctacaaagaatataaaacacctaggaatttatttaaccacagatgtgaaagattaatacaaggaaaactataaaacattggtgaaagaaattgaagaggatacaagaaaaaatggaagggtattttatgctcatagataggaagaattaatatcgttaaaatgaaaatgctacccaaagcaatttacaaattcagtgcaattcctatcaaaataccaatgacgttcttcacagaaatagcaaaaataattcccaaatttttagatggaacctcagcagaccctgaatagccaaagccatcctgaccaaaaagaacaaagctaaaggcatcacactacctgacttccaaatatactacaaacctatagtaacccaatcagcatggtactggcataaaaatagacatataaaccaatgaaacagaatagcagattcagatataaattcacacatttgcagccaactcatttttgacaaaggcagtaagcccgtatacaactgggaaatgacagtctcatctatcaatggtgctggaaaatctggatacccatgtgcagaatggaagtcgatccctatctttcactatatacaaaaatcaagtcaaagtggtttaaagtcttgggccggtgcagtggcttatgcctataatcccatcactttgtgaggctgaggtgggcagatcatgcggtcagaagattgagaccatcctggccaacatggtgaaacccagtctctactaaaaatacaaaaattagctgggcgtggcagcatgtgcctgtagtcccagctactcaagaggctgaggcaggagaactgcttgaaccccggaggtggaggttgcagtgagccaagatcacaccactgcactctccagcctggcaacaaggcaagactccatctcaaaaaagaaaaaaaaaaaaaaaagcaaagtggtttaaagtcttaaatctaagacctgaaattatgaagccagaagaaaaacttgaaaaaatactccaaaacattgactggggcaaacatattttgtgtaaggctaagacctgaaattatgaaaccaggagaaaaacttgaaaaaatgctccagaacattggctgtggcggagatattttctgcaagccctcaaaagcgtaggcaaccaaaggaaaaatagacaaatgggattacatcaagctaaaaagcttcttctgcacagcaacagaaacaatcaaagtgaagagataacccacagaatgggagaacatttttacaagctatccatctgacaaggcattaataactagaatatgcaaggagctcaaacaagtcaatgggaaaaaatcaaatgatccaatccaatttttaaatgagcaaaagttctcaaaagatggcataaaaatggccaacagacatatgaaaaaatgctcaatatcactaatcatcagagaaatgcaaatcagaaccacaatgacatgtcatcttatcccagttagaatggcttttatcaaaatgacaagaaataacagatgcccatgagtatatggagaaaggagaactcttgtaccttgttgatggaaatgtaaattaattagtatagcccatatagaaactgcattgaggttctccaaaatctaaaactaccatatgatccagcaaccccactactgggcatatatccaaaagaaagaaaatcagtatatccaagagatgcctgcacgaccatgtttattgcagtactatttacaatatccaaaacatgaaatcaacttaagtgtccatgaatgtattaatggataaagaaaatgtggtacatatagctatgcaatgaaatattcagccattaaaaatgaaatgttgtcattttcagcaatatggatggaactggaggtcattatgttcaaataatcatacgtaaaataatgtcattatgtaaaataatccaagcacagaaagacaaataacgcatgttctcatgcgttatacatgggagcttaaaaagtggatatcatgatgatagagaataaggtggtggttaccagagaggggaaagagttgggtgagggggatgggtgaatagaggttggctgatggatacaaatatacacttaaaagaaataagaactggagtttgatagatcagtgtggatactatagttaacattaggtgtacatttctttttttttttttttttttttttttttgagacagagtctcactgtgtcacccaggctggagtgcagtagcgtgatctcggctcactgcaagcaccacctcctgggttcatgccattctcctgcctcagcctcccgagtagctgggactagaggcgcccgccaccacgctcagctaatttttttttttttttgtatttttagtagagacggggtttcaccatgttagccaggatggtctcgatctagacctcatgatccacccatctcggcctcccaaagtgctgggattacaggcgtgagccaccgcgcctgacctggtgtacgtttcaaaatagctagaagagaataattggaatgttcctagtgtaaagaaaagaaatatttaaggtggtggatatcccaattattctgatttgattatataaatgtatcatatggtcacatgtatcatatggtcacatgtatcatatggtcacatgtatctcaaaagtatgtacaactattacgtatcaacaaaaataaattaattaaaaaacaaaaaagaattagactagctcagcctagtggcgtggttgccaaagttcagtccccaggccagcagcaccagcttcccatgggaactcattaaaattccagcttgtcagccccacctgagaccttctaattccgaagctcaggggatgggcctagcatctgtgtttcaacaagccccccaggtgaagctaatgtggctcactggttgggtttgagaaccactggttgggttgaagcaggactgtaggaaatagactctcacctgcttgattttgctttgggaacagctggggagagcctccgccctggtcaactggagcctctgctattggttgtgcaccccatcttgtgtaactggttgcatcgtggaccttgaaaacaatactcctgctcaagagtttctagtcactctcacattcacagtgactttttaatacgtgtggatggaaggtgaagcagtgctgaccaggtgagggcagtcacagtctgtggccctcatcggattccccctgcccctgtcccttgaccatcccagctgcctggaaaggaccagattcattgggggtggggggaggggtcagtgactgagcaggtgtcaagtgcacagaactcttctctcctcgtccctcctagaatgtccatatcctcattctggaatctgtgactatgttagttaagattcagaaggaattttataggtgtgattaaattaaggatcttgagaaaggggttatcttggcttatccagggagcgcagtgtggtcacaaggatccttgtaaggggagacagagaggaaggaaggctacactgctggctctcgacaagctgatggcgccataagatgggagcggtgatgtgccctagaagctggaaaagacaagggaacaatttgccccagaccctctagaagcaacgcagccctggggaccactgtagactcttacccataagagaactgcaagaggataaatgtgtgttgttttaaagcactgagcttgtgatattctgaataaatgtgcatttattcacatttataataagaactgtcaaataaacatgtgttgctttagggcactgagtttgtggtattttgttccagcagcaataggagaccaatgcatggtctttctggacttttaaggaatttgctcagcttcttcccaagtcagagacttcaaacgtgctgcccccatggcccaagccaccctctcttccctcccaacctgtcccttcagctgggtaatctccctcagctttctggccttgacctacctgattctccctggccctacctaggcaggccaggtcttcattcatcatccgtcaacccctgcccgttgctctcatgacatcctttactttcgcacaagcttgtccaaccctccgcctgcaggctgaatgtggcccaacataaatttgtaaacttacttaaaacattatggggtttttttacgcgattttttttttagctcatcagctaccgttagtgtaagtttgttgttgttgttgttgtttttgggatggagtctcactctgtcaccaaggctggagtgcagtggtaccatctggtctcactgaaacctccgcctcctgggttcaagcgattctgctgcctcagcctctggagtagctgggattccaggcatgaaccactatgccagctcatttttgtatttttaatagagacagtgtttcactgtgctagacaggctagtcacaaactcctgacctcaggtgatc

SEQ ID NO: 2104 - DNA, 1068 bp, Homo sapiens
cccagcctctgcccggggcaccccggccttccaggcacgccgggccaccatggcagccagggcttgccgggccgcgatggccgcgacggccgcgacggcgcgcccggggctccgggagagaaaggcgagggcgggaggccgggactgccgggacctcgaggggaccccgggccgcgaggagaggcgggacccgcggggcccaccgggcctgccggggagtgctcggtgcctccgcgatccgccttcagcgccaagcgctccgagagccgggtgcctccgccgtctgacgcacccttgcccttcgaccgcgtgctggtgaacgagcagggacattacgacgccgtcaccggcaagttcacctgccaggtgcctggggtctactacttcgccgtccatgccaccgtctaccgggccagcctgcagtttgatctggtgaagaatggcgaatccattgcctctttcttccagtttttcggggggtggcccaagccagcctcgctctcggggggggccatggtgaggctggagcctgaggaccaagtgtgggtgcaggtgggtgtgggtgactacattggcatctatgccagcatcaagacagacagcaccttctccggatttctggtgtactccgactggcacagctccccagtctttgcttagtgcccactgcaaagtgagctcatgctctcactcctagaaggagggtgtgaggctgacaaccaggtcatccaggagggctggcccccctggaatattgtgaatgactagggaggtggggtagagcactctccgtcctgctgctggcaaggaatgggaacagtggctgtctgcgatcaggtctggcagcatggggcagtggctggatttctgcccaagaccagaggagtgtgctgtgctggcaagtgtaagtcccccagttgctctggtccaggagcccacggtggggtgctctcttcctggtcctctgcttctctggatcctccccaccccctcctgctcctggggccggcccttttctcagagatcactcaataaacctaagaaccctcaaaaaaaaaaaaaaaaagg

SEQ ID NO: 2105 - protein, 219 aa, Homo sapiens
PSLCPGHPGLPGTPGHHGSQGLPGRDGRDGRDGAPGAPGEKGEGGRPGLPGPRGDPGPRGEAGPAGPTGPAGECSVPPRSAFSAKRSESRVPPPSDAPLPFDRVLVNEQGHYDAVTGKFTCQVPGVYYFAVHATVYRASLQFDLVKNGESIASFFQFFGGWPKPASLSGGAMVRLEPEDQVWVQVGVGDYIGIYASIKTDSTFSGFLVYSDWHSSPVFA

SEQ ID NO: 2106 - DNA, 278 bp, Homo sapiens
tacaaagttagtttgtgatcaacgattcactacaattgaagtgttactttgtcagaatatttattcctttgtgtgacatgctagattccctggatgtagctgatcatttttattttgtaaatattacctaactttacataaactatatcataataaactatttttgcatcaaaaaaaaaaaaaaaaaaaaaaaaaaaaaaaaaaaaaaaaaaaaaaaaaaaaaaaaaaaaaaaaaaaaaaaaaaaaaaaaaaaaaaaaaaaaaaaaaaaaaaaaaaaa

SEQ ID NO: 2107 - DNA, 468 bp, Homo sapiens
  misc_feature (467)..(467): n is a, c, g, or t
ctatgtaataaagaaaaaaaagaaattcaatccaatgacacacaccacatgtatttgggcagagtcagattctctcagctattttgagtctgtggaagaaacaaaaaaaagcttcctcctgaggatgggttattgtcatcaagaagccacctgcatagccgtatccattacctcatggtaattcccggtgctttcccctcatatcccctagaagcaaatatctgttctgaggttttttgggacttctggctgcaataggagcaagggacccaggcagggcagagcaataccttccgaagcttccatattccctgggggccagcacatgcaaggtttatatggtcagtagctcacgtgaagtcatctggaatctttcttaaatctgctctcttaaaatctcttatggcaaaaaaaaaaaaaaaaaaactcgtgccgctcgtgccgaattcttggcctcgagggccaant

SEQ ID NO: 2108 - DNA, 5189 bp, Homo sapiens
gggaaagtgaagaaaacagaaaaggagagggacagaggccagaggacttctcatactggacagaaaccgatcaggcatggaactccccttcgtcactcacctgttcttgcccctggtgttcctgacaggtctctgctccccctttaacctggatgaacatcacccacgcctattcccagggccaccagaagctgaatttggatacagtgtcttacaacatgttgggggtggacagcgatggatgctggtgggcgccccctgggatgggccttcaggcgaccggaggggggacgtttatcgctgccctgtagggggggcccacaatgccccatgtgccaagggccacttaggtgactaccaactgggaaattcatctcatcctgctgtgaatatgcacctggggatgtctctgttagagacagatggtgatgggggattcatggcctgtgcccctctctggtctcgtgcttgtggcagctctgtcttcagttctgggatatgtgcccgtgtggatgcttcattccagcctcagggaagcctggcacccactgcccaacgctgcccaacatacatggatgttgtcattgtcttggatggctccaacagcatctacccctggtctgaagttcagaccttcctacgaagactggtagggaaactgtttattgacccagaacagatacaggtgggactggtacagtatggggagagccctgtacatgagtggtccctgggagatttccgaacgaaggaagaagtggtgagagcagcaaagaacctcagtcggcgggagggacgagaaacaaagactgcccaagcaataatggtggcctgcacagaagggttcagtcagtcccatgggggccgacccgaggctgccaggctactggtggttgtcactgatggagagtcccatgatggagaggagcttcctgcagcactaaaggcctgtgaggctggaagagtgacacgctatgggattgcagtccttggtcactacctccggcggcagcgagatcccagctctttcctgagagaaattagaactattgccagtgatccagatgagcgattcttcttcaatgtcacagatgaagctgctctgactgacattgtggatgcactaggagatcggatttttggccttgaagggtcccatgcagaaaacgaaagctcctttgggctggaaatgtctcagattggtttctccactcatcggctaaaggatgggattctttttgggatggtgggggcctatgactggggaggctctgtgctatggcttgaaggaggccaccgccttttccccccacgaatggcactggaagacgagttcccccctgcactgcagaaccatgcagcctacctgggttactctgtttcttccatgcttttgcggggtggacgccgcctgtttctctctggggctcctcgatttagacatcgaggaaaagtcatcgccttccagcttaagaaagatggggctgtgagggttgcccagagcctccagggggagcagattggttcatactttggcagtgagctctgcccattggatacagatagggatggaacaactgatgtcttacttgtggctgcccccatgttcctgggaccccagaacaaggaaacaggacgtgtttatgtgtatctggtaggccagcagtccttgctgaccctccaaggaacacttcagccagaacccccccaggatgctcggtttggctttgccatgggagctcttcctgatctgaaccaagatggttttgctgatgtggctgtgggggcgcctctggaagatgggcaccagggagcactgtacctgtaccatggaacccagagtggagtcaggccccatcctgcccagaggattgctgctgcctccatgccacatgccctcagctactttggccgaagtgtggatggtcggctagatctggatggagatgatctggtcgatgtggctgtgggtgcccagggggcagccatcctgctcagctcccggcccattgtccatctgaccccatcactggaggtgaccccacaggccatcagtgtggttcagagggactgtaggcggcgaggccaagaggcagtctgtctgactgcagccctttgcttccaagtgacctcccgtactcctggtcgctgggatcaccaattctacatgaggttcaccgcatcactggatgaatggactgctggggcacgtgcagcatttgatggctctggccagaggttgtcccctcggaggctccggctcagtgtggggaatgtcacttgtgagcagctacacttccatgtgctggatacatcagattacctccggccagtggccttgactgtgacctttgccttggacaatactacaaagccagggcctgtgctgaatgagggctcacccacctctatacaaaagctggtccccttctcaaaggattgtggccctgacaatgaatgtgtcacagacctggtgcttcaagtgaatatggacatcagaggctccaggaaggccccatttgtggttcgaggtggccggcggaaagtgctggtatctacaactctggagaacagaaaggaaaatgcttacaatacgagcctgagtctcatcttctctagaaacctccacctggccagtctcactcctcagagagagagcccaataaaggtggaatgtgccgccccttctgctcatgcccggctctgcagtgtggggcatcctgtcttccagactggagccaaggtgacctttctgctagagtttgagtttagctgctcctctctcctgagccaggtcttcgtgaagctgactgccagcagtgacagcctggagagaaatgggacccttcaagataacacagcccagacctcagcctacatccaatatgagccccacctcctgttctctagtgagtctaccctgcaccgctatgaggttcacccatatgggaccctcccagtgggtcctggcccagaattcaaaaccactctcagggttcagaacctaggctgctatgtggtcagtggcctcatcatctcagccctccttccagctgtggcccatgggggcaattacttcctatcactgtctcaagtcatcactaacaatgcaagctgcatagtgcagaacctgactgaacccccaggcccacctgtgcatccagaggagcttcaacacacaaacagactgaatgggagcaatactcagtgtcaggtggtgaggtgccaccttgggcagctggcaaaggggactgaggtctctgttggactattgaggctggttcacaatgaatttttccgaagagccaagttcaagtccctgacggtggtcagcacctttgagctgggaaccgaagagggcagtgtcctacagctgactgaagcctcccgttggagtgagagcctcttggaggtggttcagacccggcctatcctcatctccctgtggatcctcataggcagtgtcctgggagggttgctcctgcttgctctccttgtcttctgcctgtggaagcttggcttctttgcccataagaaaatccctgaggaagaaaaaagagaagagaagttggagcaatgaatgtagaataagggtctagaaagtcctccctggcagcttcttcaagagacttgcataaaagcagaggtttgggggctcagatgggacaagaagccgcctctggactatctccccagaccagcagcctgacttgacttttgagtcctagggatgctgctggctagagatgaggctttacctcagacaagaagagctggcaccaaaactagccatgctcccaccctctgcttccctcctcctcgtgatcctggttccatagccaacactggggcttttgtttggggtccttttatccccaggaatcaataatttttttgcctaggtgcctgactcctttcagattccctctttatcttccctcacagtttggaaaggatgagggttatcttcctcgattcttccaccctctcactttcctgcctgttccccactccacaggagggagctgacgttggcttgaaaggagtaaagtcaacatctgctgctttcctgtggactctggtgattcatagagccggatggggagagtcaacaggaaaaaaggagggaggaggaaaagccacaagagacattctgtacaattccaaggaacagagaagcctttagacaggcaactgccatcccccctgaaacctgagacctgtagtgcactcgaccgccctcaggtgttggtgaaacagagctgcccccaggctcgctgggcataggcttcctgattccaagccttttctgggagcaaagccagggcctggtgcctgattttctgaagccaggagccctcaggtggctggagctggaatagcagggaggactgggtgtacctaggcagtattttctctacttctctcaagtcttatactcactcttgagccctccttggggcctgcttagaaagcagacaggagagagagtactgctacttgatgatgggaaatgctttcactttaccagctttgggaagcagcagccccatgggatctaaaagtgtggagtctgcattaagaaacctacatgggtggcatggggctctggggagcaagcccttacttgctcagcactggttatgtagcacaaatagctcctaggaaaatgtttctggggcaaccctagaaccctggtcatattttgcagggtttctctggtggaatcagtttgccagcccttgcttgatgcttactggaaatctccaggttaatttctatctctgatccctccccaacccactccatatttgggtcatggacagtaaaggcagttggattctcatagacaactgggtaacttatatttctttgtaatcaagacttgagatatcgaagtcagttattggtctccagagtgcagctctgggagccttttgaagaatcagcactcattaagagctgagaagagagaagacctgattgggtggttgactagcagtcacagaacctgtcctcccaggctgttcctgaggcctgaccacagtatttattttggcatgtctctggccttctgcagaggcccaccctcatgggcattgtctctgtttcccagtggggtggacagtatatcagatggtcagaacaaataaagttcagtgtcaaatgaaaaaaaaaaaaaaaaaaaa

SEQ ID NO: 2109 - protein, 1167 aa, Homo sapiens
MELPFVTHLFLPLVFLTGLCSPFNLDEHHPRLFPGPPEAEFGYSVLQHVGGGQRWMLVGAPWDGPSGDRRGDVYRCPVGGAHNAPCAKGHLGDYQLGNSSHPAVNMHLGMSLLETDGDGGFMACAPLWSRACGSSVFSSGICARVDASFQPQGSLAPTAQRCPTYMDVVIVLDGSNSIYPWSEVQTFLRRLVGKLFIDPEQIQVGLVQYGESPVHEWSLGDFRTKEEVVRAAKNLSRREGRETKTAQAIMVACTEGFSQSHGGRPEAARLLVVVTDGESHDGEELPAALKACEAGRVTRYGIAVLGHYLRRQRDPSSFLREIRTIASDPDERFFFNVTDEAALTDIVDALGDRIFGLEGSHAENESSFGLEMSQIGFSTHRLKDGILFGMVGAYDWGGSVLWLEGGHRLFPPRMALEDEFPPALQNHAAYLGYSVSSMLLRGGRRLFLSGAPRFRHRGKVIAFQLKKDGAVRVAQSLQGEQIGSYFGSELCPLDTDRDGTTDVLLVAAPMFLGPQNKETGRVYVYLVGQQSLLTLQGTLQPEPPQDARFGFAMGALPDLNQDGFADVAVGAPLEDGHQGALYLYHGTQSGVRPHPAQRIAAASMPHALSYFGRSVDGRLDLDGDDLVDVAVGAQGAAILLSSRPIVHLTPSLEVTPQAISVVQRDCRRRGQEAVCLTAALCFQVTSRTPGRWDHQFYMRFTASLDEWTAGARAAFDGSGQRLSPRRLRLSVGNVTCEQLHFHVLDTSDYLRPVALTVTFALDNTTKPGPVLNEGSPTSIQKLVPFSKDCGPDNECVTDLVLQVNMDIRGSRKAPFVVRGGRRKVLVSTTLENRKENAYNTSLSLIFSRNLHLASLTPQRESPIKVECAAPSAHARLCSVGHPVFQTGAKVTFLLEFEFSCSSLLSQVFVKLTASSDSLERNGTLQDNTAQTSAYIQYEPHLLFSSESTLHRYEVHPYGTLPVGPGPEFKTTLRVQNLGCYVVSGLIISALLPAVAHGGNYFLSLSQVITNNASCIVQNLTEPPGPPVHPEELQHTNRLNGSNTQCQVVRCHLGQLAKGTEVSVGLLRLVHNEFFRRAKFKSLTVVSTFELGTEEGSVLQLTEASRWSESLLEVVQTRPILISLWILIGSVLGGLLLLALLVFCLWKLGFFAHKKIPEEEKREEKLEQ

SEQ ID NO: 2110 - DNA, 497 bp, Homo sapiens
agtcggtcgtcaagagacacctacactaatagtttatgcacagcataaactattcagattataggcacttgtaattctaaccttgtatccatttgatcaaagaaaatttgtagaacatttttacctctcatgatcacaatcattagtgtctccctttataacgacctatgttttgtttactttgaaacaccaaatttgttgtcttggttttttttacatgacagaactcatgcagtttcttttttagttgaaagttcacatcttgccccttgaatagtttgaacatttctttcttaattcttttttgttttggttttgcactgtaaaactgatgaaaactttaagccaatcttaatgcactagcctctgtagtgtaaggaagtgtgagaaggagtttcttaatgagtttacacgtttaaatcaagcatattataagttatatgccatgtgttgaaggcttttctatttatatatataaagatttttagtatttgttt

SEQ ID NO: 2111 - DNA, 314 bp, Homo sapiens
  misc_feature (269)..(269): n is a, c, g, or t
aagggagggctcgaagcttctcccggggtcgtcgcaagaaaaaatgcaagatttgcaagcttcgatcctttttccgtaaactcaacaccaggctaatgtcccaacggatctgatggtggggagggagaaaactgtcctttagaggatcttccccactccggcttggccctgctgtttctcagggagaagcctgtcacatctccatctacagggagttggagggtgtagagtcccttggttgaacagggtagggagcctggataggagtnggtgggaataaaccagactgggatgcctctgtctcagtcctgcct

SEQ ID NO: 2112 - DNA, 6949 bp, Homo sapiens
aaacaagaagaatgggattgatatttccgcagaagtttggaagttatgtaacagagcaggttgagatcctaccttttaggagcagcctgccccttttgaaggggtaaagggagtgggtgcagtgccctctcttctgttgtagtggcttatccctctaaggcatgacccttggataggggttacctgcctcggaaagtccccacttccttgtgggagtttaaaatagattggcatatgtgagagatggagacaaggtgggaaatcggatcctgtcttaggatttctcatcaggagatgctgatacttggtgtttcagcttgataaattgagaaggtgccatgaaaccaggtcctggaacagaatccctggttgctctgtcttttagctgctctgaccctctgccctgcagagcatgcattttgcatgtgcctggcaggaggccctcctgcttgagccctgctgtatttgtctgtgttgacaacgtgactgccagccattaagcttggtcagtccacagacacactaggaaagcagaggcagctcttggtttctctggaacagagctgcaagaagtctctgggcatctgcatggccaggagcttatgcttaactgttgagtgacctgcagccataagggcattaattctgccttccagaggtgggaatgacttggctttaaacagtgatttgtgtgagaattcttcaaatcccataaggtagaaggcatggtggagtggaggagaaatcttggctcatatctgcctcttccattgaccagctgtgtgaccttgggcctgttacttttaacctacctgaccctccatttcctcatttatcagaagtgtctaactgtacacaagttaaactgtaaggattacatgaggtagtagtcaatcctggtgtttctctgtatcttctcacttctcactggtgttggaaatatgatcttgcgaccctagatggcagccactctggggcagaagagacagtgaccaccttttgaagagctcaaaggagaatattgccccacagggcttagtgggtcccccaggctgaggctggggaggagggccacctttgcctacagcaagtggcatatcattgttctaggggttctcttgacggcagaactttgcctctagctcattttccacagcctagattttccaatcttgccaatccagttgacttctgtcttctcatttccaagccattgttctctctctttcactatctacatggattatccttcattcaaactgctttgtcccggccgggtgcggtggctcatgcctgtagtcctagcactttgggaggccgaggcgggtggatcacgaggtcaggagatcgagaccatcctggctaacatggtgaaaccccgtctctactaaaattaaaaaaattagccgggcgtggtggcaggcgcctgtggtcccggctacttgggaggctgaggcgggagaatggcatgaacccgggaggtggagcttgcagtgggtggagatcgcgccactgcactccagcctgggcgacagagcgagactccgtctgaaaaaaaaaacaaaaaaactgctttgtcctgtaggaatcctgtgcgggttatgtgcacctccctcaatccttaccttgaagctgaggtttcccctcagctctcaagtactcagtttgcactgcaggtagtccctattttaacgaaagttatacggtccagctcagggaatcctgaaaagctgcccttgcttccatggtaatcaaaaggcagttctcatggaataaaagctacctgaagcctgagttgggacctttggctggggaaggtggttgaggacgttctctgattagatgcttggcatgaggtttgctactggaactgctagtgtagaatgtttcagccccctagagttgtccctgtgatgtggctacctcctttctctgggatttctcttaaagtctggggagcccctgcttctcatttcctggaatttatcttcccagtctccctttctggctgaaaatttctagtatcttacagaacagcggtgggatacactggagcacatcatattaccactaagtatgtctaataaatgatgtcctctgatttgacatttcctaaatgtgaagctcctgattttatacaattttgaaattagtaagcttgttagttttgtttgaaattctaggcattggatacacttaacatgagggctacatgtgcatcaacatactctggtttccttccctctgtatcttttttttttttgagatggagtctcactgtctcctaggctggagtgcagtggtgtgatcatggctcactgcagccccaaccttcagggctcaggtgatcctcccgcctcagccacccaagtggctgggaccgcaggtgcatgccaccatgcctggctaacttatttttatatattgtagagacggagtctccctatgttgcctaggctgaccttgagctcttgggctcaggtgatcctcccgccttggcctcccaaagtgttgggattataggcgtgagccactgtgtccagccttttcctctgtatcttgtatccattccccagagcgatactgtgtatccttgaacagacggtttcttgaagtcagagtctatctcctctgtcacttctcccccttcattatctaagactgaggttgtggtttatatgcttagagttgaaagcatggggtccaacgtgttctgtactctgtagttccccagactctccagggaaactacttagctctcaggtggttcttttctgtttttctcagagcaagttatctaataactgaagaggactctgccctttggcctgttcctgactttctaactccttttgctggaggaaggggaggttgaggggggtgccctgtggtgtgaaagccccacttgccctctcctctatactttcttccaatgcagacgggagaaagtatcataaatgtagtgactgtgggtcaggggagctctgagaggccagcacaggaaaccagaaacaaaatgagtcagttcgtaggtggcgatcagaggcaccctgctgagggtgcaaggccacaggtgatgcctcctcagtaggcccaggagcatcaaaacgggaacagtccctttcagccttcaggagcctcccaaatgtcacttagtgatgtcccattcacctgcttaaaggccctgcatcctgccaggtagttggtttgtccatagcatcctgagctctgcttgggtgagccagacaaaaagaatgattcctggccagagtagtgataccagggcccagacagaggcagagagtccggatagaagatcctgtaagctggggtagggagccgaggaggccatggagccaggggaatcattgaagtgagggacaatttctggaggagggaaactgagtaaggaaggcctggccaaggaccaagaaggggacagtatcctgatctatgaaagaagactcaagtggggattgacagagccagattgggtggagtccaagctttgggcaggtgagtgtccaggagatgagggctgagaatgggccttcagagcccagccagaaggggaaagcacaaagctccaccctccttcttcacatccctccatgctgctcaaatcccaggtcttcaggcaccatggaggacaaacgcaacatccagatcatcgagtgggaacacctggacaagaagaagttctacgtgtttggtgtggcaatgacaatgatgatccgtgtcagtgtctacccattcaccctcatccgcacccggttgcaagttcagaaggggaagagcctctaccatgggaccttcgatgccttcatcaagatcctgcgagcagatggtatcactggcctctaccgagggttcctggtcaataccttcaccctcatctctggccagtgttatgtcaccacttatgagctcacccggaagtttgtagctgactacagccagagtaacacagtcaaatcactggtggctggtggctcagcctcccttgtggcccagagcatcacagtgcccattgatgtagtctcccagcacctgatgatgcaacgcaagggtgagaaaatgggccgctttcaggtgcgggggaacccagagggacaaggggtagttgcctttggccaaaccaaggacatcatcaggcagatcctgcaggctgatggacttcgcggcttctatcgaggctatgtggcttcactgcttacctatatcccaaacagtgctgtctggtggcccttctatcacttctatgcagagcagctctcctacctgtgtcctaaggagtgccctcacattgtctttcaagctgtctcggggcccctggctgcagccactgcctccatcctcaccaatcccatggatgtcatacgaacccgtgtgcaggttgagggcaagaactccatcatcctgaccttcagacagctgatggcagaagaagggccttggggcctcatgaagggcctctcggccagaatcatctcagccacaccttccaccattgtcattgtggtgggctatgagagcctcaagaaactcagcctccgacctgagctggtggactcgagacactggtaaccagtggtggggagagaagcctgctgttttccacactaccgtgggtcaggggcagagtggagaggacagcaccctctccaggtgctcccaccacacacccagccctgccctgggccaagtggcctatctgggatagggatagagactttgaactgctcttgctgaagaggctccacgcctggatcccttgcccccactatttaaaattctcttctgagccgggctccctcactcagtccctgtatttgatactggcctaaagaccccaccccccaccctgccagcccttcttctggcttccccttccatctgtgtccctgagaccctgagaagagctgtacatagagcttgcttactaccactggttcttcctcttgggctttcagcccagactccaagcagctgctatcaaccctctctcccttcatctcttagccttgcttatttttattttgggaccgagctgcccactagatgactctgcttttccctgcatttggggctaaggtgccaggtacttatttgcacagggagcaggagcagcaaaaaatctctggttctccagagcactcgtcctctctttggaggggttattaggttgggagaaatgttgatacttttgttttgtgtgtgtgtgtgtgtgtgtgtgtgtgtgtgtgtgtgtgtgtgttttaacatctgtgaaccaggctattagtcctgctaaagcgccaatcctgctgtcagagctcacccccttcctaagacaggtagaaaaatgtaatgtagctttttccacaagccagttccctgtcccttcagtctcaggagccctaggagagtctaagctggggcatcccctggcccagaggactcccgtggtgggcacagttctaagtggatcaggctgtcttgggtgcactggacttggagcactaccttgagaagtcaggttgagaaagtagttgatctagaaggcaacaagtgggcatgtgttccccagcacattacccaggccagcagagccaaacctaggagagggcagtgggtagattctctgccccaggcagccatgacatacacataaataccccaatcactcagacttacggcaacaagtgttgtctcactatggtgatctctaagatccacatcactggatgcgtagtcatcccagtcatggtaccctgtggaggaatgctggaagaacataaagagcagttcagaaagtcacccaataccaggaccactgcatttaccagcctgatactgccaagattatctgatgctctcctcaggagctaggagaggagtgctccttcctccctaccgctactctccccaagcctgtgttgcaggtagagaggtgcagcaaatagagaaggcatgtcaaaccctgcatttctacctgagagtgtgacctggatgatcctccaaaccctattggtcccaccccctgggaaaggccatggtgccagtttgaaaggtgctagctacctgaagccttgatatttcttcatggctgccgcacattcttccaccttggccagaacaggttctgaaaaccgcttctctaccttcaccaccaccactgcccatcttgatctctttgagggttttcccatttcacttgatcttatttttgtttatcccttcctgcactttgtcaagagagtcctccagtttctatccaggaatgttcacatccaaagggttggacccacggatcattctgaatcttcctgcccctcctcactgcttaaccctgagaaccacaaatataatggaagcagttccccccaccctcaccccatctctttaagctcatcctagcaagacctctagagaccctagagactcgactttagccttccccgccatggcacagtggggaaggtgtcaatggggagtgtcacggacaggaggtaggatcctgccgctcgcgtcttagtgtttctccctcaagactttccttctgttttgttgtcttgtgcagtattttacagcccctcttgtgtttttctttatttctcgtacacacacgcagttttaagggtgatgtgtgtataattaaaaggacccttggcccatactttcctaattctttagggactgggattgggtttgactgaaatatgttttggtggggatgggacggtggacttccattctccctaaactggagttttggtcggtaatcaaaactaaaagaaacctctgggagactggaaacctgattggagcactgaggaacaagggaatgaaaaggcagactctctgaacgtttgatgaaatggactcttgtgaaaattaacagtgaatattcactgttgcactgtacgaagtctctgaaatgtaattaaaagtttttattgagcccccg

SEQ ID NO: 2113 - protein, 368 aa, Homo sapiens
QSQIGWSPSFGQVSVQEMRAENGPSEPSQKGKAQSSTLLLHIPPCCSNPRSSGTMEDKRNIQIIEWEHLDKKKFYVFGVAMTMMIRVSVYPFTLIRTRLQVQKGKSLYHGTFDAFIKILRADGITGLYRGFLVNTFTLISGQCYVTTYELTRKFVADYSQSNTVKSLVAGGSASLVAQSITVPIDVVSQHLMMQRKGEKMGRFQVRGNPEGQGVVAFGQTKDIIRQILQADGLRGFYRGYVASLLTYIPNSAVWWPFYHFYAEQLSYLCPKECPHIVFQAVSGPLAAATASILTNPMDVIRTRVQVEGKNSIILTFRQLMAEEGPWGLMKGLSARIISATPSTIVIVVGYESLKKLSLRPELVDSRHW

SEQ ID NO: 2114 - DNA, 493 bp, Homo sapiens
  misc_feature (2)..(2): n is a, c, g, or t
  misc_feature (113)..(113): n is a, c, g, or t
anttcggcacagggtcagtgctgacagcttgctgaattcaaggaggcatttctcctgtttgacagaacaggtgattccaagatcaccttaagccaggtcggtgatgtccttcnagctctgggcacaaatcccaccaatgcagaggtcaggaaagttctgggaaaccccagcaatgaagagctgaatgccaagaaaattgagtttgaacaatttctgcctatgatgcaagccatttccaacaacaaggaccaggccacctatgaagactttgttgagggtctgcgtgtctttgacaaggaaggcaatggcacagtcatgggtgctgaactccgccatgttctagccaccctgggtgaaaagatgaaagaggaagaagtggaagccctgatggcaggtcaagaagactccaatgggctgcatcaactacgaagcttttggtcaagcacatcatgtctaatctgaatggagctctcaagaacaagcattgtttagg

SEQ ID NO: 2115 - DNA, 612 bp, Homo sapiens
tataaatgagtttcattttaagtaaactcattttgtgggatttgagatttaaaaatgaaattaattttgcacattctagtcatggttgggctctaaggcaatgttgtaaagctgtaattgtttgccttatgggaagaagtgaaaaggaattaaaatttatggtgtgtctactatgaaccaggcatgatgctgagagtttaactgtgtaatttttggcctaaatagccctgtgaagtagatattattccaactttacaggttagaaaatttgaggcacagagaggtgaaatatttgcctaaagtgaaacggcaaatttggcaatttggacttggattcaagtgtttataactaaagcccagctccttgcatcataccctggtacctaaaagacataaaaactcacttcaggtgcaatgtgaatgaaaatgacgttatgaccccagcttgttggctatgtgctccttgagaaaaaattctgttggatagaatgcgggcaatcctcaaaagcccttggtatctttgccatgcattactcttagcccttgccatgttttaatttaattctcaccaatcccgggaggatggggctattatcattcccattttacaga

SEQ ID NO: 2116 - DNA, 1465 bp, Homo sapiens
gtttcagcggccgctgaattctaggaataatcagaagtcagtttgggagaagtcaaaatggacacaatcttcttgtggagtcttctattgctgttttttggaagtcaagcctcaagatgctcagctcaaaaaaataccgaatttgcagtggatctttatcaagaggtttccttatctcataaggacaacattatattttcaccccttggaataactttggttcttgagatggtacaactgggagccaaaggaaaagcacagcagcagataagacaaactttaaaacaacaggaaacctcagctggggaagaattttttgtactgaagtcatttttctctgccatctcagagaaaaaacaagaatttacatttaatcttgccaatgccctctaccttcaagaaggattcactgtgaaagaacagtatctccatggcaacaaggaattttttcagagtgctataaaactggtggattttcaagatgcaaaggcttgtgcagagatgataagtacctgggtagaaagaaaaacagatggaaaaattaaagacatgttttcaggggaagaatttggccctctgactcggcttgtcctggtgaatgctatttatttcaaaggagattggaaacagaaattcagaaaagaggacacacagctgataaattttactaagaaaaatggttcaactgtcaaaattccaatgatgaaggctcttctgagaacaaaatatggttatttttctgaatcttccctgaactaccaagttttagaattgtcttacaaaggtgatgaatttagcttaattatcatacttcctgcagaaggtatggatatagaagaagtggaaaaactaattactgctcaacaaatcctaaaatggctctctgagatgcaagaagaggaagtagaaataagcctccctagatttaaagtagaacaaaaagtagacttcaaagacgttttgtattctttgaacataaccgagatatttagtggtggctgcgacctttctggaataacagattcatctgaagtgtatgtttcccaagtgacgcaaaaagttttctttgagataaatgaagatggtagtgaagctgcaacatcaactggcatacacatccctgtgatcatgagtctggctcaaagccaatttatagcaaatcatccatttctgtttattatgaagcataatccaacagaatcaattctgtttatgggaagagtgacaaatcctgacacccaggagataaaaggaagagatttagattcactgtgaatgaaaagcacagcctcagaataaaagatgatttctcaaaaatagctgattggcaaaatatcgtcatcttgacaatatttgctctatatcttatgtcttttctgttttaaactgtgcctgtagtaatagatatctgtcttgatgaataagtaaaattaggtatgcatttgtttcaaaaaaaaaaaaaaac

SEQ ID NO: 2117 - protein, 405 aa, Homo sapiens
MDTIFLWSLLLLFFGSQASRCSAQKNTEFAVDLYQEVSLSHKDNIIFSPLGITLVLEMVQLGAKGKAQQQIRQTLKQQETSAGEEFFVLKSFFSAISEKKQEFTFNLANALYLQEGFTVKEQYLHGNKEFFQSAIKLVDFQDAKACAEMISTWVERKTDGKIKDMFSGEEFGPLTRLVLVNAIYFKGDWKQKFRKEDTQLINFTKKNGSTVKIPMMKALLRTKYGYFSESSLNYQVLELSYKGDEFSLIIILPAEGMDIEEVEKLITAQQILKWLSEMQEEEVEISLPRFKVEQKVDFKDVLYSLNITEIFSGGCDLSGITDSSEVYVSQVTQKVFFEINEDGSEAATSTGIHIPVIMSLAQSQFIANHPFLFIMKHNPTESILFMGRVTNPDTQEIKGRDLDSL

SEQ ID NO: 2118 - DNA, 1800 bp, Homo sapiens
aggcctgaaccttcgctccagccccagcacaagccggccagggcgcagggccaagtgttgcccgccattccccgggtaccccatgacctcccagctggggctggctcggactgaggagtcgtccctgcccgtcaccctctggggtctccagtgctgcggagctcagctggcttttgcagcggtaggggctgggaggagaagctgcagggagaccgcaggcgtgggacgttgtggggggtcaggcttgctctggggctgggaccccggggggagcagtggggttgacgccacagcgatgacttgggccacgggtctgggggctctcccgcggggcgattgggctctgtctttcgggattagggtctctcccacagggtttggggttctctctgcagatttgggggagtctctcccgcgggatgagggggggctctccgccgcacccgcctatgatggcccagaggacccgagctcgggtcactcccgtcgccctcggggctcggcgagggtgcaggaggcgggcgctgagcggtgacgcgactccgggcggctcccgggcgcgccgcatatatagcagcggcggcggtggcggcggccacaccgggcggcggacacgtggagggacccggcccgcgccttctgcccctgctgccggccgcgccatgcggtgagcgccccaggccgccagagcccacccgacccggcccgacgcctggacctgccgcccagacccgccaccgcacccggaccccgacgctccgaacccgggcgcagccgcagctcaaggtactactggcgccgggccgaccctgcgcccccgggaggcctccgttcggctttcctctgcccagggacggttctgccagggccctggccggccgccgcctctgctcctccccggagccccggcactccttgcctcggggcgcagcccactccgggttccgacccgcccgccctgtccttcccttccagatggcccgaggcagcgccctcctgctcgcctccctcctcctcgccgcggccctttctgcctctgcggggctctggtcgccggtaagtgcgggcgcgtctcctccgagcgaaggggacatcagaccggccgggcgtggagggcttcctggaggaggcagcctccgccctgcccgcggggatgggcgtggaaagtggaaaggcgggcgctgtcctggctgcgggcgtcgcgggaagggtccggggctccctgggattccccccgcgcgcttctccgagtgtatcaacagccccgggctataaccaggccgccgggagagctctgcgcttcgggtcagcgcctcgggaaagcgagaagctcgcccgttccgcagggcttagttagaatggagggctaggagccactggcgtggcctcagcgtcactaaagcaggtgcagtgcgctgagagtgcgcggctcaggccctcaagtgaagtatttcgtaaataaagtggttccattttcatgtcaaatatagccgacttaggggtaaacctggaatttcgcgagctatccaaaagcacatgcattgttctaagtcctctgccatgccgggaaagcctgggtgcacccattcagcataggctccagcacagccctggcatctgatccccttttctcccttcaaggccaaggaaaaacgaggctggaccctgaacagcgcgggctacctgctgggcccacgtaaggtactgacagcatggcctccccactcctgaccccacctgcccctcgctttgaaccctggctcctgcccctccgcctgcgctgggcagaccctctggcct

SEQ ID NO: 2119 - protein, 45 aa, Homo sapiens
MARGSALLLASLLLAAALSASAGLWSPAKEKRGWTLNSAGYLLGP

SEQ ID NO: 2120 - DNA, 199 bp, Homo sapiens
  misc_feature (31)..(31): n is a, c, g, or t
  misc_feature (86)..(86): n is a, c, g, or t
gtccgtggctgtccagcttgggtgtcctgtnctcggcttaggggcacaggcttgcgtgcgcacctagggacggcggaggcatcgtntccttcctgcaggaaggaaggagcttccggagctttcctgggaggctcactggggccgcggagataacctgaggtcctgcaacaggctgggggcccaaggaccatcccaggcc

SEQ ID NO: 2121 - DNA, 689 bp, Homo sapiens
aggctgggtgttatttcgttaggtgctgaaggctgtggtgcgcggatgtgcccattcccacgtgaagcgctacgctagcatacgctcggctggcggctcccagctcgccgcaggagacagtcccggcagcagcgggggaccggaagtggctcgcggaggctcagaagctagtcccggagcccggcgtgtggcgcctcggagcgcggtgacgggccatgtccctaatctgctccatctctaacgaagtgccggagcaccccatgtgtatcccgtgtctctaaatcatgtttatgagcggcggctcatcgaggaagtacattgcggagaaatgggtaccgaccccatcaaaaccagctctctccgagggagcagcttcatcgaccatcaaagtttgctcacccaaaatccgggcccaaagcctccctcagccaccagcatcccgggccattctgaaagcttttgcagggattgaggtgggatgcagtcattgttgcacagtttcactctgcggccagcaggctgcaagacaacccggccaagagcttgtcacacgctcttgtaccaagcacggatggccggcctgccggtgtccatttgcccggtctcaccaagggaatgtcacttgctgcccgagaaagctctggctaaccctgaaaccacaggctgggcctcatttgtgccccaggctg

SEQ ID NO: 2122 - DNA, 1547 bp, Homo sapiens
ggcggctagcggcgaggccccttcctgaccttcagggatcggccaccatgtcccaccggaagttttccgcccctcggcacggacacctgggcttcctgccccataagaggagccaccggcaccggggcaaggtgaagacgtggccgcgggatgaccccagccagcccgtgcacctcacggccttcctgggctacaaggcgggcatgacccacaccctgcgggaggtgcaccggccggggctcaaaatttccaaacgggaggaggtggaggcggtgacaattgtagaaacgccgcccctagtggtggtgggcgtggtgggctacgtggccacccctcgaggtctccggagcttcaagaccatctttgcagaacacctcagtgatgagtgccggcgccgattctacaaggactggcacaagagcaagaagaaagccttcaccaaggcctgcaagaggtggcgggacacagacgggaaaaagcagctacagaaggacttcgccgccatgaagaagtactgcaaggtcattcgggtcattgtccacactcagatgaaactgctgcccttccggcagaagaaggcccacatcatggagatccagctgaacggtggcacggtggccgagaaggtggcctgggcccaggcccggctggagaagcaggtgcccgtgcacagcgtgttcagccagagtgaggtcattgatgtcattgctgtcaccaagggtcgaggcgtcaaaggggtcacaagccgctggcataccaagaagctgccgcggaagacccataagggcctgcgcaaggtggcctgcattggcgcctggcaccccgcccgcgtgggctgctccattgctcgggccgggcagaagggctatcaccaccgcacggagctcaacaagaagatcttccgcatcggcaggggcccgcacatggaggacgggaagctggtgaagaacaatgcatccaccagctacgacgtgactgccaagtccatcacaccgctgggtggcttcccccactacggggaagtgaacaacgacttcgtcatgctgaagggttgtattgctggtaccaagaagcgggtcattacgctgagaaagtccctcctggtgcatcacagtcgccaagccgtggagaatattgagctcaagttcattgacaccacctccaagttcggccatggccgcttccagacagcccaagagaagagggccttcatgggcccccaaaagaagcatctggagaaggaaacgccggagacctcgggagacttgtaggctgtgtggggtggatgaaccctgaagcgcaccgcactgtctgccccaatgtctaacaaaggccggaggcgactcttcctgcgaggtctcagagcgctgtgtaaccgcccaaggggttcaccttgcctgctgcctagacaaagccgattcattaagacaggggaattgcaatagagaaagagtaattcacacagagctggctgtgcgggagaccggagttttatgttttattattactcaaatcgatctctttgagcaaaaaaaaaaaaaaaaaaa

SEQ ID NO: 2123 - protein, 407 aa, Homo sapiens
MSHRKFSAPRHGHLGFLPHKRSHRHRGKVKTWPRDDPSQPVHLTAFLGYKAGMTHTLREVHRPGLKISKREEVEAVTIVETPPLVVVGVVGYVATPRGLRSFKTIFAEHLSDECRRRFYKDWHKSKKKAFTKACKRWRDTDGKKQLQKDFAAMKKYCKVIRVIVHTQMKLLPFRQKKAHIMEIQLNGGTVAEKVAWAQARLEKQVPVHSVFSQSEVIDVIAVTKGRGVKGVTSRWHTKKLPRKTHKGLRKVACIGAWHPARVGCSIARAGQKGYHHRTELNKKIFRIGRGPHMEDGKLVKNNASTSYDVTAKSITPLGGFPHYGEVNNDFVMLKGCIAGTKKRVITLRKSLLVHHSRQAVENIELKFIDTTSKFGHGRFQTAQEKRAFMGPQKKHLEKETPETSGDL

SEQ ID NO: 2124 - DNA, 1735 bp, Homo sapiens
gacagaggcgcggaggctcggagagagaagacgtggagggagggacagagcctggacagcggtggacacggcatcgtgcgcggggaagagggcagcacgcagcaggcgccgagcgccgggcaccgggaagggcagcccgggtgatctccggccgtccatgcacagagcgccttcccccacagccgagcagccgccgggcggaggggacagcgcccgccggaccctgcagcccagactcaagcccagtgcccgagccatggcactgcctcggacgctgggggagctgcagctgtaccgggtcctgcagcgcgccaacctcctttcctactatgagaccttcatccagcagggaggggacgacgtgcagcagctgtgtgaggcgggtgaggaggagtttctggagatcatggcacttgtgggcatggccaccaagcccctccatgtccggcgcctgcagaaggcactgagagagtgggccaccaatccagggctcttcagtcaaccagtgcctgctgttcccgtctccagcatcccgctcttcaagatctctgagactgcgggtacccggaaagggagcatgagcaatgggcatggcagcccaggggaaaaggcaggcagtgcccgcagttttagccccaagagcccccttgaacttggagagaagctatcaccactgcctgggggacctggggcaggggacccccggatctggccaggccggagcactccagagtcggacgttggggcaggaggagaagaggaggctggctcgccccccttctccccccctgcagggggaggagtccctgaggggactggggctggggggctggcagcaggtgggactgggggtggtccagaccgactggagccagagatggtacgcatggtggtggaaagtgtggagaggatcttccggagcttcccaaggggggatgctggggaggtcacatccctgctaaagctgaataagaagctggcacggagcgttgggcacatctttgagatggatgataatgacagccagaaggaagaggagatccgcaaatacagcatcatctatggccgtttcgactctaagcggcgggagggcaagcagctcagcctgcacgagctcaccatcaacgaggctgctgcccagttctgcatgagggacaacacgctcttattacggagagtggagctcttctctttgtcccgccaagtagcccgagagagcacctacttgtcctccttgaagggctccaggcttcaccctgaagaactgggaggccctccactgaagaagctgaaacaagaggttggagaacagagtcaccctgaaatccagcagcctcccccaggccctgagtcctatgtacccccataccgccccagcctggaggaggacagcgccagcctgtctggggagagtctggatggacatttgcaggctgtggggtcatgtccaaggctgacgccgccccctgctgacctgcctctggcattgccagcccatgggctatggagccgacacatcctgcagcagacactgatggacgaggggctgcggctcgcccgcctcgtctcccacgaccgcgtgggccgcctcagcccctgtgtgcctgcgaagccacctctcgcagagttcgaggaagggctgctggacagatgtcctgccccaggaccccatcccgcgctggtggagggtcgcaggagcagcgtgaaagtggaggctgaggccagccggcagtga

SEQ ID NO: 2125 - protein, 525 aa, Homo sapiens
MHRAPSPTAEQPPGGGDSARRTLQPRLKPSARAMALPRTLGELQLYRVLQRANLLSYYETFIQQGGDDVQQLCEAGEEEFLEIMALVGMATKPLHVRRLQKALREWATNPGLFSQPVPAVPVSSIPLFKISETAGTRKGSMSNGHGSPGEKAGSARSFSPKSPLELGEKLSPLPGGPGAGDPRIWPGRSTPESDVGAGGEEEAGSPPFSPPAGGGVPEGTGAGGLAAGGTGGGPDRLEPEMVRMVVESVERIFRSFPRGDAGEVTSLLKLNKKLARSVGHIFEMDDNDSQKEEEIRKYSIIYGRFDSKRREGKQLSLHELTINEAAAQFCMRDNTLLLRRVELFSLSRQVARESTYLSSLKGSRLHPEELGGPPLKKLKQEVGEQSHPEIQQPPPGPESYVPPYRPSLEEDSASLSGESLDGHLQAVGSCPRLTPPPADLPLALPAHGLWSRHILQQTLMDEGLRLARLVSHDRVGRLSPCVPAKPPLAEFEEGLLDRCPAPGPHPALVEGRRSSVKVEAEASRQ

SEQ ID NO: 2126 - DNA, 186 bp, Homo sapiens
atgaaacacgaagcctacggagagtgctacaaggtgagctgcctggaaatccctgggccctctgggcccaagggctaccgtggacagaagggtgccaagggcaacatgggtgagccgggagagcctggccagaagggaagacagggagaccccggcatcgaaggccccattggattcccaggaccc

SEQ ID NO: 2127 - protein, 62 aa, Homo sapiens
MKHEAYGECYKVSCLEIPGPSGPKGYRGQKGAKGNMGEPGEPGQKGRQGDPGIEGPIGFPGP

SEQ ID NO: 2128 - DNA, 2512 bp, Homo sapiens
gcggggcctctaccggcccgatggagcgcgcgggcgctactagccgcgggggccaagcccctggcttcttactgcggcttcatactgagggccgagccgaggcggcgcgggtgcaggagcaggacttacggcagtgggggctgacagggattcacctacgctcttaccagctggagggagtaaactggctcgcccagcgcttccattgtcagaatggctgtatcctgggagatgagatgggcctggggaagacctgccagactattgctctcttcatttatttggcaggaagattaaatgatgaagggccatttctgattctttgtcccttgtctgttttgagcaactggaaagaagaaatgcagagatttgctccaggtctttcctgtgtaacatatgcaggcgacaaggaggaaagagcctgccttcagcaagacctgaaacaggagtcacgttttcatgtgctactgactacctatgagatttgcttgaaagatgcatcatttctaaaatcattcccttggagtgttcttgttgtggatgaagctcacaggttgaaaaaccaaagctccctgctgcataagaccttgtcagagttctcagtagtcttcagtctcctgttgaccggaactcccatccagaacagcctccaagagctctactccctcctcagttttgtggagcctgatctcttttccaaggaagaggtgggagattttattcaacgctaccaggatattgagaaagaatctgagtcagcaagtgaactgcacaaactcttgcagccatttctgctgaggcgagtgaaagctgaggtagctacagagcttcccaagaagacagaagtagtgatataccatggcatgtcagcattgcagaagaaatactacaaggccattttgatgaaagacctagatgcatttgaaaatgagacggcaaagaaggttaaactacagaacattttgtcccagcttcgaaagtgtgtggatcacccatatttgtttgatggtgtggagccggagccttttgaagttggagaccacctgactgaggctagtgggaagcttcacctgctggataagctactagcattcctgtattctgggggccatcgggttttacttttctcccaaatgacccagatgttggatattctccaagactatatggattacagaggctacagctatgagcgtgtggatggttctgtgagaggagaagagagacacttggccattaagaactttggacagcagcccattttcgtttttctcctgagtactagggcaggtggagttggcatgaacttaacagcagcagatactgtgatttttgttgacagtgactttaatcctcagaatgacttgcaagcagctgccagggctcatcgcattggccaaaacaagtctgttaaagttattcggctgattggtcgagacactgtggaagaaatagtctataggaaagcagcctccaaactgcagctcaccaacatgatcatagaaggaggccattttactctgggagcccagaaacccgctgccgatgctgacctccagttgagtgagatactcaaatttggtttggataaactgctggcctctgaggggagcaccatggatgaaatagacctggagtccatcctgggagaaacaaaagatggccagtgggtctctgatgccttgcctgcagcagaaggagggagcagagatcaagaggaaggaaaaaatcatatgtacttatttgaaggtaaagattattctaaagagcccagtaaggaagacagaaaatcatttgaacaactggtaaaccttcagaaaacccttttggagaaagctagtcaagagggccgatcactccgaaataaaggcagtgttctcatcccaggccttgtggagggatctaccaaaaggaagcgggttctgagtccagaagagctggaggacagacagaagaaaagacaagaagcagctgccaagagaaggagactcatagaggagaagaagaggcaaaaggaagaggctgaacataagaaaaaggtggcctggtgggaatccaacaattaccagtccttctgcctgccctctgaggagagcgagccagaggaccttgagaatggggaagagagctctgctgagctggattaccaagacccagatgctacttccctcaagtacgttagtggtgatgtcacccaccctcaggctggggccgaggatgctctcattgtgcactgcgtagatgactctggccactggggcagaggtggtttatttacagctctggaaaagcgatccgctgagccaagaaaaatatatgagctggctgggaaaatgaaagacctgagtttgggaggtgtccttttatttcctgttgatgataaagaatcaagaaacaaagggcaagatttgttggccttgattgtggctcagcatcgtgatcgttccaatgtcctgtctggcattaagatggcagccctagaagagggcctgaagaagatatttttagcagc

SEQ ID NO: 2129 - protein, 831 aa, Homo sapiens
MERAGATSRGGQAPGFLLRLHTEGRAEAARVQEQDLRQWGLTGIHLRSYQLEGVNWLAQRFHCQNGCILGDEMGLGKTCQTIALFIYLAGRLNDEGPFLILCPLSVLSNWKEEMQRFAPGLSCVTYAGDKEERACLQQDLKQESRFHVLLTTYEICLKDASFLKSFPWSVLVVDEAHRLKNQSSLLHKTLSEFSVVFSLLLTGTPIQNSLQELYSLLSFVEPDLFSKEEVGDFIQRYQDIEKESESASELHKLLQPFLLRRVKAEVATELPKKTEVVIYHGMSALQKKYYKAILMKDLDAFENETAKKVKLQNILSQLRKCVDHPYLFDGVEPEPFEVGDHLTEASGKLHLLDKLLAFLYSGGHRVLLFSQMTQMLDILQDYMDYRGYSYERVDGSVRGEERHLAIKNFGQQPIFVFLLSTRAGGVGMNLTAADTVIFVDSDFNPQNDLQAAARAHRIGQNKSVKVIRLIGRDTVEEIVYRKAASKLQLTNMIIEGGHFTLGAQKPAADADLQLSEILKFGLDKLLASEGSTMDEIDLESILGETKDGQWVSDALPAAEGGSRDQEEGKNHMYLFEGKDYSKEPSKEDRKSFEQLVNLQKTLLEKASQEGRSLRNKGSVLIPGLVEGSTKRKRVLSPEELEDRQKKRQEAAAKRRRLIEEKKRQKEEAEHKKKVAWWESNNYQSFCLPSEESEPEDLENGEESSAELDYQDPDATSLKYVSGDVTHPQAGAEDALIVHCVDDSGHWGRGGLFTALEKRSAEPRKIYELAGKMKDLSLGGVLLFPVDDKESRNKGQDLLALIVAQHRDRSNVLSGIKMAALEEGLKKIFLAA

SEQ ID NO: 2130 - DNA, 303 bp, Homo sapiens
ttttttttttttttttttttgaataagatacaagtttatttatctttcatgtaacagtccagggctaatagagcagttctgccatcctcatcacagggcttctgcctctgggtccaaagtagttgccccaattcctgccatcacatctgcaccccagccagtggagaggataagagggcaagggtaacacatacatattcttttttagggcacaaactagaaataatacatgcaacttccattcacatctcattggccccaaactttggacaaacccagatgcaagagaagctggtaaattag

SEQ ID NO: 2131 - DNA, 1758 bp, Homo sapiens
cgggggtttgtctgggcaccgtcggggtaggatccggaacgcattcggaaggctttttgcaagcatttacttggaaggagaacttgggatctttctgggaaccccccgccccggctggattggccgagcaagcctggaaaatggtaaatgatcatttggatcaattacaggcttttagctggcttgtctgtcataattcatgattcggggctgggaaaaagaccaacagcctacgtgccaaaaaaggggcagagtttgatggagccgggtggacttttctatgccatttgcctccacacctagaggataagcacttttgcagacattcagtgcaagggagatcatgtttgactgtatggatgttctgtcagtgagtcctgggcaaatcctggatttctacactgcgagtccgtcttcctgcatgctccaggagaaagctctcaaagcatgcttcagtggattgacccaaaccgaatggcagcatcggcacactgctcaatcaattgaaacacagagcaccagctctgaggaactcgtcccaagccccccatctccacttcctccccctcgagtgtacaaaccctgcttcgtctgccaggacaaatcatcagggtaccactatggggtcagcgcctgtgagggatgtaagggctttttccgcagaagtattcagaagaatatgatttacacttgtcaccgagataagaactgtgttattaataaagtcaccaggaatcgatgccaatactgtcgactccagaagtgctttgaagtgggaatgtccaaagaatctgtcaggaatgacaggaacaagaaaaaaaaggagacttcgaagcaagaatgcacagagagctatgaaatgacagctgagttggacgatctcacagagaagatccgaaaagctcaccaggaaactttcccttcactctgccagctgggtaaatacaccacgaattccagtgctgaccatcgagtccgactggacctgggcctctgggacaaattcagtgaactggccaccaagtgcattattaagatcgtggagtttgctaaacgtctgcctggtttcactggcttgaccatcgcagaccaaattaccctgctgaaggccgcctgcctggacatcctgattcttagaatttgcaccaggtataccccagaacaagacaccatgactttctcagacggccttaccctaaatcgaactcagatgcacaatgctggatttggtcctctgactgaccttgtgttcacctttgccaaccagctccagcctttggaaatggatgacacagaaacaggccttctcagtgccatctgcttaatctgtggagaccgccaggaccttgaggaaccgacaaaagtagataagctacaagaaccattgctggaagcactaaaaatttatatcagaaaaagacgacccagcaagcctcacatgtttccaaagatcttaatgaaaatcacagatctccgtagcatcagtgctaaaggtgcagagcgtgtaattaccttgaaaatggaaattcctggatcaatgccacctctcattcaagaaatgctggagaattctgaaggacatgaacccttgaccccaagttcaagtgggaacacagcagagcacagtcctagcatctcacccagctcagtggaaaacagtggggtcagtcagtcaccactcctgcaataagacattttctagctacttcaaacattccccagtaccttcagttccaggatttaaaatgcaagaaaaaa

SEQ ID NO: 2132 - protein, 448 aa, Homo sapiens [sequence omitted]

SEQ ID NO: 2133 - DNA, 1586 bp, Homo sapiens
ctggccaagggcgtccactagacaactctatcccttgcgctgaagctcaatcgtgctgagggagagctttcttaatattactgtgttgctcttagcccttctctgggttaggatctgtcagcatttctatgataaactcctattctcaaaggtttttaatttgaccataaaaatgtgccccaggctgaagtttgctatacagggctgtaccaaagagtcaaggtttacttccttctctttccaacttcttccccattctccaaggaaaagaacaacaaaaaaatctggtatggtccctccttaatagtgatttcagaattttggaaagcaccaagatccaagatggtagttttaatgtagttactcattcgcacacattttttaaatttaatgggtcacctggcatatattgtagataacatatcttttctataatttgtaagtcaataatttttttaactgctacatgatatttttttttgcccaaagattttaaaagacttgaagttggtcagttcaaaactcagatttttctacacattgtctgccatgtccattaggagtttggggaaaatactctcacacagacccttactttgcatgcagtttagagggtaagatacgtgcttcttttggggataaagatttccttacttaattgtcaaatttcatggagccattctagtctgttggggaaaatagtgattaaaaccacttccaaaattaacattttttgacaattcagatatgataagaagcaggggaaaataatacactttactcttttcttgcttaaaggcaaagaaatcaatgaaacttgaggacacactaaacatttgataactgcaaatgtgctttaaaaattggttcaatggtgcttacacatgaaacggtaacaaatggggttcctaggacgtcagaaggaatctttagtttgtatgtaattacacactagaggaggaggtgcttttaagccagtcttttatttttaatcatctcaaatatgcaaccatacatgcagtaacattaagggtcgtaaactggtgggaaacaggaacttcagtggagaggcttaaatgcctctggttagagtgggggtttttgtttgtttgtttattgttgggtttcaacactgagcatcatttctgtgatcaagtttctaactggcatgtgttttgatcatgaggtttaccatatcttgcccatacagacaaatgagagatctagtttcattttgttccctaaagaaagaacactctctaaaattaaatcatacctgtaaatttcttcagcatttgtttctgttcaatgaaattgagacccttaatgttgttttaatgtaaaattgaatattttgtctgtgatatactttaataatttaaagtaagtaatagttctaaagtcttcactgttgctactaagagaaaatagaattttaaaggtgatgataaagatgctataatgtcagttcactccagtccaatcaaatgtagtaagaaaaagtccttgaatagttctctagggacaatttctcacttgccattgacattaatctttggtgtattctcaaaaaaaaaaaaaaaaaa

SEQ ID NO: 2134 - DNA, 841 bp, Homo sapiens
ctttttctcaattttcatttcccagaactgggcacctccgggctgtgaaaagttagggaagtgtctgacacctccagaatccattcccaagaagtgcctctggtcccactagcacctgcgcagactcaggccaggcctagaatctccagttggccctgcaagtgcctggaggaaggatggctctggcctcggtcctcccccaaccctgcccaagccagacagacagcacctgcagacgcagggggactgcacaattccacctgcccaggacctgaccctggcgtgtgcttggccctcctcctcgcccacggcgcctcagatttcaggaccctcctcctcgcccacggcgcctcagacctcaggaccctgccgtctcacgcctttgtgaaccccaaatatctgagaccagtctcagtttattttgccaaggttaaggatgcacctgtgacagcctcaggaggtcctgacaacaggtgcccgaggtggctggggatacagtttgcctttatacatcttagggagacacaagatcagtatgtgtatggcgtacattggttcagtcagccttccactgaatacacgattgagtctggcccagtgaatccgcatttttatgtaaacagtaagggaacggggcaatcatataagcgtttgtctcaggggagccccagagggatgacttccagttccgtctgtcctttgtccacaaggaatttccctgggcgctaattatgagggaggcgtgtagcttcttatcattgtagctatgttatttagaaataaaacgggaggcaggtttgcctaattcccaggttgatttttctcttggctgagtgatttt

SEQ ID NO: 2135 - protein, 522 aa, Homo sapiens
MAAVVAATRWWQLLLVLSAAGMGASGAPQPPNILLLLMDDMGWGDLGVYGEPSRETPNLDRMAAEGLLFPNFYSANPLCSPSRAALLTGRLPIRNGFYTTNAHARNAYTPQEIVGGIPDSEQLLPELLKKAGYVSKIVGKWHLGHRPQFHPLKHGFDEWFGSPNCHFGPYDNKARPNIPVYRDWEMVGRYYEEFPINLKTGEANLTQIYLQEALDFIKRQARHHPFFLYWAVDATHAPVYASKPFLGTSQRGRYGDAVREIDDSIGKILELLQDLHVADNTFVFFTSDNGAALISAPEQGGSNGPFLCGKQTTFEGGMREPALAWWPGHVTAGQVSHQLGSIMDLFTTSLALAGLTPPSDRAIDGLNLLPTLLQGRLMDRPIFYYRGDTLMAATLGQHKAHFWTWTNSWENFRQGIDFCPGQNVSGVTTHNLEDHTKLPLIFHLGRDPGERFPLSFASAEYQEALSRITSVVQQHQEALVPAQPQLNVCNWAVMNWAPPGCEKLGKCLTPPESIPKKCLWSH

SEQ ID NO: 2136 - DNA, 12793 bp, Homo sapiens
atgatttacaggaagaccatgtactcagctgcagcttctaaatccagaacgatttgcacgtcttatcaaggaagtaatgaatacattctggcctggcagagaattgattgttcaatggtatccatttgatgaaaacagaaatcacccatctgtttcatggcttaagatggtttggaaaaatctttatatacatttttcagaggatttgactttatttgatgagatgccacttatccccagaactatactagaggaaggtcagacatgtgtggaactcattagactcaggattccatcgttagtcattttagacgatgaatctgaagcacagcttccagaatttttagcagacattgtacaaaaacttggagggtttgtccttaaaaaattagatgcatctatacaacatccgcttattaaaaaatatattcattcaccattaccaagtgctgttttgcagataatggagaagatgccattgcagaaattgtgtaatcaaataacttcgctacttccaacacacaaagatgccctgaggaagttcttggctagtttaaccgatagcagtgagaaagagaaaagaattattcaagaattggcaatattcaagcgcattaaccattcttctgatcagggaatttcctcttatacaaaattgaaaggttgtaaagtcttacaccatactgccaaactcccagcagatctgcgactttctatttcagtaatagacagtagtgatgaagctactattcgtctggcaaacatgttgaaaatagaacagttaaagaccactagctgcttaaagcttgttttaaaagatattgaaaatgcattttattcacatgaagaggtaacacagcttatgttatgggtccttgagaatctatcttctcttaaaaatgagaatccaaatgtgcttgagtggttaacaccattaaaattcatccagatatcacaggaacagatggtatcagctggtgaactctttgaccctgatatagaagtactaaaggatctcttttgtaatgaagaaggaacctatttcccaccctcagtttttacctcaccagatattcttcactccttaagacagattggtttaaaaaacgaagccagtctcaaagaaaaggatgttgtgcaagtggcaaaaaaaattgaagccttacaggtcggtgcttgtcctgatcaagatgttcttctgaagaaagccaaaaccctcttactggttttaaataagaatcacacactgttgcaatcatctgaaggaaagatgacattgaagaaaataaaatgggttccagcctgcaaggaaaggcctccaaattatccaggctctttggtctggaaaggagatctctgtaatctctgtgcaccaccagatatgtgtgatgtaggccatgcaattctcattggctcctcacttcctcttgttgaaagtatccatgtaaacctggaaaaagcattagggatcttcacaaaacctagccttagtgctgtcttaaaacactttaaaattgttgttgattggtattcttcaaaaacctttagtgatgaagactactatcaattccagcatattttgcttgagatttacggattcatgcatgatcatctaaatgaagggaaagattcttttagagccttaaaatttccatgggtttggactggcaaaaagttttgtccacttgcccaggctgtgattaaaccaatccatgatcttgaccttcagccttatttgcataatgtacctaaaaccatggcaaaattccaccaactatttaaggtctgtggttcaatagaggagttgacatcagatcatatttccatggttattcagaagatatatctcaaaagtgaccaagatctcagtgaacaagaaagcaaacaaaatcttcatcttatgttgaatattatcagatggctgtatagcaatcagattccagcaagccccaacacaccagttcctatacatcatagcaaaaatccttctaaacttatcatgaagccaattcacgaatgctgttattgtgacattaaagttgatgaccttaatgacttacttgaagattctgtggaaccaatcattttggtgcatgaggacatacccatgaaaactgcagaatggctaaaagttccatgccttagtacaagactgataaatcctgaaaacatgggatttgagcagtcaggacaaagagagccacttactgtaagaattaaaaatattctggaagaatacccttcagtgtcagatatttttaaagaactacttcaaaacgctgatgatgcaaatgcaacagaatgcagtttcttgattgatatgagaagaaatatggacataagagagaatctcctagacccagggatggcagcttgtcatggacctgctttgtggtcattcaacaattctcaattctcagattcagattttgtgaacataactaggttaggagaatctttaaaaaggggagaagttgacaaagttggaaaatttggtcttggatttaattctgtgtaccatatcactgacattcccatcattatgagtcgggaattcatgataatgttcgatccaaacataaatcatatcagtaaacacattaaagacaaatccaatcctgggatcaaaattaattggagtaaacaacagaaaagacttagaaaatttcctaatcagttcaaaccatttatagatgtatttggctgtcagttacctttgactgtagaagcaccttacagctataatggaacccttttccgactgtcctttagaactcaacaggaagcaaaagtgagtgaagttagtagtacgtgctacaatacagcagatatttattctcttgtggatgaatttagtctctgtggacacaggcttatcattttcactcagagtgtaaagtcaatgtatttgaagtacttgaaaattgaggaaaccaaccccagtttagcacaagatacagtaataattaaaaaaaaatcctgctcttccaaagcattgaacacacctgtcttaagtgttttaaaagaggctgctaagctcatgaagacttgcagcagcagtaataaaaagcttcccagtgatgaaccaaagtcatcttgcattcttcagatcacagtggaagaatttcaccatgtgttcagaaggattgctgatttacagtcgccactttttagaggtccagatgatgacccagctgctctctttgaaatggctaagtctggccaatcaaaaaagccatcagatgagttgtcacagaaaacagtagagtgtaccacgtggcttctgtgtacttgcatggacacaggagaggctctgaagttttccctgagtgagagtggaagaagactaggactggttccatgtggggcagtaggagttcagctgtcagaaatccaggaccagaagtggacagtgaaaccacacattggagaggtgttttgctatttacctttacgaataaaaacaggcttgccagttcatatcaatgggtgctttgctgttacatcaaataggaaagaaatctggaaaacagatacaaaaggacgatggaataccacgttcatgagacatgttattgtgaaagcttacttacaggtactgagtgtcttacgggacctggccactagtggggagctaatggattatacttactatgcagtatggcccgatcctgatttagttcatgatgatttttctgtaatttgccaaggattttatgaagatatagctcatggaaaagggaaagaactgaccaaagtcttctctgatggatctacttgggtttccatgaagaacgtaagatttctagatgactctatacttaaaagaagagatgttggttcagcagccttcaagatatttttgaaatacctcaagaagactgggtccaaaaacctttgtgctgttgaacttccttcttcggtaaaattaggatttgaagaagctggctgcaaacagatactacttgaaaacacattttcagagaaacagtttttttctgaagtgttttttccaaatattcaagaaattgaagcagaacttagagatcctttaatgatctttgttctaaatgaaaaagttgatgagttctcgggagttcttcgtgttactccatgtattccttgttccttggaggggcatcctttggttttgccatcaagattgatccaccccgaaggacgagttgcaaagttatttgatattaaagatgggagattcccttatggttctactcaggattatctcaatcctattattttgattaaactagttcagttaggtatggcaaaagatgatattttatgggatgatatgctagaacgtgcagtgtcagtagctgaaattaataaaagtgatcatgttgctgcatgcctaagaagtagtatcttattgagtcttatcgatgagaaactaaaaataagggatcctagagcaaaggattttgctgcaaaatatcaaacaatccgcttccttccatttctgacaaaaccagcaggtttttctttggactggaaaggcaacagttttaagcctgaaaccatgtttgcagcaactgacctttatacagctgaacatcaagatatagtttgtcttttgcaaccaattctaaatgaaaattcccattcttttagaggttgtggttcagtgtcattggctgttaaagagtttttgggattactcaagaagccaacagttgatctggttataaaccaattgaaagaagtagcaaaatcagttgatgatggaattacactgtaccaggagaatatcaccaatgcttgctacaaataccttcatgaagccttgatgcaaaatgaaatcactaagatgtcaattattgataagttaaaaccctttagcttcattctagttgagaatgcatatgttgactcagaaaaggtttcttttcatttaaattttgaggcggcaccatacctttatcagttgcctaataagtataaaaataatttccgcgaactttttgaaaccgtgggtgtgaggcagtcatgcactgttgaagattttgctcttgttttggaatctattgatcaagaaagaggaacaaagcaaataacagaagagaattttcagctttgccgacgaataatcagtgaaggaatatggagtctcattagagaaaagaaacaagaattttgtgagaaaaattatggcaagatattattgccagatactaatcttatgcttctccctgctaaatcgttatgctacaatgattgcccttggataaaagtaaaggataccactgtaaaatattgtcatgctgacatacccagggaagtagcagtaaaactaggagcagtcccaaagcgacacaaagccttagaaagatatgcatccaatgtctgttttacaacacttggcacagaatttgggcagaaagaaaaattgaccagcagaattaagagcatccttaatgcatatccttctgaaaaggaaatgttgaaagagcttcttcaaaatgctgatgatgcaaaggcgacagaaatctgttttgtgtttgatcctagacagcatccagttgatagaatatttgatgataagtgggccccattgcaagggccagcactttgtgtgtacaacaaccagccatttacagaagatgatgttagaggaattcagaatcttggaaaaggcacgaaagagggaaatccttataaaactggacagtatggaataggattcaattctgtgtatcatatcacagactgcccatcttttatttctggcaatgacatcctgtgtatttttgatcctcatgccagatatgcaccaggggccacatccattagtcccggacgcatgtttagagatttggatgcagattttaggacacagttctcagatgttctggatctttatctgggaacccattttaaactggataattgcacaatgttcagatttcctcttcgtaatgcagaaatggcaaaagtttcggaaatttcgtctgttccagcatcagacagaatggtccagaatcttttggacaaactgcgctcagatggggcagaacttctaatgtttcttaatcacatggaaaaaatttctatttgtgaaatagataagagtactggagctctaaatgtgctgtattcagtaaagggcaaaatcacagatggagacagattgaaaaggaaacaatttcatgcatctgtaattgatagtgttactaaaaagaggcagctcaaagacataccagttcaacaaataacctatactatggatactgaggactctgaaggaaatcttactacgtggctaatttgtaatagatcaggcttttcaagtatggagaaagtatctaaaagtgtcatatcagctcacaagaaccaagatattactcttttcccacgtggtggagtagctgcctgcattactcacaactataaaaaaccccatagggccttctgttttttgcctctttctttggagactgggctgccatttcatgtgaatggccactttgcactggattcagccagaaggaacctgtggcgtgatgataatggagttggtgttcgaagtgactggaataacagtttaatgacagcattaatagctcctgcatatgttgaattgctaatacagttaaaaaaacggtatttccctggttctgatccaacattatcagtgttacagaacacccctattcatgttgtaaaggacactttaaagaagtttttatcgtttttcccagttaaccgtcttgatctacagccagatttatattgtctagtgaaagcactttacaattgcattcacgaagacatgaaacgtcttttacctgttgtgcgggctccaaatattgatggctctgacttgcactctgcagttataattacttggatcaatatgtctacttctaataaaactagaccattttttgacaatttactacaggatgaattacaacaccttaaaaatgcagattataatatcaccacacgcaaaacagtagcagagaatgtctataggctgaaacatctccttttagaaattggtttcaacttggtttataactgtgatgaaactgctaatctttaccactgtcttatagatgcagatattcctgttagttatgtgacccctgctgatatcagatcttttttaatgacattttcctctcctgacactaattgccatattgggaagctgccttgtcgtctgcagcagactaatctaaaactttttcatagtttaaaacttttagttgattattgttttaaagatgcagaagaaaatgagattgaagttgagggattgccccttctcatcacactggacagtgttttgcaaacttttgatgcaaaacgacccaagtttctaacaacatatcatgaattgattccatcccgcaaagacttgtttatgaatacattatatttgaaatatagtaatattttattgaactgtaaagttgcaaaagtgtttgacatttccagctttgctgatttgttatcctctgtgttgcctcgagaatataagaccaaaagttgcacaaagtggaaagacaattttgcaagtgagtcttggcttaagaatgcatggcattttattagtgaatctgtaagtgtgaaagaagatcaggaagaaacaaaaccaacatttgacattgttgttgatactctaaaagactgggcattgcttccaggaacaaagtttactgtttcagccaaccagcttgtggttcctgaaggagatgttctgcttcctctcagccttatgcacattgcagtttttccaaatgcccagagtgataaagtttttcatgctctaatgaaagccggctgtattcagcttgctttgaacaaaatctgttccaaagacagtgcatttgttcctttgttgtcatgtcacacagcaaatatagagagccccacaagcatcttgaaggctctacattatatggtccaaacttcaacatttagagcagaaaaattagtagaaaatgattttgaggcacttttgatgtatttcaactgcaatttgaatcatttgatgtcccaagatgatataaaaattctaaagtcacttccgtgctataaatccatcagtggccgctatgtaagcattggaaaatttggaacatgctacgtacttacaaaaagtatcccttcagctgaagtggagaaatggacacaatcatcatcatctgcatttcttgaagaaaaaatacacttaaaagaactatatgaggtgattggttgtgtacctgtagatgatcttgaggtatatttgaaacacctcttaccaaaaattgaaaatctctcttatgatgcaaaattagagcacttgatctaccttaagaatagattatcaagtgctgaggaattatcagagattaaggaacaactttttgaaaaactggaaagtttattgataatccatgatgctaacagtagactaaagcaagcaaagcatttctatgatagaactgtgagagtttttgaagttatgcttcctgaaaaattgtttattcctaatgatttctttaagaaattggaacaacttataaaacccaaaaatcatgttacatttatgacatcctgggtggaattcttaagaaatattggactaaaatacatactttctcagcagcagttgttacagtttgctaaggaaatcagtgtgagggctaatacagaaaactggtccaaagaaacattgcaaaatacagttgatatccttctgcatcatatattccaagaacgaatggatttgttatctggaaattttctgaaagaactatctttaataccattcttatgtcctgagcgggcccccgcggaattcattagatttcatcctcaatatcaagaggtaaatggaacacttcctcttataaagttcaatggagcacaggtaaatccaaaattcaagcaatgtgatgtactccagctgttatggacatcctgccctattcttccagagaaagctacacccttaagcattaaagaacaagaaggtagtgaccttggtccacaagaacagcttgaacaagttttaaatatgcttaatgttaacctggatcctcctcttgataaggtaatcaataactgcagaaacatatgcaacataacgacgttggatgaagaaatggtaaaaactagagcaaaagtcttaaggagcatatatgaattcctcagtgcagaaaaaagggaatttcgttttcagttgcgaggggttgcttttgtgatggtagaagatggttggaaacttctgaagcctgaggaggtagtcataaacctagaatatgaatctgattttaaaccttatttgtacaagctacctttagaacttggcacatttcaccagttgttcaaacacttaggtactgaagatattatttcaactaagcaatatgttgaagtgttgagccgcatatttaaaaattctgagggcaaacaattagatcctaatgaaatgcgtacagttaagagagtagtttctggtctgttcaggagtctacagaatgattcagtcaaggtgaggagtgatctcgagaatgtacgagaccttgcgctttacctcccaagccaggatggtagattggtaaagtcaagcatcttagtgtttgacgatgcgccacattataaaagtagaatccaggggaatattggtgtgcaaatgttagttgatctcagccagtgctacttagggaaagaccatggatttcacactaagttgataatgctctttcctcaaaaacttagacctcgattattgagcagtatacttgaagaacaattagatgaagagactcccaaagtttgtcagtttggagcgttgtgttctcttcaaggaagattgcagttactcttgtcttctgaacagttcattacaggactgattagaattatgaagcatgaaaatgataatgcttttctggccaatgaagaaaaagccataagactttgcaaagccctaagagaaggattgaaagtatcctgctttgaaaagcttcaaacaacattaagagttaaaggttttaatcctattccccacagcagaagtgaaacttttgcttttttgaagcgatttggtaatgcagtcatcttgctctacattcaacattcagacagtaaagacattaatttcctgttagcactggcaatgactcttaaatcagcaactgacaatttgatttctgacacttcatatttaattgctatgctaggatgcaatgatatttacaggattggtgagaaacttgacagtttaggagtgaaatatgactcttcggagccatcaaaactggaacttccaatgcctggcacaccaattcctgctgaaattcattacactctgcttatggacccaatgaatgttttttacccgggagaatatgttgggtaccttgttgatgctgaaggtggtgatatctatggatcataccagccaacatacacatatgcaattattgtacaagaagttgaaagagaagatgctgacaattctagttttctaggaaagatatatcagatagatattggttatagtgaatataaaatagttagctctcttgatctgtataagttttcaagacctgaggaaagctctcaaagcagggacagtgctccttctacaccaaccagccccactgagttcctcacccctggcctgagaagcattcctcctcttttctctggtagagagagccacaagacttcttccaaacatcagtcccccaaaaagcttaaggttaattctttaccagaaatcttaaaagaagtgacatctgtggtggagcaagcatggaagcttccagaatcggaacgaaaaaagattattaggcggttgtatttgaaatggcatcctgacaaaaatccagagaaccatgacattgccaatgaagtttttaaacatttgcagaatgaaatcaacagattagaaaaacaggcttttctagatcaaaatgcagacagggcctccagacgaacattttcaacctcagcatcccgatttcagtcagacaaatactcatttcagagattctatacttcatggaatcaagaagcaacgagccataaatctgaaagacagcaacagaacaaagaaaaatgccccccttcagccggacagacttactctcaaaggttctttgttcctcccactttcaagtcggttggcaatccagtggaagcacgcagatggctaagacaagccagagcaaacttctcagctgccaggaatgaccttcataaaaatgccaatgagtgggtgtgctttaaatgttacctttctaccaagttagctttgattgcagctgactatgctgtgaggggaaagtctgataaagatgtaaaaccaactgcacttgctcagaaaatagaggaatatagtcagcaacttgaaggactgacaaatgatgttcacacattggaagcttatggtgtagacagtttaaaaacaagataccctgatttgcttccctttcctcagatcccaaatgacaggttcacttctgaggttgctatgagggtgatggaatgtactgcctgtatcataataaaacttgaaaattttatgcaacaaaaagtgtgaagatatttaacgaaaaaaaaggtagatcttgaatgtgttgtagcacgaataaattgctgtacttcattaagcttcattgccaattagctaggaattgttaagcacattgcagattgttcttggagaattctggagttgttatgaacatgaataccaacggaaaaccttaactgaatctaaaagaaaactattttgaagatggtggtgagctgcaaaatagctggatggatttgaatgattgggatgatacatcattgaactgcactttatataaccaaagcttagcagtttgttagataagagtctatgtatgtctctggttaggatgaagttaattttatgtttttaacatggtatttttgaaggagctaatgaaacactggacatataattggtttaaacataaggggaattaagtctttgtagtctgtcatttttttaagtggatcctcttggatgcgttattttctcatcagctggctctgatcatgaatttgttgtaattttatgttgtactcagtgcatttaagaaatggtagagtattttaatcctattacttgactaagagtgtgaaggtagtactttttagagtgcactgagtgcactttacatctttatttaaatttttttttaacatcttatgtttacaggcttcctgtttgatgaagatagcaacggaaaactcaaaatggtggcagttcttattaccagttgttagtattgtttctggaaactgcttgccaagacaacatttattaactgttagaacacttgctttatgtttgtgtgtacatattttccacaaatgttataatttatatagtgtggttgaacaggatgcaatcttttgttgtctaaaggtgctgcagttaaaaaaaaaacaaccttttctttcaatatggcatgtagtggagtttttttaactttaaaaacatcaaaaattgttaaaatcattgtgttatctagtagtttataattatcggcttatatttccccatgaatgatcagaactgacatttaattcatgtttgtctcgccatgcttctttactttaacatatttcttttgcagaatgtaaaaggtaatgataattagtttatataagtgtactggctgtaaatgatgctaaatatactttatgcaattaagggcttacagaacatgttgaaactttttttacttttattgggaataaggaatgtttgcacctccacattttattgctt

SEQ ID NO: 2137 - protein, 3829 aa, Homo sapiens
MNTFWPGRELIVQWYPFDENRNHPSVSWLKMVWKNLYIHFSEDLTLFDEMPLIPRTILEEGQTCVELIRLRIPSLVILDDESEAQLPEFLADIVQKLGGFVLKKLDASIQHPLIKKYIHSPLPSAVLQIMEKMPLQKLCNQITSLLPTHKDALRKFLASLTDSSEKEKRIIQELAIFKRINHSSDQGISSYTKLKGCKVLHHTAKLPADLRLSISVIDSSDEATIRLANMLKIEQLKTTSCLKLVLKDIENAFYSHEEVTQLMLWVLENLSSLKNENPNVLEWLTPLKFIQISQEQMVSAGELFDPDIEVLKDLFCNEEGTYFPPSVFTSPDILHSLRQIGLKNEASLKEKDVVQVAKKIEALQVGACPDQDVLLKKAKTLLLVLNKNHTLLQSSEGKMTLKKIKWVPACKERPPNYPGSLVWKGDLCNLCAPPDMCDVGHAILIGSSLPLVESIHVNLEKALGIFTKPSLSAVLKHFKIVVDWYSSKTFSDEDYYQFQHILLEIYGFMHDHLNEGKDSFRALKFPWVWTGKKFCPLAQAVIKPIHDLDLQPYLHNVPKTMAKFHQLFKVCGSIEELTSDHISMVIQKIYLKSDQDLSEQESKQNLHLMLNIIRWLYSNQIPASPNTPVPIHHSKNPSKLIMKPIHECCYCDIKVDDLNDLLEDSVEPIILVHEDIPMKTAEWLKVPCLSTRLINPENMGFEQSGQREPLTVRIKNILEEYPSVSDIFKELLQNADDANATECSFLIDMRRNMDIRENLLDPGMAACHGPALWSFNNSQFSDSDFVNITRLGESLKRGEVDKVGKFGLGFNSVYHITDIPIIMSREFMIMFDPNINHISKHIKDKSNPGIKINWSKQQKRLRKFPNQFKPFIDVFGCQLPLTVEAPYSYNGTLFRLSFRTQQEAKVSEVSSTCYNTADIYSLVDEFSLCGHRLIIFTQSVKSMYLKYLKIEETNPSLAQDTVIIKKKSCSSKALNTPVLSVLKEAAKLMKTCSSSNKKLPSDEPKSSCILQITVEEFHHVFRRIADLQSPLFRGPDDDPAALFEMAKSGQSKKPSDELSQKTVECTTWLLCTCMDTGEALKFSLSESGRRLGLVPCGAVGVQLSEIQDQKWTVKPHIGEVFCYLPLRIKTGLPVHINGCFAVTSNRKEIWKTDTKGRWNTTFMRHVIVKAYLQVLSVLRDLATSGELMDYTYYAVWPDPDLVHDDFSVICQGFYEDIAHGKGKELTKVFSDGSTWVSMKNVRFLDDSILKRRDVGSAAFKIFLKYLKKTGSKNLCAVELPSSVKLGFEEAGCKQILLENTFSEKQFFSEVFFPNIQEIEAELRDPLMIFVLNEKVDEFSGVLRVTPCIPCSLEGHPLVLPSRLIHPEGRVAKLFDIKDGRFPYGSTQDYLNPIILIKLVQLGMAKDDILWDDMLERAVSVAEINKSDHVAACLRSSILLSLIDEKLKIRDPRAKDFAAKYQTIRFLPFLTKPAGFSLDWKGNSFKPETMFAATDLYTAEHQDIVCLLQPILNENSHSFRGCGSVSLAVKEFLGLLKKPTVDLVINQLKEVAKSVDDGITLYQENITNACYKYLHEALMQNEITKMSIIDKLKPFSFILVENAYVDSEKVSFHLNFEAAPYLYQLPNKYKNNFRELFETVGVRQSCTVEDFALVLESIDQERGTKQITEENFQLCRRIISEGIWSLIREKKQEFCEKNYGKILLPDTNLMLLPAKSLCYNDCPWIKVKDTTVKYCHADIPREVAVKLGAVPKRHKALERYASNVCFTTLGTEFGQKEKLTSRIKSILNAYPSEKEMLKELLQNADDAKATEICFVFDPRQHPVDRIFDDKWAPLQGPALCVYNNQPFTEDDVRGIQNLGKGTKEGNPYKTGQYGIGFNSVYHITDCPSFISGNDILCIFDPHARYAPGATSISPGRMFRDLDADFRTQFSDVLDLYLGTHFKLDNCTMFRFPLRNAEMAKVSEISSVPASDRMVQNLLDKLRSDGAELLMFLNHMEKISICEIDKSTGALNVLYSVKGKITDGDRLKRKQFHASVIDSVTKKRQLKDIPVQQITYTMDTEDSEGNLTTWLICNRSGFSSMEKVSKSVISAHKNQDITLFPRGGVAACITHNYKKPHRAFCFLPLSLETGLPFHVNGHFALDSARRNLWRDDNGVGVRSDWNNSLMTALIAPAYVELLIQLKKRYFPGSDPTLSVLQNTPIHVVKDTLKKFLSFFPVNRLDLQPDLYCLVKALYNCIHEDMKRLLPVVRAPNIDGSDLHSAVIITWINMSTSNKTRPFFDNLLQDELQHLKNADYNITTRKTVAENVYRLKHLLLEIGFNLVYNCDETANLYHCLIDADIPVSYVTPADIRSFLMTFSSPDTNCHIGKLPCRLQQTNLKLFHSLKLLVDYCFKDAEENEIEVEGLPLLITLDSVLQTFDAKRPKFLTTYHELIPSRKDLFMNTLYLKYSNILLNCKVAKVFDISSFADLLSSVLPREYKTKSCTKWKDNFASESWLKNAWHFISESVSVKEDQEETKPTFDIVVDTLKDWALLPGTKFTVSANQLVVPEGDVLLPLSLMHIAVFPNAQSDKVFHALMKAGCIQLALNKICSKDSAFVPLLSCHTANIESPTSILKALHYMVQTSTFRAEKLVENDFEALLMYFNCNLNHLMSQDDIKILKSLPCYKSISGRYVSIGKFGTCYVLTKSIPSAEVEKWTQSSSSAFLEEKIHLKELYEVIGCVPVDDLEVYLKHLLPKIENLSYDAKLEHLIYLKNRLSSAEELSEIKEQLFEKLESLLIIHDANSRLKQAKHFYDRTVRVFEVMLPEKLFIPNDFFKKLEQLIKPKNHVTFMTSWVEFLRNIGLKYILSQQQLLQFAKEISVRANTENWSKETLQNTVDILLHHIFQERMDLLSGNFLKELSLIPFLCPERAPAEFIRFHPQYQEVNGTLPLIKFNGAQVNPKFKQCDVLQLLWTSCPILPEKATPLSIKEQEGSDLGPQEQLEQVLNMLNVNLDPPLDKVINNCRNICNITTLDEEMVKTRAKVLRSIYEFLSAEKREFRFQLRGVAFVMVEDGWKLLKPEEVVINLEYESDFKPYLYKLPLELGTFHQLFKHLGTEDIISTKQYVEVLSRIFKNSEGKQLDPNEMRTVKRVVSGLFRSLQNDSVKVRSDLENVRDLALYLPSQDGRLVKSSILVFDDAPHYKSRIQGNIGVQMLVDLSQCYLGKDHGFHTKLIMLFPQKLRPRLLSSILEEQLDEETPKVCQFGALCSLQGRLQLLLSSEQFITGLIRIMKHENDNAFLANEEKAIRLCKALREGLKVSCFEKLQTTLRVKGFNPIPHSRSETFAFLKRFGNAVILLYIQHSDSKDINFLLALAMTLKSATDNLISDTSYLIAMLGCNDIYRIGEKLDSLGVKYDSSEPSKLELPMPGTPIPAEIHYTLLMDPMNVFYPGEYVGYLVDAEGGDIYGSYQPTYTYAIIVQEVEREDADNSSFLGKIYQIDIGYSEYKIVSSLDLYKFSRPEESSQSRDSAPSTPTSPTEFLTPGLRSIPPLFSGRESHKTSSKHQSPKKLKVNSLPEILKEVTSVVEQAWKLPESERKKIIRRLYLKWHPDKNPENHDIANEVFKHLQNEINRLEKQAFLDQNADRASRRTFSTSASRFQSDKYSFQRFYTSWNQEATSHKSERQQQNKEKCPPSAGQTYSQRFFVPPTFKSVGNPVEARRWLRQARANFSAARNDLHKNANEWVCFKCYLSTKLALIAADYAVRGKSDKDVKPTALAQKIEEYSQQLEGLTNDVHTLEAYGVDSLKTRYPDLLPFPQIPNDRFTSEVAMRVMECTACIIIKLENFMQQKV

SEQ ID NO: 2138 - DNA, 2641 bp, Homo sapiens
ggccggtggcccgggcccgaccaccccagctgcgcgtcgttactggccacaagtttgctctgggccagccaagttggcaacttggaagcttctcccgggctctggaggagggtccctgcttcttcctacagccgttccgggcatggccgggctgggggcgtcgctccacgtctggggttggctaatgctcggcagctgcctcctggccagagcccagctggattctgatggcaccattactatagaggagcagattgtccttgtgctgaaagcgaaagtacaatgtgaactcaacatcacagctcaactccaggagggagaaggtaattgtttccctgaatgggatggactcatttgttggcccagaggaacagtggggaaaatatcggctgttccatgccctccttatatttatgacttcaaccataaaggagttgctttccgacactgtaaccccaatggaacatgggattttatgcacagcttaaataaaacatgggccaattattcagactgccttcgctttctgcagccagatatcagcataggaaagcaagaattctttgaacgcctctatgtaatgtataccgttggctactccatctcttttggttccttggctgtggctattctcatcattggttacttcagacgattgcattgcactaggaactatatccacatgcacttatttgtgtctttcatgctgagagctacaagcatctttgtcaaagacagagtagtccatgctcacataggagtaaaggagctggagtccctaataatgcaggatgacccacaaaattccattgaggcaacttctgtggacaaatcacaatatatcgggtgcaagattgctgttgtgatgtttatttacttcctggctacaaattattattggatcctggtggaaggtctctacctgcataatctcatctttgtggctttcttttcggacaccaaatacctgtggggcttcatcttgataggctgggggtttccagcagcatttgttgcagcatgggctgtggcacgagcaactctggctgatgcgaggtgctgggaacttagtgctggagacatcaagtggatttatcaagcaccgatcttagcagctattgggctgaattttattctgtttctgaatacggttagagttctagctaccaaaatctgggagaccaatgcagttgggcatgacacaaggaagcaatacaggaaactggccaaatcgacactggtcctggtcctagtctttggagtgcattacatcgtgttcgtatgcctgcctcactccttcactgggctcgggtgggagatccgcatgcactgtgagctcttcttcaactcctttcagggtttctttgtgtctatcatctactgctactgcaatggagaggttcaggcagaggtgaagaagatgtggagtcggtggaatctctccgtggactggaaaaggacaccgccatgtggcagccgcagatgcggctcagtgctcaccaccgtgacgcacagcaccagcagccagtcacaggtggcggccagcacacgcatggtgcttatctctggcaaagctgccaagatcgccagcagacagcctgacagccacatcactttacctggctatgtctggagtaactcagagcaggactgcctgccacactctttccacgaggagaccaaggaagatagtgggaggcagggagatgatattctaatggagaagccttccaggcctatggaatctaacccagacactgaaggatgccaaggagaaactgaggatgttctctgaatggacatttgtggctgactttcatgggctggtccaatggctggttgtgtgagagggcttggctgatactcctatgcttgagttcaaaggctgaaaattcagttaaggtgttacttaataatagtttttaggctccatgaattggctcctgtaaatactaacgacatgaaaatgcaagtgtcaatggagtagtttattaccttctattggcatcaagttttcctctaaattaatgtatggtatttgctctgtgattgttcatttttttctgctacttttgggtagaaaaaagattcaattgcttggctgtagctttctctcatatatatcaccctaaatataatgaagatcttttagtgtgtatcattttccttttagaaactagtattctcttatttcttactttaatgtacttctatcactgcatttattttgcctgtgcataggagcaattaggatctaaaaaaatatatgggaagataaaagatctaagaacaagtacttgctggaaaattagttggctggacattgataaaataatgcatttataacaattacatgtgtttttgggaacaaggaaaatttctcaaaaaagaatatttcacacatcccttcttttgaatggcctctttgtgaccagccagacctcaggtcttcactctttcttctttgtaaaccatgtcatgtggaaagatttcctcagttagtgagcttgtgtctgcaaattgattttgtttgtaatgtattttgatagcaaatcatgctgcatctatatctttttcttgtttgagctgttactacattgtacatggcatgtgggatcaattaaaaatttgttttaaaaat

SEQ ID NO: 2139 - protein, 550 aa, Homo sapiens
MAGLGASLHVWGWLMLGSCLLARAQLDSDGTITIEEQIVLVLKAKVQCELNITAQLQEGEGNCFPEWDGLICWPRGTVGKISAVPCPPYIYDFNHKGVAFRHCNPNGTWDFMHSLNKTWANYSDCLRFLQPDISIGKQEFFERLYVMYTVGYSISFGSLAVAILIIGYFRRLHCTRNYIHMHLFVSFMLRATSIFVKDRVVHAHIGVKELESLIMQDDPQNSIEATSVDKSQYIGCKIAVVMFIYFLATNYYWILVEGLYLHNLIFVAFFSDTKYLWGFILIGWGFPAAFVAAWAVARATLADARCWELSAGDIKWIYQAPILAAIGLNFILFLNTVRVLATKIWETNAVGHDTRKQYRKLAKSTLVLVLVFGVHYIVFVCLPHSFTGLGWEIRMHCELFFNSFQGFFVSIIYCYCNGEVQAEVKKMWSRWNLSVDWKRTPPCGSRRCGSVLTTVTHSTSSQSQVAASTRMVLISGKAAKIASRQPDSHITLPGYVWSNSEQDCLPHSFHEETKEDSGRQGDDILMEKPSRPMESNPDTEGCQGETEDVL

SEQ ID NO: 2140 - DNA, 2425 bp, Homo sapiens
atgtggtggagagttctcagcttgctggcatggttccccttgcaagaggcctctctgactaaccacacagaaaccatcaccgtggaggaaggccagacgctcactctaaagtgtgtcacttctctgaggaagaactcctccctccagtggctgaccccctcagggttcaccatttttttaaatgagtatcctgctttaaaaaattccaaataccagcttcttcatcactcggccaatcagctctccatcactgtgcctaacgtaaccctgcaagatgaaggcgtgtacaagtgcttacattacagcgactctgtaagcacaaaggaagtgaaagtgattgtgctggcaactcctttcaagccaatcctggaagcttcagttatcagaaagcaaaatggagaagaacatgttgtactcatgtgctccaccatgagaagcaagccccctccgcagataacctggctacttgggaatagcatggaagtgtccggtggaacgctccatgaatttgaaactgatgggaagaaatgtaatactaccagcactctcataatccacacttatggcaaaaattcaacggtggactgcattatccgacacagaggcctgcaagggagaaaactagtagcacccttccggtttgaagatttggttactgatgaagagacagcttcagatgctctggagagaaactctctatcctctcaagacccacagcagcccaccagtactgtctcagtaacggaagattctagtacatcggagattgacaaggaagagaaagaacaaaccactcaagatcctgacttgaccaccgaagcaaatcctcagtatttaggactggcaagaaagaaaagtggcatcctgctgctcacgctggtgtccttcctcattttcatactcttcatcatagtccagctcttcatcatgaagctgaggaaagcacatgtgatatggaagagagaaaacgaagtttcagaacacacactagaaagttacagatcaaggtcaaataatgaagaaacatcatctgaagagaaaaatggccaatcttcccaccctatgcgttgcatgaactacatcacaaagttgtactcagaagcaaaaacaaagaggaaggaaaatgtacaacattcaaaattagaagaaaagcacatccaagtaccagagagtattgtgtagtgctctctgcaatggaacatgtgatttcagggttgccgcagtgtcacctcagtggaccagcctgggggaaggagcttaattgctgagacattaataatgacctcttagtgcaatgcaagatggtgtcctcggataatgatctgccccggagctagggcagcaacatgaggaccaaaccatgcacataaagcttgtagtttaaaaaagaaaagcaaaaaaataattatgcctgacactacttcagagcaggaggattctacgaagccttggggatcagggtcagtgtgagcagctaacatcctacctcaaatggaacaggattttttgatgctttgctctaatggaactgttttaaaaatttttttttctttttaatattttcttctggtcacaaaataaagaaatttgggatgcaaagtacctaaagatctctgatcctaagaagttacttctggccaggcgcggtggctcatgcctgtaatcctagcactttgggaggctgaggtaggcagatcacttgaggtcaggagttggagaccagcctggccaacatagtgaaaccccgtctctactaaaaatgcaaaaattagccaggcgtagtggtgcgcacctgtagtctcagatacttgggaggctgagggtggagaatcgcttgaacctgggaggtggagattgcagtgagtcaagatctcaccactgaactccagcctgggcgacagagggagactctgtctcaaaaaaaaagaagttacttccaagacagacttttaacatgtaaccagcacaaagcaatgtcagggaggagtgatacatgacaataaatgagtcagatgagcaagaaggccccagaacccatgccccaaggcacaaagaggagctcagggtaggcccaaagattcgaattccttagattactaaatcacatgagcggaccttgtctgtcagataagatttttacctggaaattccatgaccaatacatgtgcaaaagaaaatgatgggttgaatttactgattattgacctaatggatggctttttaaaatgttttaataaaaagcagaatagatgtttgtttttctagtggttataccaagctatacttcctgttttcacgtgtgaaagtaacatgggacatgcctttcttttccgatcagtttatttaagctatacagcaaactttggcatttatgtggagcatttctcattgttggaatctgaataaaccaattacaaaataaaaa

SEQ ID NO: 2141 - protein, 393 aa, Homo sapiens
MWWRVLSLLAWFPLQEASLTNHTETITVEEGQTLTLKCVTSLRKNSSLQWLTPSGFTIFLNEYPALKNSKYQLLHHSANQLSITVPNVTLQDEGVYKCLHYSDSVSTKEVKVIVLATPFKPILEASVIRKQNGEEHVVLMCSTMRSKPPPQITWLLGNSMEVSGGTLHEFETDGKKCNTTSTLIIHTYGKNSTVDCIIRHRGLQGRKLVAPFRFEDLVTDEETASDALERNSLSSQDPQQPTSTVSVTEDSSTSEIDKEEKEQTTQDPDLTTEANPQYLGLARKKSGILLLTLVSFLIFILFIIVQLFIMKLRKAHVIWKRENEVSEHTLESYRSRSNNEETSSEEKNGQSSHPMRCMNYITKLYSEAKTKRKENVQHSKLEEKHIQVPESIV

SEQ ID NO: 2142 - DNA, 1272 bp, Homo sapiens
gaattcggccaaagaggcctatgcttctctgaagacttgcagcaaggcttgctgaggctcacagaagatagccccagtgttttggagtggttttgaatgtgattctgagatcagactgactgagctggaatcctggctttatatcttaccagctacacaaccttggagtcttagaaattttttcttttcaataagcagtcatccttactttccctcaagatgacaaacagttcgttcttctgcccagtttataaagatctggagccattcacgtattttttttatttagttttccttgttggaattattggaagttgttttgcaacctgggcttttatacagaagaatacgaatcacaggtgtgtgagcatctacttaattaatttgcttacagccgatttcctgcttactctggcattaccagtgaaaattgttgttgacttgggtgtggcaccttggaagctgaagatattccactgccaagtaacagcctgcctcatctatatcaatatgtatttatcaattatcttcttagcatttgtcagcattgaccgctgtcttcagctgacacacagctgcaagatctaccgaatacaagaacccggatttgccaaaatgatatcaaccgttgtgtggctaatggtccttcttataatggtgccaaatatgatgattcccatcaaagacatcaaggaaaagtcaaatgtgggttgtatggagtttaaaaaggaatttggaagaaattggcatttgctgacaaatttcatatgtgtagcaatatttttaaatttctcagccatcattttaatatccaattgccttgtaattcgacagctctacagaaacaaagataatgaaaattacccaaatgtgaaaaaggctctcatcaacatacttttagtgaccacgggctacatcatatgctttgttccttaccacattgtccgaatcccgtataccctcagccagacagaagtcataactgattgctcaaccaggatttcactcttcaaagccaaagaggctacactgctcctggctgtgtcgaacctgtgctttgatcctatcctgtactatcacctctcaaaagcattccgctcaaaggtcactgagacttttgcctcacctaaagagaccaaggctcagaaagaaaaattaagatgtgaaaataatgcataaaagacaggattttttgtgctaccaattctggccttactggaccataaagttaattatagctttgaaagataaaaaaaaaaaaaaagcggccgc

SEQ ID NO: 2143 - protein, 319 aa, Homo sapiens
MTNSSFFCPVYKDLEPFTYFFYLVFLVGIIGSCFATWAFIQKNTNHRCVSIYLINLLTADFLLTLALPVKIVVDLGVAPWKLKIFHCQVTACLIYINMYLSIIFLAFVSIDRCLQLTHSCKIYRIQEPGFAKMISTVVWLMVLLIMVPNMMIPIKDIKEKSNVGCMEFKKEFGRNWHLLTNFICVAIFLNFSAIILISNCLVIRQLYRNKDNENYPNVKKALINILLVTTGYIICFVPYHIVRIPYTLSQTEVITDCSTRISLFKAKEATLLLAVSNLCFDPILYYHLSKAFRSKVTETFASPKETKAQKEKLRCENNA

SEQ ID NO: 2144 - DNA, 319 bp, Homo sapiens
tccagactgtgaaatcagcctctgggccaaggagggtcctacagacaaggtggcatctcaacctcacccaagaaacccccgggactttaccccagcaggctgccactggggcaccgaactaagccagctcagccttccaagctgcttagcctttgtcaaccatcaaagtggggaaagggtctctggccttgcaaggatttgggcaggatggaagtctttgtctaggtctgaaatcaagggcttgggaatctagagcagagctcctggccagcgtttgaagcctggcctcccacctggggcatttactgacaccctgtcg

SEQ ID NO: 2145 - DNA, 2438 bp, Homo sapiens
ccggcgggggcgccgcggagagcggagggcgccgggctgcggaacgcgaagcggagggcgcgggaccctgcacgccgcccgcgggcccatgtgagcgccatgcggcgccgcgcagcccggggacccggcccgccgcccccagggcccggactctcgcggttgccgctgctgccgctgccgctgctgctgctgctggcgctggggacccgcgggggctgcgccgcgcccgcacccgcgccgcgcgccgaggacctcagcctgggagtggagtggctaagcaggttcggttacctgcccccggctgaccccacaacagggcagctgcagacgcaagaggagctgtctaaggccatcacagccatgcagcagtttggtggcctggaggccaccggcatcctggacgaggccaccctggccctgatgaaaaccccacgctgctccctgccagacctccctgtcctgacccaggctcgcaggagacgccaggctccagcccccaccaagtggaacaagaggaacctgtcgtggagggtccggacgttcccacgggactcaccactggggcacgacacggtgcgtgcactcatgtactacgccctcaaggtctggagcgacattgcgcccctgaacttccacgaggtggcgggcagcaccgccgacatccagatcgacttctccaaggccgaccataacgacggctaccccttcgacggccccggcggcaccgtggcccacgccttcttccccggccaccaccacaccgccggggacacccactttgacgatgacgaggcctggaccttccgctcctcggatgcccacgggatggacctgtttgcagtggctgtccacgagtttggccacgccattgggttaagccatgtggccgctgcacactccatcatgcggccgtactaccagggcccggtgggtgacccgctgcgctacgggctcccctacgaggacaaggtgcgcgtctggcagctgtacggtgtgcgggagtctgtgtctcccacggcgcagcccgaggagcctcccctgctgccggagcccccagacaaccggtccagcgccccgcccaggaaggacgtgccccacagatgcagcactcactttgacgcggtggcccagatccgcggtgaagctttcttcttcaaaggcaagtacttctggcggctgacgcgggaccggcacctggtgtccctgcagccggcacagatgcaccgcttctggcggggcctgccgctgcacctggacagcgtggacgccgtgtacgagcgcaccagcgaccacaagatcgtcttctttaaaggagacaggtactgggtgttcaaggacaataacgtagaggaaggatacccgcgccccgtctccgacttcagcctcccgcctggcggcatcgacgctgccttctcctgggcccacaatgacaggacttatttctttaaggaccagctgtactggcgctacgatgaccacacgaggcacatggaccccggctaccccgcccagagccccctgtggaggggtgtccccagcacgctggacgacgccatgcgctggtccgacggtgcctcctacttcttccgtggccaggagtactggaaagtgctggatggcgagctggaggtggcacccgggtacccacagtccacggcccgggactggctggtgtgtggagactcacaggccgatggatctgtggctgcgggcgtggacgcggcagaggggccccgcgcccctccaggacaacatgaccagagccgctcggaggacggttacgaggtctgctcatgcacctctggggcatcctctcccccgggggccccaggcccactggtggctgccaccatgctgctgctgctgccgccactgtcaccaggcgccctgtggacagcggcccaggccctgacgctatgacacacagcgcgagcccatgagaggacagaggcggtgggacagcctggccacagagggcaaggactgtgccggagtccctgggggaggtgctggcgcgggatgaggacgggccaccctggcaccggaaggccagcagagggcacggcccgccagggctgggcaggctcaggtggcaaggacggagctgtcccctagtgagggactgtgttgactgacgagccgaggggtggccgctccagaagggtgcccagtcaggccgcaccgccgccagcctcctccggccctggagggagcatctcgggctgggggcccacccctctctgtgccggcgccaccaaccccacccacactgctgcctggtgctcccgccggcccacagggcctccgtccccaggtccccagtggggcagccctccccacagacgagccccccacatggtgccgcggcacgtcccccctgtgacgcgttccagaccaacatgacctctccctgctttgtaaaaaaaaaaaaaaaaaaa

SEQ ID NO: 2146 - protein, 606 aa, Homo sapiens
MRRRAARGPGPPPPGPGLSRLPLLPLPLLLLLALGTRGGCAAPAPAPRAEDLSLGVEWLSRFGYLPPADPTTGQLQTQEELSKAITAMQQFGGLEATGILDEATLALMKTPRCSLPDLPVLTQARRRRQAPAPTKWNKRNLSWRVRTFPRDSPLGHDTVRALMYYALKVWSDIAPLNFHEVAGSTADIQIDFSKADHNDGYPFDGPGGTVAHAFFPGHHHTAGDTHFDDDEAWTFRSSDAHGMDLFAVAVHEFGHAIGLSHVAAAHSIMRPYYQGPVGDPLRYGLPYEDKVRVWQLYGVRESVSPTAQPEEPPLLPEPPDNRSSAPPRKDVPHRCSTHFDAVAQIRGEAFFFKGKYFWRLTRDRHLVSLQPAQMHRFWRGLPLHLDSVDAVYERTSDHKIVFFKGDRYWVFKDNNVEEGYPRPVSDFSLPPGGIDAAFSWAHNDRTYFFKDQLYWRYDDHTRHMDPGYPAQSPLWRGVPSTLDDAMRWSDGASYFFRGQEYWKVLDGELEVAPGYPQSTARDWLVCGDSQADGSVAAGVDAAEGPRAPPGQHDQSRSEDGYEVCSCTSGASSPPGAPGPLVAATMLLLLPPLSPGALWTAAQALTL

SEQ ID NO: 2147 - DNA, 508 bp, Homo sapiens
gttccccgaaagacgaggctgcgcccggattccggtccgcagggagaccgaagggcacagctccccgcgccgcgcacgccgcccgagcccggagtgcggacacccccgggatgcttgcgccccagaggacccgcgccccaagcccccgcgccgcccccaggcccacccggagcatgctgcctgcagccatgaagggcctcggcctggcgctgctggccgtactgctgtgctcggcgcccgctcatggcctgtggtgccaggactgcaccctgaccaccaactccagccattgcaccccaaagcagtgccagccgtccgacacggtgtgtgccagtgtccgaatcaccgatcccagcagcagcaggaaggatcactcggtgaacaagatgtgtgcctcctcctgtgacttcgttaagcgacactttttctcagactatctgatggggtttattaactctgggatcttaaaggtcgacgtggactgctgcgagaaggatctgtgcaatgg

SEQ ID NO: 2148 - DNA, 655 bp, Homo sapiens
cctctcccgatcagtagctgagccctgcaggtcaccttctcctgacctattacaccactgatgcttatgctgggcacaattttatacccttgctgttgttcagtctaatcatccctataaccctatcggatcattcccatatgacagaggagaaaacctggggacacaggggctgtgtcctggaccaaggccttgcttgcagcaaaaggcagagctggggatctagccaggagccccagcacagtcctgattcttcccccactaaactgagctgtgaaatagatcatggcggtctggaaaacgagctaattccgtgccgatggaggtgttgatggatgtccaccactctccacttgggaggaggccttaaacatcccacctcaggtctagcttctctctgtgactgagtaccttgggaaagtgggctcagaggaggaaagggacttacttgcccaagggccacagactgccacgtggcaggtaagggaccgctattctcctgtccctttcacagaggacaggaggaacagtgaggacaggtgagagtacatgagattaagcctcataagctgcaagcaggcccagatcaagcttgcacacggtaggtgctgacctcaaatgcaggccatagaggggccaactcaggccctgagtc

SEQ ID NO: 2149 - DNA, 678 bp, Homo sapiens
aggctggagaactagtcctcgactcacgtgcaaggatgatgctgaaaggaatagcaaggcttatctctaggatccataagttggaccctgggcgttttttacacatggggacccaggctcgccaaagcattgctgctcacctagataaccaggttccagttgagagtccgagagctatttcccgcaccaatgagaatgacccggccaagcatggggatcagcacgagggtcagcactacaacatctccccccaggatttggagactgtatttccccatggccttcctcctcgcttgtgatgcaggtgaagacattcagtgaagcttgcctgatggtaaggaaaccagccctagaacttctgcattacctgaaaaacaccagttttgcttatccagctatacgatatcttctgtatggagagaagggaacaggaaaaaccctaagtcttgccatgttattcatttctgtgcaaaacaggactggctgatactacatattccagatgctcatctttgggtgaaaaatgtcgggatcttctgcagtccagctacaacaaacagcgctttgatcaacctttagaggcttcaacctggctgaagaatttcaaactacaaatgagcgcctcctgaaccagataaaagtccagagagttgtctggaataagagagaagcctggaa

SEQ ID NO: 2150 - DNA, 350 bp, Homo sapiens
  misc_feature (88)..(88): n is a, c, g, or t
  misc_feature (323)..(324): n is a, c, g, or t
  misc_feature (330)..(330): n is a, c, g, or t
  misc_feature (333)..(334): n is a, c, g, or t
  misc_feature (336)..(336): n is a, c, g, or t
  misc_feature (339)..(339): n is a, c, g, or t
  misc_feature (344)..(345): n is a, c, g, or t
  misc_feature (348)..(348): n is a, c, g, or t
gaaaacgctccctgtcacaaaggggggaacacatgggcgccggctgccggggcggcgatcttagggaactagggtcacctggagatcncgccaccgtctctgcccgctcgactcctccgcccgggccgctcggccggtccagccgcggccggcgcctggctgtgaggtggattcccggcccagtctgaccatctccctccagtttttccacttcgttcggaccttctcataactatgtccaccctctacgtctcccctcacccagatgccttccccagcctccgagccctcatagccgctcgctatggggaggctggggaggnncccggncgnngnggngcccnnccncg

SEQ ID NO: 2151 - DNA, 245 bp, Homo sapiens
  misc_feature (66)..(66): n is a, c, g, or t
ggaccctccccaccagctcagcctgtggaggcctcccaagattgtaggaataggcccatccctctntggccatggccccaagttcctgcacacaggagcacccacagagagacacacacaggacacaaaacccctggcacgttcagagacagaagccacagatacatcccggcacagacagacacacacgaggccagttcccttgcgtgtccagcccctccagacaccaccacttcagaaactct

SEQ ID NO: 2152 - DNA, 1677 bp, Homo sapiens
gaggcaaatatttattttcattactgcccaacagttttctaaagtgttgtactcttttaccctcccaccagcaatacgtagtaggtacagttgttctacattctcaccaacacttagtattttcagtctttttcattttggtcattctggtgaatgtgtagtggtatactactgtggttttaatttacatttccccgatgagtaggaatattgcttaccttttgatgtgtttattgaacatttggatatcttctttgtgttatgaccattcagacatttgttcagtttttattttacttattgatttctgagggctctttgtatattctagacatgagtattttgttagacatgtgtattataaagtgaatattttgttctaaacagtgtcttgaatttttactttatgttttactttgaatatgttggtaatcctagggacctgtgaaatatgagggaagtgtgcagcagagagaggaaactgtaaggcaagaagtggacccaccttaataaggggaaaacaagaatgacatttaacctgcagagcaatttcacttggagacaaggacagctggtcccttgaatattggatggtggcaaataagacatccaagcactaagagggcaggcagagaagagttgagaatgaagcaacagcatgcttatggtggctgatggccaggtagtgagtagacaagagtggggctctggacatagatggtctgaatttgagtcctgtctcccacctactaccatcttgtgaaggtacttaaccactccaagttcctaattttaaaaaagcaaaagtaggaataatgcgagcacctacttcatgggtttgttctaatggtatactacctatccccatttttcacatattgtgaatacttaatatataacatcaaaaactacaactcctatgctgggaaaatattagaacaaataatgtttgttgttgttaatatttgtttacttattggaattggcttcagagatactctacaaataactcttggggtagagatggatgttctagcagatttgggagtcaatcagaaattggctcctgtttcagaaagttacagttattatggacttgtgacatttctgttcagaagtctgtatctggcatcttcccgcacacatgtcttgctttcaagtgctgttcagttatgtttggaatgagaatggtggtctccctacttctgcttcacttcttccacaaccttgctgacttctaaatagtttcctgcttagaatccttaggaggaattaggatctcctttcagccctatcttgggactgacttacattcccacatgtgtccatgtgcccctagacaatctaaggagagtctagcttgccacacatgtgaaatcattcccagttcacaggtgggaagttatgggaatgaagaaaatgtgggggaggtagcaataaaactctctacttacatttcattgctgcatctgctataataaaatgagagccaagagcaacttattcccttgtgacatgatgacacacctctggatagatgtatattcagggatatgggtgggtggagaatgttacaaacactttctcttccctagtatcctattacctgtctgaagaagtacactgtgtaccttcgtatcactatgtcctataaaaaaaaaaaaaaaaccggaattc

SEQ ID NO: 2153 - DNA, 530 bp, Homo sapiens
  misc_feature (63)..(63): n is a, c, g, or t
  misc_feature (66)..(66): n is a, c, g, or t
  misc_feature (413)..(413): n is a, c, g, or t
  misc_feature (434)..(434): n is a, c, g, or t
  misc_feature (451)..(451): n is a, c, g, or t
  misc_feature (459)..(459): n is a, c, g, or t
  misc_feature (467)..(467): n is a, c, g, or t
  misc_feature (477)..(477): n is a, c, g, or t
  misc_feature (494)..(494): n is a, c, g, or t
  misc_feature (503)..(503): n is a, c, g, or t
  misc_feature (515)..(515): n is a, c, g, or t
  misc_feature (520)..(520): n is a, c, g, or t
  misc_feature (526)..(526): n is a, c, g, or t
aagacatcatgggaagggggctttgtggtttgcctctgctctcgtcgggcgatctggctttanttncaggaggaggtaagcagaggagatcagtgcctgtttctgaccccaggagggccttgttgggctccaacctagagccttccggcttcaggtcccaagagaagtccccccctaactgtgacccccctaactgtgatcaggggtctgccattgcccgcttttctctgcctgatctggggactcaggagaggccacggcagccacagcctaggggtggttcagtccctgggcccacagtctggtcagttgagtccttctggggaaccggggctatgaaaattttcgtctttgggggaccggtacccatggaagggaaaattttccttgaggggggtgagggaccaaaggantcaagatcctttttcagggcntgattaggccaagatgntgaggaanttttaggntaagggtttnggggagattctcgggcnttttgagcntcctgtttgggnacaanggggantaac

SEQ ID NO: 2154 - DNA, 460 bp, Homo sapiens
  misc_feature (23)..(24): n is a, c, g, or t
  misc_feature (32)..(32): n is a, c, g, or t
  misc_feature (36)..(36): n is a, c, g, or t
  misc_feature (38)..(38): n is a, c, g, or t
  misc_feature (58)..(58): n is a, c, g, or t
  misc_feature (123)..(123): n is a, c, g, or t
  misc_feature (363)..(363): n is a, c, g, or t
  misc_feature (379)..(379): n is a, c, g, or t
  misc_feature (392)..(392): n is a, c, g, or t
  misc_feature (397)..(397): n is a, c, g, or t
  misc_feature (408)..(408): n is a, c, g, or t
  misc_feature (455)..(455): n is a, c, g, or t
gattcggaacaggacctcgtgcnnggcgaacnaagnancacgccatgaaggcctcggnacgctacgagagtacaaggtagtgggtcgctgcctgcccacccccaaatgccacacgccgccccnctaccgcatgcgaatctttgcgcctaatcatgtcgtcgccaagtcccgcttctggtactttgtatctcagttaaagaagatgaagaagtcttcaggggagattgtctactgtgggcaggtgtttgagaagtcccccctgcgggtggaagaacttcgggatctggctgcgctatgactcccggagcggcacccacaacatgtaccgggaataccggggacctggaccaccgcaggcggctngttcacccagtggctnaccggagacatgnggttncccgggcacgncggctccgaagcccaattccatttcagattcatggaaggtgggaagnagatc

SEQ ID NO: 2155 - DNA, 1527 bp, Homo sapiens
ctctacaagtacttctatgccatctccaacatcgaggtcatcggcaggtgcaagtgcaacctgcacgccaacctgtgctccatgcgcgagggcagcctgcagtgcgagtgcgagcacaacaccaccggccccgactgcggcaagtgcaagaagaatttccgcacccggtcctggcgggccggctcctacctgccgctgccccatggctctcccaacgcctgtgccgctgcaggttcctttggcaactgcgaatgctacggtcactccaaccgctgcagctacattgacttcctgaatgtggtgacctgcgtcagctgcaagcacaacacgcgaggtcagcactgccagcactgccggctgggctactaccgcaacggctcggcagagctggatgatgagaacgtctgcattgagtgtaactgcaaccagataggctccgtgcacgaccggtgcaacgagaccggcttctgcgagtgccgcgagggcgcggcgggccccaagtgcgacgactgcctccccacgcactactggcgccagggctgctaccccaacgtgtgcgacgacgaccagctgctgtgccagaacggaggcacctgcctgcagaaccagcgctgcgcctgcccgcgcggctacaccggcgtgcgctgcgagcagccccgctgcgaccccgccgacgatgacggcggtctggactgcgaccgcgcgcccggggccgccccgcgccccgccaccctgctcggctgcctgctgctgctggggctggccgcccgcctgggccgctgagccccgcccggaggacgctccccgcacccggaggccgggggtcccggggtcccggggcggggccggcgtccgaggccgggcggtgagaagggtgcggcccgaggtgctcccaggtgctactcagcagggccccccgcccggcccgcgctcccgcccgcactgccctccccccgcagcaggggcgccttgggactccggtccccgcgcctgcgatttggtttcgtttttcttttgtattatccgccgcccagttccttttttgtctttctctctctctctttttttttttttttttctggcggtgagccagagggtcgggagaaacgctgctcgccccacaccccgtcctgcctcccaccacacttacacacacgggactgtggccgacaccccctggcctgtgccaggctcacgggcggcggcggaccccgacctccagttgcctacaattccagtcgctgacttggtcctgttttctattctttatttttcctgcaacccaccagaccccaggcctcaccggaggcccggtgaccacggaactcaccgtctgggggaggaggagagaaggaaggggtggggggcctggaaacttcgttctgtagagaactatttttgtttgtattcactgtcccctgcaagggggacggggcgggagcactggtcaccgcgggggccgatggtggagaatccgaggagtaaagagtttgctcactgctgccaaaaaaaaaaaaaaaaaaaaaa

SEQ ID NO: 2156 - protein, 260 aa, Homo sapiens
LYKYFYAISNIEVIGRCKCNLHANLCSMREGSLQCECEHNTTGPDCGKCKKNFRTRSWRAGSYLPLPHGSPNACAAAGSFGNCECYGHSNRCSYIDFLNVVTCVSCKHNTRGQHCQHCRLGYYRNGSAELDDENVCIECNCNQIGSVHDRCNETGFCECREGAAGPKCDDCLPTHYWRQGCYPNVCDDDQLLCQNGGTCLQNQRCACPRGYTGVRCEQPRCDPADDDGGLDCDRAPGAAPRPATLLGCLLLLGLAARLGR

SEQ ID NO: 2157 - DNA, 208 bp, Homo sapiens
ggcgactctagagtagacccgctcatttcagttcccccattcatccatttgtcccattagttgctgtggattatcaagttttgaaggaactgtacatcccaacagactgaaacattctaagtgaaatgagtataatccaagtaactggtgaactttggaggtttggagcttgaagagaatggctaagaagatttgaattatagggagg

SEQ ID NO: 2158 - DNA, 4238 bp, Homo sapiens
gcgctctcaggcgggctccggcggcagcgacgcgagcgcggcgatggggagcggcggcgtggtccactgtaggtgtgccaagtgtttctgttatcctacaaagcgaagaataaggaggaggccccgaaacctgaccatcttgagtctccccgaagatgtgctctttcacatcctgaaatggctttctgtagaggacatcctggccgtccgagctgtacactcccagctgaaggacctggtggacaaccacgccagtgtgtgggcatgtgccagcttccaggagctgtggccgtctccagggaacctgaagctctttgaaagggctgctgaaaaggggaatttcgaagctgctgtgaagctgggcatagcctacctctacaatgaaggcctgtctgtgtctgatgaggcccgcgcagaagtgaatggcctgaaggcctctcgcttcttcagtctcgctgagcggctgaatgtgggtgccgcacctttcatctggctcttcatccgccctccgtggtcggtgagcggaagctgctgcaaggccgtggttcacgagagcctcagggcagagtgccagctgcagaggactcacaaagcatccatattgcactgcttgggcagagtgctgagtctgttcgaggatgaggagaagcagcagcaggcccatgacctgtttgaggaggctgctcatcagggatgtctgaccagctcctacctcctctgggaaagcgacaggaggacagatgtgtcagatcctgggcgatgcctccacagcttccgaaaactcagggactacgctcgcaaaggctgctgggaagcgcagctgtctttagccaaagcctgtgcaaatgcaaaccagcttggactggaggtgagagcttccagtgagatcgtctgccagctatttcaggcttcccaggctgtcagtaaacaacaagtcttctccgtgcagaagggactcaatgacacaatgaggtacattctgatcgactggctggtggaagttgccaccatgaatgacttcacaagcctgtgcctgcacctgaccgtggagtgtgtggaccggtacctgcggaggaggctggtgccgcggtacaggctccagctgctgggcatcgcctgcatggtcatctgcacccggtttatcagtaaagagatcctgaccatccgggaggccgtatggctcacggacaacacttacaagtacgaggacctggtgagaatgatgggcgagatcgtctccgccttggaagggaagattcgagtccccactgtggtggattacaaggaggtcctgctgacgctagtccctgtggagctgagaacccagcacctgtgcagcttcctctgcgagctctccctgctgcacaccagcctgtccgcctacgccccagcccgcctggctgccgcagccctgctcctggccagactgacgcacgggcagacacagccctggaccactcagctgtgggacctcaccggattctcctatgaagacctcattccctgcgtcttgagcctccataagaagtgcttccatgatgacgcccccaaggactacaggcaagtctctctgaccgccgtgaagcagcggtttgaggacaagcgctatggagaaatcagccaggaagaggtgctgagctacagccagttgtgtgctgcattaggagtgacacaagacagccccgaccccccgactttcctcagcacaggggagatccacgccttcctcagctctccctcggggcggagaaccaaacggaagcgggagaacagcctccaggaagacagaggcagcttcgttaccacccccactgcggagctgtccagccaggaggagaccgtgctgggcagcttcctcgactggagcctggactgctgctctggctatgaaggcgaccaggagagtgagggcgagaaggagggcgacgtgacagctcccagcggcatcctcgatgtcaccgtggtctacctgaacccagaacagcattgctgccaggaatccagtgatgaggaggcttgtccagaggcaaagggaccccaggacccacaggcactggcgctggacacccagatccctgcaacccctggacccaaacccctggtccgcaccagccgggagccagggaaggacgtcacgacctcagggtactcctccgtcagcaccgcaagtcccacaagctccgtggacggtggcttgggggccctgccccaacctacctcagtgctgtccctgcacagtgactcgcacacacagccctgccaccatcaggccaggaagtcatgtttacagtgtcgtcccccaagtcccccggagagcagtgttccccagcaacaggtgaagcggataaacctatgcatacacagtgaggaggaggacatgaacctgggccttgtgaggctgtaagtgtgtcagcacatttgccgcagtggatgtgtactgagggggctggaggcgaagggtgggagcatagcataggaacgctgcatagaccatggaggcctttgcgcagagagcagagaggatgacttgcggccaccaagtttctgtctccgcgggagtcccgtgcaagccatcagaatgttgaaatgagggtgaagagctcagatccctctctttggaaagtttagcctggaagcagttggccacactgtgtggagggcacctctctgtcccttccgtgtctcactgtctctggaagcttcagcccatgtgtgtcctggtgttcccagccccaccagagccccgtgccgggagctgacagctttcacgcttaaggcacgtgtgacctgggtagtcagacaccacttgagcccctgcccacatctgctggtttggggcttcagtggggagctgacagctgtgagcacaccactgtcccctcatccacctcggcctgcatggggcacccacttccttctgggtggggcttccatggtaagggggcctgcgtccctgcacactgcgaggactgccttgccacaggcccactccctacgacacgtgactcgttttagagctctgtcccagaggcgttcgtatgtgacccacagatggcgtcaatgtgaacacctctctttgtgctgaatttctgggccattcttttcctgtcttatttctaaatttccttcttccaagatgaaaacaaaagaaaaacttaaaacagaaggtattaaaaaaacaagagattcccaccattatttaggttcacctgcaaaacaaaaatcttactccagcccctcaatgccatcctgacacactttatgcaaaaagaattttcccagataggctagccagaaaaaacttcaagtcctctgtaacatctgaggtgaccaagaggcagaagagcagagcagtcgggggccgtgtcctggctgatcccaactgcagctctgctgtgggggcccgtgggagggaggcagacccctgggctttcctgctggccacggagactctgctcctgcatggaaagggagcctgggagccagcagcccacgcctggggagcctgcctggggccatgtgaccatggcctctccctgggaacgggctgaccacaacacaccctgctgccatccacttctgtttactctgcaaatgtaagaaagaaccacttggccagaagtgtcccccagatgcttttttttttttttttttggagacagttttgctcttgtctccccggctggagtgcagtggcatgatctcaactctcaactcactgtaacctccgcctcccggatactcctgcctcagcctcctgggtagctgggattacaagcacccaaccacgcccagctaatttttgtattttcggtagagacgggatttcaccatgttggccaggctagtctcgaactcatgacctcaagtgatccgcccacttcggtctcccaaagtgctgggattacaggcatgagccacggcgcctggcccccaaatgctcttgaaccggaaacccagggatgggagatgctcactgagctgctgcttttatgtgtgctggtgctatgtgtgttcatgtccgcggcagctgtctttttgctactataagggaattctggccaccctgggtggggtgtggtcggggtgagaacccaagcgttggaactgtagacccgtcctgtcgactgtgtgcccctgggcatgtgtgagcctcagtttcctcatctgtaaggggggcaatgatacctacctcacagggggttgtgaggattaaatgtgaggaggatagtggcaac

SEQ ID NO: 2159 - protein, 786 aa, Homo sapiens
MGSGGVVHCRCAKCFCYPTKRRIRRRPRNLTILSLPEDVLFHILKWLSVEDILAVRAVHSQLKDLVDNHASVWACASFQELWPSPGNLKLFERAAEKGNFEAAVKLGIAYLYNEGLSVSDEARAEVNGLKASRFFSLAERLNVGAAPFIWLFIRPPWSVSGSCCKAVVHESLRAECQLQRTHKASILHCLGRVLSLFEDEEKQQQAHDLFEEAAHQGCLTSSYLLWESDRRTDVSDPGRCLHSFRKLRDYARKGCWEAQLSLAKACANANQLGLEVRASSEIVCQLFQASQAVSKQQVFSVQKGLNDTMRYILIDWLVEVATMNDFTSLCLHLTVECVDRYLRRRLVPRYRLQLLGIACMVICTRFISKEILTIREAVWLTDNTYKYEDLVRMMGEIVSALEGKIRVPTVVDYKEVLLTLVPVELRTQHLCSFLCELSLLHTSLSAYAPARLAAAALLLARLTHGQTQPWTTQLWDLTGFSYEDLIPCVLSLHKKCFHDDAPKDYRQVSLTAVKQRFEDKRYGEISQEEVLSYSQLCAALGVTQDSPDPPTFLSTGEIHAFLSSPSGRRTKRKRENSLQEDRGSFVTTPTAELSSQEETVLGSFLDWSLDCCSGYEGDQESEGEKEGDVTAPSGILDVTVVYLNPEQHCCQESSDEEACPEAKGPQDPQALALDTQIPATPGPKPLVRTSREPGKDVTTSGYSSVSTASPTSSVDGGLGALPQPTSVLSLHSDSHTQPCHHQARKSCLQCRPPSPPESSVPQQQVKRINLCIHSEEEDMNLGLVRL

SEQ ID NO: 2160 - DNA, 428 bp, Homo sapiens
  misc_feature (291)..(293): n is a, c, g, or t
  misc_feature (296)..(296): n is a, c, g, or t
  misc_feature (300)..(300): n is a, c, g, or t
  misc_feature (312)..(312): n is a, c, g, or t
  misc_feature (322)..(322): n is a, c, g, or t
  misc_feature (329)..(329): n is a, c, g, or t
tagaaaccattcctttctttattaaacatagcttgcaagtgataaatattacaaagtttttttttcttttaatcctttctccaaaaattagcttattatttgaatctgtcactgctgaaatgctcagcagcatctgaaacagatgggagtgtatttgcctttttgaaaaccagtttctattggtcttagttttttcattttatttcccaaacacaatgcagaaaatcagaatgagttaaaaaagaaataaaggaaacttaaagagagttgtgcaaaaagggcttggttccnnntcncccnacccttatcaangaaggccatnccccatncaacctccctgctccccaccccccaaccccaatctatcctttcaccttcaccagggcttcacccatcaccctgtaccctctccaggctttatcagccca

SEQ ID NO: 2161 - DNA, 3373 bp, Homo sapiens
ggtggcaacttctcctcctgcggccgggagcggcctgcctgcctccctgcgcacccgcagcctcccccgctgcctccctagggctcccctccggccgccagcgcccatttttcattccctagatagagatactttgcgcgcacacacatacatacgcgcgcaaaaaggaaaaaaaaaaaaaaaagcccaccctccagcctcgctgcaaagagaaaaccggagcagccgcagctcgcagctcgcagctcgcagcccgcagcccgcagaggacgcccagagcggcgagcaggcgggcagacggaccgacggactcgcgccgcgtccacctgtcggccgggcccagccgagcgcgcagcgggcacgccgcgcgcgcggagcagccgtgcccgccgcccgggcccgccgccagggcgcacacgctcccgcccccctacccggcccgggcgggagtttgcacctctccctgcccgggtgctcgagctgccgttgcaaagccaactttggaaaaagttttttgggggagacttgggccttgaggtgcccagctccgcgctttccgattttgggggcctttccagaaaatgttgcaaaaaagctaagccggcgggcagaggaaaacgcctgtagccggcgagtgaagacgaaccatcgactgccgtgttccttttcctcttggaggttggagtcccctgggcgcccccacacggctagacgcctcggctggttcgcgacgcagccccccggccgtggatgctgcactcgggctcgggatccgcccaggtagccggcctcggacccaggtcctgcgcccaggtcctcccctgccccccagcgacggagccggggccgggggcggcggcgccgggggcatgcgggtgagccgcggctgcagaggcctgagcgcctgatcgccgcggacctgagccgagcccacccccctccccagccccccaccctggccgcgggggcggcgcgctcgatctacgcgtccggggccccgcggggccgggcccggagtcggcatgaatcgctgctgggcgctcttcctgtctctctgctgctacctgcgtctggtcagcgccgagggggaccccattcccgaggagctttatgagatgctgagtgaccactcgatccgctcctttgatgatctccaacgcctgctgcacggagaccccggagaggaagatggggccgagttggacctgaacatgacccgctcccactctggaggcgagctggagagcttggctcgtggaagaaggagcctgggttccctgaccattgctgagccggccatgatcgccgagtgcaagacgcgcaccgaggtgttcgagatctcccggcgcctcatagaccgcaccaacgccaacttcctggtgtggccgccctgtgtggaggtgcagcgctgctccggctgctgcaacaaccgcaacgtgcagtgccgccccacccaggtgcagctgcgacctgtccaggtgagaaagatcgagattgtgcggaagaagccaatctttaagaaggccacggtgacgctggaagaccacctggcatgcaagtgtgagacagtggcagctgcacggcctgtgacccgaagcccggggggttcccaggagcagcgagccaaaacgccccaaactcgggtgaccattcggacggtgcgagtccgccggccccccaagggcaagcaccggaaattcaagcacacgcatgacaagacggcactgaaggagacccttggagcctaggggcatcggcaggagagtgtgtgggcagggttatttaatatggtatttgctgtattgcccccatggggtccttggagtgataatattgtttccctcgtccgtctgtctcgatgcctgattcggacggccaatggtgcttcccccacccctccacgtgtccgtccacccttccatcagcgggtctcctcccagcggcctccggtcttgcccagcagctcaaagaagaaaaagaaggactgaactccatcgccatcttcttcccttaactccaagaacttgggataagagtgtgagagagactgatggggtcgctctttgggggaaacgggttccttcccctgcacctggcctgggccacacctgagcgctgtggactgtcctgaggagccctgaggacctctcagcatagcctgcctgatccctgaacccctggccagctctgaggggaggcacctccaggcaggccaggctgcctcggactccatggctaagaccacagacgggcacacagactggagaaaacccctcccacggtgcccaaacaccagtcacctcgtctccctggtgcctctgtgcacagtggcttcttttcgttttcgttttgaagacgtggactcctcttggtgggtgtggccagcacaccaagtggctgggtgccctctcaggtgggttagagatggagtttgctgttgaggtggtgtagatggtgacctgggtatcccctgcctcctgccaccccttcctccccatactccactctgattcacctcttcctctggttcctttcatctctctacctccaccctgcattttcctcttgtcctggcccttcagtctgctccaccaaggggctcttgaaccccttattaaggccccagatgaccccagtcactcctctctagggcagaagactagaggccagggcagcaagggacctgctcatcatattccaacccagccacgactgccatgtaaggttgtgcagggtgtgtactgcacaaggacattgtatgcagggagcactgttcacatcatagataaagctgatttgtatatttattatgacaatttctggcagatgtaggtaaagaggaaaaggatccttttcctaattcacacaaagactccttgtggactggctgtgcccctgatgcagcctgtggctggagtggccaaataggagggagactgtggtaggggcagggaggcaacactgctgtccacatgacctccatttcccaaagtcctctgctccagcaactgcccttccaggtgggtgtgggacacctgggagaaggtctccaagggagggtgcagccctcttgcccgcacccctccctgcttgcacacttccccatctttgatccttctgagctccacctctggtggctcctcctaggaaaccagctcgtgggctgggaatgggggagagaagggaaaagatccccaagaccccctggggtgggatctgagctcccacctcccttcccacctactgcactttcccccttcccgccttccaaaacctgcttccttcagtttgtaaagtcggtgattatatttttgggggctttccttttattttttaaatgtaaaatttatttatattccgtatttaaagttgt

SEQ ID NO: 2162 - protein, 241 aa, Homo sapiens
MNRCWALFLSLCCYLRLVSAEGDPIPEELYEMLSDHSIRSFDDLQRLLHGDPGEEDGAELDLNMTRSHSGGELESLARGRRSLGSLTIAEPAMIAECKTRTEVFEISRRLIDRTNANFLVWPPCVEVQRCSGCCNNRNVQCRPTQVQLRPVQVRKIEIVRKKPIFKKATVTLEDHLACKCETVAAARPVTRSPGGSQEQRAKTPQTRVTIRTVRVRRPPKGKHRKFKHTHDKTALKETLGA

SEQ ID NO: 2163 - DNA, 663 bp, Homo sapiens
caaatgaacaggtatggctgtgttccagtaaaactatggataaaaacaaccacaattgcatttggctaagggctttaatttgctcatgcaagtgtagatcctggtcttaatttgtttttttaacatttacagattgatcagggaccatgaaaagaaacttgtgcttcaccgaagaaaaatatctaaacatcgaaaaacttaaatattatggaaaaaaaacattgcaaaatataaaataaataaaaaaaggaaaggaaactttgaaccttatgtaccgagcaaatgccaggtctagcaaacataatgctagtcctagattacttattgatttaaaaacaaaaaaacacaaaaaaatagtaaaatataaaaacaaattaatgttttatagaccctgggaaaaagaattttcagcaaagtacaaaaatttaaagcattcctttctttaattttgtaattctttactgtggaatagctcagaatgtcagttctgttttaagtaacagaattgataactgagcaaggaaacgtaatttggattataaaattcttgctttaataaaaattccttaaacagtggccatgcataaataggtaatatcttaatggtgctgagccgacataagaatcttttatgaaaatgtactgttaagttcagggggtcta

SEQ ID NO: 2164 - DNA, 2233 bp, Homo sapiens
ataaaaacattgtatatagtagaccaaatggtcatagttactgtgagcctggcagagcagaaaaggcagttgaaggaggcagagaaggggttggtgatacggtgctataaatctgtggtccagtccacctcccttttaagacgtcctccccctatttctgttcttagttagagatgcagcagcttactcctgtagcgacctactaaaaagcaacaaggagaaagacatcgtctttttgaaaaaacgttctttcgtctcttttctttgttccttggtttgtttttcttgcccctttttgtttagttgaacggcaataggagggtagtctctccgtctttttaaactcttttttaagtttcccctcccctttcatatttttttgggccatttcttttagctttggactttgggggtcgaaagcgtttctttttatttgcttcttttaagccgagcacagtttaggtttcgtgctgtcttaagagaactatccagcagcttcttgctcatccttattgggagaactgcaccgttactttaaaaacacacatacacaaaaaccttaagggagaaaggtaattgctgccatggaaacacaactgtctaatgggccaacttgcaataacacagccaatggtccaaccaccataaacaacaactgttcgtcaccagttgactctgggaacacagaagacagcaagaccaacttaatagtcaactaccttcctcagaacatgacacaggaggaactaaagagtctctttgggagcattggtgaaatagagtcctgtaagcttgtaagagacaaaataacagggcagagcttgggatatggctttgtgaactacattgaccccaaggatgcagagaaagctatcaacaccctgaatggattgagacttcaaaccaaaacaataaaagtttcctatgctcgcccaagttcagcttctatcagagatgcaaatttatatgtcagcggacttccaaaaacaatgacccagaaggagttggaacagcttttttcacaatatggacgcattattacttctcgtattcttgtcgaccaggtcactggcatatcaaggggtgtagggtttattcgatttgacaagcgaattgaggcagaagaagctatcaaaggcctaaatggccagaaacctcccggtgccacggagccaatcactgtaaagtttgctaataacccaagccaaaaaaccaatcaggccatcctttcccagctgtaccagtctccaaacagaaggtatccaggaccgctagctcagcaggcacagcgttttaggttggacaatctgctcaatatggcttatggagtaaagaggttttctccaatgaccattgacggaatgaccagtttggctggaattaatatccctgggcaccctggaacagggtggtgtatatttgtgtacaacctggctcctgacgcagatgagagtatcctgtggcaaatgtttgggccttttggagctgtcaccaatgtgaaggtcatccgtgactttaacaccaataaatgcaaaggttttggatttgtgactatgacaaactatgatgaggctgccatggcgatacgtagcctcaatggataccgtctgggagacagagtactgcaggtctcctttaagacaaacaaaacgcacaaagcctaatgagctcttgtcctcagtccatttatatatgaaaactatacaacaaaggcaagttaagagaaactttatacattagtaaatgtctttgtaagtcagtgttgagatggggataaaatgactacttagcatcctaagaaatatgtgagattttttattgctagtatttgaattaaaacttcttaaatatcttttatgttgaatatggacaagaggtacagggttttacctgtcacattgcattctattgccttctttgaagaaggtggaccttttaaagtgtttcagctaagggaagacatttcttttctttttacataactgccttgaacctgtgagtaaatattgaggctttgtgttgtaattcttcagttggttgtgtcttttttttcccccctttttcctttttctgattagctttgtgtttggtttacatttaaagcattgctgttatgtctgtttaagaaaagtattttgaagtttacatttttatttatgaagtttaaaacagtatttattttgtaattatgatttgggttggggaagggggggctacattataaacgcttagg

SEQ ID NO: 2165 - protein, 359 aa, Homo sapiens
METQLSNGPTCNNTANGPTTINNNCSSPVDSGNTEDSKTNLIVNYLPQNMTQEELKSLFGSIGEIESCKLVRDKITGQSLGYGFVNYIDPKDAEKAINTLNGLRLQTKTIKVSYARPSSASIRDANLYVSGLPKTMTQKELEQLFSQYGRIITSRILVDQVTGISRGVGFIRFDKRIEAEEAIKGLNGQKPPGATEPITVKFANNPSQKTNQAILSQLYQSPNRRYPGPLAQQAQRFRLDNLLNMAYGVKRFSPMTIDGMTSLAGINIPGHPGTGWCIFVYNLAPDADESILWQMFGPFGAVTNVKVIRDFNTNKCKGFGFVTMTNYDEAAMAIRSLNGYRLGDRVLQVSFKTNKTHKA

SEQ ID NO: 2166 - DNA, 3475 bp, Homo sapiens
gaattcgcggccgcgtcgaccgcttctgtggccacggcagatgaaacagaaaggctaaagagggctggagtcaggggacttctcttccaccagcttcacggtgatgatatggcatctgccagctctagccgggcaggagtggccctgccttttgagaagtctcagctcactttgaaagtggtgtccgcaaagcccaaggtgcataatcgtcaacctcgaattaactcctacgtggaggtggcggtggatggactccccagtgagaccaagaagactgggaagcgcattgggagctctgagcttctctggaatgagatcatcattttgaatgtcacggcacagagtcatttagatttaaaggtctggagctgccataccttgagaaatgaactgctaggcaccgcatctgtcaacctctccaacgtcttgaagaacaatgggggcaaaatggagaacatgcagctgaccctgaacctgcagacggagaacaaaggcagcgttgtctcaggcggaaaactgacaattttcctggacgggccaactgttgatctgggaaatgtgcctaatggcagtgccctgacagatggatcacagctgccttcgagagactccagtggaacagcagtagctccagagaaccggcaccagccccccagcacaaactgctttggtggaagatcccggacgcacagacattcgggtgcttcagccagaacaaccccagcaaccggcgagcaaagccccggtgctcggagccggcaccgccagcccgtcaagaactcaggccacagtggcttggccaatggcacagtgaatgatgaacccacaacagccactgatcccgaagaaccttccgttgttggtgtgacgtccccacctgctgcacccttgagtgtgaccccgaatcccaacacgacttctctccctgccccagccacaccggctgaaggagaggaacccagcacttcgggtacacagcagctcccagcggctgcccaggcccccgacgctctgcctgctggatgggaacagcgagagctgcccaacggacgtgtctattatgttgaccacaataccaagaccaccacctgggagcggccccttcctccaggctgggaaaaacgcacagatccccgaggcaggttttactatgtggatcacaatactcggaccaccacctggcagcgtccgaccgcggagtacgtgcgcaactatgagcagtggcagtcgcagcggaatcagctccagggggccatgcagcacttcagccaaagattcctataccagttttggagtgcttcgactgaccatgatcccctgggccccctccctcctggttgggagaaaagacaggacaatggacgggtgtattacgtgaaccataacactcgcacgacccagtgggaggatccccggacccaggggatgatccaggaaccagctttgcccccaggatgggagatgaaatacaccagcgagggggtgcgatactttgtggaccacaatacccgcaccaccacctttaaggatcctcgcccggggtttgagtcggggacgaagcaaggttcccctggtgcttatgaccgcagttttcggtggaagtatcaccagttccgtttcctctgccattcaaatgccctacctagccacgtgaagatcagcgtttccaggcagacgcttttcgaagattccttccaacagatcatgaacatgaaaccctatgacctgcgccgccggctttacatcatcatgcgtggcgaggagggcctggactatgggggcatcgccagagagtggtttttcctcctgtctcacgaggtgctcaaccctatgtattgtttatttgaatatgccggaaagaacaattactgcctgcagatcaaccccgcctcctccatcaacccggaccacctcacctactttcgctttataggcagattcatcgccatggcgctgtaccatggaaagttcatcgacacgggcttcaccctccctttctacaagcggatgctcaataagagaccaaccctgaaagacctggagtccattgaccctgagttctacaactccattgtctggatcaaagagaacaacctggaagaatgtggcctggagctgtacttcatccaggacatggagatactgggcaaggtgacgacccacgagctgaaggagggcggcgagagcatccgggtcacggaggagaacaaggaagagtacatcatgctgctgactgactggcgtttcacccgaggcgtggaagagcagaccaaagccttcctggatggcttcaacgaggtggccccgctggagtggctgcgctactttgacgagaaagagctggagctgatgctgtgcggcatgcaggagatagacatgagcgactggcagaagagcaccatctaccggcactacaccaagaacagcaagcagatccagtggttctggcaggtggtgaaggagatggacaacgagaagaggatccggctgctgcagtttgtcaccggtacctgccgcctgcccgtcgggggatttgccgaactcatcggtagcaacggaccacagaagttttgcattgacaaagttggcaaggaaacctggctgcccagaagccacacctgcttcaaccgtctggatcttccaccctacaagagctacgaacagctgagagagaagctgctgtatgccattgaggagaccgagggctttggacaggagtaaccgaggccgcccctcccacgccccccagcgcacatgtagtcctgagtcctccctgcctgagaggccactggccccgcagcccttgggaggcccccgtggatgtggccctgtgtgggaccacactgtcatctcgctgctggcagaaaagcctgatcccaggaggccctgcagttcccccgacccgcggatggcagtctggaataaagccccctagttgcctttggccccacctttgcaaagttccagagggctgaccctctctgcaaaactctcccctgtcctctagaccccaccctgggtgtatgtgagtgtgcaagggaaggtgttgcatccccaggggctgccgcagaggccggagacctcctggactagttcggcgaggagactggccactgggggtggctgttcgggactgagagcgccaagggtctttgccagcaaaggaggttctgcctgtaattgagcctctctgatgatggagatgaagtgaaggtctgagggacgggccctggggctaggccatctctgcctgcctccctagcaggcgccagcggtggaggctgagtcgcaggacacatgccggccagttaattcattctcagcaaatgaaggtttgtctaagctgcctgggtatccacgggacaaaaacagcaaactccctccagactttgtccatgttataaacttgaaagttggttgttgtttgttaggtttgccaggtttttttgtttacgcctgctgtcactttcctgtc

SEQ ID NO: 2167 - protein, 870 aa, Homo sapiens
MASASSSRAGVALPFEKSQLTLKVVSAKPKVHNRQPRINSYVEVAVDGLPSETKKTGKRIGSSELLWNEIIILNVTAQSHLDLKVWSCHTLRNELLGTASVNLSNVLKNNGGKMENMQLTLNLQTENKGSVVSGGKLTIFLDGPTVDLGNVPNGSALTDGSQLPSRDSSGTAVAPENRHQPPSTNCFGGRSRTHRHSGASARTTPATGEQSPGARSRHRQPVKNSGHSGLANGTVNDEPTTATDPEEPSVVGVTSPPAAPLSVTPNPNTTSLPAPATPAEGEEPSTSGTQQLPAAAQAPDALPAGWEQRELPNGRVYYVDHNTKTTTWERPLPPGWEKRTDPRGRFYYVDHNTRTTTWQRPTAEYVRNYEQWQSQRNQLQGAMQHFSQRFLYQFWSASTDHDPLGPLPPGWEKRQDNGRVYYVNHNTRTTQWEDPRTQGMIQEPALPPGWEMKYTSEGVRYFVDHNTRTTTFKDPRPGFESGTKQGSPGAYDRSFRWKYHQFRFLCHSNALPSHVKISVSRQTLFEDSFQQIMNMKPYDLRRRLYIIMRGEEGLDYGGIAREWFFLLSHEVLNPMYCLFEYAGKNNYCLQINPASSINPDHLTYFRFIGRFIAMALYHGKFIDTGFTLPFYKRMLNKRPTLKDLESIDPEFYNSIVWIKENNLEECGLELYFIQDMEILGKVTTHELKEGGESIRVTEENKEEYIMLLTDWRFTRGVEEQTKAFLDGFNEVAPLEWLRYFDEKELELMLCGMQEIDMSDWQKSTIYRHYTKNSKQIQWFWQVVKEMDNEKRIRLLQFVTGTCRLPVGGFAELIGSNGPQKFCIDKVGKETWLPRSHTCFNRLDLPPYKSYEQLREKLLYAIEETEGFGQE

SEQ ID NO: 2168 - DNA, 707 bp, Homo sapiens
ggacgaagagaaaaaacgagaaaaaaaaaacaaagccaagggcgagaaggaaaaaagagaaacaagacaagaagagaagagaagacaaagaagaaacaagcaaggagatattttatataggatcgagtgcctggtgttatgtgtcggctatgagggcggcgcgtgagggcgcgggtccctgggagccaggtagcgagcggggcgcccggcagcgcggagtcagcgccgcgggggccgcacccgactcgcgcctggacactcgcggggcgccgacctggcagggggccaaaccagtgctcctgccacctctctggctgccccctagagcctgcccatcccagcctgaccaatgtccacagccagggagcagccaatcttcagcacacgggcgcacgtgttccaaattgacccagccaccaagcgaaactggatcccagcgggcaagcacgcactcactgtctcctatttctacgatgccacccgcaatgtgtaccgcatcatcagcatcggaggcgccaaggccatcatcaacagcactgtcactcccaacatgaccttcaccaaaacttcccagaagttcgggcagtgggccgacagtcgcgccaacacagtctatggcctgggctttgcctctgaacagcatctgacacagtttgccgagaagttccaggaagtgaaggaagcagccaggctggccagggagaaac

SEQ ID NO: 2169 - DNA, 366 bp, Homo sapiens
  misc_feature (297)..(297): n is a, c, g, or t
tttgtttaaatattacaatttattttactaattaaaacatttcataacagaaaagcaacttggaaaacagaaatctcagctcaagggcaaaggcaaactcttgaggaagaaggtggcccagaatcaaaggccaacagcaggttaagtgctaggtggtggagtcatggggaggagaggcttctaaactactcaggatgttggttaacggctggaactttgggagacctcgcagctaactacagggcaggcagcccattcacaaagtgggtaaatgttgattccttctgtgggtcttanaggatgcttatagagggtcacggctcaggcggtgttgcggggtgagctgtgctctctatttctgcctgc

SEQ ID NO: 2170 - DNA, 461 bp, Homo sapiens
tttttttttgtattttttgtagagatggggttttaccatgttgggtaggctggtctcaaactcgtgagctcaggtgatccacccgcctcagcctccaaaagtgctgggattacaggtgtgagccaccacacctggccaatgggccatttctttggttgaattttaaaatattattttttatcatttaccattttctagggcattttaagacccaatttattctgccacaatcatgtcatcagaatagtcaaatgaaatgactttcatttgaattctcactattaagatttaaaattgtggaaaactaaagtgggattggagtagactgttaggaatagatcctagatgaaaaatcacttttggatttgcagaaaccctggatacaaagtagttcaattaaccataaaacaaggatcagctgatctctacacgccaccacctgtttcatgtacatgggaaga

SEQ ID NO: 2171 - DNA, 599 bp, Homo sapiens
aactccagagcctgggcctgaacagggaggtggtctctcaggcttgatgctcaggcctatatctctccatttttgccctatctcttaaatatatgtaatgtcataaaatgcttttgaatctttttaaaaagtgtcaagctcatgaaagacagcctaagaaactattacagattggaggaaactaaggaaaaataaaactgaatgcagtgtgtatcctagatcagagaaagaacattagtggagaaagaacattagtgaaatgtgaataatttgagctaataatattgtaccagtagccggatatggtggtgggtgcctataatcccagctacttggaaggctgaggcaggagaagctcttgaaccggggagataaaggttacagtgagccgagacctcaccattgcactccagcctggacaacaagagcaaaactccgtctcaaaaaaaaaaaaaaaaaaaaaaactcgagggggggcccgggtccccaattcgccctatagtgagtcgtattacgcgcgctcactggccgtcgttttacaaccgtcggactgggaaaaccctgcggttacccaacttaatgggcttgtgagacatccc

SEQ ID NO: 2172 - DNA, 421 bp, Homo sapiens
ttttttttttttttttttttttttttttggagaaaaagggccagatgtttattattttgttacattatttccattgcatattccacatttatttattttcacttttatttattatcattatttttcacaaaggtccaaggaatttcaaaaacaacattaaaacaatcattcaaactgtttcaggcacggtttcaattaaaagcataaatttgatttctgacttcctgtttccttctatgatacaatctcaagttttgtttcaggaagcacaattattgtagcgttaagggggatacctgccaaagctcatctcctagggctgccctcattctcaaaaagttcctgagtcaacaaaaaggggacccccagggtatggaataaggagatgagagcatgctctgccaactggctgggacctgaa

SEQ ID NO: 2173 - DNA, 573 bp, Homo sapiens
ttttgcataacaagtttatttttttaaaaggcatatagacaataaacaaagtaaataatcagatcttaacttctgtcctagacttgttccgttaagttctagtctgtgagcacttgtagttcaataatcgtcatcttcatcagagtccattacttttcttctgttgaatttcactgttgttgtcttttctgtttgttggcttacttttttaaggatttctattaaaccttgttctgataccttctcacttagttgtccatatcttgccatctgtataaggtaattctctactgctttagttttttcaggctttacaagtgctaagttacttaacctggcccgggccgactgatccagaacttgggctaagatactgtttctcatttctgcttccctgtgctttgcttcctgttgggccgcatcaccaggatccccgtgtttggcctgcagctcggccagcctctgtctcctcagcgcctcaagctcctcgtccgccatggctcggcgtcacgctggagcagccgcggtcactctcgcagcccttcgtcgcagtcgtttctcttgttttttttg

SEQ ID NO: 2174 - DNA, 4925 bp, Homo sapiens
accgcgcgccactgtcttcgccttcttgcacttcgcgggagaagttgttggcgcgaatggatcctgagcctcgataacagattcctcaaccggcccacccgccagccagccagcgccttcatcctggggctgcgatggacattcggaaattctttggagtaataccaagtggaaagaaacttgtaagtgaaacagtaaagaagaatgagaaaacaaagtctgatgaagaaactttaaaagcaaagaaaggaataaaggaaatcaaggtaaatagctcccgtaaagaggatgacttcaaacaaaagcaaccaagcaagaaaaagaggatcatctatgattcagattcagagtcagaggagacgttgcaggtaaaaaatgccaaaaagccaccagaaaaactgccagtatcttctaaacctggtaaaatttcacggcaggatcctgttacatacatttcagaaacagatgaagaagatgactttatgtgtaagaaggcggcctctaaatcaaaagagaatggaagatctacaaatagtcatcttggaacatcaaacatgaaaaagaatgaagaaaacactaagaccaagaataagcctttatcaccaataaaacttacacccacatcagtacttgattattttggaactggaagtgtccaaagatctaataagaagatggtggcaagcaaaagaaaagagctttcacaaaatacagatgagtctggattaaatgatgaagccatcgccaagcaattacagcttgatgaagatgcggagctggagaggcagttgcatgaagatgaagagtttgccagaacattagccatgttggatgaagaacccaagaccaaaaaggctcgaaaggacacagaagcgggagaaacgttttcatctgtccaagccaatttaagtaaagcagaaaaacataaatatcctcataaagtaaaaacagcacaagtttcagatgaaagaaagagctacagtcctaggaagcaaagtaaatatgaaagttcaaaagaatctcagcaacattccaagtcatcagctgacaaaataggagaagtctcttctcccaaggccagttctaagctggcaattatgaaaagaaaagaagagagctcttataaagaaatagagcctgtggcctcaaaaagaaaagaaaatgccattaaattgaaaggagagacaaaaactcctaagaaaaccaaaagttctccagctaaaaaagagtctgtaagtcctgaagattctgaaaagaaacgcactaattatcaagcttatcgaagctacttaaatcgagaaggtcccaaggctctgggctccaaagaaataccaaagggagctgaaaattgcttggaaggccttatatttgtaatcacaggcgtgctggagtctattgaacgagatgaggccaagtctctaattgaacgttatgggggaaaagtaacaggaaatgtcagcaagaaaacaaattatcttgtcatgggtcgtgatagtggacagtccaagagtgataaggccgcagccttggggacaaaaattattgatgaagatggcctgttgaatctgattcggactatgccaggcaagaaatccaagtatgaaatagcagttgaaactgagatgaagaaagagtccaaactggagagaacaccccaaaaaaatgtccaaggaaaaagaaaaattagtccatctaaaaaggaatcagaatctaaaaagagcaggccgacttccaaaagggacagtttggcaaagacaataaaaaaggaaacagatgtgttttggaaaagcctggatttcaaggagcaggtggctgaggagacaagtggtgacagcaaggctaggaatttggctgatgacagcagtgaaaacaaagtggaaaatttgctctgggtggataaatataagccaacctcgctcaagaccataattggacagcaaggtgaccagagctgtgccaacaaactcctacgctggctccgaaactggcaaaagagttcttccgaagataaaaaacacgcaaagtttggtaaattttccggcaaagatgatggctctagttttaaagcagcgttgctgtcaggccctcctggtgttggcaaaaccaccacagcttccctggtgtgtcaggagttgggatacagctacgtggaactgaatgcaagtgacacccggagtaagagcagtttgaaggcgattgttgctgagtcactgaacaataccagcatcaaaggcttttattcaaatggagcagcctcttcagtaagcacgaaacatgctctcatcatggatgaagtagatggcatggcaggcaatgaggataggggaggaattcaggaattaattggcctgataaaacatactaaaattcccattatttgtatgtgcaatgatagaaatcatcccaagattcgctctctggttcattattgttttgatcttcgttttcaaagacctcgggttgaacagattaagggtgctatgatgtctattgcatttaaagaaggtttaaagattccccctccagctatgaatgaaataattttgggagccaatcaagatatcagacaggttttacataatctgagtatgtggtgtgcacgaagtaaagcattaacctatgaccaggccaaagctgattctcacagagccaaaaaggatatcaaaatgggcccatttgatgttgcccggaaagtgtttgcagctggagaggagactgctcacatgtcacttgtggacaagtcagatctcttttttcatgattattcaatagcacccctcttcgtccaggaaaattacatacacgtgaagcctgtagcagcagggggtgacatgaaaaagcacctgatgcttttaagcagagcagcagacagcatatgcgatggtgacctagtggacagccagatccggagtaagcaaaactggagtcttctgcctgcgcaggccatttatgccagtgttcttcctggagagttgatgagggggtacatgacccagtttcccaccttcccaagctggctggggaagcactcgtctacaggcaaacatgatcgtattgttcaggacctggccttgcatatgagtctcagaacttactccagcaaaaggactgtaaacatggattatctgtcgcttctaagggatgcacttgtacagcccttgacctcacaaggagtagacggagtacaggatgttgttgcacttatggacacatattatttgatgaaagaagactttgagaatatcatggaaatcagcagctggggtggcaaacctagtcccttttcaaagctggatcccaaggtgaaagcagccttcacaagagcttacaataaggaagcccaccttactccatactcacttcaagctataaaggcatctagacacagcacaagcccatccctggattcggaatacaatgaagaattaaatgaagatgactctcaatctgatgagaaagaccaagatgctatagaaactgatgccatgatcaagaaaaagacaaaatcttcaaagccttcaaaaccagaaaaagataaggagcccagaaaaggaaaaggaaaaagttcgaagaaatgaaaccatttttcactagcgacagccactttttactctccctcctgaccagtccagctggtctagagaaagccttgttttttcccagagcaaccatgttttagcataatgggatgacctggtgtcccattataaataaagggtggtatggctagaagggtatgagcagtaggcttatgtacacctcttatagaggttgataggactgcttgggtcctccactgtcctctgtcaatctagttagacgtgcttctgaatgactgtagaattggaactagaaactacacctgggctttggagtcagattttagttaacaataatgagcctgggagcagtagtactaaggcgtcttttgtaggcttaagaatttatcctaatggcctttataggaccaatgctgattttttttaaaggcagttcctattatgtggtgaaattttgtaaataaatgattatacaaaacagtcaccacctagaactgggtattctttgtacattgtcagatatctttcaaagtataaattaggaataaaaatgttccacatgatatgtgtacaaattctttttaagattgtcatcttgtacagcaaaatattatgttggtatattacttccttattaatttgcaaatgattggattaaaaaagctcactgtattccttactaacctgttgtgtgaaacataacattggcagtcgaggagtcagaactcggattcccagcctcactccctctgtgtgtgttgaccacgtctctgctgtgaataggatttcatgcagtggtctgttatggggctttgcagcgtggggggctgcagaagattctcagacattcttatccttctggagtctcaacccatcaggttcagaccagtaggaaccaggctgggtcaggctcttaatttcactatggtgggggacaaaatgaacactggcttttgttcactttgcccctgagagatctagtcctgtcctgtgatggcttccacaaaccctgttggaagtttgggttattcctataactgtatgtgttgagtggccgtgaggctatggacctagcctggaatttagatgtctagctattttttaatcttgttggtaaatgctcagaggtctgtgctacctctgtgaggtatatactaaaatgaatgtaaaataaggatcgtattccctgctttaaggaactggtagtcttgtttgggtgatgagacaaagttcttgagacatttaaactgtatttaccagtgtgaaaaatgtcatttatggagattaattcattatggaaataaaacattgcctaagcccttgaaaaaaaaaaaaaaaaaaaaaaaaaaaaaaaaaaaaaaaaaa

SEQ ID NO: 2175 - protein, 1147 aa, Homo sapiens
MDIRKFFGVIPSGKKLVSETVKKNEKTKSDEETLKAKKGIKEIKVNSSRKEDDFKQKQPSKKKRIIYDSDSESEETLQVKNAKKPPEKLPVSSKPGKISRQDPVTYISETDEEDDFMCKKAASKSKENGRSTNSHLGTSNMKKNEENTKTKNKPLSPIKLTPTSVLDYFGTGSVQRSNKKMVASKRKELSQNTDESGLNDEAIAKQLQLDEDAELERQLHEDEEFARTLAMLDEEPKTKKARKDTEAGETFSSVQANLSKAEKHKYPHKVKTAQVSDERKSYSPRKQSKYESSKESQQHSKSSADKIGEVSSPKASSKLAIMKRKEESSYKEIEPVASKRKENAIKLKGETKTPKKTKSSPAKKESVSPEDSEKKRTNYQAYRSYLNREGPKALGSKEIPKGAENCLEGLIFVITGVLESIERDEAKSLIERYGGKVTGNVSKKTNYLVMGRDSGQSKSDKAAALGTKIIDEDGLLNLIRTMPGKKSKYEIAVETEMKKESKLERTPQKNVQGKRKISPSKKESESKKSRPTSKRDSLAKTIKKETDVFWKSLDFKEQVAEETSGDSKARNLADDSSENKVENLLWVDKYKPTSLKTIIGQQGDQSCANKLLRWLRNWQKSSSEDKKHAKFGKFSGKDDGSSFKAALLSGPPGVGKTTTASLVCQELGYSYVELNASDTRSKSSLKAIVAESLNNTSIKGFYSNGAASSVSTKHALIMDEVDGMAGNEDRGGIQELIGLIKHTKIPIICMCNDRNHPKIRSLVHYCFDLRFQRPRVEQIKGAMMSIAFKEGLKIPPPAMNEIILGANQDIRQVLHNLSMWCARSKALTYDQAKADSHRAKKDIKMGPFDVARKVFAAGEETAHMSLVDKSDLFFHDYSIAPLFVQENYIHVKPVAAGGDMKKHLMLLSRAADSICDGDLVDSQIRSKQNWSLLPAQAIYASVLPGELMRGYMTQFPTFPSWLGKHSSTGKHDRIVQDLALHMSLRTYSSKRTVNMDYLSLLRDALVQPLTSQGVDGVQDVVALMDTYYLMKEDFENIMEISSWGGKPSPFSKLDPKVKAAFTRAYNKEAHLTPYSLQAIKASRHSTSPSLDSEYNEELNEDDSQSDEKDQDAIETDAMIKKKTKSSKPSKPEKDKEPRKGKGKSSKK

SEQ ID NO: 2176 - DNA, 217 bp, Homo sapiens
ccccgccgggcgccggcgccaattggagcgcctcggggggcgggggaggggcggagcgcgcctcttgatggacggcggcatttccggctctcgcgagtctgggtgggagcgcgccaaatttctcccctgaagcagaggtggtagccaacggctccatgtctctgaggagcggcgggcggcggcgcgcggacccaggcgcggatggcgaggccagcag

SEQ ID NO: 2177 - protein, 20 aa, Homo sapiens
MSLRSGGRRRADPGADGEAS

SEQ ID NO: 2178 - DNA, 405 bp, Homo sapiens
cctccaccctgccccacaaggctccgtacttccacctgcctgggcagccctcacacccatgctccctcctttaggcaggcccagaaaggtgccccttcctgagggtgttgggggatggcggcagagagacagctggtattaggagcttccccatcctaatgtgcaggaccaagttgcccgctctgccagccaggggctccagccatgctggcacaggcatctcagaggtgtgagatgaactccgcctcatgcaggatgcccagggctcggaagcagtaaggaggatgctacagaaaggactgcagaaagaaaaaagccacatggttaacttttcccctggggggcaaaggggcccggctctcaaaaagaaagccaggcacagtcccaacaccaagtgtaaggcag

SEQ ID NO: 2179 - DNA, 477 bp, Homo sapiens
ggcacgaggcgccgtgcggtctccggacgctcgctgctcagcccgatccccgccaactgtgcaggcggctgacccgcagcggcagcggcagcagcgaggactcgagcgctggctgcagcgacaccatggatctctcctttatggccgcgcagctgcccatgatggggggagctttcatggactcgcccaacgaggacttcagcaccgagtactccctgtttaactcctctgccaatgtccacgcggctgccaatggccagggccagccggaagatcctcctcggtcctccaacgacgccgtcttgctatggattgccatcatagctacgctggggaacatcgtggtggtgggcgtggtgtatgccttcaccttctgaggacggcacaccctgcaccaccatggggtgaggcttggcacgtagctctgacttgctgtcggcctttggcttctcctgtgttctagaaccaggagttttg

SEQ ID NO: 2180 - DNA, 1455 bp, Homo sapiens
ggggcccaggccccgccgtcgcgccagccccgcggccccagcgggccgggcactcgcagccgcgctcgggccggcggacgctcgcgccggctcaccatgcactgccacgccgagctgaggctgagctcgcccggccagctcaaagcagccaggcggcgctacaagactttcatgatcgacgagatcctctccaaggagacctgcgattactttgagaaactttccctctactccgtgtgcccgtcgctggtcgtgcgacccaagcccctgcattcctgtacgggctccccttccctgcgggcatatccgctcctctcggtgatcacccgccagcccactgtcatctcccacctggtccctgccaccccgggaatcgcccaggcactgtcctgccaccaggtcaccgaggcggtctctgctgaggccccagggggcgaggccctagccagcagcgagtcagagacggaacagcccacgccccgacagaagaagccccgccggagtcgcaccatcttcaccgagctgcagctcatgggcctggagaagaaattccagaagcagaagtatttgtcaaccccagacaggttggacttggctcagtctctgggactcactcagctgcaggtgaagacctggtatcagaatcgcaggatgaaatggaagaaaatggttcttaaaggtggacaggaagcacccacaaaacccaaaggtcgccccaagaagaactccatccccacatcagaagagattgaagctgaagagaagatgaacagccaggcccagggtcaggagcagctggagccctctcaggggcaggaggagctctgtgaagcacaggaaccgaaagcacgtgatgtccccttagagatggcagagccaccagacccgccccaggagttgccaataccctcttcggaacccccaccattaagctaaagtaaaacccttttgagggaagagggagactggggagaagggaaaagagagaaggcagggagagtagggagagaaaaccttccagcagcccagtaaactgcgggcgaagagatctacccgtctccctccctcccacagttaccattggccttgtcatcgcaagcatttgacaaagacttgcttgtcttgggcctgtcacctcctgaaaggctgctttagctgtggatgcccttgattaagggagagagcgcctaggagctgcctgccccagctggggtgacggctgtagggctgggtctatgttgcaagccctatatcctagcatgcagtggaaagtgcttagctctctccctcctgacctctgggcagccagtcatcaaagcagagagacgtggcggcatgtgggcagcatgcccaggttccttgctgactcagcacttatttctgtagttttaaaaaagaatttaatgtttttggttgtatttttttgggggggtgagggtgggcaaaaacatggga

SEQ ID NO: 2181 - protein, 279 aa, Homo sapiens
MHCHAELRLSSPGQLKAARRRYKTFMIDEILSKETCDYFEKLSLYSVCPSLVVRPKPLHSCTGSPSLRAYPLLSVITRQPTVISHLVPATPGIAQALSCHQVTEAVSAEAPGGEALASSESETEQPTPRQKKPRRSRTIFTELQLMGLEKKFQKQKYLSTPDRLDLAQSLGLTQLQVKTWYQNRRMKWKKMVLKGGQEAPTKPKGRPKKNSIPTSEEIEAEEKMNSQAQGQEQLEPSQGQEELCEAQEPKARDVPLEMAEPPDPPQELPIPSSEPPPLS

SEQ ID NO: 2182 - DNA, 259 bp, Homo sapiens
  misc_feature (222)..(222): n is a, c, g, or t
  misc_feature (258)..(258): n is a, c, g, or t
aagccccggggtcaggtaagtagcctcaggggctcccttggccagagcttctgttcaggcgctctccatgaaagcagccctggaaaactgagcctgaagtcagagacagctcaggcccagcacagggggcagtcccttgccactggctcgggcccttccctggactttttgccttcctccatttttgcttctctgggtctgtcttcgtccatgcctgctctnagatgctcccccaccccttcctgtacctgggaccanc

SEQ ID NO: 2183 - DNA, 267 bp, Homo sapiens
cccggggtgagcgtccccgtcccgctcctgctccttcccatagggacgcgcctgatgcctgggaccggccgctgagcccaaggggaccgaggaggccatggttttatcgctcgcctgctgcggtgcccgctgaggccatgccgggtccccggcgccccgctggctcccgcctgcgcctgctcctgctcctgctgctgccgccgctgctgctgctgctccggggcagccacgcgggcaacctgacggtagccgtggtactgccgctgg

SEQ ID NO: 2184 - DNA, 4975 bp, Homo sapiens
ctctcacacacacacacccctcccctgccatccctccccggactccggctccggctccgattgcaatttgcaacctccgctgccgtcgccgcagcagccaccaattcgccagcggttcaggtggctcttgcctcgatgtcctagcctaggggcccccgggccggacttggctgggctcccttcaccctctgcggagtcatgagggcgaacgacgctctgcaggtgctgggcttgcttttcagcctggcccggggctccgaggtgggcaactctcaggcagtgtgtcctgggactctgaatggcctgagtgtgaccggcgatgctgagaaccaataccagacactgtacaagctctacgagaggtgtgaggtggtgatggggaaccttgagattgtgctcacgggacacaatgccgacctctccttcctgcagtggattcgagaagtgacaggctatgtcctcgtggccatgaatgaattctctactctaccattgcccaacctccgcgtggtgcgagggacccaggtctacgatgggaagtttgccatcttcgtcatgttgaactataacaccaactccagccacgctctgcgccagctccgcttgactcagctcaccgagattctgtcagggggtgtttatattgagaagaacgataagctttgtcacatggacacaattgactggagggacatcgtgagggaccgagatgctgagatagtggtgaaggacaatggcagaagctgtcccccctgtcatgaggtttgcaaggggcgatgctggggtcctggatcagaagactgccagacattgaccaagaccatctgtgctcctcagtgtaatggtcactgctttgggcccaaccccaaccagtgctgccatgatgagtgtgccgggggctgctcaggccctcaggacacagactgctttgcctgccggcacttcaatgacagtggagcctgtgtacctcgctgtccacagcctcttgtctacaacaagctaactttccagctggaacccaatccccacaccaagtatcagtatggaggagtttgtgtagccagctgtccccataactttgtggtggatcaaacatcctgtgtcagggcctgtcctcctgacaagatggaagtagataaaaatgggctcaagatgtgtgagccttgtgggggactatgtcccaaagcctgtgagggaacaggctctgggagccgcttccagactgtggactcgagcaacattgatggatttgtgaactgcaccaagatcctgggcaacctggactttctgatcaccggcctcaatggagacccctggcacaagatccctgccctggacccagagaagctcaatgtcttccggacagtacgggagatcacaggttacctgaacatccagtcctggccgccccacatgcacaacttcagtgttttttccaatttgacaaccattggaggcagaagcctctacaaccggggcttctcattgttgatcatgaagaacttgaatgtcacatctctgggcttccgatccctgaaggaaattagtgctgggcgtatctatataagtgccaataggcagctctgctaccaccactctttgaactggaccaaggtgcttcgggggcctacggaagagcgactagacatcaagcataatcggccgcgcagagactgcgtggcagagggcaaagtgtgtgacccactgtgctcctctgggggatgctggggcccaggccctggtcagtgcttgtcctgtcgaaattatagccgaggaggtgtctgtgtgacccactgcaactttctgaatggggagcctcgagaatttgcccatgaggccgaatgcttctcctgccacccggaatgccaacccatggggggcactgccacatgcaatggctcgggctctgatacttgtgctcaatgtgcccattttcgagatgggccccactgtgtgagcagctgcccccatggagtcctaggtgccaagggcccaatctacaagtacccagatgttcagaatgaatgtcggccctgccatgagaactgcacccaggggtgtaaaggaccagagcttcaagactgtttaggacaaacactggtgctgatcggcaaaacccatctgacaatggctttgacagtgatagcaggattggtagtgattttcatgatgctgggcggcacttttctctactggcgtgggcgccggattcagaataaaagggctatgaggcgatacttggaacggggtgagagcatagagcctctggaccccagtgagaaggctaacaaagtcttggccagaatcttcaaagagacagagctaaggaagcttaaagtgcttggctcgggtgtctttggaactgtgcacaaaggagtgtggatccctgagggtgaatcaatcaagattccagtctgcattaaagtcattgaggacaagagtggacggcagagttttcaagctgtgacagatcatatgctggccattggcagcctggaccatgcccacattgtaaggctgctgggactatgcccagggtcatctctgcagcttgtcactcaatatttgcctctgggttctctgctggatcatgtgagacaacaccggggggcactggggccacagctgctgctcaactggggagtacaaattgccaagggaatgtactaccttgaggaacatggtatggtgcatagaaacctggctgcccgaaacgtgctactcaagtcacccagtcaggttcaggtggcagattttggtgtggctgacctgctgcctcctgatgataagcagctgctatacagtgaggccaagactccaattaagtggatggcccttgagagtatccactttgggaaatacacacaccagagtgatgtctggagctatggtgtgacagtttgggagttgatgaccttcggggcagagccctatgcagggctacgattggctgaagtaccagacctgctagagaagggggagcggttggcacagccccagatctgcacaattgatgtctacatggtgatggtcaagtgttggatgattgatgagaacattcgcccaacctttaaagaactagccaatgagttcaccaggatggcccgagacccaccacggtatctggtcataaagagagagagtgggcctggaatagcccctgggccagagccccatggtctgacaaacaagaagctagaggaagtagagctggagccagaactagacctagacctagacttggaagcagaggaggacaacctggcaaccaccacactgggctccgccctcagcctaccagttggaacacttaatcggccacgtgggagccagagccttttaagtccatcatctggatacatgcccatgaaccagggtaatcttggggggtcttgccaggagtctgcagtttctgggagcagtgaacggtgcccccgtccagtctctctacacccaatgccacggggatgcctggcatcagagtcatcagaggggcatgtaacaggctctgaggctgagctccaggagaaagtgtcaatgtgtagaagccggagcaggagccggagcccacggccacgcggagatagcgcctaccattcccagcgccacagtctgctgactcctgttaccccactctccccacccgggttagaggaagaggatgtcaacggttatgtcatgccagatacacacctcaaaggtactccctcctcccgggaaggcaccctttcttcagtgggtctcagttctgtcctgggtactgaagaagaagatgaagatgaggagtatgaatacatgaaccggaggagaaggcacagtccacctcatccccctaggccaagttcccttgaggagctgggttatgagtacatggatgtggggtcagacctcagtgcctctctgggcagcacacagagttgcccactccaccctgtacccatcatgcccactgcaggcacaactccagatgaagactatgaatatatgaatcggcaacgagatggaggtggtcctgggggtgattatgcagccatgggggcctgcccagcatctgagcaagggtatgaagagatgagagcttttcaggggcctggacatcaggccccccatgtccattatgcccgcctaaaaactctacgtagcttagaggctacagactctgcctttgataaccctgattactggcatagcaggcttttccccaaggctaatgcccagagaacgtaactcctgctccctgtggcactcagggagcatttaatggcagctagtgcctttagagggtaccgtcttctccctattccctctctctcccaggtcccagccccttttccccagtcccagacaattccattcaatctttggaggcttttaaacattttgacacaaaattcttatggtatgtagccagctgtgcactttcttctctttcccaaccccaggaaaggttttccttattttgtgtgctttcccagtcccattcctcagcttcttcacaggcactcctggagatatgaaggattactctccatatcccttcctctcaggctcttgactacttggaactaggctcttatgtgtgcctttgtttcccatcagactgtcaagaagaggaaagggaggaaacctagcagaggaaagtgtaattttggtttatgactcttaaccccctagaaagacagaagcttaaaatctgtgaagaaagaggttaggagtagatattgattactatcataattcagcacttaactatgagccaggcatcatactaaacttcacctacattatctcacttagtcctttatcatccttaaaacaattctgtgacatacatattatctcattttacacaaagggaagtcgggcatggtggctcatgcctgtaatctcagcactttgggaggctgaggcagaaggattacctgaggcaaggagtttgagaccagcttagccaacatagtaagacccccatctc

SEQ ID NO: 2185 - protein, 1342 aa, Homo sapiens
MRANDALQVLGLLFSLARGSEVGNSQAVCPGTLNGLSVTGDAENQYQTLYKLYERCEVVMGNLEIVLTGHNADLSFLQWIREVTGYVLVAMNEFSTLPLPNLRVVRGTQVYDGKFAIFVMLNYNTNSSHALRQLRLTQLTEILSGGVYIEKNDKLCHMDTIDWRDIVRDRDAEIVVKDNGRSCPPCHEVCKGRCWGPGSEDCQTLTKTICAPQCNGHCFGPNPNQCCHDECAGGCSGPQDTDCFACRHFNDSGACVPRCPQPLVYNKLTFQLEPNPHTKYQYGGVCVASCPHNFVVDQTSCVRACPPDKMEVDKNGLKMCEPCGGLCPKACEGTGSGSRFQTVDSSNIDGFVNCTKILGNLDFLITGLNGDPWHKIPALDPEKLNVFRTVREITGYLNIQSWPPHMHNFSVFSNLTTIGGRSLYNRGFSLLIMKNLNVTSLGFRSLKEISAGRIYISANRQLCYHHSLNWTKVLRGPTEERLDIKHNRPRRDCVAEGKVCDPLCSSGGCWGPGPGQCLSCRNYSRGGVCVTHCNFLNGEPREFAHEAECFSCHPECQPMGGTATCNGSGSDTCAQCAHFRDGPHCVSSCPHGVLGAKGPIYKYPDVQNECRPCHENCTQGCKGPELQDCLGQTLVLIGKTHLTMALTVIAGLVVIFMMLGGTFLYWRGRRIQNKRAMRRYLERGESIEPLDPSEKANKVLARIFKETELRKLKVLGSGVFGTVHKGVWIPEGESIKIPVCIKVIEDKSGRQSFQAVTDHMLAIGSLDHAHIVRLLGLCPGSSLQLVTQYLPLGSLLDHVRQHRGALGPQLLLNWGVQIAKGMYYLEEHGMVHRNLAARNVLLKSPSQVQVADFGVADLLPPDDKQLLYSEAKTPIKWMALESIHFGKYTHQSDVWSYGVTVWELMTFGAEPYAGLRLAEVPDLLEKGERLAQPQICTIDVYMVMVKCWMIDENIRPTFKELANEFTRMARDPPRYLVIKRESGPGIAPGPEPHGLTNKKLEEVELEPELDLDLDLEAEEDNLATTTLGSALSLPVGTLNRPRGSQSLLSPSSGYMPMNQGNLGGSCQESAVSGSSERCPRPVSLHPMPRGCLASESSEGHVTGSEAELQEKVSMCRSRSRSRSPRPRGDSAYHSQRHSLLTPVTPLSPPGLEEEDVNGYVMPDTHLKGTPSSREGTLSSVGLSSVLGTEEEDEDEEYEYMNRRRRHSPPHPPRPSSLEELGYEYMDVGSDLSASLGSTQSCPLHPVPIMPTAGTTPDEDYEYMNRQRDGGGPGGDYAAMGACPASEQGYEEMRAFQGPGHQAPHVHYARLKTLRSLEATDSAFDNPDYWHSRLFPKANAQRT

SEQ ID NO: 2186 - DNA, 743 bp, Homo sapiens
catccgctgtcatgcctggctaatttttgtatttttagtagagacgggggttcaccatcttgaccaaactggtcttgaactcttgacctcgtgatccagctgcctcggcctctcagagtgttgggattacaggcgtgagccaccatgcctggcctcttggaatatttaataagctaaaaaattcttatacacaggtagattaattaggtagccaggagtggcccctgaaagtatgtctggcaaaacctagaactgcatcctagccatcactgtaccttctgccctccctgctgtctcctctgccagttacagttaaaaggttgtgggtgaggacgctgggcagagtcccaggcgtctgctgtcagctccccagcccggcctgcctgccgagccatctgggcgtcccacggtggagagtgtggtgcttgtgacgcggtggtgctgggagccatcctggtggcagatgtgggctctcactgcaagtcagtgtaagtccccagggactgtcagcagcacgtcctgctgccctctctctgcagaagccctggtaacctgcgtttggaaatctctacgatttctgaggagctgtcagccctgtcttgtcaccctgtgtggggccgcttcgaatggcttgtccggcgggtgaaaggaccggggcttccttgaagggcccccatgccttggaggccgccggtccccggcttggtggcgccttcactgggggccaccgttggggccccttt

SEQ ID NO: 2187 - DNA, 653 bp, Homo sapiens
tttaaaacttttattaacgcttgaagaaaaataatgcaatgtgacaatgtacaggtcctgttgcctaaatccgtagtagaaacagatattatcacttagcaagctcacgtggtgccaattctgagatcagacggggttgttcctccttaggaagtggccactggaagcattgtttttccatgctatttccgtgaagccttttgcttggttcgagtttaaatttctccctttgtgtgagtatgactatagttctggcctggtgttttctatttatttagttttagatgtcagcattttactatacttggtcctctcacttcagaataacagggctatttattgatacaaaggagaggtgttcagatcatcttgttaagatgcagagctcaaaataaacactaaatctttatttggagatccacatccttcctcaaaggaaggctcatgagtaaatttgtatgcagtataaagcccaagtagagggtgtatttttaatgactactttgcttacattttagattgtgcaaatgtctcaatcaatgcttgcaagaatgtggaccttcctcagttttaagccgaagaccctgagcaataaatactgttgcatgcttccaataacgttgagggatgggattgaaaagcttatttcccca

SEQ ID NO: 2188 - DNA, 385 bp, Homo sapiens
ttgggatgagctgggcagcagtgttggcagtcgcggctgcgagatttgggcacttttgggggtgccggtggcccggtccgatggcgcttggttgggcaggcttctctgaggaggaactgaggagactaaagcagactaaagatccatttgaaccacagcgacgtctccccgcgaagaaaagtcgacaacaacttcagcgagaaaaagcccttgtagagcaaagccaaaaacttgggcttcaagatggatcaacctcattacttccagagcagctgctttcagcaccaaaacagagagttaacgttcaaaaaccacctttttcttcccctactcttccgagtcatttcactctcacctcccccgttggtgatggacaaccacaggg

SEQ ID NO: 2189 - DNA, 426 bp, Homo sapiens
cccagcgcctcggaggtgctgacgcggcatctgatgcagcggcgcctgcgcttaggacctccttctgcgtgccctacagcgccgtccgcaacgaccagttcggcctctcgcacttcaactggccggtgcagggcgccaactaccacgtcctgcgcaccggctgcttccccttcatcaagtaccactgctccaaggctccctggcaggacctggcccggcagaaccgcttcttcacggcgctcaaggtcgtcaacctcggtattccaactttattatatggacttggctcctggttatttgccagagtcacagagactgtgcataccagttatggacccataacagtttattttctcaataaagaagatgaaggtgccatgtattgaaagtgtgcgtcaaagaacataaatatcagtggattttctc

SEQ ID NO: 2190 - DNA, 476 bp, Homo sapiens
  misc_feature (14)..(14): n is a, c, g, or t
  misc_feature (16)..(16): n is a, c, g, or t
  misc_feature (19)..(19): n is a, c, g, or t
  misc_feature (415)..(415): n is a, c, g, or t
  misc_feature (455)..(455): n is a, c, g, or t
gtgattgcccgtgntnctnctgagtctgtcttattgagtagttagcagtattttttcctaaaattcagaagtcatctttgttacacaacacaggggttcaggtagcaataggacacaaaattgctttattctacaactgccagctccaggcagaaataggaaggcaaagagataagagaaggaaaaatgagagaatgaagtctgtatagggtagagcaatagaaagtaagcttcgggtgcctccaacgttcatggctgcctgtctcattggtaaacctcacatttagttacttgtggctactgcccgcacatacacttctgtaattgagaactcttaggagaggactaggggaatcactgggggatagtggggctgggagagaaccccagggttttatatgtatacttttgaccntcagtgtttatttttaaaatgcttattgaatcacacaccnttgcctttgttaggtttaagt

SEQ ID NO: 2191 - DNA, 413 bp, Homo sapiens
tttttttttttttttttgctttcttggacggtccaggaggctttggaacagggctcctcggggttttcttgccaactgtctgagcccgggaacaagcacgggcccccttcctccttcagctcctgcccacactccatttcaccctccgaggccgacgccattgtggagttattgttctcagaatctgctatgggggctgcaggaggcagcctctctccgcactggctgcagaacttgggggtttcctccttggagacatgctggcacgaaggacactccatgggtcctgctgggactgccctgcagatccagaagcaagagcaggagtcgctggcagcctgctatatactacatgtcctgtcacgtgaccacgggttcagtttcattttctggggcccccgagctcgccgcct

SEQ ID NO: 2192 - DNA, 1637 bp, Homo sapiens
aagaactggcctgtacattttcaaggaattcttgagaggttcttggagagattctgggagccaaacactccattgggatcctagctgttttagagaacaacttgtaatggagccttcatctcttgagctgccggctgacacagtgcagcgcattgcggctgaactcaaatgccacccaacggatgagagggtggctctccacctagatgaggaagataagctgaggcacttcagggagtgcttttatattcccaaaatacaggatctgcctccagttgatttatcattagtgaataaagatgaaaatgccatctatttcttgggaaattctcttggccttcaaccaaaaatggttaaaacatatcttgaagaagaactagataagtgggccaaaatagcagcctatggtcatgaagtggggaagcgtccttggattacaggagatgagagtattgtaggccttatgaaggacattgtaggagccaatgagaaagaaatagccctaatgaatgctttgactgtaaatttacatcttctaatgttatcattttttaagcctacgccaaaacgatataaaattcttctagaagccaaagccttcccttctgatcattatgctattgagtcacaactacaacttcacggacttaacattgaagaaagtatgcggatgataaagccaagagagggggaagaaaccttaagaatagaggatatccttgaagtaattgagaaggaaggagactcaattgcagtgatcctgttcagtggggtgcatttttacactggacagcactttaatattcctgccatcacaaaagctggacaagcgaagggttgttatgttggctttgatctagcacatgcagttggaaatgttgaactctacttacatgactggggagttgattttgcctgctggtgttcctacaagtatttaaatgcaggagcaggaggaattgctggtgccttcattcatgaaaagcatgcccatacgattaaacctgcattagtgggatggtttggccatgaactcagcaccagatttaagatggataacaaactgcagttaatccctggggtctgtggattccgaatttcaaatcctcccattttgttggtctgttccttgcatgctagtttagagatctttaagcaagcgacaatgaaggcattgcggaaaaaatctgttttgctaactggctatctggaatacctgatcaagcataactatggcaaagataaagcagcaaccaagaaaccagttgtgaacataattactccgtctcatgtagaggagcgggggtgccagctaacaataacattttctgttccaaacaaagatgttttccaagaactagaaaaaagaggagtggtttgtgacaagcggaatccaaatggcattcgagtggctccagttcctctctataattctttccatgatgtttataaatttaccaatctgctcacttctatacttgactctgcagaaacaaaaaattagcagtgttttctagaacaacttaagcaaattatactgaaagctgctgtggttatttcagtattattcgatttttaattattgaaagtatgtcaccattgaccacatgtaactaacaataaataatataccttac

SEQ ID NO: 2193 - protein, 465 aa, Homo sapiens
MEPSSLELPADTVQRIAAELKCHPTDERVALHLDEEDKLRHFRECFYIPKIQDLPPVDLSLVNKDENAIYFLGNSLGLQPKMVKTYLEEELDKWAKIAAYGHEVGKRPWITGDESIVGLMKDIVGANEKEIALMNALTVNLHLLMLSFFKPTPKRYKILLEAKAFPSDHYAIESQLQLHGLNIEESMRMIKPREGEETLRIEDILEVIEKEGDSIAVILFSGVHFYTGQHFNIPAITKAGQAKGCYVGFDLAHAVGNVELYLHDWGVDFACWCSYKYLNAGAGGIAGAFIHEKHAHTIKPALVGWFGHELSTRFKMDNKLQLIPGVCGFRISNPPILLVCSLHASLEIFKQATMKALRKKSVLLTGYLEYLIKHNYGKDKAATKKPVVNIITPSHVEERGCQLTITFSVPNKDVFQELEKRGVVCDKRNPNGIRVAPVPLYNSFHDVYKFTNLLTSILDSAETKN

SEQ ID NO: 2194 - DNA, 2455 bp, Homo sapiens
taacagcagcagcggcaacggcagcagcagcagcagcaagcgcagcagcagcagcagggctcctgggataactcaggcatagttcaacactatgggtcctcctctgaagctcttcaaaaaccagaaataccaggaactgaagcaggaatgcatcaaagacagcagacttttctgtgatccaacatttctgcctgagaatgattctcttttctacaaccgactgcttcctggaaaggtggtgtggaaacgtccccaggacatctgtgatgacccccatctgattgtgggcaacattagcaaccaccagctgacccaagggagactggggcacaagccaatggtttctgcattttcctgtttggctgttcaggagtctcattggacaaagacaattcccaaccataaggaacaggaatgggaccctcaaaaaacagaaaaatacgctgggatatttcactttcgtttctggcattttggagaatggactgaagtggtgattgatgacttgttgcccaccattaacggagatctggtcttctctttctccacttccatgaatgagttttggaatgctctgctggaaaaagcttatgcaaagctgctaggctgttatgaggccctggatggtttgaccatcactgatattattgtggacttcacgggcacattggctgaaactgttgacatgcagaaaggaagatacactgagcttgttgaggagaagtacaagctattcggagaactgtacaaaacatttaccaaaggtggtctgatctgctgttccattgagtctcccaatcaggaggagcaagaagttgaaactgattggggtctgctgaagggccatacctataccatgactgatattcgcaaaattcgtcttggagagagacttgtggaagtcttcagtgctgagaaggtgtatatggttcgcctgagaaaccccttgggaagacaggaatggagtggcccctggagtgaaatttctgaagagtggcagcaactgactgcatcagatcgcaagaacctggggcttgttatgtctgatgatggagagttttggatgagcttggaggacttttgccgcaactttcacaaactgaatgtctgccgcaatgtgaacaaccctatttttggccgaaaggagctggaatcggtgttgggatgctggactgtggatgatgatcccctgatgaaccgctcaggaggctgctataacaaccgtgataccttcctgcagaatccccagtacatcttcactgtgcctgaggatgggcacaaggtcattatgtcactgcagcagaaggacctgcgcacttaccgccgaatggggaagactgacaattacatcattggctttgagctcttcaaggtggagatgaaccgcaaattccgcctccaccacctctacatccaggagcgtgctgggacttccacctatattgacacccgcacagtgtttctgagcaagtacctgaagaagggcaactatgtgcttgtcccaaccatgttccagcatggtcgcaccagcgagtttctcctgagaatcttctctgaagtgcctgtccagctcagggaactgactctggacatgcccaaaatgtcctgctggaacctggctcgtggctacccgaaagtagttactcagatcactgttcacagtgctgaggacctggagaagaagtatgccaatgaaactgtaaacccatatttggtcatcaaatgtggaaaggaggaagtccgttctcctgtccagaagaatacagttcatgccatttttgacacccaggccattttctacagaaggaccactgacattcctattatagtacaggtctggaacagccgaaaattctgtgatcagttcttggggcaggttactctggatgctgaccccagcgactgccgtgatctgaagtctctgtacctgcgtaagaagggtggtccaactgccaaagtcaagcaaggccacatcagcttcaaggttatttccagcgatgatctcactgagctctaaatctgcaatcccagagaatcctgacaaagcgtgccaccttttattttccgtcaggtgccaggtcttagttaagattcacaatctttagaaagaatgagattcacaataattaactcttcctctcttctgataaattccccatacctcccaatccaagtagcatctgtagctacataacctatatacctccagcagctggacatggggaggcgacagtcctatctagacatcatacacatttgccaagaaaggatctctggggcttccgggggtgagattcaagcaggacaataacaagaggctggacaccctacagatgtctttgatgttttcagttgtttgatatatctcccctgtagggcatgttgaggaaggaggagggctgatcaaggccaagctggtctagcctgacatcctagctcctgactgaacactata

SEQ ID NO: 2195 - protein, 641 aa, Homo sapiens [sequence omitted]

SEQ ID NO: 2196 - DNA, 1553 bp, Homo sapiens
tctaaaggaggtggagagcgcaccgcagcccggtgcagcccggtgcagccctggctttcccctcgctgcggcccgtgccccctttcgcgtccgcaaccagaagcccagtgcggcgccaggagccggacccgcgcccgcaccgctcccgggaccgcgaccccggccgcccagagatgaccgcgaccgaagccctcctgcgcgtcctcttgctcctgctggctttcggccacagcacctatggggctgaatgcttcccggcctgcaacccccaaaatggattctgcgaggatgacaatgtttgcaggtgccagcctggctggcagggtcccctttgtgaccagtgcgtgacctctcccggctgccttcacggactctgtggagaacccgggcagtgcatttgcaccgacggctgggacggggagctctgtgatagagatgttcgggcctgctcctcggccccctgtgccaacaacgggacctgcgtgagcctggacggtggcctctatgaatgctcctgtgcccccgggtactcgggaaaggactgccagaaaaaggacgggccctgtgtgatcaacggctccccctgccagcacggaggcacctgcgtggatgatgagggccgggcctcccatgcctcctgcctgtgcccccctggcttctcaggcaatttctgcgagatcgtggccaacagctgcacccccaacccatgcgagaacgacggcgtctgcactgacattgggggcgacttccgctgccggtgcccagccggcttcatcgacaagacctgcagccgcccggtgaccaactgcgccagcagcccgtgccagaacgggggcacctgcctgcagcacacccaggtgagctacgagtgtctgtgcaagcccgagttcacaggtctcacctgtgtcaagaagcgcgcgctgagcccccagcaggtcacccgtctgcccagcggctatgggctggcctaccgcctgacccctggggtgcacgagctgccggtgcagcagccggagcaccgcatcctgaaggtgtccatgaaagagctcaacaagaaaacccctctcctcaccgagggccaggccatctgcttcaccatcctgggcgtgctcaccagcctggtggtgctgggcactgtgggtatcgtcttcctcaacaagtgcgagacctgggtgtccaacctgcgctacaaccacatgctgcggaagaagaacctgctgcttcagtacaacagcggggaggacctggccgtcaacatcatcttccccgagaagatcgacatgaccaccttcagcaaggaggccggcgacgaggagatctaagcagcgttcccacagccccctctagattcttggagttccgcagagcttactatacgcggtctgtcctaatctttgtggtgttcgctatctcttgtgtcaaatctggtgaacgctacgcttacatatattgtctttgtgctgctgtgtgacaaacgcaatgcaaaaacaatcctctttctctctcttaatgcatgatacagaataataataagaatttcatctttaaatgag

SEQ ID NO: 2197 - protein, 382 aa, Homo sapiens [sequence omitted]

SEQ ID NO: 2198 - DNA, 320 bp, Homo sapiens
  misc_feature (72)..(72): n is a, c, g, or t
gtgattttaactttccaatggcgtttttacctttcttttagaaaactaatgcgatggatattaatacttgtnattgccttgtggtttattgagcttttggatgtgtggagcacttgtagtcagcccatttgtgcaaaatggacaaggacagaggctgagggaagcaagaagtctttgtcttctgaagggcaccacatggatcttcctgatgttgtcattacctcacttcctggttcaggagctgaaattctcaaacaactttttttcaacagtagtgattttctctacatcagggttcctacagcctacattgatattcc

SEQ ID NO: 2199 - DNA, 2881 bp, Homo sapiens
ttttcactttaaagagttctgtgagtcagaagtcattttgactgccctcaataaaattagtaatgcaattggtcattttctctttacagattgttcagttcaagggaatgaagaattcagaataattttggtaaatggattccaatatcgggaataagaataagctgaacagttgacctgctttgaagaaacatactgtccatttgtctaaaataatctataacaaccaaaccaatcaaaatgaattcaacattattttcccaggttgaaaatcattcagtccactctaatttctcagagaagaatgcccagcttctggcttttgaaaatgatgattgtcatctgcccttggccatgatatttaccttagctcttgcttatggagctgtgatcattcttggtgtctctggaaacctggccttgatcataatcatcttgaaacaaaaggagatgagaaatgttaccaacatcctgattgtgaacctttccttctcagacttgcttgttgccatcatgtgtctcccctttacatttgtctacacattaatggaccactgggtctttggtgaggcgatgtgtaagttgaatccttttgtgcaatgtgtttcaatcactgtgtccattttctctctggttctcattgctgtggaacgacatcagctgataatcaaccctcgagggtggagaccaaataatagacatgcttatgtaggtattgctgtgatttgggtccttgctgtggcttcttctttgcctttcctgatctaccaagtaatgactgatgagccgttccaaaatgtaacacttgatgcgtacaaagacaaatacgtgtgctttgatcaatttccatcggactctcataggttgtcttataccactctcctcttggtgctgcagtattttggtccactttgttttatatttatttgctacttcaaggtaagaaaactttttttctatcatttccatttttaccttctttacacagaattcctcatcaaatgagtgtttctatttaaacttttttcttccatagatatatatacgcctaaaaaggagaaacaacatgatggacaagatgagagacaataagtacaggtccagtgaaaccaaaagaatcaatatcatgctgctctccattgtggtagcatttgcagtctgctggctccctcttaccatctttaacactgtgtttgattggaatcatcagatcattgctacctgcaaccacaatctgttattcctgctctgccacctcacagcaatgatatccacttgtgtcaaccccatattttatgggttcctgaacaaaaacttccagagagacttgcagttcttcttcaacttttgtgatttccggtctcgggatgatgattatgaaacaatagccatgtccacgatgcacacagatgtttccaaaacttctttgaagcaagcaagcccagtcgcatttaaaaaaatcaacaacaatgatgataatgaaaaaatctgaaactacttatagcctatggtcccggatgacatctgtttaaaaacaagcacaacctgcaacatactttgattacctgttctcccaaggaatggggttgaaatcatttgaaaatgactaagattttcttgtcttgctttttactgcttttgttgtagttgtcataattacatttggaacaaaaggtgtgggctttggggtcttctggaaatagttttgaccagacatctttgaagtgctttttgtgaatttatgcatataatataaagacttttatactgtacttattggaatgaaatttctttaaagtattacgatgcgctgacttcagaagtacctgccatccaatacggtcattagattgggtcatcttgattagattagattagattagattgtcaacagattgggccatccttactttatgataggcatcattttagtgtgttacaatagtaacagtatgcaaaagcagcattcaggagccgaaagatagtcttgaagtcattcagaagtggtttgaggtttctgttttttggtggtttttgtttgttttttttttttttcaccttaagggaggctttcatttcctcccgactgattgtcacttaaatcaaaatttaaaaatgaataaaaagacatacttctcagctgcaaatattatggagaattgggcacccacaggaatgaagagagaaagcagctccccaacttcaaaaccattttggtacctgacaacaagagcattttagagtaattaatttaataaagtaaattagtattgctgcaaatagctaaattatatttatttgaattgatggtcaagagattttccattttttttacagactgttcagtgtttgtcaagcttctggtctaatatgtactcgaaagactttccgcttacaatttgtagaaacacaaatatcgttttccatacagcagtgcctatatagtgactgattttaactttcaatgtccatctttcaaaggaagtaacaccaaggtacaatgttaaaggaatattcactttacctagcagggaaaaatacacaaaaactgcagatacttcatatagcccattttaacttgtataaactgtgtgacttgtggcgtcttataaataatgcactgtaaagattactgaatagttgtgtcatgttaatgtgcctaatttcatgtatcttgtaatcatgattgagcctcagaatcatttggagaaactatattttaaagaacaagacatacttcaatgtattatacagataaagtattacatgtgtttgattttaaaagggcggacattttattaaaatcaatattgtttttgctttttctgaggagtctctttcagtttcattttttctcatcccatgacttccctccgatggt

SEQ ID NO: 2200 - protein, 384 aa, Homo sapiens
MNSTLFSQVENHSVHSNFSEKNAQLLAFENDDCHLPLAMIFTLALAYGAVIILGVSGNLALIIIILKQKEMRNVTNILIVNLSFSDLLVAIMCLPFTFVYTLMDHWVFGEAMCKLNPFVQCVSITVSIFSLVLIAVERHQLIINPRGWRPNNRHAYVGIAVIWVLAVASSLPFLIYQVMTDEPFQNVTLDAYKDKYVCFDQFPSDSHRLSYTTLLLVLQYFGPLCFIFICYFKIYIRLKRRNNMMDKMRDNKYRSSETKRINIMLLSIVVAFAVCWLPLTIFNTVFDWNHQIIATCNHNLLFLLCHLTAMISTCVNPIFYGFLNKNFQRDLQFFFNFCDFRSRDDDYETIAMSTMHTDVSKTSLKQASPVAFKKINNNDDNEKI

SEQ ID NO: 2201 - DNA, 2056 bp, Homo sapiens
gtggaaacctcttcagcatttgcttggaatcagtaagctaaaaacaaaatcaaccgggaccccagcttttcagaactgcagggaaacagccatcatgagtgaggtcaccaagaattccctggagaaaatcctcccacagctgaaatgccatttcacctggaacttattcaaggaagacagtgtctcaagggatctagaagatagagtgtgtaaccagattgaatttttaaacactgagttcaaagctacaatgtacaacttgttggcctacataaaacacctagatggtaacaacgaggcagccctggaatgcttacggcaagctgaagagttaatccagcaagaacatgctgaccaagcagaaatcagaagtctagtcacttggggaaactacgcctgggtctactatcacttgggcagactctcagatgctcagatttatgtagataaggtgaaacaaacctgcaagaaattttcaaatccatacagtattgagtattctgaacttgactgtgaggaagggtggacacaactgaagtgtggaagaaatgaaagggcgaaggtgtgttttgagaaggctctggaagaaaagcccaacaacccagaattctcctctggactggcaattgcgatgtaccatctggataatcacccagagaaacagttctctactgatgttttgaagcaggccattgagctgagtcctgataaccaatacgtcaaggttctcttgggcctgaaactgcagaagatgaataaagaagctgaaggagagcagtttgttgaagaagccttggaaaagtctccttgccaaacagatgtcctccgcagtgcagccaaattttacagaagaaaaggtgacctagacaaagctattgaactgtttcaacgggtgttggaatccacaccaaacaatggctacctctatcaccagattgggtgctgctacaaggcaaaagtaagacaaatgcagaatacaggagaatctgaagctagtggaaataaagagatgattgaagcactaaagcaatatgctatggactattcgaataaagctcttgagaagggactgaatcctctgaatgcatactccgatctcgctgagttcctggagacggaatgttatcagacaccattcaataaggaagtccctgatgctgaaaagcaacaatcccatcagcgctactgcaaccttcagaaatataatgggaagtctgaagacactgctgtgcaacatggtttagagggtttgtccataagcaaaaaatcaactgacaaggaagagatcaaagaccaaccacagaatgtatccgaaaatctgcttccacaaaatgcaccaaattattggtatcttcaaggattaattcataagcagaatggagatctgctgcaagcagccaaatgttatgagaaggaactgggccgcctgctaagggatgccccttcaggcataggcagtattttcctgtcagcatctgagcttgaggatggtagtgaggaaatgggccagggcgcagtcagctccagtcccagagagctcctctctaactcagagcaactgaactgagacagaggaggaaaacagagcatcagaagcctgcagtggtggttgtgacgggtaggaggataggaagacagggggccccaacctgggattgctgagcagggaagctttgcatgttgctctaaggtacatttttaaagagttgttttttggccgggcgcagtggctcatgcctgtaatcccagcactttgggaggccgaggtgggcggatcacgaggtctggagtttgagaccatcctggctaacacagtgaaatcccgtctctactaaaaatacaaaaaattagccaggcgtggtggctggcacctgtagtcccagctacttgggaggctgaggcaggagaatggcgtgaacctggaaggaagaggttgcagtgagccaagattgcgcccctgcactccagcctgggcaacagagcaagactcggaattcctgcagcccgggggatccactattctagagcgccgcaacggccgtggagtccagagatg

SEQ ID NO: 2202 - protein, 490 aa, Homo sapiens
MSEVTKNSLEKILPQLKCHFTWNLFKEDSVSRDLEDRVCNQIEFLNTEFKATMYNLLAYIKHLDGNNEAALECLRQAEELIQQEHADQAEIRSLVTWGNYAWVYYHLGRLSDAQIYVDKVKQTCKKFSNPYSIEYSELDCEEGWTQLKCGRNERAKVCFEKALEEKPNNPEFSSGLAIAMYHLDNHPEKQFSTDVLKQAIELSPDNQYVKVLLGLKLQKMNKEAEGEQFVEEALEKSPCQTDVLRSAAKFYRRKGDLDKAIELFQRVLESTPNNGYLYHQIGCCYKAKVRQMQNTGESEASGNKEMIEALKQYAMDYSNKALEKGLNPLNAYSDLAEFLETECYQTPFNKEVPDAEKQQSHQRYCNLQKYNGKSEDTAVQHGLEGLSISKKSTDKEEIKDQPQNVSENLLPQNAPNYWYLQGLIHKQNGDLLQAAKCYEKELGRLLRDAPSGIGSIFLSASELEDGSEEMGQGAVSSSPRELLSNSEQLN

SEQ ID NO: 2203 - DNA, 7568 bp, Homo sapiens
gcgcggaggcagggaaccggagccttggagcgacccaacccctcgtctcgctgccctcccgcgcctgcaacggtgcgcggagactccggcgaactcagacacccaacggcggagaacagaagcggcaggcggcggacgtggcccggaagctgcgcgccgaacgcagcgcacccgctgccgagcagaggagccgcgcctttccccgaccctcggctccagcccccggcgcctgccgcctcgcagcccctctgcgtcctcggctcgggggccggcaccggcgatgccgagcggacgctccagtcctccgacccgctgaagaagcagcagccgctcgcccggagcctacggggattgtgcgagcggatcgtgctcggtggaggctcgggctgcggggcgcggggactccggggggcggggggagggaccgctctgtcggtgcccggcgccagccgcggctttgaagggtctccctcccctgcccttagcagctctgccacggactccgggaggctgcgggcggcgtcctgagggctccccagcagacccaatcggacttgagaaggtgatcgctctgctctcccaacccccttccctccccattccccccacttaactttttgtctccgttcatccgcggcttcgtcccctccccggcagacccacccgcggctgtgacaaccgcccggggcatgggccccccaacacggctcctagaggccccgcggcctcgcaagatgtgagaggccctccccgggcagaatcggagcttcaggagaggagctaataccccgccccccgtccctcacatcaggcggggtggaggtgcgcgctgagcccccgcggtgctgagcgtcccggagcgcccaatcctgggctggaacgagtagctggccggaggcgcgccgcggagagccggctgtcatgccctattgatccccctctgccccccgccaagtatgtttgggctggaccaattcgagccccaggtcaacagcaggaacgctggccagggcgagaggaactttaacgagaccggactgagcatgaacacccactttaaggccccggctttccacactggggggccccctggccctgtggatcctgctatgagcgcgctggggcaacccccgatcttgggcatgaacatggagccctacggcttccacgcgcgcggccactcggagttgcacgcaggggggctgcaagcgcagcctgtgcacggcttctttggcggccagcagcctcaccacggccacccgggaagtcatcatccccaccagcatcacccccactttgggggcaacttcggtggcccggaccccggggcctcgtgcctgcacgggggtcgcctgctcggctacggcggcgcagccggaggcctgggcagccagccgcccttcgccgagggctatgagcacatggcggagagccaggggcctgagagcttcggcccgcagcgaccggggaacctcccggacttccacagttcaggtgcctccagccaccgcgtgccggccccatgcctgccgctggaccagagccctaaccgagccgcctccttccacggcctgccgtcctccagcggctccgattcccacagtctggagccacggagggtgacgaaccaaggagccgtcgactcgctggaatacaattaccgggcgaggcgccctcgggacattttgacatgttttcgccctctgactccgaagggcagctgcctcattatgcagcgggtcgccaggttcctggggggcggctttcccggggcgccctcggccatgcccagagctgcgggcatggtgggcttgtccaaaatgcacgcccagccaccgcagcagcagccccagcagcagcagcagccccagcagcagcagcagcatggtgtgttctttgagaggttcagtggggccagaaagatgcctgtgggtctggagccctcagtgggctccaggcacccgttaatgcagcctccccagcaggccccgccaccccctcagcagcagcccccgcagcagccgccacagcagcagccgccgccgccacccgggcttctagtccgacaaaattcgttgcccgcctgcgctccctcggccccagcagggcgaggcgggcacgcccagcggcggcctgcaggacggaggccccatgctgcccagccagcacgcgcaattcgagtatcccatccaccggctggagaaccggagcatgcacccttattccgagcctgttttcagcatgcagcatcctcctccgcagcaggcgcccaaccagcggctgcagcatttcgacgcgcccccctacatgaacgtggccaagaggcgcgcttcgactttccgggcagcgcgggagtggaccgctgcgcttcgtggaacggcagcatgcacaacggcgctctggataatcacctctccccttccgcctacccaggcctacccggcgagttcacaccgcctgtgcccgacagcttcccttcggggccgcccctgcagcatccggccccggaccaccagtccctgcaacagcagcagcagcagcagcagcagcagcaacagcagcagcagcagcagcaacagcaacagcaacagcagcagcagcagcagcgccaaaacgcggccctcatgattaagcagatggcgtcgcggaatcagcagcagcggctgcgccagcccaacctggctcagctaggccaccccggggacgtgggccagggcggcctggtgcatggcggcccggtgggcggcttggcccagccgaactttgagcgcgaaggcggcagcacgggcgccgggcgtctgggcaccttcgagcagcaggcgccgcacttggcgcaagagagcgcgtggttctcaggtccgcatccgccgcccggagacctgctgccccgtaggatgggcggctcgggtctgcccgctgactgtggcccgcacgaccccagcctggcgccccctcctccgcctggtggctcgggggtgctgttccggggccctctgcaggagccgatgaggatgcccggagaggccacgtgccgcgctgccttcaccggcctgcagttcgggggcagtctgggaggcctgggtcagctgcagtcgcccggggcgggcgtggggctccccagcgctgcttcggagcgccggcccccgccgccggactttgctacgtctgcgctcgggggccagccgggctttccgtttggtgcagccggccggcagtccacgccgcacagcggtccaggcgtgaactcgccccccagcgcgggagggggcggtggcagctctggtggcggcggtggcgggggtgcctacccgccgcagcctgatttccagcccagccagcgcacctcggccagtaaattgggcgcgctctcgctgggctccttcaacaagcccagctccaaggacaacctgttcggccagagctgcctggctgcgctctccaccgcttgccagaacatgatcgccagcctcggggcccccaacctcaacgtgaccttcaacaagaagaacccgccagagggcaagaggaaactgagccagaacgagaccgacggcgcggcagtggccggcaacccgggctcggattacttcccaggagggactgctcctgggggccccaggacccggaggccgtccgggaccagtagcagcggctccaaagcctcggggccgcccaaccctccagcccagggggacggcaccagcctctcccccaactacaccctggaatccacgtcggggaatgacggcaagccggtctccgggggcggcggccggggacggggtcgcagaaaaagggacagtggtcacgtgagccctggcaccttctttgacaagtactcggcggctccggacagcgggggcgcacctggggtgagcccagggcagcagcaagcgtcaggcgcagccgtcgggggaagctccgcaggcgagacgcgcggggcaccgacgccccacgaaaaggcgctcacgtcgccatcctgggggaagggggctgagttgctcctgggggatcagccggacctcattgggtccctggacggcggggccaagtcggacagtagttcgccaaacgtgggtgagttcgcctcggacgaggtgagcacgagctacgccaatgaggacgaggtgtcgtccagctctgacaacccccaggcactagttaaagcgagcaggagtcccctggtgaccggctcgcccaaactccctccccgtggggtaggcgccggggaacacggaccgaaggcgcccccgcccgccctcggcctgggcatcatgtctaactctacctcgacccctgacagctacggcggcggtgggggcccgggccatccgggcactccgggcctggagcaggtccgcaccccgacgagcagcagcggcgccccgccacccgacgagatccaccccctggagatccttcaggcgcagatccagctacagaggcagcagttcagcatctccgaggaccagcctctggggctgaagggtggcaagaagggtgagtgcgccgtcggggcctcaggggcgcagaatggcgacagcgagctgggcagctgctgctccgaggcggtcaagagcgccatgagcaccattgacctggactcgctgatggcagagcacagcgctgcctggtacatgcccgctgacaaggccctggtggacagcgcggacgacgacaagacgttggcgccctgggagaaggccaaaccccagaaccccaacagcaaagaagcccacgacctccctgcaaacaaggcctcagcatcccagcctggcagccacttgcagtgcctgtctgtccactgcacagacgacgtgggtgacgccaaggctcgagcctccgtgcccacctggcggtccctgcattctgacatctccaacagatttgggacattcgtggctgccctaacttgaatgacaagaaagatcccctcctctaccaggcccttcctctccccctgtctgtttccttccccctcaaccttaccccacccctctgttaatttgaaagggccactattgctgagtggatgagttttttttttttcctctaggttggtacctgcttagtggcatatggaccggaaagggttaatttaaagggggggaacctcaaaagtttttttaaaaaagaaacttgtctgccacagtatgttaccagtgttaacccttctgcagttagcaaacttttgcttaagcctttttcctctagatactccccatgtttcggtaatcttggcatacattttttagatgacctctttccttgttttgttttcatgctgctgtatgtccaagtattgttatttcataataagacaagagttgctttcttttttattctttttccttttcttaccccctccccttttattttctttttgctttgttcactgcttattaaaatggaaatcctggagaatagtagttctggaatattgccgggtgaaagtccaattgtcatcacaatgttatatattgacaccccagtgtcatcagtcaggcaggagccaaacaatgaatgcccctcttaggtattccgcctgggattttgttttgtctgttccctaagaaaatatattttcattcctgcaaacacagtgctcagccttcagttcccttccacttgagttctctcttctcctgctggaagccgcccctctctgcgatggacgtgaggacgtgtccagctctgctctgtgggaaggagttggaatgttcgacagcagtgttttctctccttttctgggcctcctcgcaaatgcccaggccctgcattttcacgctgtgctaagcagcctttggtctgcatgggggatggtgtgctcccagcctgcagtctttggagcaaggctgctgcccgtgccttgggtgctggagttggaggaggctgttctcagccctttcccttttctgaaagctgttcctggccgggcatcccagggaagaaggaggggactgcgtgtatctcctccacctctcccattccatccccagtccagcctgggcaaccccacccctgggagggatgaggcaccctcttgctcagcctgctcagccttctctgagcctttgcagggatctgcagactcctgagggctagaggacagagaaagagaatagaatgaaatgactttgattcctgcgccttttagttttgaactctggaattcctctgccccctccccaacatttttttggaatctcaccctgttgcaaaactagagccatgtcccaagcatctcacaaaggaataactgctctgagcagagatgagtggtggttggcaggggcaggcaactttgggtgctgctgatgcctgcaaaagccatttatggcttgtggtggggggcacatagattccccggtgggttagacaggaagtaactgatatcacttcacccaaatatataaccgtgatggttatctatttaatttcagtttttgttaacgagcgtgtcttactaaaacgctccactttgagctcccccaccccctccaggtcctcagagtttgcagatctgggctttctaaagcaagtgacctgaaggctctgggctcaccatacaacacccacgttgtttatttcaaagaacttttcagcgaagggagaggagctttcagaaaaacctcactctttcccctcccttctcccctctttccttctgccggtccttttggctggggtctgagtctgcggttctcgcctgggcagtcttgacgaggagcaaaccccgccttcagagggcagacaaagcaggtggcatgaattgatcagcgagaaaggtgtgagccgaggcagttcctgcgttctgctacaaaaggaatggaaagggaagggaatttccccccaccatgggctgtgggagagttgaccgtattctgggcaagactccatgacccctctgattctgcagtgtacagctgtttgagagcctcatcattttacttttgaaacaggaatgatttctccttaattgcttaaggccggggagcaaagtgtcttaacttctgtctttgactttcccagcgttgagtcatcaacactttgccaattagctcatggtcctggcaacctcagaaacccctgaagttttaaaaactttctcgctccccacgaccccagaatgaaacagctttaaaaatagccttaagcaaaaggatgttatttcattaaatttggtttaatggaaagaataaaagtaaatgaaaaacacaccctacacactagactccgaacactggtaatcagtactgcatagcaaactctttgggaaagaaaacgaaaatgttattgcacatgtaaaatatgaaaacttaactctgctgtgtgttaggcaatcctgtaatcttttttgactcttaaaagaaattcatttctgaaatgcttggttggaagactgtgacaatagctcatgaaattgagtgttatttttttctttcttttttaaaaaaatatgtaaagtgcagtcttctgtattcctgcatattgtatatacctgtatatgttttcctgagcagttaaataacaataaatatgacgttaatggtgaaaaaaaaaaaaaa

SEQ ID NO: 2204 - protein, 1319 aa, Homo sapiens
MFGLDQFEPQVNSRNAGQGERNFNETGLSMNTHFKAPAFHTGGPPGPVDPAMSALGQPPILGMNMEPYGFHARGHSELHAGGLQAQPVHGFFGGQQPHHGHPGSHHPHQHHPHFGGNFGGPDPGASCLHGGRLLGYGGAAGGLGSQPPFAEGYEHMAESQGPESFGPQRPGNLPDFHSSGASSHRVPAPCLPLDQSPNRAASFHGLPSSSGSDSHSLEPRRVTNQGAVDSLEYNYRARRPRDILTCFRPLTPKGSCLIMQRVARFLGGGFPGAPSAMPRAAGMVGLSKMHAQPPQQQPQQQQQPQQQQQHGVFFERFSGARKMPVGLEPSVGSRHPLMQPPQQAPPPPQQQPPQQPPQQQPPPPPGLLVRQNSLPACAPSAPAGRGGHAQRRPAGRRPHAAQPARAIRVSHPPAGEPEHAPLFRACFQHAASSSAAGAQPAAAAFRRAPLHERGQEARFDFPGSAGVDRCASWNGSMHNGALDNHLSPSAYPGLPGEFTPPVPDSFPSGPPLQHPAPDHQSLQQQQQQQQQQQQQQQQQQQQQQQQQQQQRQNAALMIKQMASRNQQQRLRQPNLAQLGHPGDVGQGGLVHGGPVGGLAQPNFEREGGSTGAGRLGTFEQQAPHLAQESAWFSGPHPPPGDLLPRRMGGSGLPADCGPHDPSLAPPPPPGGSGVLFRGPLQEPMRMPGEATCRAAFTGLQFGGSLGGLGQLQSPGAGVGLPSAASERRPPPPDFATSALGGQPGFPFGAAGRQSTPHSGPGVNSPPSAGGGGGSSGGGGGGGAYPPQPDFQPSQRTSASKLGALSLGSFNKPSSKDNLFGQSCLAALSTACQNMIASLGAPNLNVTFNKKNPPEGKRKLSQNETDGAAVAGNPGSDYFPGGTAPGGPRTRRPSGTSSSGSKASGPPNPPAQGDGTSLSPNYTLESTSGNDGKPVSGGGGRGRGRRKRDSGHVSPGTFFDKYSAAPDSGGAPGVSPGQQQASGAAVGGSSAGETRGAPTPHEKALTSPSWGKGAELLLGDQPDLIGSLDGGAKSDSSSPNVGEFASDEVSTSYANEDEVSSSSDNPQALVKASRSPLVTGSPKLPPRGVGAGEHGPKAPPPALGLGIMSNSTSTPDSYGGGGGPGHPGTPGLEQVRTPTSSSGAPPPDEIHPLEILQAQIQLQRQQFSISEDQPLGLKGGKKGECAVGASGAQNGDSELGSCCSEAVKSAMSTIDLDSLMAEHSAAWYMPADKALVDSADDDKTLAPWEKAKPQNPNSKEAHDLPANKASASQPGSHLQCLSVHCTDDVGDAKARASVPTWRSLHSDISNRFGTFVAALT

SEQ ID NO: 2205 - DNA, 439 bp, Homo sapiens
  misc_feature (84)..(84): n is a, c, g, or t
  misc_feature (341)..(341): n is a, c, g, or t
ggcaggaccgaaccgctccttctttaaatatataaatttcagcccaggtcagcctcggcggcccccctcaccgcgctcccggcnccctcccgtcagttcgccagctgccagccccgggaccttttcatctcttcccttttggccggagagccgagttcagatccgccactccgcacccgagactgacacactgaactccacttcctcctcttaaatttatttctacttaatagccactcgtctctttttttccccatctcattgctccaagaatttttttcttcttactcgccaaagtcagggttccctctgcccgtcccgtattaatatttccacttttnggaactactgggccttttctttttaaaggaattcaagcaggatacgtttttctgttgggcattgactaagattgtttgcaaaagtttcgcatcaaaaa

SEQ ID NO: 2206 - DNA, 1537 bp, Homo sapiens
gctctcattaccttctgcccatcacttaataaatagccagccaattcatcaacattctggtacactgttggagagatgagacagtcacaccagctgcccctagtggggctcttactgttttcttttattccaagccaactatgcgagatttgtgaggtaagtgaagaaaactacatccgcctaaaacctctgttgaatacaatgatccagtcaaactataacaggggaaccagcgctgtcaatgttgtgttgtccctcaaacttgttggaatccagatccaaaccctgatgcaaaagatgatccaacaaatcaaatacaatgtgaaaagcagattgtcagatgtaagctcgggagagcttgccttgattatactggctttgggagtatgtcgtaacgctgaggaaaacttaatatatgattaccacctgactgacaagctagaaaataaattccaagcagaaattgaaaatatggaagcacacaatggcactcccctgactaactactaccagctcagcctggacgttttggccttgtgtctgttcaatgggaactactcaaccgccgaagttgtcaaccacttcactcctgaaaataaaaactattattttggtagccagttctcagtagatactggtgcaatggctgtcctggctctgacctgtgtgaagaagagtctaataaatgggcagatcaaagcagatgaaggcagtttaaagaacatcagtatttatacaaagtcactggtagaaaagattctgtctgagaaaaaagaaaatggtctcattggaaacacatttagcacaggagaagccatgcaggccctctttgtatcatcagactattataatgaaaatgactggaattgccaacaaactctgaatacagtgctcacggaaatttctcaaggagcattcagtaatccaaacgctgcagcccaggtcttacctgccctgatgggaaagaccttcttggatattaacaaagactcttcttgcgtctctgcttcaggtaacttcaacatctccgctgatgagcctataactgtgacacctcctgactcacaatcatatatctccgtcaattactctgtgagaatcaatgaaacatatttcaccaatgtcactgtgctaaatggttctgtcttcctcagtgtgatggagaaagcccagaaaatgaatgatactatatttggtttcacaatggaggagcgctcatgggggccctatatcacctgtattcagggcctatgtgccaacaataatgacagaacctactgggaacttctgagtggaggcgaaccactgagccaaggagctggtagttacgttgtccgcaatggagaaaacttggaggttcgctggagcaaatactaataagcccaaactttcctcagctgcataaaatccatttgcagtggagttccatgtttattgtccttatgccttcttcttcatttatcccagtacgagcaggagagttaataacctccccttctctctctacatgttcaataaaagttgttgaaagattaac

SEQ ID NO: 2207 - protein, 433 aa, Homo sapiens [sequence omitted]

SEQ ID NO: 2208 - DNA, 155937 bp, Homo sapiens
gatcttgcctcccactacactctcactggcccactaagctctggcttcattttgaatatcccaaacttgtcctctcctttgggatcctgagtttgccaccctctttgtccagaatgtttttgccctagattttcacagactgacttcttgccattcagagctcagcccaaatatcacctgtccaaagagtcctgcctcttcacccagttactttatcccattccctattttgctttcttcgtagttcctatcatgggtttgcataagtaagcatgacttttacctgtcaacttcttgcctgccttccctactagaatataagctctgtgaaagcatggactgtgtcctcttaccaccatgtctccaaggatagtactggcacccaggggatgctcaatagatgaatgaatgaaggctcaatagttacaaagccaacttacagaaaaagagaagccatttaggactgcacaatctattaatactttctagggcacaggtctcctagaccaggggctcccaactcccaggccacaggctggtatcagtccattgcctgttaggaaccaggccacacagtaggaggtaaacagtgggtgagtaagtgaagctctgtctgtatttacaaccactccccatcacttgcattaccgcctgagctctgcctcctgtcagatcagcagcagattctcacaggagtgcaaaccctattgtgaactgcgcacatgagggatctaggctgcacgctccttatgagaatccaaggcctgatgatctgtcactgtcttccatcacccccagatctagctgcaggaaaacaagctcagggctcccactgattctacattataatgagttgtataattatttcattatatattacaatgtaacaataatagaaataaagtgcacaataaatgtaatgcacttgaatcatccccaaaccatccccatccccagtccatggaaaaattgtcttccatgaaactggtccctagtgccaaaaaagttggggaccactgccctagactgtcttaattctcttctgctgtccatttgttttgggggttttttggtttaatcggtgtctccctccagaagtaggaaggagaaacacaaggtaaaagaggagaaactttgccagtggccttaaaagcctttatgaggaaaaagctgaaagtatcttgagaagtttttaatgtttgaagccatttttcttcctatatccattaatgaatggctaatattgttttatttgctttaaaaggactaccaagctctaatcatagggtttatttcttttccagaaagcggatgttggtgctgttaatcaaaagcctttgaatcaaggtcatatgatttctaacagattatttccctcacaacatgtctttgtctcacagcaacaaatcatatcattaaaatcaccaaggcatgtgggctaagtgtttgattagctgtaactttcatttcagaaacggccacctgtggtaaaaagttatgccagtttatgtgagcagatgaaaatgatacacctcatcaatttttaaaattagggtactgacaatatagtcctccatgctgtccttttattgttgaaaacaaaggaaaactgagtatcagtggatcagtaagaaatgagtgttcccttttgtaagtggaatctgaccagctttgtctggaatttgactggttgtatggaaaaggttcctaaataggctggacacgcctgtaatcctagcactttgggaggcctaggtgggtggatctcttgagcccaggagtttaagaccagcctgagcaacaaggtgaaatcccatctctacaaaaaaataccaaaaaaaaaaaagaaacaagaaaagttgctaaataaaaactatgtttatcaagtaaatgaccatcatttcactgctaaagttttaatcatttttttccaattactatgacgaaggcttgccaatttacttgggtactatacatgtaaaataatggctaacatttattgatcacttgctacatgtcaagtactgttctaagttccatattgagaattatagagttcaattttccattttcataaagaagtttaactcagaataaaaatccagattcctcaccatggcccatccagccttcatcttctagcacaccattctctccttgctcactctgctaggccccactgacttgcttttggtatcttaatgacatcaagctccttgcttccttagctccttgcttccttgaccttctcatcctttaggtttcagctcagatgtctacttaaagagattctctggtcaacctgtctattaatgtctgttccaacaaccagttacttcccttatagcacttataatttgtcattctgtttctgacttctacttcttatccatctctccagtagactgtgaattccatgaaaacaaggacggtgtataactatttgctgaataaattgataagtggatggacaggttctgtttccaaatttcattgactcccttctttgcttccctcccaggccaaaaaaaaaaaaatggcttttccaaggcttcacattacaaagactctactcatgattaaggctcactcctttccccaggaagtagagaacagatttctttttattcattcaacaaatatttattgaacctcgatggccaggcacttggtgaacaaagataaataggatacagttcccttgggattagctcaaaataaatggagagagaaagagaaaatctatgtgtctgtgggtgtctgtttttaaacacaaacccacactagttagtgtgtgagaaggggagacatatgagtcgacagccacctacttgagaatccctgttcagaaatagcttccctgcggacttgtccccaatgcctacagttccatcaagagagttaattctgtaggagagggaaggtggatgatgtgatagacaaatgatttgctagcatggtaactcctcagttcagaggcagtgttaatcacaaagcaaaaatgaaaatcttgcacaatcacaaatgggcgcccaggactgtatgttatttgtcaatcctgtgatcttcttggcctgagtacacacgatcttcatgttactgagcttttaccatttggaatatgtaaaccaaatcctaaatgaggttttccatttatcagtcacaacatgcaacatttttcttccttattaagaattaaaagagtttatgagagagaaataaaatctgattttcaagttgtcaaaaaaaatcgtgatataatgcaatcagtttagccaggaaacaaaatggccaatataaactgttgcaggaactcccacagctgtaagcagctgtcgttcctgaaaggcaactccttctttatcatttcttccatctggtttattttttgtgcatgcattctagcatacaaataatccctccccttttttttttttggtccacaggtacaattgtacacatgtacctgtaattttattctattcagtctccttggtagagaaagcaataattttataataaaatgagggctctctagacttaattctctctcttttcccaatatatttgcatcatgagtttcatttgattgcacagccatgaactccatgctggcgaccttcagtggaaggattcggaggcagcaggaggccgacttctccagggggtggggtgaggagaaaacgtagacttattccctttcttatttccacctactttgaaaactttttttttttacatgaaaggggcgaccaataaccatttttgctttaacttgcaaaaagcttagatatgccatttgcatggtgatcattatttatttatatattcattaatgggtaaggaagtaatgctcttctaaagctgagtagagccacgtagccatggtttccaactgcacaagcatcccttaggtgaacagctcttttgaagtggttttgttagcaattaagtgcagttatagccctgacatgaaactaagcatttgtacacctgccatgaatgcttaaaatctgtgccagtgagtgggatctggaagtagaggagcaccctgcagaactgggctacaggatgcttttaaataataacaataataactaaaagctgttagtattgagggcttaccaccagccagccactttcctagtgcctttaatacattatctcatttaatcctcacagcaaccttcgtgggactcattgctgctggaggcctcataaatattctagggctacaatgccctgcaaaaaacccatcagcactggcaaccctgaccctcttctctgtggttagatgggagccagggccaagggacatgcaaggtgaattggggcgagcttgccttctatatgtgctgtttccctttgttcttttcagtttttactcatttcttaattatagaagtaatacctgtttgctatttttatttttatgttttctatgtgtttttgtttttgtttttaagactgagtctcattctgttgaccaggctggagtgcagtggcgcgatctcagctcactgcaacctccaccttccgggttcaagtgattctcatgcctcagcctccccgagtagctgggattacaggtgcccaccaccatggctggctaatttttgtatttttagtagacaacatttcaccatattggccaggctggtcttgaactcctgacctcaagtgatctgccctcctctgcctcccaaggtgttgggattacaggtgtgagccactgcacccggccgtttgctatttttaaaaatcaacaaaagtatatgaaattagaaggaaaatatacctgtctcctcttaattccctgctcccctccccaccaagatcaccactagatccttctagacttaatatgtatatataaacctatatagtttttaaaaaataaacatggatgggatcatcactgcagctcttgcctttcaacttaatctttttgatgtcagaatgtgtattcagtgcaacatgggcctagtagtccatagtatacataaatcacaaatgacttatctggccccttattgataggcattgtaattgtttttgtttttactctaatgcaacaatgctttaataaacattcttgttcttgtatttgtatatgcttgtttaatgtttctataggacagattcctataagtgaaactgctgggccaaagaggaagcacatataaaactgtgatagtgaaattgccttctgggagattgcaccaatttacactcctatcaagagtgattgggaatattcatttctctctaactccactaacactggatgttgtccaaagtttttatttttgcacaactaatcaaggaaaaggtatctttaagaattttgcacttcttaaatctaatgatattgagcttggtttaattttcatattggctatttgtgtatcttctgtgaattattcccctctcctatccccattctctcccctctgcctttcaacacctcttttcgccccaaggatcctagatgtctctccccaaccccctaacagaaggaaataatacagagagcaaggggatggtgaaatgatgaaagaaagcaggtcctggggcaatagggacaaaaagtgttcccagtcaggagtgtttgccttttaaaggagcctgccccaatgggacaacgctcacctccaaagactggattgccaatggcgctgtttcagctccaacaacaggaaaagtattttccgtgggaagtattttccagaaggtcctgggaccttcattataacattgagtcagtgctttttttgtctatcacaatgaggctttcccttgttagtagtcagagtcagctgcttgggactgtatcacaaagccttaagtattcacagttcttcgcattaatctaaggagttaatcggaagtgcagttaaaaacatatgtatgcaatgcttgccatagcattgcttattggatcagaaaactggaaactattttaaatgtccaacaataaagaataggttcataacaatttggtagatgcgtctgatgaaatacaatgaagcagttttaaatgattctggaataagtactcaatgtcactgaaaactattttaattttagattaaaaatatatgcaaagaaaaaaacactgaaaattgatatgtcaaaaccctaataaggaattctatttgggtggcagaaatatgaaaactttttcttttcttttttgaacttctgggcatattttaattttgggagtgaccaaatattataatgatcagaaaaattatcttttttttttttttttttgagatggagtctcactgtgtcatcgcccaggtgcagtctcggctcactgtaacctctgcctcccaggttcaggcaattcttgtgcctcagtctcccgagtagctgggattacaggcgcccgccacaacaactggctaattctttttgtatttttagcagagacagtgtttcaccatgttggccaggctagtctcaaacttctgatctcaagtgatccacccaccttggcctcccaaagtgctgggattacaaagtggggtgagccaccgtgcctggtgaaaacttacctttaaatacagataacagaatgttaaaaagtagtttatggtattattctcacaaattactccttttaaacctggcaatcactgagaaatacagccttgaccttgccaacattcagttctcagtgattcatacttaagggaatccaccaccacacccaccctatgactgggcgcttagagcaggggtggcatccatgcactcccactctgttgacttcccagcatttatacaccacgtcccagttttaggcatcagaggctctttctcccgctccagcccaaggccccattctccttacaccctcctgcttccccagcccctgccctcattcctgatctcacactcattcttacctatttcttccaagcatcttctaagttacatttctctatctcctctttgtttttttcttttttgagttatgaattactgtgttgctctcttcactttaggaagctttatacttagtatacatgtactaatatgtaaattatggttgattacagcatttgtaattatttctataatttattttaaagctgcgcatcaggcctttggtcaggcacttcttacactctgaactactttctgtccagtgtttatttgctaagaaaaatatcaggcctcacagccctgtgtttcatctgtaaagcccttttgttattttccagtggcctcagcggagatttaacatcaagaatggtagtaggaaaaaaaaaatggtgatagaaccttttatctcaacctaagacttatcactttcagagatgcttcctgcactgatacatattattatttcggaagtagtttattgagagtctagtatgtgccagacactgtgcttaaatcctggggaattatgaattgaaagtacacgtttgcatttgcagatgcataaaaacttgcagtctagaaggagaggagacacgtacataattagatgccatgctggtgttaggtgtcccaacagggccagagcaggagggagacagaggccctgaaggagaacgtgatctggggaggtttccagagggacacttgagctaagtctcaaaaaatgtgtatgatggtggttgcataactctgtaaatatactaaaacttattgaattttttatttaaaatgggttaagggtaaaccttgcagtatgtatattagatctcgataaagcagtttttttaaaaggtgtattgaaactgggtcaaacacaccagaaggggaagaacatccccaagagagagaagagcctggcaaacgcatggagatgtgaaccatcgcgacaagtagggggactgccagtcttagagtggctggaatgtagggtagctgtggatggctcaagtgtccaaaaggatttaagcagcaaaatcacagaaacaacttcattttcatgtaatggcccgaatcccagagtctcaatgacattctgggcaccttctggttttttgttttgttttgctttgtttttgactaaaagccctttctctgccaagtctaagatggggaagaaagatgacgagaaggaagaacccatatgcccaaagattagaacaaaaaatacattttctagaaatcattttggtcatctctctgcttctaggcaggtttgttaaactaacccagacagaggaacccattttgtccttaaaggtccctagagaaggagactccaagtgggacaggctttaggctaagaaaaagcattctctgcaggccctttgcaaatccagccacacatggaaagcccctaagagaagcagaatgccctccctgcattctgacctgttcatgccagcctagtgacacgaagcattgatgtgaggcccttgtttcttcagtcacccagcccagaatgcccagaggaggtaaagatcacttacatggcacctggtgatcgggacttccaggacaatggtaatgatagttccatggagcatgtggggaaagattgggaggcagcatctgtgcacatgctggatacctctgaggttcaaactgagggaactccctggacctgagaggtctggggaggtcctgggggtaacacacggaggtgaggggcaggggcctttccagctgcctgatgcccaggacatcctggggctgggaatcatatcccgtgtctatggttggcagatccaggcctgctcggttcctgtgaggctggggccgttgcaccatctcctggctaccgcccaaggagtctgctgaggcattaggtaaactttggtctgatttgtctgagtcatggccagtgtcaggagaagccgctgaaagctgagataccagccattgattacgtttttccataaatgaaaactgatgctctgcagggagggctccaaccacagactcagacgcaggctcgctgactgcagagcacccagaagggaaagctttgcccaggcctgggtgtctcctgcagaaactgtcttcactgtcctccagaacttgagtgcgcaggcaggtgacctgccgggatacaggccgctggtgatttgcaagtttcagggttgagtgagcttgagaaaagtctccggaggaattgtgaagcattgtgggtgcagacaagctgttgggtgccatgttccttatatttggagcaggtggttctgattcctcttccggggaatattctgggattggtttcagcaactgacttgggtatggttctgattcatcaacctccacaggaatgcttcggttcattctagtttctggaacaagagaaaacatgctatagccttagaagacagataaattcttggagtcctcactttatgaccttaagggacctcattcaagatgtggtttaaattaacagtgagacaccaatgtgcttgcaaagccctaatcacataaaattgtttacttatcctccaggcaaaagcactaatgcttattaagatattttatctggaaggcaattcaaagaatgtgattggaccatcctgtggtagaaatcattcaccagcaaggggaaaacacagatgaaaatcaactgccaagtattgaggaaagagaaattatcataatgtgggctgcttcgtgtgtgcttggaatacatgaagaaataaatcttagtaactgatatggaatgatctctaagatatattgagttttttttaaaagccaggcgcagagcagtgtgcatactatgctgctattttgtgtaaaaaacgagaggagaatgtgtgtttctgtgtgcatatctgcttgtatatgtataaaccgtgtggaggatatacagacattgctacactggttgcctttgaggatggaattaagctgggggagaggagtgggaggaagttttcaccttttaaacttttataattttgttccatttgactatttcctaattttaaaaaataaaagtgtttttttttaagcaaagaaagcaagcccaagtttaaaacacattgaaaaaaggtcagagtgacattttctacctaattttaggtcatttggaggacttaattccctctgggcactatgcctgcaacaaaggtagccatgaccatctggtttgtgatgtagttgaaccagcaaggctcgctaaactagaccttagcctgcagagcatttatccaacgggccgggcaatattgcttttagctgtaagaagaactcttaattcacctaacacaatgagaaagaaaaccagtctcctctcatcattaaactgattgagatgatgccttgactgcaggggcaggaagaacgcagtccagaggactgcacaggagcaactgggggtttgcaggaggctgcagagcaggtgtcgtaaaagagcaagcaagtgaaaaagaagaaatcccagagggttattctatgcaaggctagtacacagcatacttcaaataccagagagagaaaagggattatgtctggatttaaaaattcctactttggatccatgtcgcatttcaaccacattcactgagggctcactgtgcctaaagtcagtttacataaattatgttctaaaacaagtttcggagagcatgaattcactttctcttgcaccttgtacccaatccaatgggatcaggacagcatgcattttgaaatgctcccctttcacacagatggggccagcagttttccaccaaatatacttaacagcctacagaaagatacctctccactccctgccaaatgaatgctctttgacagtcttctcccacttggtatcaaacttacccacctgctgcacaacgacccttgctctgttttctgacgcaacagaaaactcaacttctaacttccggctggccttccctcctccctccgtctctccctttccctgtccttgtccttttcaggctgtgtatgtcctctgctcattggctctgcagaaaaggagacctcatcagctaaagtgatcagaccttataaaaatgaacaagagcctacccaaaaaacctgtaaataaatatcgcaactttttattatttaaaaaatgtttggccgggcgcagtggctcgggcctgtaatcccagcactttgggaggctgaggcgggtggatcacctgaggtcaggtattcgagactagcctggctaacatggcaaaaccccctttctactagaagtacaaaaattagctgggcgtggtggcatgtgcctgtaatcccagctactcaggaggctgaggcaggagaatcgcttgaacctgggaggtggaggttgcagtgagctgagattgcgccactgcattccagcctcagcgacaagagcgagactccatctccaaaaaaaaaaaaaatgctcaccattttttccctttctttcttgcaatttttccacagttatgaaattggatgtgccacacaacatgctcttcagccggtcagaaaacgaaaatattttttcaaggcctggctgactgttgtgtcatcgtctacatgcacttgtgggcacacagctgaatgggaggcaaagagatgcaaaaagtgagctgagtggcaggaggactaattcctgtcctctctttattgccatgggatttgctttcaatcctcactcttcaggtacaactatttccattctcactgggttttccagtgtgagtaccttagaagcgcttttctacctaaagaaaaaaaaagttgcaaattctactcttctagctgaggagccatctgggggcttggaggaggctttaaaaaaagtgatgagggcagtcatctcacataaactggaaatctgaggtcatcctctggtgggaattcttcagttaaaactgctctggggctgggcgtggtggctcacacctgtaaccccagcactttgcaggctgaggcaggaggattacttgaccccaagagttcaagaccagccttggcaatataatgagaccctgtctctacaaaaaattaaacaaattagccaggtgcggtggcgtgagcctgtagtcccagctacttgggaggctgaggtgagaggtcacttgagccctggaggtgtccagcctgcagtgagccgagatcgtgccatggcactccagcctgagtgacagagcaagaacctgtctcaaaaaataaaaataattttttaaaaaactggtctggccaggcgcggtggctaatgcctatagtcccaacactttggaaggccaaggtgggtggatcacctgaggtcaggagttcaagactagcctggccaacatggtgaaaccctgtctctactaaaagtacaaaaattagctgggtatggtggcaggcacctgtaaccccggctacttgggagactgaggctgaagaatcgattaagcctgggaggcggaggttgcagtgagctgagatcacaactgttgtaccccagcctgggcaacaggagcgaaactctgtctcaaaagaaaataaaataaactggtctgaaaaggaacacatggcttttgagtatttagtaaataaacctggcatggcaagaaacaacttctaataaaactatggaattaataatctttaaaaaacaaaatggaccctggtgtttcaaacatgtcactatcaaatactcaaaacagcagataattacagaactcaactatgtgtccaactcaatgctgtgtatcccccttctgactatacgcccaactgaaatagttttattactttttaaataaccacaagtgatacaaacttcaagaggtaccaaagggtatgcatgccgggcgccgtgactcacgcctgtaatcccagcactttgggaggccaaggcgggcagatcgcaaagtcaggagttcgagaccagcctggccaacatggtgaaaccccgcctctactaaaaatacaaaaattagccgggcatgatggcaggcacctgtaatcccagctactccagaggctgaggcaggagaattgcttgaacccgggaggcggaggttgcggtgagccgagatcgtgccactgcactccagcctgggtgacacagcgagactctgtctcaaaaaaaaaaaaaaaaaggaggtatgcagtgagagataatcacagtaatttctgaagacacagaaaacattcttcctaccttcaagttgctgtgatccagcctaagagaggaaactaagtaacatgcagaaaacccacgaccggcgtcccagggccttcgtgcttgtcgctccctcttcatggaacacccttcccccacacagctgcatggctggcttcctttctccttcaggtctttccttggctgtcacctcagggaggtctccctggtcgcactccctaaaatgtttacactctcctctcattcccatctcccttccctgctttaccttcttatccagcagttattactgtcttatatattacccaaatgtatatgatatacacaaatatctaataatctcttatttgctcattgcctctcccttctcccagaatataaacttcctaagggtgcaattttctcttttctttttctttgtgatacgggggtcttgctctgtcacccaggctggagagcagtacctagatcatggttcactgcagcctcaaactcctgggctcaagtgatcctcccacctcagtctcccaagtagctaggactacaggcgcacgccatcatgcctaatttttctgttttttctgagacggagtcttgctctgtcacccaggttggagtgcagtggcacaatctcggctcactgcaacctctgcctcccgggttcaagcgattctcatgcctcagcctcccgagtagctgtgattacaggtgtgcgccactgcgtctggctaatttttgtatttttagtagagacagagtttcaccacgttggccagactggtctcaaactcctgacctcaggtgatccgcccgcttcggcctcccaaagtgctgggattacaggtgtgagccactgcgccagtcggtgtgcctgacttttaaaatttttttgtagagatgaggtctcactatgctacccaaactggtattgaactctttacctcaagcagtcctcccacctcagcctcccaaagtgctgggattataagtgagccaccacgcctggcctgggggcatgatttttgactgttctgtttacagctatattctcaacacctagaactgcacctggcacatagtaggtgctcaataaagattcactgaatgaataaatagttgatgcctatttcagagaggggacagacaggtccatgtagccggatcagtgacaatgagaatgttgtcaacaacaatgttgggtagcaaggagtatctggtgggcctggtcctcagagttcttaaaattatgccacgtgggtgacccttccctcttctttttttttcctctccagaacatttattaagtgcccactatgtgtcaagcacccaagttaggtctgggccatgcccaaaggtcctgcccatgggcaggattgaccacaacccttacttgcagaataaaggtgatgccatcagccagtgtaatgggagcatctgctcttagattccaggcagggagttgctggtctttgtgcctctgcagagctccacctagaactgaaaagggtggggcacgcctgccactaccacacaggccccctccagccccagacccctgtctgaactggcagaaagtgggcaaccctgccaactctcctgaggcagtcatagagaacaattacaaatgccacatcagggggccacagacagattaatgggttatgtcaaggatggcagttttatctgttttgtctttaatgtccatagtgtaaaaatactaaacattaaaaagcaatcactcagtatctcaccattgtatttttaaaatacaaagaaaaccattcagcagagggtgagagcatgtaccctgggtaagcacgagtgggcatgaactggggacagaggtgagtcctggggacatataactggatggaacagctgtgcatgtgagcctggttcttgcttgttctgacccgacccatttttctgtttttcctttttttttccaggctttctccatatttacgtgcttgtaactctggcatgacctttgctccagtctctaccagagggcggtgcctggattgaagtggaaaagccctgttttccagccatgacccagggagcaagcactgactcctcaggggaacaggagacctgccaactaggaccctgggagcccccatgctggcagtgccctgggtcatctcaggctcatcagcaaatcctggggggagagcggggctggagggcgaagaagcccaggagagttcctggctcagaacccctctctgaggctcccaatacagagcccaggccccacacccagggcctctgagtatttttgtttattgtatgtaaaatactagtgtatttttgtttaagtctcacaggtaaacaggttctctcatactttgccaagggaaatgtgatctgtgcaatttggcaataactatcagaattttaaaagcttatgccctttgacctagtaatttcacttctaagaatttcccctgcagagatatgtatatcttgtatgaaatgaagaggctacgaagacaggcaacgccgcagtgtttataatagcgaagaccagacacaacccacatgtctaaaggttctgatttttaaaactgtagtatatctgtacaatgagcactccacatcctttaagaatgaggaagggctgtgtgaactgaaatggaactatctctaagatttattaagttaaaaaaattcaagagtagcacagtgtgtagggtatgccatcatttgtatgatataaggtcgtatatctgccatctcaaatgaggaacagtggttgcctctgggaagggaattggatggctaggaatggggtaggaaagaggtttgcttttcagaacattttatactatttaagttttgtaacaagtgcatctattttgacttaaaagataaaaaatgaaaaggaaaggctccactagtgattctgatgctcacaaagattaagaaccaatgcgaatgaggaactcatgacaccgcccaggagacagtgaacatatctcttcaaatatcaaaaacctttcagcagagggtgagaacatgtgcctggggtaagcatgggtgggcatgagctgggtacagaggtgattcccagggacatacaactaccttgccctcctgggatcaggtcttcctcccaccttagcctcccatattgttgggaccacaggcatgcaccaccacacctggttaattttttttttttttttttttttgtagcgacagagtctcgccatgttgcctaggctggtctcgaactcctgggctcaggcaatccttctgcctcgtccttccaaagtgctgagattacaggcatgagccactgcacccagcctgacagtagcttttaatctctggactctcatcaccgtttggactgtgagctgtggttctagctcttggatctgatgggcatcttccctcaaatatgtcagtttctctctccaggtcccttgctttgtcttcctttttgcctcctcgggcctgatacctttctctgggcttctctactctgccccgagctgcctagttttgcgaataatgtcacatccagatgtcagcagccctgatgtccatgtgacaatgctcccttgctgtccatgtgacaatgctcccttggtgtcccagtgacagattttcccatgcttcaccctctctcttttttaatttttttttctgtacacagctctcagtcaagccccttgagctgcctccaactgtttgctcatgtctgttcccagcaatcttttcctcttttagcacaatcttccttaacttactagttttttgaaacagagcctattagtcttcacagcgctacctttctgatctcagagttcaccaaaaagcttttcctcccatcatgcctgcctccctttcttcaggtccgttagagtccaccgtggcctgtgtgggaagcaagtctctcccagggcacacatgaacagacttcatgcccacatccacagtgaacagtggcttctgccttccagatgggcttaccctaaatcaacacatattcctaggatgtgggaacatatgcaatacttaaatgcacaggctctgggttcagactccctagggttaaattctccctgtgccggctagctgcatgattagatttgtgatcttgacaaagttacctaacgtctctgggcctcacttttctcatctgcaaaatagggaaaatagcaacacttctccataggggtgtggtgaggataaagagtagatgtaaataaagtgttgaatgtagagcctggcacatatcaagctcttaaaaagcaatggccattttgttatttttaccgcaacgacaactgcagttattatctggcttcagagctctctttttaaaaacagtattccctggttttacacccaggtgctaatactattctatgaagctaatgtatagagaccatatctttttaacaaacgtgtatatatgagtcatttccggcacatttgatacacatcatctcgtttggtccttaaaacaagcctaggccataagcagggtacgtgttaccactttgccattcctgttttacagaggcttagacacattgagaagcttttccatagtcacttaacaagtgatgggtgaagccaaatcaagcctttagatctccaagctctttccattaaaccatataaatcacgggttggcaaactttttctgcaaaggggacagatagtaaatagtttaagccttatgggccacatgctgtgtctgtttcatattctgctccttttttatttttattttttttaagaaaagacaccctttaaacatataaaaaccattctgagcaacaggctggtgctaaaaacaggtcatggtaaccattggctctagggttgtagtttactgttgatatagattgtacactgataagccaaaatacaaacctaatgaaactgacatacttaaggaactttactctttgttagcaatcattgttaatatttattgaatggtgactacgtgggaaatgctgttccaagtgtgatagatatattaacttacttaatcctcacacccactctaatttcctaagtactattgtcagactcattttacagacaggaaaagcaaggcatagagaaggtaagtaacttttccgaggtcacatggctattaagtagcagagctgtgattcaaatataagcggtttggcaccagatcctgtgcacttaaccgcttgcatctcggttgggagcactgactggttcagctattgggagggaagaaaggggatggggaagccacataacccctaggagattctgtaataaatatgcttcagagccattcaccttgaagctgaggaggcatggaagcaggccacctgtgttctgtacagcatcaccaggctggaaatctgccatggctttccttcacgccatcacaagaggatacagatgaggctgcagaggcatcttgatttgagaaaagcatttgactggatctcattaaattttaatcattaactgaattcaaaataaattgaaaactggttgacagagcaccaacaaagggtgatgataaatggtgatgcatctagaggggagctatcttccaggggacaactctaaggcaaggacggatgggatttaatgaaggtgttatgtccccagaagaagacaaatagcacagcaaggaacagaggaaggacaggagtgagcagcctgagtaattaataaaccatattaacagctcctccataatcaggccttggtgatcacaactgcttggattttttcttaagctttctttgagtcaggaataggtttgaagcgtcctagagacacacagcatgaatatttcaggtggacattaaaaagaaatctataaatttacagctgggaggatcctgagatctacttcggatcagaaactttcaattacaagattcccaaggccttacttcattccccagagagtaatctttttaataaatgtccaaaagtcatggatttaaaaaaaaatctttaaactcattaatgtcctttgtttcctgcccaaatgcatgcaaactttcataacactggtttgctgagtggaaggttggttttgagtgaactgtttggctcagattcaaactccaatgaacaaatacttccaagtttacttgctgaatttcccatacagagaagttcttccactgggcttgccagaggatttgaaacagtggtgagccctggaaggaagggaatatttactggcccttggacataaacccagcacagtaagactcacatcaggctgaaggcagtgcagtatgaaccgacctgatttgaggaagtttgctctgggactcctctgagctactaaatgaggaggagaaggactaatgggaacacactgactccatcacattagaagttataataaacatttagagaacaacctcaaaccagcccatgttttttttttttttctgtcgttgtcattgttttggtttttgtttttttgtttcttcagataagatggtttctctaagcacatgtgtgatccctaattcagccacagccacggagtgaaggagaggaaggggtagaaaggaaaaaccaagagaggaagaggaagggagagaaaggaaggaaggagaacggaagagaagtaaggaaagtggggaaacgctgaaggatttttttgtatttgccttttattggtgtaggagagacacttatttacttgtaatttgtatgtagtgctgggtatgagaaggggcagttggaagagaagggaaagaatgaatataggtgaaaggtaagagtgtcatagggtaagctgggaggccaggaagagtttggacagacagctcagagtaggaagagagttcagagcggggagggagacctgttgactctgggaaggggaaagggaaaaaacactggcatcctgactgcagggaaacaatgaggcagcggagagcaagtatccctcattgctgagggagctgccaagaccccaggcagcctcagtctgtggggtgcggcctgtggggtgcgaggagaggggcacaggctgggagctccggtcagtcctggccctcctaaagggcttgagttcagctgccttatcagggaaccaagccaaaccagcacagacctaaggatcaccccatggatggaagcccacccttcttcagccagtctacaactcctggtatccgggaaggtctgtgcacacacaaggtgtgcacacacacacacacacacacacacacaaggcgtgcacacacagctacagagtgagctgagtagtcacagccaagcacatgtgtgcttctaggaggcctgctgggcacgggaggcaaagaccataagtgggagaaaggacagcctgagtttcatgaactaaaaatatcttggtgacaacgcattgggaagaaacaggagaggcccggggggcagcttcttgattccagtcctcagacactttctcatggaaaaatccttcagactgcaggattgttttgataaggaaatgtgatcaaacattaggggtcatttcattggatctgaaaggaatttaaagttgaatatgcctcatctgtgttcactcttttttttctgcagcagttgcctgcaattcatatatgtttttagaagctaatttaaaattgcctgcagaagaaaaatgatttgaattcaggatattcctgagatttccattctacaacgtgtaaaacaaagatttcatttagacaaactaccccaccataatctttctgaatgcctgttgaagaatgcctgcagatatgactgtcttctcctcttctttttcttttcagagcatttgaaagtcactaactccttaatcccaggagaagcaggctttaacatttcctgtctctacaccttccaaaaatgagtaaccctgagttaagaacctttctatccgacatgttggtacattactcagacctcacttctgtttaacccaccccatgcaaggaacagagcagagtaactacattatccatcttttgatgctccatcatggagtgactggtagctgcagcagcagattaagaatgactgtggtgtgtggcctttaaggattagagcgaggctggcaagtgcacaacagttagcctgctttcagataatggtgcatcgttgtttgaaaataaaatcaggaactcattgcaggtgaaatatcttgaaattcctgtcctttcatcccaggggaatagagagaaatgcctaaaaacatgacacggactacaccaggacatcccacagaaaccaaaagtcctgcaccagcccatcccagtcagctagggcctgtttgaactgtattgatggcaagtaattgccaaaaagaaacaatgacaatttttttttaagtcacggtctggaaaaagttaaggattctgtgtatccgccatctaataatgtctctaatcacagtcatcacccttacatggtattaggatgtgtttcatagtttcccttcccctcccattaaaggccccacacacagtgactggtccagctgaggagtggtttccaggtccagctacagcagtaactctggcttctggagctgggcttgtctgccagttctctggcctgccttgactctgtggacaatagcacagactatccttcctgggtaacccaaatgggacatgaactaattcgagaaactccctgttttctcctatttggctagagccagtaataaggcctcaattccaggcagccctcccgcagagacacgtgtctcccagcctttcgccctgactgctgctttacctcttgccttgagagcagacgagtgaaacagaaatcaaagcagttgacatggaaggggggtgagcacctactaggcatttggtagcatgctggattctgggaggtagaaaaatatcaggaaacaaagtcctttcctcaagggggtaaccaactggtagtgggaggtaaaattaaaatatgtgaataatcggtaaacaaaacaagtcttgaagaccacccattaccactacccctctgggactatcctggctttgttttataagggaatttgacacactcatgttagatcaccaccccccatcaatttactgatgaagaaatccaggcttagtggagtcagagtgaattgcctaagtcatggaaccacaagaagtgaagaacttgaaaccaagtttcttgtccttttaaaaaatttggcctcttgttctcctgttcctttaaaaaaaaaaaaatccccctattctaagataccatcttgaacttgaaagtcacaagaagcttgattagcttctaagatcaagttctggcatttctcccccttgttcccaaaggctccgtccagcgccaggctgggagggctggagggcggctgcggagaggggccgggaggcggctcacagccagcacagagctcagcagaacttcctggcccaaaaatgtgctgttgatttttttcccccctgcacgaaacaaggattgagaaaactgccactgacgtgttctggggctgaaagccaattacttaatctttgccatccctggctctctctttggagaagtggggcttgaattcttgagagaaacttgtggggacactaagtacccaaacgaatggttcccaggcagctccgagctgtccccgtgtgcgagcctcctctcctcaaagggttaacccggcggggctcgctggcctgaaatactatactagcaacacatccttgcagcacaaacttcactgtcattttctcagctaagatggtctctgtgcgaacaagttaaaggaggggagacgaacacagaggaaagtagaggcagaatgtttcagtaaaggagaaacagcgtgctttgggaaataggtcagaggtgaagaaataagaccaggcaagtggcaactccgaataacttaccttagatccaccacggacagacagactgggcccggagggtagtcggctctcggcggcttctcgtctccctccaccttctccgggcccaggtaagtagaagaacaggctctgaagcaggaagtggaagctgtatgcaaatttctacggagcctaggaagcctctgctcaaaatctccctgtgggcagtgaatcaacggctgaggagtcactttatttcttaaaacagaaacctccttcattcatgagaaagggccagtgaccaattaggcggcatttttgttttcgccacccagctaagaagctgcccaggagtgggcagaacctcagtgtagtcgcagtgccctcgcctgggagggtgtctccgggaggagattgaactcgaatgttaagaattagtaatcattagcagctccaaaggaggggattgtgggcagataatggggaagaagagggagtcgagcttcttccacctcctctaactgcttaaaacatcagcattgccgagcgcggtgactcacgcctgtaatcccagcactttaggaggccgaggcgggaggatcacgaggtcaggagatcgagaccatcctggctaacaaggtgaaaccccgtctctactaaaaaatacaaaaattagccgggcgtagtggcggacgcctgtagtcccagctactcgggaggctgaggcaggagaatggcgtgaacccgggaggtggagcttgcagtgagccgagatcgccactgcactccagactgggcgacagagcgaagactccgtctcaaaaaaaaaatttaaaaaaacccaaaaaatcagtatttgctgcccataaccactgggggggtgggggggggctcactgaccatgctcctggacacacgtgtacacacagcatacacatgcctgtggcttgtgcacacacaccaccctattgtcaggcacaaaaaaagtggttaattttaagaacacacacacacacatacatacacatgcacacatgcacactaacctcctctggctgcattttcctgacctcaagattttttttctcccctttccttcccattgtttaatcagtagcctgcagaatttattgcatgaaggagcgctgcaggcaggatgatacccagcgatgtgaacagagagagagagagacaactgcctttcggggcagcagtcagtaatgggagcagtgttagctggagctttggagtcaggaggacctgggtacgaactcagccatgtcactggccagctgggcgccctgggcagacacaccatgctcctggtgctggacttgtctgcctgttgaaggggtccaagtgtcagtccactcagccggctatctctctactctcatcaaggggacaggccccagagcatccctgttcagattgtaccaggttctgctcaagcaggatacaggaagcaggttgctcaacattccacaagcagagaaaatgcagcttgtttttaacacagtatacacaggttgtttgcatttggtttgcagaaaatgatgcagctattaaaaatcatcaatatgtatgtattatctgagccactaacatgaaaaagtggctctgagatattatttaactaaaagtattatcttattttttgccaatatatgtgacatatacacacacatagatatgtatatcgattttttttaagagacagtgtctcagtctattgcccaggctggagtgcagtggcgcaatcatagctcactgcagccttgacctcctgggctcaaacaatcctcctgcctcagtctcccgggtaggtgggactacaggtgcacaccgccacacctagctaatttttaaattttttctagagacaggtctccctgtgttgctgaggctggtcttgaactcctggtctcaagggatcctcccaccttgtgagcagcaagccacccaggtgccgaggcaagagaccgaggacacgagctgttccagtacaataaaatataaaacaagaatagttataccagatatagatcttagatatgattatatatgaatatcattaatcattagtttgtagcaattactctttattccaatattacaataaaccttgctctataatcataacctaggaaaaaccaggccatacgagataagagctgaggggacacagtgagaagtgaccaaaagacaagagtgcgagccttccgttatgcccagacagagccaccagaagggctccttggcctagcggcgatgccagcatctgggaagacgcctgttgccaggcggaccgtggtctagtggtagcgaaaagcgtcaaggaacaacacccgctacttagcagacggggaaaggggttcccgggggagtttagaaaagactgcccctccacctcttgtggagggcctgacagcagtcagccttgcccacagttatccggaggcctaaccgtctccctgtgatgctgtgcttcagtggtcacgctcctagtccgccttcatgttccatcctgtacagctggctctgccttctagatagcagtagtaaattagtgaaagtactaaaagtctctgatctacaaaaataatggcataaactgtctttctctttgtctcctctctctctctgccttggctgccaggcagggaaggttcccctgtccagtggacacgtgacccacgtgaccttacctatcattggagatgactcacactctttaccctgccccttttgctttgtatccaataaataacagcgcagccagacattcggggccactaccggtctccgcgcattggtggtagtggtccccggggcccagctgtcttttcttctatctcttcgtcttgtgtctttatttctacactctctcgtctccacacacggagagagacccactgaccctgtggggctggaccctacaccacctcagcctcccaaaatgctgggattgcacgtgtgcctcactgcacccagcccaacatatagatttgtgtttgctcaccactgggccccaggggacctagcacactgccctgcctaggacattgtgggcaatcactgtgtatctgttcagtgaccaagttagaaatatctggaaagatgtatgccaaactgtttagtggtgctcacttcaagggaatgcgattgaggaaaataaataaggatagagggctttatgatatatacatatggactatttgattctttttttcacaataacatgtaggactttttcatttaaaagaatgaagttttttaaaaaagttttattaccttggctttgaagtttctgcttcaaaattattattagagtcatcttttggagggtaggaaaaaatagcattttctgtggtccggttggtaccaggatactttgagagagctactggagttaggaaatgggaacggaaaagcaaagaagaatggcaaggggaggagctagcagggagagcgaggggagcaggaatggaaatatttttcatttctctttgttgtccttaaatggattgggaaaggcctgaagatgctctgccgagtaccacctctgaaatacaacccgccagggagaacaaagggaaacttttctccagttctccaccaactgttttcctgggtgtgagacctaagagccctgtaggaagaacacaagtgccgaagtgctgcttttcattgctgttggctgggccttcctcttgtctacagtttgtttgtttgtttgtttgaaacggagtcttgctttgtctcccaggctggagtgcaatggcacgatgtcggctgaccgcaacctctgcatcctgggttcaagcaattctctcacctcagcctcccgagtagctgggattacaggtgcctgccaccacacccagctaattttcttgtattttaagtggagacggggtttcaccatgttgaccaggctgatctcaaactcctgacctcaggtgatccgctcgcctcctgtctaaatttatcatgagcagaaaggcaggcacttcagggaatgagttcatggttccctcttagaagcctctgctggggctccgggctgaaaagcagcctgaggatggccactgtttagagagggtgtcctgaacaggagaaatctcctctgaacctgcctgaggcagttatggtgaagtacaggtgacccaggcgaacacacacagcttttgaattgctgtcacgggagagcaactcttcactgaggacctaccctacactccctttgagcatatctcatcctccaaacagtcctgtgaggtgtgtttactgtcattcccactttaactttgaggactctgaggctcagagatactgagtaacttctgcaaggtcacacagctcatctatggaggagtcaagcccagagcagtctcccttccaggtggatgttattactgccccctccctgcaccccgccacagccccccaacccctaccctccattgccctgttgccatctgttcttcctacatgcttgggtggagcacaggtaacacactttctttgcacaactcttgacaacgcttaagaagggaaaaaaaggtgtagacaataaaagggtggggttgtgactgtgccacagcctggtgctgtgtttatatgtaaggattgctgtacagatcataaatagaatagtcaagatgtgggtcagtcttctctctcttgttagaaatctagaaggggagcatgtgtgtttgccagatcctagagtttgctcagtgaattcgtcagggttctgcagagagagaatcaacaggattacctccgtgattatggaggctgagaagtcctgtgacaggctgtctgtgagccggacaccccaggatgctggtagcatggctcagtccaagtctgaaggcctcaggaccagggcagctgatggtgcaactctcaggccaaggccaaaggcctgaaaacccaggggccactggtgtaaatgctggagtccaaaggcttgggagcctggagtccttgtccaataacagcagaggaagagtataactcagttccagcagacagattgacccattcaccttttctctgattttgttctctctggactcccagcagatagaatagtgcccactcacattcactgtggctcttccccacctagtccactcagactcacatgctaatctcctctggaaacaccctcacaggcacacccaaaatgaatgctttatcaggtttccaaacattccttaatccagccaagttaatacctaaccatcacactcagtgtcattgtctgttccggctactgtaacagaataccatagactgggtggcttaaacaacaaacatttatttctcatagttcaggaggctggaaagtccaagatcaaggcactggaaaatctggtgtctggtgaagtttcacctcctggttcataagtggccatcttctcattgtgtcctcacatggtagaaaaggggctgaagagttctctgaggtcccttttataagggcactaatgtcattcatgaggtctccacctcatgacttaattacctccccaaagtcctacctcctaatatcattatattgggggttgggatttcaatacatgaattttgggtggatatgtcattcagtctataatacttagtgtattaatccattttgatgctgctgataaagacatatccaagaccaggtaatttatacagggaaaagggtttaatgaactgatagttccgcgtggctggggaggcctcacaatcatggcagaaggcaaggaggagcaagtcaaatcttacgtggatggcggcaggcaaagagagagcttgtgcagggaaactcccctttttaaaaccatcagatctcatgagacttattcactatcatgagaacagcacaggaaagacctgccgccatgactcagttacctcccaccaagtcccttccacaacacatgaaaattcaagatgagatttgggtggggacacagccaaaccatatcacttagtattttttatttattttttttatttttcattttattttattttattttattttagagacagaatctcgctgtgtcacccaggctggagtgcagtggcgcaatctcggctcactgcaagctccgcctcccaggttcatgccattctcctgcctcagcctcccaagtagctgggactacaggcgcccgccaccatgcagggccaattttttgtatttttagtagagacggggtttcaccatgttagccaggatgattttgatttcctgaccttgtgatctgcccgcctcagcctcccaaagtgctgggattacaggcgtgagccaccacgcccagccaatcacttagtattttttaaaaaggcataagaagataaagaatatcttattccactccctaagcaaaactgaccaaaccatttggatctaattagaaactctccattctatagcattaatctatggaaagaaatgaaaagggaaaggattcattccttggacaaaccttgattttacatttttaaaagctataatttcaagtactaaaaaggcagagtgaaactatgatgtttcacgtggaagagaagacaattaccatcatgttcttccctgagaagggcccttatccaaagggtctggtgtgttcaaacaccaactggctaactctccccacagcccctcagtgcccctcagtggacagtcatcgctagggtccgaatgtctgtgtccccccaaaatccatgttgaaaaccctatctgcaatgtggtggtattaagacatggggcctgtaggaggtgataaggtcatgagggtggagccctcaggcatgggattagtgccctttaaaagaggcccaagggagcctcctggccccttctacacatagaaggcaccatctataaggaacaggccctcaccagacaccagatctgctagcaccttgatcttggacttcccaacctccagaacggtgagcaatacatttctgttgttcatgaattacttggtttaaggtattttgttatagcaaccagaacagactgagatagccacagaggagttgctgctagggcagagacaggaagagaagaaatgctcaggctcccagtgtcgggtcctgccacaccagacccactctagtcccacagcctgcagtgagcacctgccttattccaggcatatgcttggtgctaggcatgtaaatggaaagattctcaacatgtctctttcagaagcaaaaactggtgatgcaagcagttccaaactggccactagacaaagctatagagtccaccagttgcttctgttccactgcttttgtgggctgcttccagtccagagaggctgccctgcagggccctggaagataccagaactgaccaccaccctcctcctccacctcctgccaagcccctggaccctgctctgctttcctagtgacccttccctttgggtgagctcctctctggaacagggtcttgttctgtcatcagattcagtcaggggacctcctgaatagaagtcctggtagcatggagtctcagaatggaagagttagttctcaatttgttttttctttccaagaggttccttgactccagtgcaaattaattaattaattaatctatttatttattttgagacagtctcactctgtagccgaggctggagtgcagtggtgcgatcttggctcactgcaaccaccacctcctgggttcaagagattctcctgcctcagcctcccgagtagctgagatacaggcacccgctaccatgcctggctaatttttgtatttttagtagagatggggttttgccatggctggtcttgaactcctgacctcaggtgattcacctgccttagcctcccaaagtgctgggattacagatgtgagccactgtgcccagcccccagtacaaatttattaacctccttcccctactaaaggaatactgggaacagcaggctttgtcaacctacaaaaggttctgttaagcaatggatgcctgttcaactgacacttgcatacttactcagggagcactctcaagttttgggaaaagttcaagatgatctgttccaagatgactgactctctgtggtcacctggacccaaaggttttggcagcttttcttgttaaaaagtgattaggttctctacactaggctccccatgacttccaccacaatagtagtagctaagctcgagagaacacttggtgagcgcctacagggttctgagcactttgcatgcactcactcgtttactgttgacaacacctctgtgaagcagggactatgagatcagctacctttcatggagcatctaatacatgcaaggtgattttcaccgtctgtataatgaagtggagaaatttactcaccagaattccagagcttctcttcaaaaaacaggtgaatagagtccagattctgcttcctatgaaggctgaacacagcagggtgggtcagatgagagggggtgtttggaaagggataaagggacaatgacaatgtagcatggggccagcagaggagggggaggaggcacagcagtgtggcagtgagagactttgtggaacagggtggcagcgacagtagaaaggacagggaggagctttaacatgctttgctacgtgacccattacattgtgcccttcaggacaatctatcataaagtttgacattcttcttcaagttttctctagttggatttacccagtttaacttttggatgtgtccatggacagcgttatttagttcacattttaaaattaggatgtttagtataaaaaaacccagaaaatatcaagtgttggaaaggaggtggagaaactggcacacttgtgcactgttggtgggaatgtaaaatgctccagctgctatggaaaacacagtgacagttcctcagaaattaaaaccagaattaccataggatccagcaatttcacttctgaatatatatgtatatatacaccccaaagaaacgaaagcagaggctcaaacagctctctgtacacctgtgttcataacagcattatttgcaacaaccaagaggtagaaacaatccaagtgtttatcaacagatgaatggatacacaaaatgtgttccattcatacaatggaatattattcagccttaaaagggaaggaagttctgacactacaacatgagtgaaccttgacacattgtgctgagtgaaataagccacaagggacaaatactgcacgatccacttatgtaagggacctaaagtagtcaaattcacacagacagaaagtaaacggtggttgccaggggctggggaggagggaagtggggagttattgttcagcaggtacggactttcagtttgcaagatgaaaagagttctggagatggattgtgataatggttatgcaacaatgggaatgtgcttaatcccactgaattgtacaacttaaaatggttaagatggtaaattttctgtgtatttcaccacatttaaaaaacaaccccaaggcagctgtgcgagataggttttattacttttattccccaggtgaggaaatccaggcacagagaagttaggtgccttgctagggctacacagctgggcgtcaaatcaggagctgactccctaagaaagccacgcctctctcccgcatcaggcatcacaggagccactcagggagcaacggagggcgctggctgtcagctgatgccacagagattaatcttgggcgggcctagcctctcctttctgcgcgtttctctctctagactgcacttcctccaaccctgcattttctagggtccttattcccttctctgcctttccccatcaaaacattctctcagagaaaaacctgatcacacatttatacctaagttacacggtgtgaatttaagtcaacgcactgcctctctgaggggtgcttgcatgttaagcctcatcaccctctatgaaatgaaaggctttgttccatattaaaggaatttcaggcatcaaggaacaagtggggagaaattggtggcaagtggggcaatgataacccaggaaaggcattaaatggtgaaactttgggcacacagttagaagggagatagattttatggacatgctgatctttcagagctcctcaaagatgtgaggggtgggtttgtgggagatgggagggtggacagttgatgctcaaatcctccctctgagcaagcgtagctgcctgatttccagactccagacacgtgtttatcactagaaccgtgtgcatcctagaaaagagaatccaggggttgatttcttcagcagatcacttctctgacagttctcaatgccacctgtctgcattgtgaaatcccagtcccaagcagctgggtgtggtagctggagctctctgtccatagaatctgaacaatgattcctttagcgtcaagaatgcattccacatactcactggcagactgtgctgtacagaacctaaggcgaatcctgtggacattgatgcctgtcttccaggtgcttacagagtaagactgaatgttcccaaggagtagaaaagacaccatcccaaaagcattcaggctaagcgcctgcatctgaatcaggcttcctggtctgagttcctcgttttatctcctgccagctgtgtggccacagggaagtttcttaatttctttgtatctcagtttcttaatctgcgtaatggggatagtaatgtgtctatttcatgggtaacaaaggctccgaatggaccgcttctggatgcctcctttatgagaagaaaacgtctccttcccaccaagggggtgtatcctctcccccagcacacagcatcgtaagtggggaccagagtagattttagccccaccaagtctgctgtgccttcctcagccaggcacaactgcacaactgtacacagcagcctgtaggatagtcatgaagatcagatcaaatgacctacgtgctgcgtccagcatttggctcaataaatatcagctactattataattgatattaaataaatgcataactcaattactataccaagaatcacttatcagtcaatactgtagggggaaaaaactcaacaaaatagtagagaatatgaaaatattcatatgggctgggcgcagtggctcacgcctgtaattccagcactttgggaggccaaggcgggcagatcacctgaggtcaggagttcgggaccagcctggccaacatggcaaaaccctgtctctactacaaatacaaaaattagccaggtgtgatggtgggtgcctgtaatcccagctactcaggaggctgaggtaggacaatcgcttgaacccaggaggtggtttttgccgagatcacgccactgcactgcagcctgggtgacagaggaagactctgtctcaaaaaaaaaaaaaaaaaaagaaagaaaaagaaaatattcatatgtagtaatgagatgaatttttatgctgacaattgaataagggagtatttttgtacgattgagagtgtactacaaatcagagaccccaaccacacatgaggatccagttgagaagaaaacaaaggcagcagcacgtacctctggagggctgctgcctgccctactctgtgctctgttctgggacagacccagcactgcgcctctcccaccacatgaaagctccaggataagtagagccgttctcactctcaaagcctgctgcctggatacgcataccctcctggcaggagaaaaattatgtattctattaatttaaaatatttttcctttcaactctgcctggttggcagaatgcatatagaagtaagagtaaatggggatagcaattctgtctatagaaaatatgttcttagaattgcatcttaaaaacaatgaagctggccgggtgaggtggctctcacctgtaatctcagcactttgggaggctgaggcaggtggattgcttgagcccaggagttcaaaaccagcctggccaacatggcaaaacctcatgtctacaaaaaattagctgagtgtggtggcacacgcctgtagtcccagctactcgagaggctgaggtgggaggaacatctgagtccaggaggttggggctacagtgagccatgattgcacactgcacttcagcctgggtaacagagtgagaccctgtctcaaaacaacaacaggctgggtgcggtggctcatgcctgtaatcctgacactttgggaagccaagacaggtggatcactcgagcccagaagtttgagaccagcctggccaacgtggtgaaaccccatctctacaaaaaatacaaaaattagccaggcgtggtggcgcatgtctgtaatcccaactactcaggaggctgaggcatgagaatcgcttgagcctgggaggtagcggttgtaatgagccaagattgtgccactgcactccagcctgggtgacagagtgagactctgtctcaaaaaataacaacaacaacaacaacaacaataaagccaggaagtttactcgtgtgtgtgtgtgtgtgtgtgtgtgtgtgtgtaagagaggagagagattgattttacttgtagattatgcaacacaaaaacaaaaacagaaaactctccaaaccccacaaccctcttttccacaacaattctaccttttctcttcagctgtcctgccagggtaaggttcttcaccttccccagagactctcaaggaactggaccaagtttgttgcagctcagcccagttggggttgtgggtatctgtagcagaggctgagagttgaaccttcatatgtattctctccttctgccatagtaatagcatttttagttgggtaagtggcttcctagaatgaaggctccattacccagccttccctgtagggtaagtatggccacgtggccaagttctgatcaatgagacatgagaagtgatgtgtgcaaccttcaaatcatgcccttcaagcaaaggggcatgccttcctctctccttcccctttctcgttggctcgaatgtagatgtaaaggtgccggtgagctgtcggggaccacgtggttaggaataatattccattgcatgtatggaccacattttgtgtatctattcatctgttgataaacacttgtatttttctacctcttggttgttgcaaataatgctgttataccccagaaatgatagagcaacaggataggagtctgggtccctgaaaaccccaaaacccacatcccgggtacataatatcacacaaaactcctatttgactctgacttgcttgtcttattgggattttcccactaagacgacatctcctcccctccactacccaccactatgggtaggaaataggtttttcttgaagattgtgggcatttttcttattagtaattttgggaagagcttaactacagaaaagatttgaagacaaaaacaggccttggaccagaatgggagagtgagctcttcctctcttgggacctcctggatagggctgggactcgggtagagggcatgtcctctgtggggaggtaggccagttagtgaaggaagccacaggctgggactccctgaagatgggctgtttctaatttgggagtggacaggcacaggggagcctgcttccgactggcatctggggctgatgaggaaactggagccgagaccctgacgccatgggacactctctctctctctctctgccacacacacacacacacacacacacacacacacacacgcacaaacagtggaaatgtcagtatctggggagctttcaggccctttgagagggcttaatttctggcaatcatcagtggggctcatgccctcacactttgaattttttttttttttgaggtagagtctcgctctgttgcccaggttggagtgcagtggcaagatctcggctcactgcaacctccacctcccgggttcaagtgattctcctgcctcagcctcctgagtagctgggattacaggcacccaccaccatgcccagctaatacagtttgaatattttacaagaaatactacctggcatttggatgggaggcaaagctgtgctaataacccctgggaagtaggtggtgtttgtctcactctccttttctttctttttttttgttttttgtggagacagagtcttgctctgtaacccaggctggagtgcagtggcacgatctcagctcactgcaacctccgcctcctgggttcaagtgattctcctgtctcagcttcctgagtagctgggattacaggcacctgccaccacaccaggctaattattttgtatttttattagaggcgggatttcaccatgttggtcagactggtcttgagctcctgacctcagatgaccacccgccttagcctcccaaagcactgggattacaggcgtgagccacggcgcctgggcaggctccttttcattcatcgattcccttcagcagttccgggctcccttcctgtaggacaccattctcccaagataccctcttgcagaggggctgcctgctctgtccagcctcctccaggcctctgccagcaggccctttgccctccttgcccttgccctttcctgccccagatctggccaactctctgccttccaagtgcacactggctgcaccacaccctccccaggctcagaggctgcagggtaggaaacagaagcttatgcaacttacccaaggccacaaggctacaggtggggagctgggattttaacccaggcaggctgactccagggtgtgggctctttgccctgaatcctccagccttcagggctcacccttcctttaacaaacagataaaatgtctcaagtccatctcctacatcctgtgggaagtccagcagcctcccctgcctttctaaggcatcttgggaggtgggggtggttatattctcctggttactactatctgaattcttcatcccttcaagtcttgttgccgccagcatctgctgtcctctctccccttccctcacccaaggcatgagcattctccttcttccttcgttcccccaagcatacctcaaccaagccaatccctggaaatgtgttcttaaggactggggaggtttggtaataatagagggtcactattcatagcagtgatcaggaaagggctgaaaattccaaatgaggcctcactgtcctgcaggcccacctctacatccacagggatggacaggagcacaaatggagacctcaaccctcaccttctcccccattctcttcccaagaacagctccatcctgcacatgaaggacgtcacatgtgaactctgtactgcctgctttgggatcgggtcattccctggtccatggcgtgggagaggctccagtggatgtacctcattggccccacgcagtggtgctggctaggacaggctcttgggcaccaactctgcgcatcttctaactccactttcaggcacatcacaatggtagcttgaaatcagtgatggtgggaatatttacactatggaaattggcaaacactgcaaatcagatttttattttcctggggagctgttttgccagcacaccactgtgccatggatgcctcaccccatgcacacgggcacagccagagaaaggccagatcaaagctctccaaggcagtggttcttagattttgctgcataatagaatcgcctgagagatctagcaattgagaaatcagtgttgtaaagagtttcccagggaatcgcaatgcacagccaaattgcagaccaatgctctaaaacatctcttcgcaaaatttagcataaaggccgggcgtggtggcacacgcctataatcccagcactttgggaggccaaggcagatggattgcttgaggtcaggagtttgagaccagcctggccaacatggtgaaaccccatctctactagaatacaaaaattagccaggcattggtggcaggtgcctgtaatcccagctactccaaaggctgaggcaggagaatcacttggatcctaaaggcggaggttgcagtgggctgagattgcgctgctgcactccagcctggggaacagagtgagactccatctcaaacaaaacaaacaaacaaacaaaaaatttagcgtacatataaattgccagggggtcttttaaatgacagattctagttcagtaagtctgggtggtgcctgggagtctgcattgctaagaagctctcaggtgctactgatgctgctggtctctggatcataatctgagtaacaagggtctaaagcacagggcctaagggtggtactcctattctgaggaacttcagctttgcagctcacggggaatttctggagttactgttcatgtttttgagacagaatctcgctttgtcgtccaggctggagtgcagtggcgcaatctcagctcactccaacctccgcctcccgggctcaagggattctcctgcttcagcctcccaagtagcagggattacgggtgtgtgccgccatacctggctgtttttggattttagtagagatggggtttcaccatgttggccaggctgatctcgaactcctgacctcaagtgatctgcccacctcggcctcccaaagtgttgggattacaggcgtgagccacggcacctggccagagttatctttcttcttaaactctggcctcagcaatttttttggagcagagtctggccccttttaccctattctaggtcatggcaaaccggtctcctttgaagcctgaagaaaattcccaaattcttgtcatctcattatgtagatccattctccttccagacaatgccaggctgtgagtatggtggaaagaaggctcatctttcataaccaaacaggtgttttcttaaacaagcccctttccttctactccccccgcccatccgtcctacacctctagaattcagatgcaccactacaataatttctttttgtgttgattgttttcctttcctgttatattggtaaagactggggcttagtgtggagggtcctgatgcaagtgtgaatgaccggcagctccagggctacctgcagtggcccgtgtggggtggggacaaggagggaggacctgcaatgaggcgccagactggagcagcctagtggtgaatccctcagtcacacaagctaagagttaccaccagactgttggcaaaagaagcagaagacacctcagaactaaaacaatcgtgaatctttcattgttatgtaaaaacgtaactaaagactaataaaatgatacccaattcttcctacagagtattgggctcagtcaccatcaacaaatcttttggtttgtatttatttattttctattttttagaggcagggtctttctgtgttgcccaggctagccttgaactctcaggttcaagcaattctcccacctcggcctcccaaagtgctgggattataggcatgagccaccacacctggctaacaaatcttttgttactcgaagtcttgagttaaagaaacctcctctgtgttgatacagatggatacctggagagaggtgaccctacctgctctcagaatcaaggttctgatgcccacatggtcttactgaggctggcagccccttggcgtgatgctgtcgcagtgaggggtggttatgtctgagtaaggccatactccaaggccggtctctgctctgcgtggctcagggctggcctgcctcaggagagactcgtttggggatgttgctcatagtgatgggaagttagatctaatctaagctgtcctggtgtctcccagctccctgaaactcacagtcttctgtttcatgggccatgtgttctgccagaacttgtctcagagggggtgagttttggttatgggcctgttggaacatttactaagcagggatttcctgcctggcacatggtcctggggcttcacttcagctcagccagtggctcctgtgtgcctgtgcaaaggcacggtactctcaggacaatctggaaagcccgagtcctcccattgtctggaattgccttttcctttcatagccactccaagtcccacctcatttctggtaggatttttgaagtgcctcacagccacggcacactctgactactgctctcactgaatatgggtgctgctcacctccccgccatttggagagtccctcccccacctccctgttgctcccattcttcctatttgcccaaagggccactatcacaattctgttccacataacattttaggaacaatggaggggaattacagttcagggcacatgaagtaaatatttaaaatggactatgaggccgggcgcagtggctcacacctgtaatcccagcactttgggaggctgaggcaggcggatcacctgaggtcaggagttcgagaccagcctagccaacatggcgaaaacccgtccctactaaaaatataaaatggactatgagacgttcaaagtttcattgaccatctttgccatggcgaatatctcacggtcatcttagggtccctggatgccacggtgccacctctctccagaaatttctctccctcctttcacagctcttgacccatgtctcagtaccacgcagagaagacaagattcttgcagctttatcagacagtgccaccgaattcctttccttggtagcaattatttcctttctgaccattgctggtgatctcaaccaattatgtcccatcaaggtaattccataagcagctatctaccactgagatcaatactattccctaaatgccagaataagccatcattttatgtttttgtagtgatatttttctttgttacatcatacatttcaggaatattaaaaaattaggaaacagtttggtggtttctcagaaagttaaacatagaattaccatatgattcagcaattcaacctctgggtatatccccaaaagaatttaaagcaggggcttggacagatatttgtgccgtgtatttatagcagcattgtttgcaatagccaaaatgtggcaacaacccaaatatccatcagaggataggtggataaacagaatgtggtctatacatacagtgggccatcactcagccttaaaaaggaagttagtcttgacacatgctgcaacaaggatgaaccttgcagacattatgctaagtaaataaactagacacaaaagggctgatattgtatgattccagttatatgaaatacctagagtagtcaaactcatagagacagtagaacagaggctaccaggggctgggagagagagaaatggggagttatttgtttaatgcatacgcagtactgttcgggatgaaaatgttctggagatggaaggcagtgaaggttgcacaacaacgtgaatgtacttaatgcctgaattgtacatttggaaatggttaaaatggtaaattttatgtgtattttatcacaatgaaaaaaatcccacaaattagaagccttggctctttcatcttctgtaccttcaggcaacacccttccgtgtacatgtccctggagagacctagagggggacaggtgagggctgagggcagggagagctggtgactgcagcacagctgtgcttataaagcaggagaggttgtttttaagattctgcttctctttgggattcagcatcaacacttggctcacaggtaagcgctccctctgaagatcccaaatgttttgctgttttcagttttcacctgtcttttgatggagttgaagccagttccctccctgggattaatattcacaacaagcagcaagcgattaatttaaccagctgaaatttattgtgccttcaccttaactcaaagcctgattctgctgggtgtttagttttcactgttgatgcattgcagatgacagcccctaagcatctgaattgaaagcacaccatgctacagaggtcctgccgcccgcctgcctcttactctgaccccctgaaatctagagagctctctgagttccacagcatgtctcactcagaaaaaccaattcttgactgctggtctctaggaacagttgggatccaagaaccagtttaagatttgggtttcatgcctgactcatggaactgatgactcatttcatttcagggggcttcagtcaatgaatgctgactggaacttacaagcacatccaaccccactcgctgcctgccacagaaacaaccagagaggctgagtgtctctcagactgagcatgaaacactctcagctgcgttcagccacattcggggttgcacgtgtgctaccgggcattgtgcggctcatcccaccccaaaccctctcctacctcacctcgcttcaccccgccctgctcccccgccctgccaagggactgtctagtgaggactccaactgttggtgtctaacaaggcagaacaaaggcccgcgtgttcatggagttccatttggagtgcacaacaatttcagagcacaaatggaaaaagaaaaaaaaagaaggttggaaatctatagctggcttttatcaaaccagaacttgtagctctcggctgacaatcagccagtagctaaaacccatgagggacagctctgacttgcagcttctggctggctattagctaccagcagccttctgaccctttttccagggaagtaacagctggcagctgacaaaggcgctggcagagcgggtaactttcgcttctctgggaatggatctaagattggcaggaaataaggcatttaaaatatgacaattataagcattttcacttgccttttttattacgcttttggattctggctctgattgctaaaatgtattatgtgctaaggagttttgatggcattttttggagaagtagatgtcccagcgctttccctgtcactaacaccagcccagaaaaaggtgcattctatgagtgttttctacgtagccttcttgaaaacaattcctagtaacgatcatgatagattaatggccgtgagattacatgagcttaagtgaagtgctgccggctaattaaagcacagctttggctcattcggggctgttgggcggggccttctgtggtgttgcagcagttggggagaaaagtagacattgggatgaagtgtagatggattaaccaacagtagaatgaagaacaatttagcctcatttctctcttttatgtaccacgcagccctccattttttttgtcacaaagggcagaggtaggggggttacaataatgggtcctagtagaagagccaatgattgtgagacgtgataaccacccttgctcaagagggtgggaggacacagtgcgacgactccacacttatgccccttgggtcctagctgctttgttgctgtgactctttttgtaggacatagcactttggggttgtagccattacactatctgcaatattgctattttaattttggtaataataatacaagctgcttattataaaggttgacttctattgaaagttttaattaaaatgtagatgttcatcagggtgcaggtgttcatgcctgtagtctcaacactttgggaggctgaggcaggtggatcacttgaggccaggagttcgagaccagcctggccaatatggcaaaaccctgtctttactaaaaatacaaaactcagctgggtgtggtggtgcatgcctgtaatctcagctactcgggagctgaggcaggagaatcgcttggacctgggaggcagaggttgcagtgagccaagatcatggcgctgcactccaccctgagtcacagagtgagactctgtctcaaaaaaaaaaaaaaaaatgtagatgttcaaggtaatgtttgtccaaagagcaccagataggtggaggagaagaacaccaagtggccagtaggacagagaaatttatccaaaagttcaaaaggagtggactggctgagcacagtggctcacgcctgtaatccctgcactttgggaggccgaggtggatggatcacctgaggtcaggaattcgagaccagcctggccaacatggtgaaaccccgtctctactaaagatacaaaaattagccaggcatggtggtgggcgcctgtaatcccagctacttgggaggctgaggctggagaatcgcttgaacccaggaggcagaggctgcagtgagccgagattgtgccactgtactccagcctgggtgacagagtgagactctgtttcagaaaaagggactggactagctggaagaagaatgtttccattacaggcttaaatggcacagatatgtgcatttgacttagtaagcagggtattttcagaatactgggttctgtttcttatgttcttgcctaaaaaaaaaaatcaattttaataggaaagcttatttttcaagatggtggactgggcacatgggtttctgccactccctcccaaggacccattaaaatgataatgaacacattttaaaagggtataaccttataacatgaagacagtcgaggaacaggaatcagtagactatgagagaaggaggataagagagaggacagttgattttccaaataagtcctcctgtaccatttgcttttttaatcatgtagatatatcactttgatatacaagatttttaagttggaagggacctttgttgccttgttcctactccagcttttaattaagaccacatttccaccattctaaagagatgatctgcgatcctatttttaacaacacccagagaaaggcaacacaatcctctcctgaactgagctgtttcattgtctgataatcctcatgtttttgattcacattttccttgcagcctgaaggtgatcatgtacacccaggagtagcccagctctgttccatgaaatgaaacgtccagagctgtccgctttatgttttatatggcaacacatttctatgtgtgattaagaaacaaaacaacaaagtggggaacgtactaagcttatcaaagtacaatagttgctgcttcaccagaaaaactagtgctttcattctatttctggcgctgttagcctgaccctagggaaccaaagacattttgcactgaaataaagaataacacttaacagctatagtcaagctcatgacaaaattgtgaaataggcaaagttttttactaggattttcccatcatctctggctgggtgtttctcctcttactgtcccctcgctcagctccaaggcaactattgctctctaggtgccaggaaaacaaaacaaactattttacactaaagtgtcattgactccctgtgagttctaccccaaggacatttgtgttctatatgagtctgtatgcaatcaagagagagaaactatacagtagtttgaacagggaaagtgtaatataaagaattactcattataacaggagactaaagtaacaaagaattgattggtaagatgtaaaaagaactctaaagaatatccgaatggcagctataaggagcagccactacctttagagctgagatagaggccaagaaagaggccccccagggctgagatccagactttttgaaggctcagctctggcataggggatgacagagagaacagagaggtgaaacttcctggaaatccatcctctagggtgtccggaaaagctgatcacaggaagatattgtaccagatgcattctgcaacaaaaccacccaaggtgagtgaagtgcccaggaagctgctggccactgggtgcctctggtcaccatgcattataggagccaggcataggagaagcagcctgtgccacaggagcctgctaagcttcaggtgtctgccaagcaagcataagggaaccaggacagaaaccccttcctcctgcagtgtctccccagacccctctactgaagccgcaaaccacagtatatatttaaatgactaaacatatatacacacagcttaacattgtgccagatgcaagagaaaaatatctgaagggcacagctccatttttgaagatcatgcaatgaatggtgaatttaaagtcaagaggccacaaacttataaccagcacatactgtaaaagagaaagaaaagatcaaggcaatgttgaacccaatgggatgaatttctaatggtaaagttccagaataagcaggctagtgaaggtattttggagatgaagagctttctaatggtccacaaatcacactatatagatgacataaatgtatatcacaactgatgggattattaaatgctgcttcaaggcaggaaagggatgctgtcaggccttgagctcttagttcaagttcacctccattcctaggtgtgtctaggactgactagttgccaccaattccatttctgctttcaagcacacgaagagaaaatattccccagacttcttgctgctaggtggggcatgcaacaagttctggtcaattgaatttgagcagaaagccatttccagatctggcccctaaaacatcccattagaccatcagttcactgatggccagatgaaggtaggggatccagtagaaggctccaaaggagttctcggggatggtggtgccctaaggtgaaaaaagcccaagtgataacttagaggagagatactctggagagctgctcaaatcacactgcactagagtatgactgaattgtgttaagcctctgatattactggaatttttattactgtagctagtgttaattaccctgactgatacactgtgcaaattaagagccctaggacagtctcattcttaagcttaaatagcagagagatagtactcattattcctttagtttgagcttgtcagaatgaggaagctagatcatacattctctttggttctatgtatgttaggtgtgggatgtctgagtcccaaagtaatttactgtggcccagtgtggagggcaaatcgtggcaaaccggtcactgcactgaatagacaaagacactctgaaaataaaacatcagggcatgttcttctctcgcttctgggaattagttatttgtataaagaggcttgacatggaggcacacaatagaatgtgtgacggaagggaccactttccctgttaaagcccagcccccactctgtcaggtagctccacccgggtccacactgtttgcccactggaagagcttccaaggtctgggctctattgttcactgatgagcagaaatagacttggtcacatataatgcacaaatatttttaaagtgccttatttttcatatttaaattatattaaatgtatatttatattaaatatgtatattaaatgactatatacacacacatttccctccattttccccttcagataacctccgaatatatatggacttttttggggtatgaatggatgaaaaaggaaagatactgcacataggtatccttccaggtcaaacgagtgagatctacttctgcagcctcctctgatctcacagctgtcaggctataaagtcagccagagaacatctctgagacctcagctggggagaagctatcccctgaccgctgagattcaagaccctctggagaactgccctgaccctcaggtggtttctttatgtgacgcccacagagttagcacggatttcctgaaggtctgcatcctgtgatccaacacctcgtgagtaaatcatttttaacagcagcatggcacaatataaagtttatggaggatggacgtaaatttggttctggaaaaagcatggttccctgtggtgacaggcagctgggctggtgtgctcaaacaccccctttattggatcgcaaatgatatcagctggaggccttgctagcccctaacagaacacacaaaacaaggatctgagagagagagagccagtcccatgctagcacctaggatcccaaatccaaacttggagctgcttttcctactatggaatgtgctcagtataggaaatctgttacactgaaggcagcaccctctaactccctttttggaggttttagtcaattccagagaaaccagggttagaaagaaggaggctggagggggaagcgagagagagaaagagagagagagaattttattctcctgtctattgacacatgagtatgtggttctactttagaattctgttttgggatggagaatctccaaaagaactcactaaatcaaacatttttaggggctttttacactgaaatcaatatcagcgcccccactctcgatgtgccccgggatgtgccacaggatccacacctccagcttcgtctttgacttagtgagattgcacacattgatgtatgtgcacgaaagggaccctgaagtctacagggttaaggacttctcacacactgaagtcccaaaccacaggagccttggcaggtttccttgtggcacctgccaggctgcccatgttataaatcattacttcccaggaaagagtggatgttggccttggaagcctgaaggcgaggccgcgtcggggtggtggtgggtggagtttggaggaaggagtgtcatcttgaggaaatgtaaattgatactcttgggttagacctggaacatctctctcaaaaagccagggcagcaggggtccccagggaagccagcacaataaagggagagctgtggacccaatgcggcctcagagaaagctgagggccacctggggcaatgacccctgctcttgtgaagacctggaatactaatgttgctttggctccttcaatcttgagaacagagcgggcaaagtccttcaaggagtgatttatggccaggaaaggtttctggagaaaccgagccctgttggtggaggcagcacagtgcagaggtgaggagggtgggttctggcactgggctggctgcactcaatttctggcttctccacttattagctgcgtgaccttaggcaagtcactcagacacctttcccagttctcccaactatgaaatgaggataataggccttaatgtgagcaactggttagaacagaacctggcatatgcaggggaacttagtagtctaagcactacacagaggaggacaaaagaggagatgaaagtccctctgctcccctacgcttgtggctacctgatgcttcctaaacagagaaatgctaaggccaggcacgagggccaggcatatagacagaaatgcagcattcagacttcgctggattcctccctttcacgcagggaagaactctgggcagggagtcaaaggacttgccttttatctcagccctgtcacagggaccacagaccacacacccccaatcttccagccttccatttatgcatagactcctgcagcagtggagtgaggtcttgaagttaatctagttcatattgattatgtggataatagcagtaacaaccactgtatcagcatttattaagagtttcttgtgtcagacactagacctgtgttataagtgccttatgagaattggctcaatgttaccttctgatatgagtgagtactcttacagccattttacagatgggaaaactgaggaagagagaagttaaatgccaaattttatacacattagctcatcaaattaatacacatgagacaggtatttcaatttacagatgaaaaactgaggctcagagaagttaaacattctaccagacccttaaagagggaggagacttacatttaagtttgtatacattttctgttaatatgagtagtctctattttattttttgttgagaaataatttataatcagtattgtgcactagtctttttttttttttttttttttgagatggaatctcgcagtgtcacccaggctggagtgcagtggcatgatcttggctcactgcaacctctgtctcccgacttcaagtgattctcctgcctcagcctctcaagtagctgggattataggcgcctgccaccacgcccagctaattttttgtatttttagtagagacagggttccactatgttggccaggctggtctcaaactcctgacctcatgatccgcctgccttggcctcccaaagtgctgggattacaggtatgagccacctcacccggccagttgtgcactagtcttaagtgtatagctcagtggaattttacttacatatataccaatgtaaccactaatctgatcaagatttagaacattttctccactctggaaggttcccctgtgtcccctcccagtgcctacctctggaccctaagataatcactagcttggcttctgtcaccattgtgacattgtttgtttctggacttcatacaaatggaatcagacagaatgtgctcttctatgtctccttctttctgtgtctcaaattataattctgagatttcatccatattatgacttgtatcaatagtttgttcctttttattgctgtgtaatatattccacagtataaatttatgcacaattcattgactcattcttctgttgacgaacatttgggttgtttccagttttggactgttatgaatatacttattctgaatattcatgtacaagtctttttgtaagcatatgtactgttttctcttggatgtatacctgggagtggagttgatgggacatagggtagtaagtgtatgcttaactttactgccagttttccaaagtggtgagagaaatttatactctcattgaaaatgaatgaccttttagttgctccacatccttgtccaagcaaggtcattcgttttgctgagccattcggtgccatccaaatgtgattttaatttgcatttccttgatgagtaacgttgttgagcatctttttctatgtttattggccatgaagagatcctcttttgtgaagggcctcttaagtcttttgccgaatttttttgtttgttggtttgagatggagtctcgctctgttgcccaggctggagtgcagtggtgcgatcttggctcactgcaagctccacctcccgggttcacaccattctcctgcctcagcctcccgagtagctgggactacaggcgcccacgaccatgcttggctaatttttttgtatttttagtagagacagggtttcaccgtgttatccaggatggtcttgatctcctgaccttgtgatctgcccgcctcagcctcccaaagtgctgggattacaggcgtgagccactgtgcccagcccatcttttgccgatttttaaatgaattgtccttttcttatagatttatagttcttaatatactccgggtatgagtattttgtaagaaatatgtattgcaaatatcttgccaagcctgtgacttacctattcacttgcttaatgatgtttttgattaacatacttttttttttgtatttttttaaaaattatactttaagttctcgggtacatgtgcacaacgggcaggtttgttacatatgtatacatgtgacatgttggtgtgctgcacccattaactcgttatttacattagggataactcctaatgctatccctcccccctccccccaccccatgacaggccctgatgtgtgatgttccccttcctgtgtccaagtattctcattgttcaattcctacctatgagtgagaacatgcagtgtttggttttctgtccttgcaatagtttgttcagaatgatggtttccagcttcatccatgtccctgcaaaggacatgaactcatccttttttatggctgcatagtattccatggtgtatatgtgccacattttcttaatccagtctaccactaatggacatttgggttggttccaagtcttttctattgtgaatagtgctgcaataaacatacgtgtgcatgtgtctttatagcagcatgatttataatcctttgggtatatacccagtaatgggatggctgggtcaaatggtatttctagctgtagatccttgaggaattgccacactgtcttccacaatggttgaactagtttacagtcccaccaacagtgtaaaagtgttcctatttctccacatcctctctagcacctattgtttcctgactttttaatgattgccattctaactggtgtgagatggtatctcattgtggttttgatttgcgtttctctgatgaccagtgatgatgagcattttttcatgtgtctgttggctgcataaaagtcttcttttgagaagtgtctgttcatatcctttgcccactttttgatggggttgtttgattttttcttgtaaatttgtttgactttttgtacaaaaagattctggatattagccttttgtcagatgggtagattgtaaaaattttctcccattctataggttgcctgttcactctgatggtagtttcttttgctgtgcagaagctctttagtttaattagatcccatttgtcaattttggcttttgttgccattgcttttggtgttttagacatgaagtccttgcccatgcctatgtcctgaatggtattgcctaggttttcttctagggtttttatggttttaggtctaacatttaagtgtttaatccatcttgaattaatttttgtataaggtgtaaggaagggatccagtttcagctctctacatatggctagccagttttcccagcaccatttattaaatagggaatcctttccccattgcttgtttttctcaggtttgtcaaagatcagatggttgtagatgtgtgatattatttctgagggctctgttctgttccattggtctatatctctgttttggtaccagtaccatgctgttttggttactgtagtcttgtagtatagcttgaagtcagatagtgtgatgcctccagctttgttcttttggcttaggattgtcttggcaatgtgggctcttttttggttccacatgaactttaaagtagttttttccaattctgtgaagaaagtctttggtagcttgaaggggatgacattgaatctataaattatcttgggcagtatggcccttttcacgatattgattcttcctatccatgaacatggaatgttcttccatttgtttgtgtcctcttttatttcattgagcagtggtttgtagttctccttgaagagttctttcacatcccttgtaagttggattcctaggtattttattctctttgaagcaactgtgaatgggagttcactcatgatttggctctctgtttgtctcttattggtgtataagaatgcttgtgatttttgcacattgatttggtatcctgagacattgctgaagttgcttatcagcttaaggagattttgggctgagacgatggggttttctaaatatacaatcatgtcatctgcaaatagggacaatttgacttcctcttttcctgattgaatatcctttatttctttctcctgcctgattgccctggccagaacttccaacactatgttgaataggagtggtgagagagggcatccctgtcttgtaccagttttcgaagggaatgcttccagttttttcccattcagtatgatattggctgtgggtttgtcataaatagctcttattattttgagatacgtcccatcaatacctagtttattgagagtttttagcatgaagggctgttgaattttgtcaaaggccttttctgcatctattgagataatcatgtggtttttgtctttgattctgtttatatgatagattacatttattgatttgcgtgagttgaaccagccttgcatcccaggaatgaagccaacttgaccgtggtggataagctgtatgatgtgctactggattcggtttgccagtattttattgaggatttttgcacaatgttcctcagggatattggtctaaaattctctatgtaagtaaagcactcctcagcaaatgtaaaagaacagaaattataacaaactgtctctcagaccacagtttaatcaaactagaactcaggattaagaaactcactccaaaccgctcaactacatggaaactgaacaacctgctcctgaatgactactaggtacataacaaaataaaggcagaaataaagatgttctttgaaaccaacgagaacaaagacacaacataccagaatctctgggacacatttaaagcagtgtgtagagggaagtttacagtattaaatgcccacaagagaaagcaggaaagatctaaaattgacaccctaacatcacaattaaaagaactagagaagcaagagcaaacacattcaaaatctagcagaaggcaagaaatgactaagatcagagcagaactgaaggaggtagagacacaaaaaacccttcaaaaaaatcaatgaacccaggagctggttttttgaaaagatcaacaaaattgatagactaccggcaagactaataaagaagaaaagagagaagaatcaaatagatgcaataaaaaatgataaaggagatatcaccaccgatcccacagaaatacaaactaccatcagagaatactataaacacctctacgcaaataaactagaaaatctagaagaaatggataaattcctggacacatacaccctcccaagactaaaccaggaagaagttgaatccctgaatagaccaataacaggctctgaaattgaggcaataattaatagcctaccaaccaaaaaaagtccaggaccagatggattcacaaccaaattctaccagaggtacaaagaggagctggtaccattccttctgaaactattccaatcaatagaaaaagagggaattctccctaactcattttatgaggccagcaccatcctgataccaaagcctggcagagacacaacaaaaaaaatgattaacatacattcttatttttgaaaaggtccaatttaccatgttttacttttacggtgaaatattttaaagaaatctctgcctactccaaggacatgaagatattccactgtttttcactagaggcctattgttttaccttttgcatttaagaatatgacttaagctcaaattaatttttgtgtatgttgtaaaataagtgtgaaaaattttttttcaacatggtatgtaaatgacttgacaccatatattgaaaagactgttttcctgttggattgcagtggtccctttgttgcaaatcaaacgactatatatatatgtgggtctatttctggagtctttattctgttccattggtctatgtgtttatccttgtctcaatagtactttttttttttttaaatggagtctcgctctgttgcccaggctgaagtgcagtggcacaatctcaactcactgcaaccttggcctcctgggttcaagcaattctctctgcctcagcctccctagtagctgggattacaggcatgcgtcaccacaccgggctaattttttgtatttttagtagaaacagggtttcaccatgttagccaggctggtctcgaactcctgacctcaggtgatccgcctgcctagacctctcaaagtgctgggattacaaggcatgagccaccgcatctggccaatagtactttgtcttacagttttatcgtgaatcttcaaatctggtagtataagtcctccaaatttgctattcttcaaaatggttttggctaagtttttttaatttccttataaaaatgtaagaatctcgtcaatttttacaaaaacttctgctaagattttgactctttaggtcaatttagagagggctgacatcttaatagtagaaagtattacaatccatgaagatggaatatctcttctcaattacatagtttgataacaataatttgggtaaaactttagttattttcaaatggttaagatagaattccatatgatccagtagttctactccaaacaccaaagagaattgaagacatatgtctacactgaaacttgtacatgaatattcatagcagcattattcataatagacaaaatgtggaaataaatgtccatcaactgatgaatggataaatacaatatggcatatccatacaatggaatattattaagcaataaaaaagaagtactgatacaacatggataaactttgaaaaacactatgctaagtgaaagaagccagtcacaagtgactacatattgtatgatttcatttaaataaaatgtccagaataggcaaatccatagaaacaaaatagagtagtggttgcctaggactagggagaggggaggagattggggcagtaatgataaggggtgtggggcttcttttagggtaatgaaaatgttttaaaattgattgtggtgatggttgtgcaactctgtgaatataccaaaagccattaaattgtacaatttaaggccaggcacggtggctcatgcctgtaatcccagcactttgggaggtcgaggtgggtggatcatgaggtcaggagatcgagaccatcctggctaacacagtgaaaccctgtctctactaaaaatacaaaaaattagctaggtgtggtggcaggtgcctgtagtcccagctactcgggaggctgaggcaggagaatggtgtgaacccagcaggtggaggttgcagtgaggcgagatcgtgccaccgcactccagcctgggtgacagatcgagactccgtctcaaaaaaaaataaaataaaataaattgtacaatttaaataagtgaattgtacttgaattctatctcaataaagctgtttaaaatagttttaaagtaatgttgtctgtaatctatttttatggaatgaatcgtgtatcttccccctgccccacacaaattcatatactgaagctctaacctccaatacctcagaatgtgattgttatttggagataaggcctttaaagaggtactgtcattaagttaaaacgaggcctttagggtgagccttaatccaatctgatagtgtctgctgttataagaagaggagattaggatagacagacagtggggatgtgtgtgatcagaggaaaggccacctgagggaggacacagggagaaggtggccatatttaagccaggaggacaggccttagaagaaaccagacctgctgacaccttgatcttggacttgtagcctccagaactgtgagaaatttctgttgtttaagccacccagtctgtggtactttgttatggcagtcctagcaaactaatacatttgtgttgatttttatattcttcagtgccacatttagtctaaaactctaaaagcatagcaacttcccacgtctacagagaagtcagaccaggctgttttcagcacgtgaagagctgtctttttttttttttttttttttttttttgagatggagttttgctcttgttgcccaggctggagtgcaatggtgtgatttcggctcaccgcaacctccacctcccaggttcaagtgattctcctgtctcagcctcccaagtagctgggattacaggtgcacgccaccacacctggctaatttttgtatttttagtagaggcggggtttcatcatattggtcaggctggtctcaaactcctgatgtcaggtgatctgcctgcctcggcctcccaaagtgctgggattacagacgtgagccaccgtacccggcctagtcatcttttttgaaaacattttgatggtaagcagcactttggaattcctgaggttgtttttctttttctttaaaaaattctagacaaatgagattttctaaatttggtgggggtgggggtgatgttaaggataattactgaaaaaatcaaaaatttaaatagtattgtcaataattctcaagataaaaattctcaagctaaatctcataaagtaattataaaaaatctttgattctgtttaattaaaaaacatgtttctatgtatattaatgctttatagttcaataaaaagttcaaaaataaaatgaaaatagataaaaattactggaagacaccatgaatctaattttaggttgtacttttaaaaatttaaatcttttaaggaactatggtaattgctgtattttttttcttttggaataaaacagtgagaaataagtgaatctctttaaattccaattatgaatgaacacaaaggaaggtgtgaatggcatattaacaagagcatgtgagggagtcatgacttggttttctaacttagggtaatgtgtgtttcacaggaaaactgaagagctgtgctgctgcaaagcagttttgaaatctacttaataaactccatattataaatagacatttgatttctggcgtggcgcagtgacccacgcctgtaatcccagcactttgggaagctgtgggcgagtggattacttgaggtcaggagtttgagaccagcctggccaacatggtgaaaccccatctctactaaaaatacaaaaattagccgggcatggccgggcacggtggctcacgcctgtaatcccagcactttgggaggccgaggcgggcggatcacgaggtcaggagatcaagaccatcctagctaacacagtgaaaccccgtctctactgaaaatagaaaaaaatagccaggcgtggtggcgggcgcctgtagtcccagctactcgggaggctgaggcaggagaatggcgtgaacgtgggaggcggagcttgcagtgagccgagatcgcgccactgcactccagcctgggcgacagagcaagaatccgtttcaaaaaaaaaaaaaaattagccgggcatggtggtgcgtgcctgtaatcccagctactcaggaggctgaggcaggagaatcacttgtacttgggaggtggaggctgcagtgagccgagatcacaccgccgcactccagcttgggtgacagagtgggaagctgtgccaaaaaaaaaaaaaaaaaagaaaagacatttgacttctattggtttcctctaaaccaaatatgaaagttgactcctaaaattcatttttggtgaggatcatctcaacacaacaatgaggaagagtaactctgtatttggtaatttccccagtgtcacagaagcaggggttcaaaccaactcttctttctggcaccaaagcctgtgcccttcaccactacggtagatgagattgaaagacttggtcgtgactcttcactcccctttgtcataacattgcagagcccacccttcaagtacagggaatatgtcctgacctattgatgtgtgcttggccacattattagaatggccaatggaatttgagacatcgcgatgcactctgaggtcttgaaagtttgaaaggcttaacttagctctgagggcttctgtgatagccataagacacgaatttcccaggaagccactgcccccttcagcctgggcccagaataaacactgtgaaacagacctgaacttgacctgaagcctgcagccaagttctgccgtgggcaaattggaactctgagcctggagtccagtcaagtacagcagggtcctggtctacctgcagacccatgagaaaaaaaaaaaaaaatccaacttgtcattttaagccgttaagttttggaataatttctgtaagcctagcattattgtagcaatagtcaaatgataaaccactacttgacatattcaaaatatggtccttggacactggtatcaaaatcatctggaacttattaaaaatgaagattataggaagatgattactcacttacactaaggagtttaatggaacaagtcagcaggagatactaaatttaataatatattaaaattaatatggaagcaattccacttctagatatttctccaagggaaagccttacagatgtccataaaaagggcaaggatgtaacgttgtttgtaacactgaaaatctggaaataacctaaatatccatcaacagaagaatggttaaatgatgccatttccaccttatggcatactaataaatattatttgttaaaaagaagcgagaaaaattctctgagtcatactgtttgatgaaaagtcaagatgcagaacaatatgtgcagtaagatttcatttatgtaaaggaaaggcatgtctatgtaaatgtatttaaaaaaagatacaaaccaagatacaaaccaagttgataagtgattacctttggtaaggtatgatgttgagaagtgtgtgtggggggtcactgctttatctgtagtgtttattgtttttacactgactaggttgtacacatatattactgtgccattaagaagaaaaatattatgtatttaatgtagctgaactggtggctcatgtctgtaatcccagcactttgggaggccaaggtgggaagattgcttgatgaacctgggctacatagtgagaccctgtctctacaaaaaattcaaaaattaaaattagccgggcatggttgtgtgcacctgtagtcttggctactcgggaggctgaggtgggaggatcacttgagcccaggtgattgaggctgcagtgagctgtgattgcaccactgcactccaactgaggtgacagagcgagaccctgtctctaaaaaatttttaaaaaaaatttaaatctggatttttaggtttcaccccaaatcagaagagtctaggaatctgcatttaactaaattttcagcccctgccctctcagttgcttgagtcagcagcaagctcaggaggaagcagccagccaggggaagagctggaaatgtgatgtggcctgggcaaaaggcacactgcaggatttcccctgtgtgggggaggcagtggagaattctgcctgagggttttcggttttaagaaaaccaaacgaggccaggcacggtggctcacgcctgtaatcccagcactttgggaggctggggcaggcagatcatgaggtcaggggatggaggccatcctggctaacatggtgaaaccccgtcactactaaaaatacaaaaagttagctgggcatggtggcagatgtctgtagtcccagctacttgggaggctgaggcaggagaatcgcttgaatccaggaggcggaggttgcagtaagctgagatcgcaccactgcacttcaggctgggtgacagagcaagactccattcagcggctggagaaagtccctgttaatggctaggttgccctctacagggcatcgccatcccaccctggtcccatcccacccctgggggagtttatctgaatcttggaagggtaagacgaggtacttgagatagttgcatttatcaaaagagggcatgagaatcaaggtggggcatcctaaagtgtggccagcccagggagagggcactggacaccattccacgtggagacattctgacaaggatgaggtaggggacaggaataaagctagtgggagttttcagtatattttctgaacagcttcatctacaaaaccaggggcttgccctgaaaaacagtccctcataccctgtaagtctgtgatcttctgggactctctgctggaggtcaggctcatcaaacccaacagggtggcacctccttgaagtgctggtgtgaaggcccaggccctgcagcctcaaatcaagtaggggaagagctgagagctgggcagactcacctggtgtgacaggagtcaggtccccagatccccagtccagtttcatggctgttcccagctcacaagtccctgttgtatcagcgacttgctttctcagcagttgagtcatgccaagtccgcctgacctgcctggttggcttctccaacagctgaaggccccatgctgaggctgccctgctgccctgcctggagaggaggatctgcacccgtgccctggagtgtctgctcaccagcccccttctgtgtccctccttgccagcaggggcagactgtgagatggttgacagggatgcccagaacagagttgagggcaggagccttccatggctgggccactggggctgtggcaagagggactcaaaaggaaccctaagtatgccatgcaattgttctgctgccagaagtttccagcaggaggcaaatgagaggagaaaagggcatacgggactgaatgctctattcccccaaattcatagttggaatcctaacaccccgtgtgacggtattaggaggtggggcctttgggaggtgattaggtcatgagagcagagcccttgcgaatgggagcagtgcccctataaaagagaccccagagagctccctcttcccttctaccaggtgaggacacagaaagaaggcaccatctctgaaccaggaagcaggcccacaccagacaccaaacctgctggtgccttgatcttggaccgcccagcctccagagctgtaagaaataaatttctagctgggtatgatggctcacacctataatcccagctaattgtgaggctgaggcagggggatcactttaggtcggaccttgagacgagcctgggcaacagagtgagaccccaactctcaaaaggcaaaaacaggccaggcatggtggctcacacctgtaatcccagcactttgggaggccgaggtgggtggatcatctgaggttaggagttcaagaccagcctggccaatatggtgaaaccccatctctactaaaaatacaaaaaattagctggatgtggtggcacatacctgtaatcccggctacttgggaggctgaggcaggagaattgcttgaacctgggagacggaggttgcagtgagccaagattgctccactgcactctagcctgggcaaaaaagtgagaattccgtctcaaaaaaaaaaaaaaaaaaaaaaaagataaaaacaacaaaaaattctgttgtttataagccacccagtctatggtatttttgttatagcagctgaatggactaagacatgttcaatgacaaattcatgaccttctgcctgagaaagccttattcagtaagtctgggaggggctgagaaacctgcatttttcttttttttttcatgtcagataggtaatgtgcagacatggtaacaaggttcaagggtgacacatctcacacatatgcataaacatccaattgtcatgtttaagaactaaaggatcaaaacctgcattttaaaagattctcttaggccgggtgtgatggctcccagtactttgggaggccgagacgagacgggcggatcacctgaggtcagaagttagagaccagcctggccaacatggcgaaaccccatctctactaaaaatacaaaaattagctgaacatggtggcatttgcctataatcccagctactcgggaggctgaagcaggagaatcgcttgaacacgggaggcggaagttgcagtgagcccagattgcgccactgcactccagcctgggcgacagagcaagactctacctcaaaaaaaaaaaaaaaaaattaatgaaagattcccttaggtcatgcacaggcagatttgagaatggtgattttaggttaacctggttgaggtttgttcagaaagcttgagaagggtcagaggtcagtgtgataaagcagactttgcttcagctgttaggagtttccctccctgggataaggggcaagggcttgatccaccttgtgacccagaacctcaaaaccagcccctttgtacagagggacagtcagatgttgagccaggctggaagtgtagcttgaacagcatccccagggctgagccccaggcacaaggcccaggaggagctgccaggcccacatctgcggtcaagattctcactgggaaattcttacatgtttgcaaaacgcagctaatgtttcacacaccgtctgcatgagcagctgctttctgttcttgacgtgggccataggatctcgaaccggagtggacgtgtgtccacatgtaatatagacacaccctctcctgataagtctgaagcagggtatgtctgtaacttcagctaaggtagggctctgatggttccctgatcaaccgtggaagtctaaatcaggccttccatgtgtactagccagtttcagcaataggcgtgggtgctttaattttagacaagagcaatcctaacgcttacagcagagccttcccaccaggctaaaagttccagaaagttttatattacagcaccaaatccagtgttatggttccaatcaattcaggaaataaaaagtctacaatttatttgggtctctaagactcagaactcctggccaaaaatgtgccctttgatcttcatccctttaatctgaagtattctctaaatgcatttccattttaacgaacaatgccttctactggcacaattctctttattgaagaaactcagcttgtgtttcaggattccaatccttggattaaattcattgtcatatatcagtcctaatgtgtgccaggttcctaccctcagtgagcttagtggcaaggagcaaaactcaaggatgtatgctaacaactgcagccagcagtgctgtgcagtgactgccttcaaaagaccagagccaggagcagggcgttctcagagggtggccatcactagacatttgagttgagtctcaaagagtggataagcttttaagaagaggagggagggaaaaagaacagtccaggaaggaggaaagaaaggagcagtgcagagcatgcttgcagagttgtgggtaactcagtgtagccaggagataaggcaggggtgatggtggaggtgatgggacagatgagcctggccagacagtggagccagactgtagtggaccaaactcccttggatttgctcaagtaaagagctgatgtacacaatgcttcagaggaatctcacagaaatgatgtggggtagcgctattggacctccagatgctagagcgtggacagtagctattcccagtcactctctctggtggcccatggtttcttgccactgcttctctctgcacgctgtgtcatctgatcacccatagggcaactctagccctgacttaagccaacctgcaggccaagcatctgtcaccacggtctcttgattcttggatccaactggacagagacaatttgattagccagtggccaatggactgtttgtcccttggtcaggtgtctacccctcaaatatcagctgttctggtcgggggcagggtgggggtgttatacagtgaaaacacaacctactgtgctcacccttcaatagaggggatagtgtgtgtggaagttgaaagaaagaggcgtggctgggcaggtcctccaaacaggtctccttccatgacagtgggggtcagtgggaactaccacattttttgaggaggaaaataacataattaaagctgtaattctggaagattactttctaccatgtgaaggataagactgaaggggaaggagaagttgccaacacgtatcaaacatataccacgtaccatatacctggcacatgtatctgtgtacctagcccctatgatgctagatactgtttgcatattactttttctagttttcacaagagcccattttatttatgagaaaactgtaatctcagtgccttgggaggttcaggtgggaggattacttgagtccagaagtttgagacctgcctggaccaaagaaaacacacacacacacacacacacacacacacacacacacacaaaattagctgggtgtggtggtgcatgcctgtagtcctagcccctagagaggctgaggtggaaggatggcttgagcccaggagtttgaggttacagtgatgagctatgattgtaccactttattccatcctgggtgacagagcaaccctgtctctttaaaaaattaataaatagcccaggtgtggtggctcaagcctgtaatcccagcactttgggaggccgaggtgggtggatcgcctgaggtcaggagttcgagaccagcctggccaacatagtgaaaccccgtctttactaaaaatacaaaaaattagccaggcgtggtggctggcacctgtaatcccagctactcgggaggctgaggcagggtaatcacttgaaccaggcaggcagaggttgcagtgagccgagatcacacaccattgcactccagcctgggcaacaagagtgaaactccatctcaaaaaaaaaaaaaattaataaataaaaaataaaagaagccagaagggaaagtgaagtaacttgcccaaagtcacacagctagttagtcaatggtagaattgtgatttgaacttaaaagctgtccagacttgaaattcacaccaagcctgaaacctaccgggatagccccgtgtgcctctctgcaggtgcctcatgtgctgtgagttcggactgagcttgtcatcttctgcctgttttctattccttttccatatcaccatcctcccagtcacctaagcccaaatctctctaaatctcagtctccttgtctgtagaacagagataataataatgtatcccaaaggttgttctgagaattaacttagaggattctcatgaagtgcttagcaccatgcatggtgctgtggtgttgccagctgtccccaacctttttggcaccagcaccagtttcatggaagacaatttttccatagcctggtggtgggcatgggggtggggggagggtttcgggatgaaaccattccacctcagatcatcaggcattagcttctcataaggagcctgcaacctagatccctttcatgcagttcacaataggattcagactcctttgagaatctaaatgccactgctgatctgacaggaggtggagctcaggcagtaatgctcacccacctgccgctcatctcctgctgggcggcccggttcctaacaggacacggattggtaccactccatgacccaagggttggggacccctggtgtccgcagaattgacagaaagagcaacttattggctgtggggaaccaaaggagtatgacttggcgttttatttatctaatacaggagctggcaaacttttcctaaaaaaggccagatagtaagtattttcggcattgtaggtcatatagtctctgttgcaactactcaactttaccattgttgggcaaaaccagccatggacaagacataaatgaatgagtgtgctgtgtttcaagaaaacgttatatacaaaaacaagcaggggccgactggacccaagggttgtcttttgctgcctcatggtctttgccctgcctcatctcatgagggcgaggccatgtctgcttagttcatcgatttttctccagggtctagtgcagtgcctggcccatagtagacattccataaatatttattaaaggaatgattaaatgagagaaagcaaacaagcaagaacaaaagaaagactgagaagagacaaaactttgggatcacctggatatctgttacagggttctgtgtaggaaatagaaaccatgctagagtttttaagcaaaaaagaatataacatgaagaattgcaaacttgttggaaaggctggaagagagggctctaggctgggcctccgaggatggctcccagaatgtggtaaaatcaatctgtcaggggtgctatcacctctgccacaatcaggaaggaggactcaggaagctgccactgggactgttgactgcaagaacatcatggctgcaagacaaggccagaaagtggtcagcaagccaggaacagcgtgaattactgccaccaccgcatttgccaggcagaggaacctagccactgccacgtccacaagattcttgatgcccatgaagctggagagtggctatcagtagctccatgatcttgctttgcagcagaaagtagccaaaagctgcaagacattggcctctgccttccaagctttgtgcaaataagtctaattggtgtagcttaactcacaatcatgatcctaatgaaaagagactctgggcagtgtagtttttagcttcctagactctgcagcaccaggaggcaccctagaaagatgtgggaatggattcatgcaacatttagcatagagtatacattctattgattgattgctacaaagtaaactatcccaaggtttaatggcttaaagccacagtcatttgttttgttcagaaatttgaaatttgggcagagctgggtgggtccagcttgtctctacttaatgatgagtcagctggggtagttcaacatgggtaccaccgtgtaagcaagtccacgcacacatgggagcccaagtggagaggaacaaaagcgcctatcagtagccccagctgagctcctgaggtcaacagctggcatcaacgtagcagtgtgttgatgcagagccattgtgaaatgcaagagcccttgtgatagcagctcctccggccacacccgagctgcgctagctgatgccgtgtggaacaggggtgagctggcctcgatgagtcctgctcagattgcagactcgtgatcaaaataaatgactgtttctatttctgccactaagttttggagtggtttgttatgtagtgagagatcaccagtacgtgcaggttgtgctgcatgggaaggagggaggagaacagatggggcaatcaacaagaaatgaagccgccaaagccagagatgggtaatggctgacctgaatgtaagctaggtctacctccccctgcaccccaacattcagccttaccagctttctaacttggatgcttcccgaaaatcaaccaagtatggtttgggttgtatctgcccaggtagcaggtcaaagcttgggctgaatgctggaagagccctataatcttataggtactgctgcgtggggactctgtctctcctagaaactgcccctcagcaatttctgatcatggtggaagatttagattttgaagtggcaaactgtcatgaaaaggcaaaactgacctatggtggttgtgatttttacacagggttccaggagagttcaggtgatttcaaacaacagggttgtcacatatagttgtgccagttgcatactgcacaattctaaggggcaccattcacattctagtcattatccttttgcatatttattacaacaatttcctggcagatggcagcaaagtgtcttgaggcagggtagctttttcgatttgcataaaggcgatttatagcaagtggcaggacgcataggtacaaaactagtatctaataatcttcagccagtagcagcggttggggatagagatggaaagagtggggacgagtattaggattagggaaggtccttttgcttaaccagaatgggcacccaacagataagaagtattgagatttgtggggttcaaagttcagcgttttgggaccagcaagtttgtagaagagacaggaattagtccaacaaaggaaacaggtttgccctgaaaggtagaactctaagggctgaatttatttaaaaaaaaaaaaattttttttttcagagacagggtcttgttttattgcccaggctggagtgcagtggcacaatcacagctcaatgtagccttgacctccagggttcaagtgatcccctctcacctcagcctcctgagtagctggaactataggtgtgtgccaccgtgccctattaaatttttaattttaatttttttagagacgacatctggctatgttgcccaggctgttctcgaactcctgacctcaagcaatcctcccgcctcatccttccgaatagctgagattacaggcatgagacactgtgtaagggctgaatttaataagtagataatgatcttttgtggagagatggggatgaagagaattaatgaatatataagtaaaaatttcatgattctaatgagattggggagcaaggggtgaggaggagggaaaaggaggagaggaagagatataaacatcagctgacatgggtgtgccctgttgaagtgaagggtatctggtatacctacaaattcctgcccaccttcaaccattctaggtctgaaaatctacattagtcatgaacaaatatcataattcacagcaatagtgcagcttctgactgttaaggtggattacatgatatcttttcattctgactgattgtagattgcaaaacctttacagttggaacaatattctccattttgcatttgattctgaaacagaatcccagccaagcacagctttttgttttatctgtgtatcttccaaggtctcctttgcctgcatgcatgttgcttttgttctcagcttgttgttttaactatagctttgctacatttccatttttttccccactattcaaaacaagtacttatttgaattagagcagaaaaatactgaatagaatgaaacatggctttcccccctctcatggtgaggtcatggtttagtggtagcaatgacaatgattaatgctttgcacttccatttagagaacttcaggaaagggtaaacaaatattttccaaaatttgcaggtgagaggaggaaggtgaagtgacttacgaaagattgtgctgattacagtctgatttctcttccccttcccaattatcttacaaattatgctttggtgaatagtcctagagctgctcatcttttaaatcaaactaaagtccactgaagtaggaaaattatgcattttgcataaatgatgtgggcaaattattattcaatttttaacagggttttcctatcgctttcccctgcacaatgtaatatggttaatttaccagaaagcattgttattcattccctaattttctaagcaactgctgccatttgcttaccatttcctccctctctgggaattgacagaccttccggctccatttggggtggtttgggttcctgagcaatctctagaggcttggcttccctcctggtgtcttccaatgtttacccattgggaggagtctaaaaaaaaagaaaagattcacatacctggatttagtttatgagtggcttaaatgaatccttttgtaaacacacacacacacacacacacacacacacacagatgaaatctcttgctatttagtgatatttccccacagtactacgtctatgcttttcattaaaaacactatctgaataatacccatttcattctctcttgcttccaattagctactcattgattattacatagtaagcacttgataattaactaaaggaaaactacccagaacaaaacaaccagaacaccatgcaactgctagtatataccttccatgatgaatgtacatatcgcatgatgattcaagcgaaacagcctggctggtaagtggaagaatgacaatggatttgtaaataggagaaagcctcccaccagctgttattaagagaagtagtgaagagttattattattccaagcttctttctggcaattcttttattctcatactttatgagaatgtgaatatgaatatatttcagaccatatcctaatcgagacactggagccaacaacctgctaaaaccttcctccgtccttgaatgctattatctaccaccccctctatttagtggccaccaatcagaataaatggtgtacctatatactgttaatggggtggcgggagaggagagagagagacagaaagagaggagagaaacagagagacagtgattgagatgcttgtgtgtgtgtacttttggtttttcttcattgagacccatttgttgatgttttccatattgaaagcatgaggtaacccctaatgggggctagaaatcagaaggaaacaaatccaaaggcaaggagcaccaggctccgctaaacactatgtaacctacttccatttgtctttaagagagttcaggcagcacctcttccaggaagcctccgctgtaccccccccccccattctgagctagatgttactactttgctaacaactgtgcttccatctgagagcttattgcaacgatttttatgggtctttatccttactagactgtagatattaattgtctgtctttgaatttctggggctaggcccagggcctagcccataataagtatacaacgaaagtttggaggagtgaatggtaagtctttacacccatctacagtcatatccacctgcatcctgttgccttgaacagccctggaaaggactcctctcatgccagctttggtttcttcctccaaatgtgtgcaatgtcttcatccttcctactcccctggctgccatcttggttaagcaggccaacctgaccagacctctacttccaggtggctctgatgactttcctcttccttctcatcctcaaacgccctcatcttctgtctcattctcagtcactgggcactttgctgggtgaaaagaggaaattagatgagagaatccacattaatgggggctaacgttaccttttccatgtacaatattatggacaacatcttcacgctgtgcttctcacacagggcacaggggctccctgcgttatgcaagggtgtgtcagggacactacaagccacaggctgggtaacatggcacaacttgatgacttgggaaaataatttttatctgaagacaaagatggatatcttagggagtagaatatcaacttttcataaaatgacaaagctaaaacgagcctttgaaggcactttacctaaggctacagcctgggcagcatagtaagaccttgtctctccaaaaaaaaaaaaaaaaaaaaaaaatgtagccgaatgtggtagcatgcacctgtagtcctagctacttgggagcctggggtgggaggatgccttgagcccaaaatgtcgacgctgcagtaagccatgatcacaccattgcactttagcctggataacagagtgagaccctgtcgcctccccgcatccccaaaaaacaaagactgtggccaggggtggtggcacatgtttatagtcccagctacttgggagactgaagtgggaggattgcttgagcccaggaatttgaatccagcctgggcaacatagtgagaccccatctcaaaaccaaacggaatcaaaataagagtatgtatcacttggtgccatttacttcatgctgtctctcaggttccaagaggtacaagtttatcctcactggcattgtgacagttctggggaaagagttgggaagtatcaagggtgttcacttcaggctatagattgggacttcaatcatatctggaacactggtggccacacattcataatgctcagggctagcactgtgggaagcatgcagtcagtcccatgtgcttagcaggttcttaggtagatgtgtcattcgaaggtaaaccactggccccactggacagtgggcctcatccacctaacagtccatccatcagtccagccagcatctgccagaagctcatcactgttctaggtgcagggagaataatggtgaaccaatcaggaagtttctgttctcgggctcatagtctggcagggcaaacacattagaggagagcagtattaaacacattggtggcattaaacaggttattagagagtagtaagccgtatggagaggagcacagtgttctggctgttgaggaagccgtcgtttgtcactggttacgttttgttagaatggtccctgcaacactggaaaaccatttatttttattttcagtgctcagaattaacttttaaaataaaggtatatttgtccctccataggattctgaatagtttgcatgttgggaaagaatgaggtatgatttaggagtttattatgtatgagaattttctgggaacataggtgtacataaattatgaatgtctatttgatatttcaaatacagtaaaggtactatttttcattattttcttctctgtagttataaactatttttgagataaaaaatatatttaaaatttggcaattgctttagtaatctatatccccctgtatcatttttagaataaaaatgtgtttaagcttccttcccctgcccccaaaccaaaaccagtctcctccctcccttctaacaaatatttttgatagcataattgaattccaacagtattgtataatatatagtggtaagaaggtcaacaaaagtcatttaaacctattaaaatacctttcaggaacaaactgaccaaagatcattttattccaatgcaacttattaggaaatgcctatcatgtgacattctttgtcctgagtcatgactaatgaacagatgacatcccttttgctgtgggctttagtacaattctcttctgcctgttgttgaaaaccatactctttcaagattcatgaaagaaccattccaattaatatagtaaacattcttaagactcccggggaaattgcagataacattttgccacactaatgctactataaaatcctctggtgccaacacttagccacaggaggattcctatctttctcaaagcaggtaaacaccttctggtgcttgtaaggaaatcttcaacagtgtggctgtgtttgagggattatatacactcttaacttttctcacggaaatgcctggttccccatacatctttctgtgtcacgactacggcagagccaaatgcatcatttgtctttatctaccctgatgttctaaagcatgggaccctctgtctcctaggctttctaatcctcccagcccgtgaactgatcatcagaggagatcaggagctacagagaatggagtgaacagaaatcctttagtcgcagtttacaatgtctgaactttgcaaatggtcttctccgataggtttatttgattttttttttttttttttttttttttttgagagagagtctcgctctgtcgccagactggagtgcagtggcgcgatcttggctcattgcaacttctgcctcctggattcaagtgattctcctgcctcagcctcccaagtagctgggattacaggcgcatgccactacgcccggataatttttgtatttttagtagaggcagggtttcactatgttggccgggatggtcttgatctcttgacctcgtgatccacccgccttggcctcccaaagtcctgggattataggcgtgagccaccgcatctggcccgttgtttgaaagaagtaaaaagaggttggcccagtggctcacgtctgtaatcccaacactgagaggccaaggcaggaggattgcttgaactcaggagttcgagaccagcttgcggcaacatggcaaggccctatctctacaaaaaataatcatgataaaaattagctagtgtggctgggaggatcgcttgaggccaggaggttgaggctgcagtgaactgtgtttgcactactacactccagcctgggtgacagagcaagaccctgtcttaaaaaaaaagtaaaaagtaatagtttattaggaaggctccctttccagcagaggagggctagatgccagctttcctaaggcaacaaagcaaatacttattcactgccaggttactgaagacaaaaaattactcaccatcaccctgacattaaggcgatacttttctttcttaacaggagaagtttctggtcagcaaattccgtttcctcaccctaagcttgtacaacttatgaggaagagaggcttcttgggaggtgtggggactctctggaatggtctacctcaggaatatctcttgaaagcacatttgcctcttggaagaaaaaacctggaagtctttgacttctttgtatttacagatgttctcttactttcactctgcaacctcactctacagcacgctgtttcctaagagtgcccttgaggtgacccaagtccttagctttctttcatataagacagtccaccatgaactcaactgataaattaaaggctatactttgaagagacttttttttaaaaataatttctatttaaaacaggttcttttttttccagattgttttgaatgaatcagaacataaaaatcctccagaaatatttgcaaattatccaacttagtggggtgtgaggattaaaagcaaagttatcttgaaaaagatatagaatatgttaatcaactacctaataatgtgataataatatatgtataagatctttaaaattttatcagctgggcactgtggcttatgcctgtaatcctagcactttgggaggccaaggcgggcggatcatgaggtcaggagtttgagaccagcctgatcaacatggtgaaaccctctctctactaaaaatacaaatattagccaggcatgatggcgcacacctgtaatcccagctactcaggaggccgaggcaggagaatcccttgaacccgggaggcagaggttgcagtgagccgagatggcaccactgcactccagcctcggtgacagagactctgtctcaaaaataaataaataaataaataaattttatcagtttagcaagtctattaatgctaaaaacaataccataaagttttgattaatcagagaacctgtttcatctttttttttttaatgttggaagccctccctaaatgtaaaggttatttcaacaaagaaaaccatcctctttgtatgaccccgcatggcatcagtgatcttagaattacaggatcttagagctgtagagatctaaggagtgaatctcatgtaaccccttcagttctacagacaggccctgaaaatgacagatgccaggaggtggctcagggtcctgaagctgaatgatcacagagccaggcgtggacaggtagcctgcgtccacccactgcccttcctaccacaccaggttgtcgctccgttagctccttcattacagaagtagggggacatttggaaataaatatactgactccaggacaagaaagattcttcttgtgattgtctatttctcctacaagcaggacacagtaaattccggttagaaaaaatgtctgataaattcagatggtaaggtatgcctacttttgctttaatgatcctctgaaatagctggtcaagagcctaccctttctagagggaaaagaactctccagatgttctgaatgtttctgtcatttgcaagtcatcgcacaaaggctaaattcaccaggtgattccataccatctggtgtgggacagatgtgccacagaactacgagtaccttccatgatttaaacaaataaacaaaaaaaaaattcaaatgtaaaatgctctctttttaattactaaattaagaaagttaaacaatttaaaaatgtaaactcacaaataaatcataacaaaaaaggaattaagacttcagagttgctagtcagtattaaaaactcaatagaaataggatttttgatttgttgttgttaaacatatgtaatttaaggttggtacaaacagcaactaaaaatgtaatacttttttgtttttgtgcatccccatgaaatgtaaagtagtgcatagttattccactggagaactcctggacatatagaaagtcattcgttagcagtacaggacatttaaaacacttattttacaatgggaaatgtacaacccccaccctcatttcccccagaaattttagttgcatgagaaagtttagcgggttgccatgactacaatgctatgggttttagatcacttaaatgtggttacaggtttattaaattaaaaatgtctgaaacatttcagcattcatatttttatacaagaagtttgtgtggtatccatcttccagttctcttggtagtatcagccatttgcttgcttatttttaagttttgagaacaaatcgcagtaagttgaagcaaatagtgctaacagaacttgtaaattcagcttggggggtggttcctgaaaagagtcaaagtaacaaccacctacaggtacagtcatgaaccaggaaagtgcaatccaaatgaaaaaattcatgctttgcaaaagccaaaaatgaggccactggtgttttcagaataacaccggtgctttgatgctgacttgcagtaaaatcctccctctgggtcccgcagcttggtggctcaggccggccacagtctccacattagcacccacattgtatatgtacagggacatatatattatatatattcatatttataaaaaagaaaacaaaaacaaacacctgtcctgattggtttttgttaaaacatgaaaaaaaattttattgttttagacaaagaggccacttttggaaaataatacttttttttttttagttgaatcaggtgaagacagagttaaaatcacataggatttgcatttttaaaaaaggaaagcactaggattgttggcactggagtaactatttacactgaacagaggtttggccttttacataacatcgatacaatgcattttccaaagtctgagaaataacaaggttctgtctcgaatgcttcacagaggaggttcggatttggggacaagtgtcattaatgagggccatggaagttcgtcagcttcagagtcacatgcaatctgatcctgggcggttccgctgctggggagcagctggctacggaattgaaagctaatggggaggggtggggcagcctctgggacaaggcctctctccgcagacccgggccttacaggttttcaccaggttggtactggggctctgtcgcggtaaagtagtcttccaggaagctctgcaagtactcaaaagtggggcgttcttcagggtcctttttccagcagtggatcatgagctcatgcagagagatggggcagtcctgcgggcagggcatcctgtagcctcgctccacctgctccagcacctcccggttgttcatgcctgcaaagacaagcgcagtgagagtgggcaccccggggatccaggccctgaccgccgcacttgcagatcccctttcttcttctttgcgtctgcatgtggctaaaacatgcggagtactcccatccccccaggagtcaaaccctgccatgctactcaggagtaaagaaggagtgcagaactgagacatgaaaaattcagaatgactctcaaaacatgataagtgaaggaagccagacacaacaggcaacatacggtatgatttcattcatgcgaaattctagaaaaggcgcaactacatctatagaaagcagatcagtggctgcctgggggaggggaggaatccctgccaaggggccagagggaactccaagtgggatgggaatgttctgtcagggtcaacgggtcaacaaacttttcctgtaaaaggccagacagtaaatatttttggctttgcgggtcacatatgatccctgtcttcttctttttaacaaccctttaaaaacgtacaaaacaaacacaggttgggagccagacctgccaacccctgttctatattatgtatggggtggtgtgactgtttatgtttgtcaaaactcaataaactgcatccttaaaattgttgaattttattgtgtgtagattatacttcaattaaactgacaacaatatatgaataaagcagacaaaaaaatccacacagaatgaaagcatgctgccccttgtttatagcatttataaactccatttatgaacttcataaattcgttttcttcatgcctgggcaaactcttagttccccactgttggagatctgccatcatgccagcgtggctgggcactgtctggccctgcaaccccacagtgccctgaggtttggtgaatttgatggggagatagaccatgtccggggcctatctctactgatgacttcagccaggccatccatcatttgaggtttttctgactcttgggaagctgttgaaacactgggctgcatagcactaacagaagacagatcgctaactcctcagagagtgcggcctcctgcacactggctgccttaacactacaggaactaccatgcttagggggtggccagtgtcctgacctcctcccaactactgccagccactattctctagttttgcttccctttttcattgtatcaccttctgccagctccccgtcaagctgtgctgtgctttggttgcttcctggccggtgaggctgtcatctggaatcctccccagtatctgacccggttaatttgcaggagcaagaacccgatgtcaagccatatagaaaccaagatttcttcccctatttcccagggctacagccagcaggagcacacaccatatgcatggagcttcctttacttctaggggaggtggcgacccgttagctagaaacttgtcagcacagccagaggcgctgggccagagcacagcctgtccccctgcagagggaacactcggacttcggggtctgttgccagtcctcttggttgtgttgttacttgtggagctgagtgtatcctggctcctcctggctgtcaaccacagcctgtcagtcacatgtctctccagaccttttcaggatgctttcttattctctgccattatcatttcttgaggtaataaaaattcacatattgtttctgctgtactgaagtaggccttcaatgcaattattgtaaaataacctcactcacgtgtcagggcgaccccttattttagggagagaggtttggtgaaggagtcagggtccctgcctctgtgccatgcatgcctttaccagcgacttcctcagttgcatgggaggagtgagaggcagcgctgtggctaattagcctacatcctcctccaatggctgaaaatgggggatgggggcggggagctggaagcaagggaggaactggagcatgctcgggaatgaaaggcagcctcctccggctctagataaacgcggacagaggccagcatttccttctccacaattccaccatccaacgagctctgaacaccatcaagtttttgtaactcacttgactacagaactgatctgaactgacctcatctggccacaaaacctgaactgattacgaggctatttactgtttttatttcttcatacatattgcccagaaagattaggaagagtgtgtaatcacgtagcagaactggcactctccaaagcatttgccttgccgcatcttttagtactgtccttggtttcatatttcagcaatgacagagcttggaccagcagaaatctcccttgtctctgtcccttccaggagtccacaggaactgaggggaaacaggcagaagggcctgacagatccttctgggtgcggttacagcccctgaaacgcctcctaatgcttgactctggctctgagtgcctccctccaaaatggcagcacagagtttaattaatcactctcctattgctccacagagcgcatgtcagtacatgtttcatttcattaaaaaacaaactactcaaatggaaagatttcacttaaaaaaaaagttttcatccaatgtctgccaatggaaagtttaattggccactgggtcatttttccagtgctcggtccaagcctcagacacagcacacttggtgatgtgaacctcaacatgtagcgtctcccgaggcagtctttcctgggcatttggagccaggggacagggcataagctggcccatgcagggtcctggcagacccacatggtcaggctccttctcgctctcccctttcctgtctgcacccctccgctcttccccactcctcttcttctcctgctttcttctgcccagacctctcaaagcaaggggagtatatgaaaacaattccacgcactgggccaagtggaaacataccaatgagggctttgccaggaaagtgggatattttgacaatgcacttggctgacaatgacaattggaatgggactagctcttttccaaccatccataaaccaggacctgcaacgggctgacctgcagacctggcaacttcacaatgtacctctgcaacaataacggtggcaatcaagatatgcccactcagcaaggcttgggctagtttttattttataaacaatagctaaattgaatggattgtgttaattcagggtgagtatcccttctctgaaatgcttatgatcaggagtgttttaaatttcagattttttaggattttgaaatatttgcattatagggctgctcaaccagtaagttgagcattccctttgcgtgttatgtcagtgctcaagaagctccagattttggtgcattttgaatttcatatttttggattagggatacttaacctgtatttaaaatacagtattctcagctatatgaattttgaaaatcatggtttttttaaataattttttttaaatggcttttactctgcacactaacaaaaagataggtctacttcatttttttcttcttagatggtttcatatttttgttagaaagaaaactgtcatttcctctttttagccacttttccccaagacattggctttacctaatacctgagaggtgaaggatagtgaataggaagggaataaacacgagtttgggcaccagggcagttgggagagtgtcttgagagacatgggtacactagagagaggaatccttttattttttatttatttatttttttttgagatgaagcgtggctctgtcatctggggtggagtgcagtggtgtgatctcggctcactgcagcctccacctcccaggttcaagcaattctcctgtctcagcctcctgagtagctgggactacaggtgcatgccactacacctggctaattttttatatttttagtagagacagggtttcactatgttggccaggctggtcttgaattcttggcttcaagtgatctgcccacctcggcctcccaaagtgctgggattacaggtgtgagccaccatgcccagccagaagaatctttttattacacttccaactgaggaggtggacaagagtgctggaaatgtttttcctttttctccttttttttttttttttttttttttgagacagagtctcgctctgttgcccaggctggagtgcagtggcacaatctcggctcactgcaacctccacctccctggttcaagcaattctcatgcctcagcctcctgagtagctgggatcctttttctcctttcttaacagaaagaagagacagaaactttataaaacatggtgtctgagcacattttagggaaacaatgtcataaacagtttggccttccaggtttcctagtgggagctgcaagggagagcatttttcaacaggaggggagatcctggctggccagtggtgtctgactgtgggaagagccacgttcgagcagtatgaatgttccctggttcccacagagaggcggcttggggctggggagccagcaagcacagaggccactgcccaattttgttccaaccctctcctcctctgctgttctgcccttctagcctcacgggagccaccagccccttctgctgtctctctagaattgctcaggaaaacaggccattgtggtgggtcactttcatagggtacaactgaacagtactcaatccataaaacacctccagcacttcgggaagctgaggcaggcagaccgcttgagctcaggagttcgagaccagcgtgggcaacatgttaaaaccctgtctgtacaaaaagtacaaaaattacctgggcatggtggcatgtacctgtggtcccagctgttcaggaggctgaggtggaaagattgcttgagcccaggaggttgaggctgtagtgagctgaaatggtgccactgcactccagcctgggtgacagagcgagaccttactagtccgctgtgtgggggtctgccttcgagtccctctttcccagagcctccatggaacatctccttgtcaactcagattttaggctttcaaacatggtccccgacatagcatcatttccagtcagtctgccccaaacactgcaactgagattctccagccaagaagactgtgctcacttcctgccattatgattatattatcctttctaaatcatgttgctggcttcctccagcaaactcagaggtcaagtttccaactctcactttcaaactctgactctgtagggttgccaacagtgtctattcttgtgtgtgtgttttcttttcccttttcttttaaacttccctattccacttctttgagctgtacatgaactcagtagtcttccctttttccttttagattctttgaaaaaaaattttttaagggacaaggtcttgctctgtcacccagcctggagtgcagtggcatgatcatggctcactgcagccttgaactcctgggctcaagcgatcctcctcacacttcagtctcccaagcagctaggactataggtatgcaccaccatgcctggctgatttttatttttatttattttttttttgtagagatagcatcttgctatgttgcccaggctgatcttgaacttctggcctcaagcgatcctccctgcttcagcctcccaaagcactggaattacagctgtgagccactatacctggtcttcttttagattctatagggaaggaataaaaatcactttcattggcagagcaccgaaatagatgtcacttcttgacttctaactttgcatcttttagcaagtgacttgacttcccttgaacttggcttctccatttgttaacaaaatacctcaacattcattgtgctttcagctatctgaaaaaatgtcttttatgaaagaagagtgtttgtgttttatagctttccatttgtgcagcttcccaatatggatctcagatgggccatatctgtacaatcagggattttaagtgttacccgtccatgtttgcatctggatttgactatgggttgcaaaacctgggtttttgtgccatgtgaataattaagcactttaacaatgggaatgatgtttagattatcagatacccaaattccttttgctaactgagctttccgttcaaagggaatcacacaacgttgtgcataaggccttgggtctgaggctccccttgcttctgtgcataaaaggcccggtgtttacatgtctgttgagcagtgctgtgctggcgctgggaaggaggaggggtgttaatggtgcttgctcagcatgagcctgcgccatcgcatgtgcttgtattaacagattctcatgtgtccttgctatcgtactggttaataaccgtgacactgagttaggttttagtataggatcattgtgaaaattctgggcagggagatgctgatggaagagtgtggatgagaataaagaacttatcttgagaaggtacaataatgacttgctttgtttctctttcctcatcttgccagataacctcaggacagctgtttttattcagcccattgtattaataaacacagaaagacagctactcatgtaactgaatacacaggtatttctgtatttgaagttgataatacagtatcatagagaactcctttgtcccagaaaaaaaaaaaaaaaggagtgaaaaagagaggcagggtgcccatgaggaaggccccggaactgcacccctgagaacaaggagcacgtgaggctggaacacaggactgggggccgaaagtccctctttggccaccctcttcacacgcattctcccctggtctccctcctcctctcactagacatgctggccaagagaaatcttgtagaaggaggtgacagcatgacctctgggcattccaggcagggttccctctctgaggggacatcatgagctgcaggaaaaaccccagggactgtggacgagccagggagagacacgcaccctcggctaagatgagagctttcattcggcttcccagtctcctcctggttggagagtcctaaccctttcttctcccatgaaaaacctgctcctgttgttatgttgaacacaaaggaaaatgtatctacggttcagggctctaaggcagagggaggaccagagtggcatttggaatcctttaaggaaaaagccaccagtttcattaatttcccttatttcttcaggtcattatcaagcgactagatgtattcaagaaagtcacctgttgaatgatttgaaagtgcttccaatgaatgaataagtgtggtttgcttaagaaagtgttcctggcctggtgcagtggctcacacctgtaatcccagcactttgggaggccaaggagagtggatcacctgaggtcaggagtttgagaccagcctggccaacatggcgaaaccctggctctactaaaaatgcaaaaattagccgggcgtggtggcgggtgcctgtaatcccagcttcttgggaggctgaggcaggagaatcgcttgaacccaggaggcagaggttgcagtgaaccgagatcatgccactgcattcccgtctggctgacagagcaagattccatccatctcaaaaaaaaaaaaaaaaaaaaaagaaagtgttcctgttctaccaggtcctgccaaatccacaaaacaggtgttcggttaagagccagggcacagaatagccaggacactctgcctagaatagtgttggaacatgatgtttgaaatgatcacagggtcaattttccagaagaactttgaggacagaggctaccttgtggctaggaaaatatatatccatgtgtgaagatgatggaatgcagttaaaaggctttgcaggctatgggctaaatttaaaaaccttgtttcaaaaacctcataggtgagttcttttttttctgtttcattcactcatttatttgcttatacttactgacagtctactatggggtggaccctgtgctggacctcgggaatccatcaaagggactcccttctctgaagctgctgagaaatacacacaaacggggggcccaacagaaatatgctaggtgtcatggaggcaagcagaaggagcaccccatttggtctggacatggggaaggctttccaaagcagatgatgttcagttgggctttgaagggttctgaggcagacaggggagccacaaagagagacctgcatgttcaagagacatctcttgatgtgtcttggtaacgtgtgaaggatggaagacagcaagagagaaatcatgtcactctcctgctcaaatcccctcacttcccacctcactaagactaaaagcaaaagtttcaaccatgagctagaaaggccttatctgatttgcccctggggcctctgggacctcctgctccctctgctccagccatgctggcctcctttgattctggagggtctctgcactctcccttcccctgatggaaggctgtgctcccagatacccacctggctggattcttgcttcctttaggtcttctactcaccagtgaggtgctcctttgccactctcccctctctccccttccctgttttatttttctccctagctgttaccagcagcaaacattcaatatattttgcttatttatctttgtttattgtttgtctcctcaaagaagaatggaagtctatgagggcagcagcatttgtctattgcttcactgctgtattcttggtgcttgcaacagtacctggcatatagtaggtgcacaataaatatttgtggaatgactacagaaaaagagttatgaagaactatgtagaattacgttttctaggatttatctgaaaggcaaagggaagccgtggacgtttttaactagcagggtgagataaccaggtctgtgttttctagaatactaactctgttggcaacaatgatagaatggtgggtgggtgggtggtggggaggcggggagaaactggaagcagaggggaaaagaaggatttgagaaaggtattaaggtgaaatgacaggtaaaaatgcataactgattttatgcatcaaccccagaaaactgcttttacttaagtctttttatttctcacatacaacaatccatcagtatgaaatcagttctaatcttgaagtaaagaaagcttctgaactcttgcttgcagaaaagcaagctagactgcaatgcagagaatgcgttcagctcaggctgctagcggggaactgatggagctcttctttggaactgcatccatacttgttacacatctcgaaagcaaccttcctcatctggtaaggtgatgtaacttttctctaccacccccgttaatctcagcatcatatttcagtattttttccttcggcttccaggttatcattcagtttgagattgtcgtcttcccttcttttgtccactcctctcacacaacttgccaatgttctaacatctccgcctccctttgccctttatttggtcacacctcacatactccactctaagttccttctgggattgtcacttctggaccttctttcacgctgggcaaagatgcctggaaagcttttataaaaccaatttatatgtcaccccctcctcccgcacctccatcttcacctaccaggcaaaggagctttcttatgtgtcaaggaaacagcaggctattctcaggtatggaagactcagaaaaatgtaccaccatctactgttctccaaaaaagaattacttcaaaatatactctagccaactgagacatgagacatgactacatcaaaatgcagaatggaaatcatgacggaccgggactgggagtctgtcctgaggtaccagcaacaggcacaaagacgcaacgtgggaagctgagaaggacccctcagcgcacactgactgacttgccacaccaacaaatagcaagaatgcagagaggaaggtccttctttgccttcacagtgacatctgaaggaagcttcgtgaaacctcttgttccttaggaattattatccttcgttagggtaataatcctataattggaatccctctgtaaaagcttctccctcaagaagagttttctgttggattcacaaacccaattaaataggattatagctatgttaaaaagcaaaacccaggaagaacccatggctaggaacaggcctgggaacaattttttgtggctttctttgaatgaggaccagctcacgacacccccaatgaggacacggttccctggttgccactgccaaccagcaaggccccaacgcaggctctcggccacccttccagtcacatctccaggtgtgcccctgcacatggcatcttctcagattcatcctgtggtccctggaactgtcctcccaggcctatgtgccttcccacgtgccagaccttgggatgctcttcccgccttctgggcttgaggaaacctacttggcttccaaggtctggcttacttgccttccctacacagccccctctccagcactcctccacagctagaggcagttatcacagcccactgcagaccagcacttgctcacagctctctctgcaggagccgctggagttagttctcacttcaaactcctctgccatcctcacaggactcagcttgaagagtccctctcaggacctgctgtgtgtggatacctggatcaggtgtccctgaccccattatcagaatgaagatctaggccccatagtaggtaaagccaagtagtccatcctttcaggatgactccctctgataataaacaaggaataaagaaggctggtttcttcctggatttgatgcacattttatctatctgactgtaatatccatgaacatagggactaaatttatttacttgcccactgtgctaacaatgcctagcctgaggcaggtactaatcaaggcttgtttagagtatgagggtcttatttgcactatctccccgatagaggaaaatgcctggcacagttcacagtgactgaagctacgctgaatgaatgaatcctggtctaagtggtaaaatgagggcattttctttatgctaaaaccaaacctgacaaaagactccctcagaaacacgcacctgccttccttctccaaggcccccacctccacccctttgtcttggtttctgtgtgagaccctgagaaacaaaaagctgctttgtattactggaagggaaggcttcacagaaacgcaaaacaacattaaccttttctccccagttgcatttaacacacagggtgactataaacctgggagggatcaggaagaaatcagttcaaaattcagacaataaataaagaagagatgccttcacatcctcgccctcctgagacccgcacatttccccccttgagaagcaattcagaaacacccacgctgtgctccatcccccagggcggccctttcttctgtgctggttggcgattcccggagtgtctgcccgtgtgtgcatgccgggagcagcagtcaccgcagcatcaataaaactgacttacacccgcatctctaaacgcccagtgccggcacttcagagactgggaatttgtcaattttgcctccatgtcaacttggctctcctaggagtctcaaggctacaccaacccagaacgagattatcttgatgtgcccctctctgtgttctctgaagatgaccagaaacaatcataaaaaaggaacaaagggattacaaattaatctgccttcgctagctcctctgactgcaaagctatgattacaaacccaggatttgcaagagacctaaattcctcattaatcgtcactatcgtttctatcattgtttttttttttttttttttctttaagctcctttcttacgcagggaatgagggggagctatgttctttcttcactcagcagtaactgaaaaatatgtccttaacatttcaaaaaagcagatcgtccctgtgctataaccactaaagcgtggaggtgaaatggcatgggtgtcctttatgtcaccatctgtcgacgttaatcaatttaagcatggataagccaaactcgtggtttctttggagagcataaatctgataatacagaaacattccagagtctaagaatttccaatttctttacattatacttgctttggtatagcatgttttgactgttcagcaacaggcagtgagtggctctaaattgcatttcacatgtgcctctgctctctttggccatctggagctgggtcctgtggagagaacaggtcctggcaccttcctgccaggctcactccatgggtcagtgctacagtgtaatcaaaaagcagtggggcttttctccttctctttcccagacatgtctgcaaactccatttgggcagaggcactgccagtgacatttctgctctgggaaccacagacacatactcctactgagagaggagagattctatgaactggagggggactgaagcatttagaccagctgctacttacattaatcctggcacacagttcatggtggctgcttgtctacatacatggtggctcccagttctgcttttctctcgctgaatacctggccatgttcttcaaactcaagctcagcagaaagctgaggatggggcttagaaagcaaagtggatgaagttttcccaaatggtgtcaaaaaagcctccaatctcaggcccatgtctgtgaggccctgctcttacctgggtatggcactcttcctttggtgaccagctctgtgagtaagattccaaaagaccacacgtcagacttgattgtgaacctcccgtacagggctgcctcgggggccgtccacttgatggggaactttgcacctgcagaatgaacacttggttattcatcaggcagagggcactgcaatgggcatggggtgtgggagggaaaggcacttggcaagctactttcctgagagcaggtttagaggggaagacagaaaggaggtgaagcaggaatgggctgggattgggaagatgtagggtctggtcttgactgtgtgaccgtaagtaatccagctcaaagcaccttagtacctcaataaaggggggaagaagccctggtttcttatgatttaggaaaattatatatatatttaactttgaaataatgctatgttttaataaacatacataggatttagtcataatgctgctctcatgagtcctcgggtatataagatagtgtggtctcactgggtacacaaaacctgattaaaccactgagctgctcccagggtggggacaactggatactgcccatgtgttctgctgaaatgtgttagatttcccaaaggcctcccacacccacagcagggaaaggaatctgcctccagctccttctctctccacatttgctgtttttcctccattctttctccctgtagtagccatctttactcctgggatagttttttcttccatactgtaagatcactttcttaccactttttcttctaccacccagcaagagtactatttaatgtttgttttttaaagagcagttctgcctccatgactgtcttatgagtctctgacttttcaagaccaaggtgcaaattcatgtcaaagtcagtggagtcctttttttcaaaaatttatttgatcattgaaagaatcctgtctctaaaccaaaaggaagggtgtggtccaccttgctttctacaagcttgatgtgtgtgcagggaattaaaagggattcaggccgggtgtggtggctcacacctgtaatcccagcaccttacaaggcagaggcgggcggtcatttgaggtcaggagttcaagaccagcctggccaacagggtgaaacctcgtctctactaaaaatacaaaaattagccaggcatggtggcacgagcctgtagtcccagctacttgggaggctgaggcgggagaatcacttgaacccaggaggcagaggttgcagtgagccgagatcgtgccattatactccagcctaggtgacagagcaagagtccgtctcagaaaaaaatgaaataaaataaaaataaataaataaataaataaataaaataaaataaaataaaagggattcagcagcttgtgctctcaaacattcagctcagcaattataaagcagttccaggtattttactgaacaaactaaaagaaaaacacaaggaatttttattacttatggaaacacagttacatgcttaaagcatgttcattctgcttaaggagctcctgaaaatcatacaaaggctgacaaaatcagaacatttcatagaatcttctataaaaagtcactatgtacaaaagtggcgaatgattaaaatatttaaattggcacagttttaatagccagaggtatgataaattacagcaattagatttttgtcttaaatacagcatatgataacatctttagtaaatctaccctggcattttcaggcaatataattttcctctccatctctcatgtgtctgtgtgaaatgaaatgaaagaaaaaaatcctactatttcattatgaggcatctcacattaacactggagcagaaaagttattctatagttttccttttatgcatggagttatttttaattagttatgtttctcaggcataattatttatatctttccttacgtgctagatgattccacataagacctggtattctctgaatagtcagttgttttgtttttaaggtttctttcaaagcattcttctcacacttcctatcctttagcattctgttcacgcagctttggactctgagccactgggattaatgtgatagattttcttcaatgttgagagcagactttgctctggaccaaacctcagctggagttctcttacttcagagaattaaaggtatactacattcattcctatttaaaccatctcttgagccaaatggcttggaaatctctgaccatctctgaagtaaatggaacatttttctctgctgtgcagacaaatcctgtaaataaaatgacaaccaaaggagttgtttttccccttctttgaatcactcaacattggtgaaggtgtgtgtgttgctgaaagtgactatttaaaatttggatactgtcatgttagattttccaagggatttcataatttcagattaaaaaaaaccaacggcaatatcagccagttgcattagtcagctttattattttctcattttataatctacaataaggattataatatataaaccttcaaaaaatgttaaaacaaaggctgcattaatgtaaggaatctttgaaaggaagtcatttgtagatatgtggtctgagttactactagtcggaacttacttaaatttgttttgtattaattttctttctaaggcaagcaatatatttacaccaaacaatgtatttataatgtatttggaggaataaaacataatgtctttgtccaacttctcctgcttcttctctgtcttaaaacagcagctgctttcaacaaaagaagcttctttatagataactcattttccttttcaaggaagacaaaaggttaaatcaaagcagcaataaggtattaatgattaactgaggtttctactgaaaagagctaatccctgcttcctcttggacacatctcattacttctgtttccccttatcttggcttcccacctcctgagggtacaaagctattggccctaaaatgcagctctaaatgtggtggagttaactggggatttttggcaggtgtctttaaaactagccttgcaggttgcacagtgtaaaatcccagtctatgaaaacagcatccctaaggttgtgtagtacataacctatacaatcccacagatgtccctgctgcagggctgctgcagtgagctctgtaagttaggagacttcagacaccttgaaggaaggatctcctgggtgtaaacgttgcctttcccttgaaagtaaagttctgacaggcaaaaagtcagaatcaaagtggtcttctaagtagtatggacttacagaacaacggagaaaacatcaggagaaccgcaatgcagttaacttggaattgttatgtaactagctgattcacactttgaaattcttctgcttgggagcaggatttagatatgaaaacagttttctcctccttgcattttatttagaggaaacagagcaaactatgcaggtaatgatcatctatgtcactgatatcttgagcttcactgtaacacttactgtacttgttccatgtttacatgaattcaaaaaaagaagtgaccactctgtcatttcttactgaattagcttaacagtttaggattctttaggataagccaatacacgaaggccataatatgtgtgtgtgtgtgtgtgtgtgtgtgtgtgtgtgtgtgtgtggtgtgtgtacttggaagcatcttttccactgaatgttttccaggtactatttgcaaattttaccaaactcccaaggtaaactcattgccgaaacctcgacttgtcattgtgaaaacttgacaacctggtgttgtcactggtacccatgtcctagaacttccatgtaagaggatctttgtgccttagtcatttaactcccaggaacatatataagaccagttagccttaggctgaattattcctgtaatgaataaatgtgtcgatgttttaaataatttctgatatacagctcaatcctgtttctctgaattctgttgagatatgaaataagtggtcacaaactctgtgtaatatcagggatcttattcaatcccatggctccaatgactatcttgaccccaatgatgcctgcatttatatcaccagatgggacctctctctcgagtccctgacttgcataaccaatttccctctcaattgtctctccatgaaattggttatacaagtcagtgcccctcaaatgcaacatccaaaatttatcttccccacaatttggcttctcaatccttggtgactttgtaaaccacccagttggtgacaacagaatcctgagaatcatcctcacctggacactctatttttcatcactgtgcactcagatcccagcacagggcctgcctattgaaggaggtcaatacatctttactgaatgatctctgtgctctcctgctttgtccctgcccgtgtcaggtccattacatcctgaccatttcatgatcttgaattcactacccttcctctagtcctcgcttgctcagcatgtccccccctgggtttctatagtagccttctaatagaatctacatgcataatctggtccctacctacttccccagctgcttcttatcatcccagacttgttctcctctgcttccctcctctctcctctgcaacctctccattgcccttctttgactgctttgcaaatgccaagctcctacctgcttcacggacaggctatttcctttatcaaaagcccttaacccatggctaattcttacttctcttttgctcctagccaaagtgttacttgcacagggaacctttgcctgatcactaaagactgcggtaggtttcctacttctatgctgccagagcacctccctctttgtagttgtcactactttttttcagtaaatattgcctaacgaagctgttattattaaagggcaatgaatgcatgaattgtctgaaggctgtctctgccccagataaatactgtgcttgagtgctggagcatgtcttcccagatggccacatctccagtactgagtacagtgtctgctgcagagaaagcacttgataaacaggtgctgaatgaatgaatgagtagctggtcagccctcccagcccttccctttttggctgaataaccacagttccttacagagcgtattatcagttccctgccctctggtgagtcttctacttgtccttggtgacagcaccagtgtcactgtctggatgtccttttaagagtctaagaattgccaattgaaatagaaaagcaacagccacacactaatgaaacttaaaacacctggagaaccctgcattttcactgccaaaggaagtgtgttcagatcccctttgggtcggagtgaatgtatctgagtgggggagccccatactttgttctctgaggacaagggggcccagttcactggggctgcagctggggatgggggtggttagttacaacagcagaaagacgaggtggcaaggggccttgggagagttcacagtgaaacaaagtggaaaatccttaatagactggattaagaataaattcttaatagactgggatgaatgcaagtgactagacatcaaccattttgacctcaccaagccctggtcttcctcatttaaaataaagttaataatcatccatgcttcaagcaagagaaaggagagggctgtggatttattcagttatcaaagtttgtccacagaaataacaacacaaacacccaccactgctgggctggcttgttctttcttcctaccacaagtatttctggagtattccccagtgcctggcactgcactcggtgccaggaggacgaaagggaacacagtctctggcagtcatggagctggaagcttagtttgagggagataaaataaatgaatggctattatatatgtcaactacaataaagtgctatgaagaataataagatggggtacaaggacagattttgtgggactctgtaacctgtactaggattttggattccatcctaagcgcaacagaaagtcactgggctgtgagcagaagtgcgatgacttcccacgtcgttctttccccttgtcttttaaaacatggaagataacacatcattaccttgagaatgacttatgatgagacagaatgggaaaagtgttttgacttttcaaaactcttcaaaagcatcgtgacatttcaaggcccatgggtgtctatcagcaattagcaattgggtagatgatgcttccattgtcacttctgtcatgtttacttaacgagtggctctgggtacatttgtactattttagcacacttctcacatgtgaataataccaataatttcggtaacaaagcagtaaaacttagcatattccaacccgcaaagctcaaacatttctatgagaaatgcatgaattatttttctgagtttattcttccccatgtccttcctttctttccaagcattttgtgtgtctcccctgtgggctcttcttcttgcttgggcttactcaagcaagtttcctgcctctcctgagtagctaggatgctagatgtgcaccaccatgcctggctaatgtttaatttaatttaatttttttttttttttgagacagtctcactctgttgcccaggctggagtgcagtggtgcaatcttgacttactgcaacctccacctcatgggtacaagcaattctcctgtctcagcctcctgagtagctgggactattggtgcacgccaccatgcctggctaatttttgtatttttagtagaggcggtgtttcaccatattggtcaggctgctcttgaactcctgacctcaggtgatccacccacctcggcctcccaaagtgctgcaattacaggcatgagccactgcacctagtttaattttatgttttgtagagatgggatcttgctatgttgcccaggctagtctcgaattcctgggctcaagtggtcctcctgccttggtctcccaaagtgctgggactacagatgtgagccaccgtgcctgacctaacttggttcttgctaccccaaacacagttaatctagttcagtttgctttactataacctgtgtcctgcacttagcatgctcacacttgtttcttttacattggctttggaaatgctctctttctcttcacctgcttagctacagcctcctcagctccagtcccacctccttcatgaagccatctgtgattactccagccttcactaatctctccaatgcacctagcgccagtgctagaaacaacagtttaatgcttgataatagcagctaccacaatagctaaacatacactgagcgcttgctaagagtcaggcatgcaaagcactgggcacatgaggtggatgccagcaatagtcttgttctacagatgagaaaacggaacaccgagaggaaagcaatgtgccaaacaaaggacaagtgtagatgacagaactgggatttgaaccgaaggtgccagagcctgactgcataaacactatacactgttccactgtgtccatgtctcctctgtgtccttttactagttctttcataagttatttaaaaaatctccttaaatagaatgcaaatcctttgaggttggagacacatatttcttcatagcaacttgcctaaggctggttaaacagcaataaatgctctaactagctaaagggtccagccaggcagtaagttatctgacaccctgacggtcaaagtaattctcttcctttacacagacttaatcaaactaaacgcaaagagtgtcaatacagtggtgtaataaactaataattttcttcactcttaaaagttataggaataaaatcttcctttcatacgacagcacagcctgactgatgctctcggtttttcagtgccaacaggatgactgcccaaagtcatcatgtcaggatggcccatcccaagccccaggccacattccagttaatgaagtccctctatccctagtggccaggtaatctgtttttcacttctgcctcaaatagaaatagcttacttgactcagttacttcctgttctttatgtgttttcatacattaagatgatggcatgggcatttcaaatgctccaatgaagactgcagatacttttgctgccaaatcacctcctgcagtaagagtacataagccggccaggaaacgaggagtggatgctcttcagtgacaatgcaaagtggtccgattgtgggctgagctgggattgagtggtcacttgtggaaggaccactatgatcatttaggaaaggagcttccgagtcaggtatccctgtgcttgcacactggatttgctggttgatcatttaaaacatccctaagtctcagtttccttgtctgtaaactggggatgataacctcctaaggttgtggtgggaagaacagttgatgtaaaaggctcagcacagcgtctggtacctggtaatagctgaataaataccagctgttattttattcagatagtaaaggcctaaagtccctgagttgcactggcaaatgccatcagcaatgccaaagctctccaaacatcagaagaggaaaagaagatgaaaaaaccctcctaatcaaaacactcatcaaccaatcactgagaatcttctgagggtccatgatgtccccagcaccctgtgaggcgctcctgggaaaaccaagcacaggttgcctccgcccttggggtttctaggcagccagggagacagacttcacgggcaaacccaacagagaactaaatggtggcactgcctttaggaagaagagggctcagcagagacaggaaaagagaacataagcaggagatgagggcttcagggagaggcagccgcattggaatgatgcagcatgacccatggctctccttgcggtggggagggtcacggcaggggccaggacaggcctgggtgggcccagctcacatctccggagagctgaactgccaagtctctctcttttttatttttcttggtgaccaggccaattccatagtctcagagaatatcccctctggctaaaaaactaggccaaggtggagaaggtgaagtcagtattgaataaaagaagccaaatccttcctacagagaatctgagctgtgccctaatagcattttcaaggaggaaacccattaacttcaacaatagacactgtttttctgaaccaaagagccacccagagccctttttaattataaagccactaactctgcaaattattatatccaatatttaatagtatgcaataattcaacttgaaagttactctgggtaataaaacaaaaaaaaaaaatcacaaacaatgccaataacagaaatttggtttacaggagggggaggtgacaaggcggtaccaggacaggatatcctgtgaaagaagcaaaatcaaagctgacctgacctggaactttgtggttatttaaacaaaacaatgatttcaaacccaatgaaacttggcaaagcaaaactcagaattttcacactaggccaaaggaatgactttcagatttcccaaatgcttctgaagtaatacaactgggtgttttccagttatccccggtgacgcactctgttgaaacttctacttcaagttcataaagttttagcatcatgtttttttgaaaagtatatgttacaatgggttaagattatattccatctgaaatttcataatgttgagcaagaagtttgagaaggagggaggttgggaggaaggaggaatgctgtcccaccggggatgtgagtggagaagggacaagttaggccaaggaggacaagaaccaaggagtggaaggtgggcccgaacatattgcaaagataaggttgattaagtaggcacagatccaaagtctggttgagtggaatccatggaaggaatattcaggctgagaggggtgaggaaagttccaagagagcccagagttcaagactggacagagaagagacagaaggtccatcagtgggtattaaaaattgaacccaggacaactagaggacacaggggagtaggctcagctaccagggagaatgcaggggcaaggctggactctaggtattaatcctggggttttgcagtcggggaaggataggcaggataaattgtggaagggcattcgatccagacatggaggctaccagaaggtaaactgtgacattccttccaaatatccctagaggagccaggaagtgaagggaggaaactctgggctgcttgcctttctccatcaccctccttgcaacggtgaccaatgacaaacccagggtaacttatgggggcaacacaaaagtagaggataacattaatgggcatctcctgaaactgtgggtatttagtccttttaagaaggaaatctgagaaccatcgaagggactttccttggagtacagactgtgttatggaggcttatttaagtggttatcttgggtgggactgaagaaaaaaggagccctgcttgctgttctagaatactgaggctctgaataattccaattatccttccagtttccgaagagccagaaaggaagtaatatcagaataaaaattctgtaacttgattacctctgtaaagagaaaacaaaacaaaacaaaacaaacagaataaaaattctgattcacagcttcaacagcataaacgctatgtttgcggactttcaatccagaacaaaagacaagagctttgtaaccaactgcacactgctgcccagggtggtgagaggaactcacctgagtgatcaacggatgtgtgggatgtagctcaacacagaaatgatgccaagaatccagccacccccagaaggggcagagggcccgtgtcagtctgacttcatgccacatgacgagctgggctgcatgggcagcactgggtttggggatactgtgtgggaacagttggaggtcacggggtttgactgggagctcagaacatatcaaaggataataggatatacagaagacaaacatcactttggggtggctttttcaaaccgctccccttttcaatctggtacagtgtctgtgccaatgggggagccaccctggggatggcagagcaatgccactgagccccctcctttggctgtaagaaatgaggcttcagaacttggggcagtttacaaatgtactgcgtgtccatgattacccagatgatgcaaatgcaggagttccttttgccagcaaagcaagacaaggaagccaactgacatttttgatgtttgatggcagtctacagttcctatttacacactttaaaatcacagagggtgaccatctgcttccttcttgatgattaccaagaaacgtgggctgcacagactgaggacttgctcttgaccattcataaacaaccatcaaaaggctctgcccaaaacagcacaaaggagaaagagatgctcacacagaatacaaaatgggactgaccagcacagataaaggggaaaggtgtgcaaagaagctgggcttgaggtgaccactgcttacctccaatccatttgtatcctctgggcagagtcagagctgcccgagggtgggaatgaaagaaattggtcccatctccgacctgaaacagttttaatctttaaagagagactgtagtaggaaagggtgatttagagtcccttttcttttaattttcatctttggctttcaacacaccctttccgggaggaaaatggatgcgctctacaattcatctccatttccctgccaatttgacctgctccccctaactattaatctgggccccgaagctccacggtggctcagcagataaacaaagccgtccctcccagaaacgaggtggaagctcagagcttgaagcgacagaatacaaatgaaggagcttttctgcttagtgactgaagtgtaccaaactcggatccgggaagcttgattacaagcagcacggttcaggcatgcgactcagctcagcgggaaagccgtgtctgacctcggagggcagggcattctgtcgggcaagtcccctggggtctctccctagacagccctcaggatgatagactctcaatgtgggctggggaggtgggggttggcatggtcattttatggcggcaccactgagttgggaacacactagtcggtgcttaagacaatggcttgcattttaaagggtttgcttttcatgaaaggatggtttgcttctctagcatgggaagaattagattaaattcagtaattaaaaaggttttttttttcttccttttctctctcctgatatttgctgttcaggtcacagcacactgtgcgggaatggcaatgctgttgttgacagagaacaagaaattcatgtgctgacgggggcagagggagggcatctcacggcgagatcagccttgatctgccaccggattacaggggcctcagaagcggctgattaataattctgcaggagcccttgagctggaaagctggcgctctgagtctaataatccccagtcgttgtaatacaaaggaaggacaggaattgaattcacagttctggattgtgaaattcaaaattcgaaagaaacagggatccacttcttcctgagtgtgtttgtcaacctagctgcctgcttgtttgtgttaaatggctactgtgctttttgaatctaaaatctgattatatttaattagtacaggcatctgggatttctaatacacaaagagttattaaagtaacaaatctttctaaaatatgttttctatgaaagaatgtgttaatttatgcggtaacaattttttaacatgaaataattaacatgaaaactgcaacagttagtaattcttcgtagtctaatttatacttgaattttcctccagacaataatctattcaatttaaaccctcaatactgggagcatttgaacagacacatttttcttcttctatttaatacataagcctaaacttacagcagtcttatacaaagacccgaatgttcctatttttatttacagtccaaagatccaaagattatgtttccttgacatttgtttcattaattttgaacttaaaaaacaaaccaaccaaaaccatagagcaaccccagttcctgtccttcatgaggattcaaatcaggagaaaggatgatagaggcagagcctccatgtggaaggagccctgatgggagcgatcaggaaaacccaaagtggggtgggtgggtgtgtgtgtgtgtgtgtgtgtgtgtatgtgtgtgtcagagagagagagagagagaaacacagctattggcatccattggatcaatattataataatattactattactactactgccaactaccactatcagctcagtgttggctttgtgccaactgctttatggttattcacagggaagccatacaattctatgatatagataactattattatccctattttaagaggaagaaataaaagctcagacaggttaagcaacttgttcaaggtctcacagtgaattggcagcaatgctaggatttataccaagacactttgatctcatgggtcatgctcttaaccagtccaggccctgccctctttgggaggggactgaggtgtatgtgggaagaagaaaagaggtcaagctatccaaaaaaaacccaaaaaacaaaaaacaaaccaaaataaaacagaacaaaaaaactccaaagtgttgtggggaggagctggaagaagtgaataataccaacaacttctactaattgtcttcttgaattcttacaaccaccttaaaggtaaccaacaccaatcctattttatgatgagaaaggtgaggctcagaggggccagaacttatgctctaggaatacggcgtcaggatgtgaacacaggcttatctagctccaaagctcttgtgcttcccatcactccaaagacaatcttggagtgtgcaaggaatatcaatgcaataaacaaccctttctggaggttcctgcagccacaacagcatttgattcccagagagagccatgcacattgatgagagacagcaggagagcatgtctcacaagagtgtgggggggttggtgaccttggttatttccattgctgtaaacaaatatttattaaatactactatgtgctctgtgtctacaagggcccgctgctagtctttaaactaaatcacttctatagagaagcagtaagaccgactccacagatactcgggagaactgctccagccgtgcccacgcagcgtgtgtgtgctcatgcagcgtgtgtgtgctcatgtgtgctcatgttgatgtgtgtatgcacatgcctcagtgaaaatgctgagaaggcccatctgatattcagacttcacaagattaaaaacaagagaggcagcgcagaggcagggatagttctcaacagagaatgcaaatatgagaaaataggcaagctggccggagatgaggacagtggatgtgtgactccccgctgtgtccggggtgagggggcccttggagcatgcaggtatatcaaagtggtgactgcccagatccactgactggcctaggctataaaatagggagacagtattttttttcttgaaagattgattttttccctatttattactaatagtgattctctttaaaaactttttagactgttttcaaggaaaatgtatgtcaaatacaaaaagttgaggtgataaggatgatttttacatttcacaactctcaaagaacttttatagatagcccatgtaagtttcacactaatgatgtgaggtgatcatttttattatcaccattttacagatgataaaaatgaggctcaaagagcttaagtaactggcctgcggacaccaagcttgtaagtgacagagctgattcaaagccagggatcctaatgtccaacccctggttcctcagtctcactaggctgcctcactagcagcttagaggcaagtacagtactggcaaatgacacactaagtgtgtattcacctttttaaaaatatgtccacaaaatctgttaggcagtaactgcaattgctaacctaggtttgccctgtaattaccaattccactggagaacacagcccagagagatgagggcatgtgtgtatcaccacagcagccgtatttataatggccccaatttggaaataaccccaaatgttcaggaacagtagaatggaggctctgtgatatatttgtacagtggaatactactcagccatgaaaagaactactgttccatgcagcaatatggaagaatctcacagacataatgggaaagaagccagacacaagagtaatactataggattcatgtctgtgatgttcatttacaggcaaaacttaccaatctatggtgaaaaggggaaaaaaggctatttgtgggggtggttactgactgggagtgggaataaggggtcttctggagtgctggaggtattctgtatctttatcttcggggtggattcaggggcatatatgtacataaaaattcatcgggctgcacacttcagatttgttcgttttactgtatgtgtgttatagctcataaagaacaaaaaggtatccacaaaaggaagttatgcttacacacagccatgtctgtctgaacttgttaggtttaaatcaacattagtcggcactgaaagctcatgaagaaaaaactagagtctgcagaggattttcccactgcttctctcctgcttgtgcaatctctgaaggaagtgagggctggaggggctgtgaatttccagaagcaaggcttgtgacattgcctatgtcgggggtcacaggagacaggtgtggtatggacaagaagatggacagcagatccttgtggtgcctgtggtgagttctggaatgattctgggaagaaggtgcagtggtggggtagggaggtggctgtgaccagaactcaggggagggctggaaggctgagggcccagctgtggcagtgagacccagtgagggcaccccgactcatctttctgggcttggaggaccaagaccaccacctcaagctcaacagatccaaacccaaatgcatcctctttctctgaaagtaagatcttcccaagtactcatttctgttattggtaatgccattctcacaatcacctgcatctgactacttgggaattatctttgattcttctctccctttcctgaatagtgtttgagactttccatgtatctacaatccattcactcatttgtttattccccaagaacttagtattgtaccagatataccaacagtaacaagcaacatttatcactatgtgctgggtaccctgttaaacactttacatgcattgtttcacttaatctttgcaaaaatgcatacagcagacaaaatgtctttccattttacagataagtaaactgaggtaggcaaaagttaaataacttgcctaagaccccagaacatcaggtggtagcgctggatttcaaaaccagttccatctgacttcaacaatcccccacgtcttcctcctcatgcttgctgactgtcgtgcagtcttaggcttcttgatatcagtagctcctagtaaagtcctttcatagataaggcactcaaataactgatgttggcattatttagagactctgattgggcagaatttagcaaagtgtttgtaactaaagacgaactatctgctgtaattgagtgagatgtccagggaatagagaataagcaatcgccccaaatttctagttgcttctagagtgctgtcagtggaagaccacctcacaggctcagggcctggccttgaccacctccctgacatgggctgctgctcagtcctgggtagctgggatggtgcgaagtaaggagcacaggaaggactgtggaacccagctccacactccaattctgcttgtgccctatgcaatgccacctcatctgcccaaggggtgacagatatttccgtgcacgctgagatgggaaactcacaactgttttgaaaacaattgtcattcatggtcctaaaatatctgtgtttggtgcatgtttccgaatgccgcctgcattcccataatcaagatgcagcatggctgtggcctgtgggtaacataaaacccgacttgcaaatattattaggcatgcggaccagctgtctggaggagctgattaattcccagcagaaacttcagcacacagcacacatgccatctgcagagtacaccagcagacacacaccaggccctttctgcctcgtaaagcagccagggcagggcaggccctcgggaggaattttataaacagctgggttgtcccagtgctggaaaaggaaggtctctccaactccctcatacagacacactagaaggtgctccttaaaaacagtcccataaaataaaggggaaaagggatgtatgactaatcctctctatctttattttctgttcttttgatcactgacttgatgagatgtggtcagcatagcttagaatggtagatgcaacagggtcagccatttctggattcaaatcctggctctgctattttcctagctgtgtgactttgtacaagttacttaacccctctgagtctattcctattgtttccctgcttggtcctcacgtttcctctcaggcctggcacttggaaggtgttttataaatggctctgccactccctacccctctgctgcaggacagcatgtcttttattctcctgggacatcctgggacctgccttgccaagcttcatttcccccccccccagttcagctctccagttcacttacttcttacttctctctttctagtgtttggcatggatttgaaggtgtttgggaaagggaggaaagaagaaaaatgtttgaagaaggaaggacgggaccctcgatttggaaattaagtaaggaaacgcagtacaaaggctaaaagaacaaggttggccttttgaaaggggctctgacggcacctggggacatgatggtgcagctgggcagccggcagaagggcaatcaggacagctaatgcagaggaacggctgggggccaggctgagggcagcagcctgggacccgctcagggcagcagcctgatgggaggggaaccagcgagggtgccaatcacctagggccacagcctgaggagcctcactccagtgaataaggcgtggactaaacccccaggccctattaacagcacccctgccagcatcctctggctcctggcctggcaaccttttcatttacccatggttcatgagcgttaaccacaaaccctgtagagttcaaagtccaggaaaaggggaaaaactcgactcacacacagaagggtgagcacacggctctattctagccctttccttaatcaaatattcatgtctcacaacctttgcccactctccttctgagtctgaggagctgggatctgacagacttgcctcaggataaagtccctcattcagggcaagtctcagatccactggcactcaggtcctctcggctcaccttgcctcaaattcacatgcacattcctctctggacggccagtgccaatcaaagctgcagtgcgcctttgattagagatacagcatgccatctggcccagcaccgggggtgtatgtgtgtgtgtaacgcacgggtatgcttgctgtgtgggcatttggctccaggacaagaactgccacgtgttggggaaattcaaatagctgagctgtctgaccgacatgtaattcagcatttggacagtatcggtagcagccagggtcttagtttaacatttttcctcatcacttgaggctgctaagaatgcttccattctcagatcaaatgaagggagaggataattggcatgaaatgaaagaatcaagaggaggaggaacaggggcaagagaaggagaaggaaaaagagaaagaaaaggactccagagctggccattatgaaatgcagtagaaagcatcaccctgtaatacattccagtcactgctccgctttgcttgggatgactaggctttggttagaaacaccaacaatgaaagttcccccttgccccagctataaacattatattctacatgaggagcctatactcgattgcaaaccacatacttaatcacacacttttacctggtgaccactttgtcagtatctgggaagaaggaaaatattcctaaaaactcctttctagtatctggtgctctaatagcacctgaaaagctgccccactggaatggctgctgagttgggatatattttacttaaaggctaatttctataaatttttgcagagggtgggatggcggggatgatgaaaggaggtagagattttcgagtaactatgctgttaccatctgtagtgtaagtccactctccactctccctctccctgctctggacccataaggattcatcgctgagctcctgtgacctctacttctggttgggtctggcagaagacccagaagtgggctagagtggggttgggtgtgaatccccagatccatccctgacgtctctctttactgaggaggccctctctgtgcagtggcccattctgacttcttgtgcccacttctctgcccccttacctttgaggccttagttctgttgctgttacaagctctgagacactgcaccatgccctgttggctttctgaaaccctgcctgtgcctttgtaaaaaacacaggcatgtgagaatgtgagaataaatgtggtctctttctccaaaaacagagtattctaggcctggacgctgtgaggagaccagcatgagccaagaggaccacagcagcaaataccaatacccacccacccaccaaaaaccaatatctcatccctccactgggcccacaacagtctcccacctgcagagctgtcaaattcctgccagatcaaggtgtccaaaccaagctgaagaatgacatttcaagtattttctgaaggaagggaagggaaggaggaaggaagggctgtgcagtaagtgactgttctcacagctgtgatcacgagccattgtcattcaagtgcccaccttgtcttgctgtgtactcattgtcttctatcaatcgggccaatccgaagtcagcaatcttgcatatgagtccattccccactagaatgtttgctgatcgcagatctctatggatataattcatgcgctcgatgtaagccattcctgcagccacctgtggaaacccagggaacaggacatgttacaccacgacccaatgtacttagacacgtcattaaatctatggcacatcaagttaccctgcagggcctacctgtgctgccatgtccacaagatttggtaatttcagagctcttccttctccatcttttaagaaatccagtaaacttcctatgaacaaaacataaaatcatttcaatttactttgaaagataattcccaacagagagctgtatttggttttcttattaaaagtaataaggtagtcaaatggaataatgccatccacatggggggacaaaaaggtttatataaaaaagcagggtagaaaaaagtataggcatggagaagtaacagttaccttttaaaaacaaacagcattaattccatttctaggaataacaacatatatttgataaaactagaagaaatgggactcaatctccctgtatgtcataaagaggaacctatgaagaactgcacctcttcaatcccattccccaatcacccctgcacaaagaattgatgtggggaaaatacagcccagctgagtggtccaaaactgtggtcctgggaccagcagctacaataacacaagggaacttgttagatatgcaaattctcaggtcccatcccagatcgagtaaatcagaaactttgaaggttgggtccagaaacttgggttttaagaaggcctacaggtgattctaataatacaaggtaaagtttgagactcactagcttagcttatttacagattttgaatcaagaaaagacaatctgaagaatatgggtggggcagatggttccccttaattagatcacagccagccaagccttaaatcagacatctgaaatgaaacattggaagcttcagagccactattataacacagcctaagaaggcttagaactaacaccaaagcagggataatcatttgcagaagctggaggcttatgatggtcatcagtgatattttatgctttaatcacaaagttatttacaaaataaccctggatacaaaggacaaaccgtttgccagaaaaaaaaattcccattaaattttaaaagaaagtacatggaaaagaaaaattacactggtatcctctgataaacaatgtattgccttttaaggctgtttcttgtttggttcatctatttttccaaaacaaaatgatctctggccttatccctaacaatgctggtttgattaggaagacagaggggttgtaggggagagaatgtgagaataaatgtggtctctgaaagcatgtaatttcatcgcctgacgtttaagaagagagctggaaataaaaaagatgttgaaatgatggagactaaacttagcttagagaccagtgtctgatattaattgtttagccctgcaaaaaggaaatgtaacaaaagctactacattcaaaataacagcaaactatcataaccctccgtaccaccctgatattaaaaatgaatgttttaattatggagaggagcttgaatttctgacacacataacatgtaaaaagtatttggcatttcataaggatttggggtggggtaaacgcaaggttagtctgttttaaaaaatgttttcattaacgagcacataactggtggttcctaatgggaatacttgacccaggcagaaactagaaaagtagcaagtaggaaacttccatttctctcccctaaacaaccccttaaggcactgtgagctggagacaggagaggtgttgcccaacctttgttcatatactcggtgacgatgtagatgggctcctcagacaccactgcatagagctggaccagcttgtcgtgcttcagcttcttcatgatctgcgcttcctcaaggaatgattcgggggacattgtgcctggtttaagagtctttatggctacttttgtgtttccattccaggtacctacaaacatcccagaatatgaagtcaaaccaaagatcttcttttgatggaaaaaggttttgaccaccagctatttgcataagattagattttaaatttaaaacacttaatacagtttttgttgaacaaagacattcaattgcaaggactctgtcaagtattttaacagaaaaaatgagtttatttgtggttatggctaagatggctatattaagatttataactcattaaaatttttttaaattttgatatattaccactctctctttttttggctcagtcatatgattacacatttataccaaaagctctgcaccatacagtgatgaaagtccaggggttggaacaggcctggccatctaatagctgtcccttagggagtacagtgtgcatggaagaaattagattatttaagtttatggggtgtgccatttaaaaatatggcaccacatgaggatgtctggaaattacctctagactttcaatgtctgcaatggacaagttacttgactgagtccttgcacaggtgtgccaagcatgctgataagcactggcaaggagctcacagtctgcttgccaatacttcaacaaggtaaggcaaatttcctcagctttactgatggctagccacaagaacaatggcttctgtcaggtaggtagacaggggaaattaaacagcagctgagagggaacagaaatatttaaatttagcatgttaaaaaaaaatctagcaaatctgaaggcaaggcctggattatgattgtcctcagttacctcatctgtaaaatataggaatggaactggattatcttttgggtctctttcagccccagcattcaaaaaacaaaaccatacctaggttctttgtgtattccattattagacctatgatgcttaagaataactttataaaggggaagaaatctgctaatttagattattttctatttgaaaaagaagactggtttaaattaagatttttatatttaatataactgactttggaatttaaggattctgtaaattggagttcttattatcctgttaaagacatggttcatacaattacaacatgcaacctacaaaatataaattatgaaaaaacaagtggcttaaagaaaagttcatttaaacttcataaaatatctgcccactaagcattcatgggaaatttgacaatttataagtgatctttgctatttaagagtcagcacccaaaattctaaatacattaagatcttcctctgtaatacaaacttcgtcaattacacagacatccatcccaattctgatgggcatgttgtcttgtgtttattggaaaacaaaatgtgaacagtatatgtaatgatttaaagttgatatttgtaaaatttgaaaataaattttctaatagggtccaattctctgtgattgtgtgagtaatttgactaaaatcctctattattagagggtgaatgaggaagaaggaggtcatatattttacgatacttgagattaagtccagagagagatggacacaataatgtggatttattaaactagctaactcatacatatatatgtgtatgtctgtctactacctatttatccacctaacatacctacatacatctttgtagtacttatcatttgctgggctatgttttaagtgctttaactgtattaactctttttttttcttttcttgagacggagtttcgcttttgttgcccaggctggagtgcaatggtgcaatggtgcgatctccgctcaccgcaacctccacctcccaggttcaagtgattctcctgcctcagcctcctgagtagctgggattacaggcatgcaccaccatgcccggctaattttgtatttttagtagaggcagggtttctccatgctggtcaggctggtctcaaactcctgacctcaggtgatctgcctgccttggcctcccaaagtgctgggattacaggtgtgagccactgtgcccggccacctgtattaactcttttaatgcagaccacacctaaagatctatacccacacgtagcaaagggtactgatcgatattgtttttaatgagttctgaggaaggaagatagaggattccataagtattaatattgttttactgaaacatgtttttgagtggggcctaaacccatgaattgtttctaagcaaagctgtaactgacccaaaagggctataaaagaaattacaaaggcccagtgcagccagccttatcaatgacaatcaaataaagagaagtatgtatctctactgaatatctactatctgcaagggactttaaacatattaacccatgtaatcctaaaaataatcctttaaataagtatcattccagccgggcgtggtggctcacgcctgtaatcccagcactttgggaggatgaagctggcagaccaccaggtcaggagatcgagaccattctggccaacatggtgaaactccgtctctactaaaaatacaaaaattagctgggcgtggtggcaggcacctgtaatcccagctactcgggaggctgaggcaggagaatcactcgaacctgggaggtggaggttgcagtgagccaatatcgcgccattgcactccagcctagtgatagagcaagactccgtctcaacaacaacaaaaaggtatcattccaattttacagatgaaaaaactgaggcttaaaggagttaaatatgccccttgttcgtggttaattagctagtaaggattcaaacccaggcccattgagcaaaacgtccatggtctttcttatggctgcccatatacagtatcttaccttcccatttcttaggaagaggaaacaccagattcatagtgtactggtttcctgttctgcgggtgccttaattaaccacatgaagtaggacagatgagcacagcaaggtatcagcatattctgaaaatctggatggcctgtgcccgtctagttatccaggttaagtgtctttgtcccaacggctgtgtgtgcatttttgttcaaaaccatccttttaatcggctttgagatgcagccaaaacaaaatgtgccctctgccttaccaagccacacttcagcgaaacacccctgacccagcttcttctccagacacaacgaacgacgtgcaacttcccaagcatctttagccaatccagaagtttgtggggtacaactcgatgcaatcacagttaagttaaaacacaaaccatcagctttctctacaggaaagggaattaataaagaaaacacagtccttataatccataattatgcatgcactaggaaagatggaaggtgacttgcccgttaggatgacactcaacaaatatttgcttttggaaatgaagagcaagatattttatggcagctggaacattccttggaccatttgctggtttatgaattgagagtcatgtaatagtacaacttgagccatttgccaattttgcccacttactatctttttttttttttttttttttttttaggaattccagaatgttaaaaccaaaactgaaattattattccccactattagtaattcaaactttcttcccggtcacgcagtctttattttcaccttccatctttggtgtttgggatcttccaaacggggaagctaataagagagtaattgagtctcagcatacccatccatacttccccaaactgcccatttcccagtctcttgatcaactgcagggattctcgagggatttcccagacatctttggttttgacagacagatcggtaagccttggcatccctttgtgacagggaactactaggcggcagcagagacctgcagctctctctgatggagcagggcaggggcaggagagggagagaagagcagaacacatgtaatgacaacactcataagtgtaaacccacactagcggcgcacagtgctcctcaaacagtgctactacaccagcagacgaccacacacatcgtggaacactagcagcacacagcgctccttaaacagcgctacaccagcagacgaccacacacacggtggaagatcagacgccacacacggaaacattttcattggaggtagaagagaggacgttttaaatttagactactccatgagcccaggtacgatacagtctatacatagacatacacgcagactgctttggtttctgtactcactgaggaagaaaaacgttttcagctcaacgtgctaataacatgtttttgggaatgctgaaaatatccttactaatttcaaacagtggttttggattaaagaatgtcaatatgactgttcttccccacctttagtatctagattacccaggggattagggatctctctatatgactatacttaaaattataactttagtggaggatccttctataggacattaaactgttataaactagtaaggttgaagattataactggtggggaaaaaaagaagtaactttttttagtgatttcttcgctttctaactgattccattccaccatgtcagatactcctgggctgcttcttggatattttccattaaaaaaaaaaaaacaactttttaacagtcttcgacgtataatttaggtgtctggtttgaaaggagaaagaatggaaactaaaattcacagaaattcaagatgtgaaagaatgtattctttataaaaaaaagaagaaaggaaaaagtagttaacactcggaggtttttattctttctttgtcttctttccttctttctttctcttcttttttaaaaagaatataaccttttagaatctggcagtgctaaggggaacttaaatgccaagtaaaaatcagtcaggcgaaaaaaggtaacaaagaataagaaatcagggagtgacaaaagctgacagagcctgccttgtgaggtggacagacctcccgctccctcctggcagcccccggacccagggaaagcagatgtgctgctgggctgtaacttgctttttactcctttctttttgatggaatcaggctctgagatgtttaggtaggaaattatttatgtgtcagcatttcaaaggcattttattgtgtgagagagaaagagggaagagggaaagccaatataaaaacaagtctaacgtgagatggattttttttccccgagattaaaaaaagtgtctattgttcatatcccctctttccttccagctttacaatgttattaaggtgccctttcgaacacagtattttcaaatgatccaaaccctggggatcctgctgatgtttggctgtaatgaaatatatttcagcatttgaaaaatccttacaacatgcaggcattttgagtatatcacttaagctcagggagatattttgttccatttctcccaaatgtttcattagaatccacataaaccgagttagccaatgccataatcaactagtactgcaagtgctgttaatattttctattgttcattagtgcaagggatcaacagacatttcttattgtcattttcgaaagattgctttttcatgccaaaaattatacatacatatttcaatgattgtgcacagagcaatagtagaggtaaatcatatactatttttgagtcttgcctttgtcctggagaacaatagaaaatggagaaatgggtcacacaaaaaaatatctctaggcttaataggatatagacatgtgtctatacatgtgcacctatatctataggcacatgtgaacatgtattatatagtggcatataatacttgctaatctaggaaagaaagcaatcattttaacaattgcacataaaaccagtctttgataaaatgtataaactgcatatctaataattatatgttttcagaaagaacaaaataatggtgatatctgggtgttaggacagaaactgatgtacattataaaagtttaatttaacacaatagacataatagatctaagagctgtgggttgtgtaagtctaagcctagttaggaaacagcagtattggtggggaacatgataaatggcttgcatgagaatgaaatgtacgtgcagctattcctgcaacagtgctgagggtaaagtgatagtggaaacacaatattccttgtaggagtccccatgtaagcgccctccgagagactgctttctcacatgcaacgcggggaatgggaaaagacaacttgaagatgaaaaaacaaacaacttttaaaatttaacctattgctttctacttgggaaacaaaaatattatagaatcttcggacaaacatgtggaactaataataacaacagtagaacaatagcaatagaacctatacagccaagccctaccattaagggctggcaaagaaaacatactctataagtgattttgtacatattagttttacccctttccactttcctgctctgggcctatccactccctccagcatccaaatggttagtaggtagttagaattaaggttacctgagtaatgttgtacaagctgctgaagtgtttcaaactgggcccgggtggtaatgtagtatccaccattgtcaagtttgcgaattttataatgtttgacatggtctcctttcatatcatcccaatcacggatagaaagtgaataggcacctggtaaacgtggaaagcattagcagctccaatcatttagagtatcagcttgctttttaggcctcattttcttgactctgattaataattaccaaggatgcacacacacatgtacacacacacagcatctccactcagtaacaggaagaagatgcttcttgatgttctgcaaatgtcagaatatattagcaataaaatgattctgcccttgagactgaaagcttcctggacatttttcttaaacacactgttcggtaccccttgttgcataatacagcgtagactcaattccaacactcctttcccccaagggtaaagaaggaccacgatgaatggctgagcttgcttcccttgtcttctctacccaggggcatactgggaggtagcagcagcatgtgcaaaagaaatctaaggcttgtttctctagaagtgagcttcaagcttctgctttacaacactttttacaggaatggataatctggcaaattaagctagaggccactactcttttcttccttgacctgtctcctcttgtgggttgtaaggagttgttaaataatgaaaagtccaacagttggaggaagagaagtgaagtcctcagttatttaaaaaacaaaaggaaagcaaaaacaacctgtatgactggcacctgaggaactaagatttcagaaaatcaaaattctaaaggacttctgaaaattctacgatcttgtgtgcctggagcagtgtagctgcatccagcccgtttcaggaggaaggtcttgatttggggcctctgtagttcttttggtgctgtctgcagttttagagcctggagggaagactgaaaacaggactccactcacaaggcagggagggtatgtgccattttaaaatccttgtacattagagataagcctttcatcccctctgactaatccacagatttgaatgacaagccaacttcttcaactcgttatcttacctttggtggtttcactctcgcggataagaaaggtacctcttgggtttccaaaggacaatagctgtcgctcagcatcttttcggccaagttttccaaagtaccacctttaaattagatcaaggaaagaaaatattttgaaatagtcatttacaaaatgcaacagcataggctttttttttgcccatgaattcccctctcctccaatttagtccttaacctttccctggatgtattttttttctagcttaattcagttccttttcaatctatcctggattctatccctaattcatctctttcactctttaaaaaaaatcagatttgagttgtgggttgttttcctcccctctagacatgaccagaactggtttgtgttaaaactgccacctgtatgcaaaaaaccagaaatctaagaccttgatttgaaatggttactgcaggagaccctttccacacttatctaaaagactctagtctgggcatggtggctcatacctgtaatcccagcactttgggaggccgaggtgggcagatcacctgaggtcaggagtttgagatcagcctggccaacatggtgaaaccccagctctactaaaaatacaaaaattagcttggtgtggtggtgggcacctgtaatcccaggtactcgggaggctgaggcaggagaatcacttgaacctgggaggcccaggctgcagtgagctgagattgtgccatagtattccagcctgggtgacagagcaaagccgtgtctcaaaacaaaacaaaacaaaaaaaacaaacgccaggcatggtggctcatgcctgtaatcctagcactttgggaggccaaggtgggtggatcatgaagtcaggagatggagacaatgctggctatcatggtgaaaccccatctccactaaaaatacaaaaaattagctgggtgtggtggcatgcacctgtaatcccagctactcaggaggctgaggcaggagaattgcttgaatctggaaggtggaggttgcagtgagccaggattgcgccactgcactccagcctgggcaacagagcgagactctgtctcataacaaaaaataaacaaaaaaacaaaactcttgaatctcttgatatctaagcattattgtaactgctgggaaataacaaaacacagtcttaatgtatatgaagataatcaagcattaaaaaaagtcagattagatagatatgatatgaataaaggaatagtattttcaataacttcctccctataagaattctgagaaaaacgcccatgagtacttacttgtattttgttttcctcccctaggtgtgtgaggacttggataagtaaaggcatttatttaccaagcacctggattgtgatctgtgttcatcatcttcttcttcttttttttttttttttcttgagacagggtctcactctgtcacccaggctggagtgcagtggcataatcatagctcactgcagccttgacctctccaggctcaagcaatcttcctacctcagcctcctgggactaaaggtgcacatcaccacacctgctaactaaaaaaattttttttgtagaggctaagagtggtggctcatgattgtaattccagcactttgggaggctgaggcaggcagatcacctgaggtctggagttcgaggccaccctggccaacatggtgaaatcccaactctactgaaaatacaaaaattagctgggcatggtggcatgtgcctgtaatctcagctattcgggaggctggggcacgagaattgcttgaaccagggatgtggaggttgcagtgagctgagacagggccactgcactctagcctggggacagagtgagactgtctccctatgttgcccagcatggtctcaaactcctgggctcaagtgatcctctcgccctggcctcccaagtgctgggattacaggagggagccatcacggtggaccctgtacatcttttctttggcacaactgtaagaactggttactgtacacctttgagatctgtgcccagtcaaaaagcatgcccttaaaatgacttggtgttgcagatatttcaatatattatccctgaagaaactaatgatactctgtgccactttaggaggcatcacattaagtcacctcaagacttttgttatttgccttatatcctccccctgcactttcaagccttaaccaagcctggcaattagttactatttcagcactaggtgctgaatgagcagcaggtgcccccaaaacccaagggagaatgctggagcattcaattggaatctgtgtgtgggaaccatttttagaatatttaactgtgaaagaatccagattctaaaatgaaatttcaattcattatgcttgaatataggtatcatgagttcactgtcaaattcttttgtgaattaagtttcactgaagaaaagagacattgcgtattagctcctcagtgacttttagaaacaccaaaatgtgcaacaattcttaatctagcattaggtggcgtaaagactagtacgtcaattatttgtgagaaatggctttctgggtttgtaccaataacccaattagaatgccgtgtaaaacagtggtgaaaaaggaattgttagaacaatggattgcaccaaaacaatagtattttaagataatgatagttaattgcatatgtaaaaccgaaggcattattttaaaaaataatattctttaaaaacaaaatatttaaaaagttgaccattataaaaataacttaaatatatagctgacaaattcccagttaaatcagggtaatgctacattttggtggtactttttattctgaaagaacacaaagatgtttgcaaatctgccctaaaatacaaattaaatacaaataccttgattcactgatgacgaaacacagtcactaggagaaagaaacaactaagaaccactgagtatttgagagtgggaaacaaaacagatcctcttagaggaaatacaaaggaattaaagaatagaacaatccaactggggatttggctagggtgtggagtctaatccctcttgcactacttaaacaaatccatggtgaaattaaatagcagagccaaaggttgggcttggtgactgacttttctcaacttcctttttagagaggcaagacccaaggtgtcaggaggaggccaagttcctgcatttgggaaatcatggctccatctctccttccctcagggctggcaaacagccactggcagttcttccccttgggagtgcctgttaatcctcatgggtcagaagaagggagaaaggttatcccttttagatcccttcagcctactgaacaccttcctaaactgctaccagttgaatagttgggccaaataactgctcgtcactgtttactaccaaagaagccaactgaggttccaaatcactgtagtatttcccaagttggggggacacactgtatgtgagtcacttttaccgggcatagaaggtgtcttttcagcactcttttaatatttctgatcacacttaggagaaaaatcttagtttaatctgtggcaattacttgctactctcccctctcttcccaacagagggagtggactgcgggcttagaaacttgggttggcaataatatatgctctagctagcatttcatatttttatggctacttttaatctatgacaagttttactggcttttcatttagggtattgatagaaagttttctttcaaaataagtgagcaggcttcaagagaaacattaagttaataatagtgcaagtattacacagggtaaaaaccggggcagaaagcctgaaaaactcagccttaatcactgctgtgaatttcttctccctcctgcccaatgctgatggcattttattgcggcaatcaacttttaaaatcaagtagttaagtgaaaacaaaatgaaacatactcttctgcctggatagagtcaactggagccacataattgctgggaatgtaacctgtctctccagttgtcaaggagcgggcttcccaccaatctccttccctgtaaataaaaaagaaaagtaaatatgttgaccatttcaacagcttgcagttagagactcactgtggtctgaagtgtataactgtcacctaatcatcctgccacccgatttctccaacctattcctttactctgaactccaacatagtccccctgtgaaggtcagaaggttccagttcgagtcagccatgagatgaacccacagttgtctcttgccttatttgtgaattaagaatgtggaatcctggccatgagaagtctctcttggtagggggcattttgcttggttagtgtccttaacttggatggatggaaaaggaatccagcctcagcctaattaagcagaacatgttagctgcagatcatctgggaagggaagctttttaggaggtctgaggtcaatatgagctgcacagtactgcttccctattgtaagcacccctctctttcaagttcaaatcatgacattagaaatgttaacatcttaacattgggaggttaggaggtctgatgagggatgaaggcatgctctaaacacgtgcctggcttgctctcaaaaagatggggagacacctctctgcaggtagaatgatgctacagtaggatcaccttccccaggcattttcagtctgaagtgattccatcaaatgtccagagcactggcctgaggctcatgggcaaggggtgaggatgggaatggctgcgtgtgctcgcacaggtgaagcacagaaactcggcaagggagtgagatttttagtcacgccactttgtactgccttaggctccatgccacagcacagcagtgtggtatcaatctggggagctctcagaggaggtgaaaggggatcttgtagctactctcatcttaaagccagtgagtacattaagcagttcaaattcatctgcttagattcaaacagggctacctgtgatgaagagcaggaatggagtgtgtacctcttcccattaacatcggggaggccatggatgtggcgctgcggctctgacatccactgagtatctgcagaaccttccaccagcctgcagtcaacgacatgattgccctcaagcaaatcagacctcccagcaaatctgatctcctggggctcaggaccttcttttcctccttttttggtccttggaggcagcaagcaaaacttcaggcattttaaaaaaaaatcgttcttttggctgagttctgtgtcaaagctttcagccaggggaaaaaaaaaatgtgttagcttctggccatggtaaagatgctccccagacagatttaatcaggtagagaataatcagcctccacattaaactcaagcattactccagaggccgctctctaaagctggactctctgagcaaggtgagcagtgagcaacgcctccagataggatttaatagagcaacagaacaaaggtgaccagccagcatgtgctgggggtgctgctgtgggaaaatgtttggtggcataagtaacagaatagcccacaaaaaaaaccaaggtgccagcaaaggtttttaaaaccttatgctttaatttagtttcctaatctctcctttttaccctattacaaatccagcaaaagtacagtactcatattcagaaagttctttattcataaaatttagttcatgtctagatttattcataatcttaaatttagttcatgtctagatctttgttaggaaatatttatacatactgaagaatataggtacagtatatatgaaccccgtgaacccactgcccaacttaagagctagatcgttaccaactgggtgggatctgcactgtgctgctcccctattgtaagcacccctctctttgaggttcaaatcatgacattaaaaatgttaacagtttgtactggtctcatttctatgccttccaaaaggaatacatacagttgtaaggatatcatctaagaacatatgtggaagtttatttttttctttaaacactgtatgtgtttaaggaaaatggctttggagacataatcttcactttaatatagtgacaaggtttactgctctgaagttccactagatggagacatttcatcattaaaaataacaatacccagctcctccccctccaccctctcccgcccagcctgggaaatgctccaaaatggcgaggaaaaaattaagtgcttgtagcagaggcttattgttttttaatgcaagataaccttcatcaagttagttctaattgaattaaattaagaaaaaaatggctagcatcaattttagggtatctgagactgtcaataggggcgggaagccaatacattttgctgcaggttgggacaagcccagccttattcaggtgatctggcattaatgaagtcatttccaattcaaatctagcattaactatctcattttggtctaggtacctaaatagtgtagcacagatcagaatgcaattatcagctcattctgaagtcatgaatcaggaattcatgattttctcacttgaccctattaatctcacaagggttttcagctactcatgagaaagataaaatccttgatttctctttttctaggctttctagggtcatcttcttcatcaaaggagacataaagtgacaaagattcaatgtttattatgtagtaaacctcacatgttgagcctagagaggctggtacagactcaaaatattcattgagagccgttgagcgagtgaattaagtcatctttttgatacactagaagcaccaattcacctataaatagatatactctatattcatgttgatttaggaaaataggatctctactatgttatcttttatttcttgagttactgtgggtaattagcattgttaaagctgtatttctttaaacggttcttatagttcagatttttcagtttgcacttggtgagatattctttgttatcttgctctaattcaaatatatgatttaaagcctggcgctggtttagaatggcttttaaggttttataacagctgtctctgttcctctgatttaaagacttgctaaaagattctgtgcccccaccacaccccacaccaagaaaagtgtctacccccaaaccccaaagttgctcgtaggcttgtgggccccggagctgggagccctagagccttggagccagggagtagttatttgccaacagaagtcagccttgatctgctcagtagtgtagcattttatgtcggtaacaattttatcaaatgcttgggtggggctctaaaccaggatttctttttatcacaataggaaaaaaaaaacaacaaacctaccctcagctgtgaccaatactccactctgtgtaaaacatgtattacattttaaagagtcactgttcgtagatggtaaacgactagtcttgaaatgtgaaaacaaggaataaaatggatgaacttaaatactttgcaaaaggggttcaaatttaataatgtcctaatacatgacactgagcacttacaacgggtcaatgaagcacctttgccccttgctgggtagcaggaacaccgcctctgggtacatacatacatgcacatcccacggtgtatgttgtactttaacaaagccagccctgtggcctccagcgccaccagggctccaccagggaagggagtgggaggacacacactaggaggtgtggcagctgccctggcagaacagagccccattcctccctctcctctgaggaccagagccagaggcgggagaggatgggggaggggaggagccgtgtgccatctgcttctgtattattgctttgtttttccttcacgattttctcttccctgttattacccttgacttcaggatattgtcttgttacacaaaccttatttttcttttctataaccttgagaaagggaattttaaaattccactgatatggaattccattggcagaaaggaagaacattaagaggaagagaacctttgtaatattttcctctacaagaacagggttggaggctcaaaggactccgtaaacatcaaaggccgtgcatggaagtcacaaaatagagattgagacggattggatcctccttaagtgtttctctaaaatttcaatttggtgacactgcagatcgtttccagattaacaaaggaagaagccatgggactgacactggcagggactgactttccaacgccctccagcgtaatgcacagacgcacgtgcagtgtggacaaagcctcctgagagctgggtctgcactcttactattccttggttcttgcagttgaaagtttacaaatagtcttgaaatttctaatcaaccttggcatgtaggggaggctaaggggcggaggatttcagaattcaaagttaatggactccaacaagcagcaaaataacagcaaggaggtatacccagagagatcaaagcccaatcccctcctccccagccccagtcaactctccaaagcttcctgtcacttgaaggttcccatcccctttgataaagtatctgggcctttcccagatcaaacctgacactgttctcaggatgcctccctgcacctcgccctgggctctgccacctgccagctctgtgctctggggcagtttcctaatctgggcctctggctcctcagatatcaaacgatgacgtcgatgcatacctcagacagtagtggaagaatgcatgagaatgtttgtaacttagctcatggctggtacatcaggagccttcaatgaatggtagctgtttattattttttaaaaacttcctgtggctacaggaggaggactcctggggggcaggtaacactcttcttgacctggctggtggccacacaggcatgttcagcttgtgaaaattcagcaaactgtatactttttgaaaattgtggtaaaatataggcaacataaaatttatcattttaatcatttttaagtgtacagttgagcggcagtaagtacgttcacactgttgtgcaacatcactgtgtacacttttgatacgtgcacttttctgcatgtgttccaacaaaaagttaaaaaaacaccaccccacacctttgttaatgatgacaatcctaatatatgtttgaaaaccctgtggctatgtagactgtgccttctgatgtctcgaagagagtcgttggccctttatggcagtattcagttcttgctgttgaaaggcggcatattctcactgcatggttctgtgagccagggggcattcaagaaaagggtgggctttccaaggaggcagttttcaggcctgaaggaggtccctgtggcaatcagcactcctctttcctgggatgtgcagtgtgaccagggctgcctcttactccctctggcatatccttctgggaaagctgaggagcctggctccaagtccttctgccaacatggaatctgatttgctcagagagcagaggagaagcaaccagacttggtggcatagaagaacttcctggtgtgcccctcagcccctgggtggcattctttcccaaccaccgggagcactcatagggacgctggagatgcctggcttgctgatgtggaaccccacccccccacactttcttcagaacctagatttttttctgaagggcctcatccacatacactgcctcaatctaatagaggcagtatttataaaccctaagaaaatctgacccgtgtttactcttcttatggaggtactgaatgtaggatttgaaaagtgagtgatcctcactcttgaaatctccccactgcttgtttaactgttgttcctcctggccaacattaaacaaccatgcagcatattcattcaagagtgggtaaaatcacttcttctagctccaaaagattccagtcactcccaaatttttgttatagggaaacgcctccacaggcttcaccaaagaaatgtttagcagtttataaaataaagaacttgttgcaagcctcaagtgagggcttagctagtgtaacatctgaaatgtgaagaaaatctcaaggcagagagcacgaaacgtgggtagccaaggcttgtgccaatcacttgaaactgtaggtttgtagaaacactcagggctgtggagagcgatgctggtgattttacaacctttaaacctaaaccaaaaccaataaacatggactgtgctagtatttttggtactctccaaaaatctccttggacacacagtgccataaaatactgcactgtgtcactgactcttctttttctcaaagtatattgttgtaaaccagtgaatttagcaaatgttcttttagcatttcagacatctgaagagatgcagaccagaaatgcaagaccccttcccaacctgaaaggtatacatgcttctcctccctctccaaacttacgagctgttcaatatttgaaatttttctcctttgtgaaaactcaggtcatcttctgtccgtgcttcatagtcataaagggccacaaagagtgtcactcctgccgaaacgaaattcacaagaagggagattattacacaaggggaaattaattccaagaaattaaatcttcactaaaatctcattctcacaatctacatctagccagcactaataacatgatgaagtgttgtaattaacgtgtcaaaaccacagtcacagggctgtgtttatgccttggtctttgtaggggaagccttactgtatctgaaagaaacctagacctgaagggcttctttctgtaatagcttttaatgagggctgaggagcagggaaatattaaaattgcatcccaaacaaaagggcagcgtcagcgtcagggttcaggtttgcagggctctgcagcagttactgacatcctttgctggtcgtatcttctcctccacttggagcctatgttagtttctgggtaaaatgcaccaccctttctcctggtaaaacagtaacatagaacgtaataggaaatgcctcctgcagcttggggaaatttagagaagaccgtttctgtaatattcaccccaattagaggatgtactgcccttggcatctgcagttcattttgcagttttgtgctgctcgccccactgctgaaaatggaaccctctcccttgtcctccccctaccttgaactcacctctcctcacactgtcttgtagcactcactcttcctcacacccaccctatgtcctctcatctggctctctagagaggcccttcctggtttacagaagtttgctagcagcagcagagaatatccagtgtcatttggcctaggatttcctccatataattaggcataattcttttttttttttcaaatagagacgggggtctcactatgttgcccaggctggtctcgaattcctgggtgcaagtgatccccctggcttggcctcccaaagtgctgggattataggtgtgacctactgtgcccaacccaacaggcataattctagcatagtccccagtgactcctgcctcctagtattcagtctcgtgcaagcccctccccttgagtgtgggctggatctaacgacttgcttctactcaacagaatgtgcagtcccttaagtgactaggcttcaaaagatggtgacttccgtctttctagcagactctctctattgccacttcagcttgtgtactttgatgaagcaaggcgccatgctggtgaggcccatgtgaccaagaactgagggtggcctctggccaacagccagcgaggcaccgaatcctgccagcactacatgagtttggaagcagatcattctcagctaaactgtgagatgactatagcccagccaacgtaccttgattacagcctgtgagagattctgaaggaccgaactgaccattcgcagattcctgacccacagaaactgtaaatttaggttttataattttaattgatgtatggacacacataaacaaaaaagcatgaaggaagatttggatccaagcggtgccacactttatgtcatcactacaagtgttcaagtgtaaagaaaaccagttttgaaactatgaaattcctgattcataaatacacagttatttctattttagtacatataagataatacactgttattaaagctcttttattaaggcaattgcatatgtcttaaaagcaatggtaaattaagttgccttccaaaactgtgtacttgtctggtcagctgtgtatgatcagttatctacctcagagtctattttcttttgtgctgggacaggttgctggccctccctgtttccacagcccaaatcctcctagctcagaagctagggctaagcagttatttcttttgagtattttttagttcttacattttatgcttgtatttgatgataaatgtcagtgacatttcatagtttccaaagtcctggctgctctgagaagtgtagattctagtgaaaattacatagtcataagataaatttgtttttgttttattttttaaaagtcacggtatcactggttctatgctccctggaatattactgctttgtgaaagcccaggctgaacgcagcaccctctgtgtacctagtacagttataaacctgggtctcccactagttgatacttctgcattagttaaggcagaaatttgatagtttggttagaggggaggggaaatctgttgccagaaatgtctaactaagtgccatactcgtctgggtaagatttgggaaacataacctctgtatattaaaaaaaaaattagttaaacatcatatagtagatagccattaaattataaaaaaaattatgaagaaagatcttttgtacccgattgaaaaaaagagatatagagatatctatatgatcaagagagttaattttttttttttttttttgagatggagtttcactcttgtcgcccaggctggagtgcagtggcataatctcagctcactgcaacctccgcctcccgggttcaagtgattctcctgcctcagcctcccgagtagctgagattacaggtgcctgccaccatgcccagctaattttttgtatttttagtagagacggggtttcaccatgttgggcaggctggtcttgaactcctgacatcgtgatctgcctgcctcagcctcccaaagtgctgggattacaggtgtaagccactgcgcctggccgagatttaattttttatttttgttttactagtgccacagacttgccagtggtaacttatttaccccattcaagataactctgtagttttctttcctaggacttgttgttaaacgtcaaaagacatttttgagctgtatgtttgatcagactgttagcttttctgttttatttcttttaagaacctctgaataaaaaacatctgaaattgaaaaaaaaaagaaattaaatgtgttttgttttaagctgctaagttttgtggcaatttgttatacagcagttgataactaatagtagttccctgcagtctgccttttcattctggtctctctgcacttcagagtgcctgctatgacctacagaaatgacagggagcccacttttttttttttcttttgagatggagattcactcttgttgcccaagctggagtgcaatggcgtgatctcggctcactgcagcctccgcctcccgggtttaagcacttctcctgcctcagcctcccgagtagctgggattacaggcgcccaccaccacgcctggctaattttttgtattttttagtagagacggggtttcgccatgttggccaggatggtctcaaactcctgcgctcaagtgatccacccacctcagccttccaaagtgctgggattacaggcatgagctactgcacccggccagagtccaccttttttaccaagctgccaatttgctgtgtaggtagttccaagggaagaaatgtgtcatggcactattcaaggaccacagagaagagtggggcttgtctttctgccccatcccaagtgggactttcctcaggagagttagcattcagaggtctgaccatgcaaagctaggctcatttggcaactttccttctttccttagatttctttgaaaggtaagaaaagagattggcttaaaacaaaaatgtgggtgcccgtaaggtcatgcctattcttatttaacactccatgaccagattcccttctttaaaaacaatttaaaaatgaagccaagccagccccactgtgtggaaggcaaggcacatgaagaccagcaccccactctctccttgcatcagctgacaagttctcactgagggcttttatgttccatgttccaggagctgaggggagaatcaaaggaggttacagagaaacacagacgttgttcttggccttacaggactgaaggcagtattgggagaaaggacatgcatatatattaaaaccaaataactcaaggcagaaaaatctgccaacatttgggagtactgtgttttaactttcaaattttataagggatcaggtagcctcttaaacaaagactcctcctgactacggtggagacccacatgctcaacacaagtggccctctctagtgactttaatgaatgatacctgcagacccaggggtccatatccagcactcgtgaatgaatgaacaaggacaatggctgtgtcagtagaattaacagtctgggctggcaaagcccttatgcttctcacggtaggcacaaggatgggggttgtgtttgcctctttttttctcctgcatcatcagaagacagatggccttagactgcctgtctgtgtctcttcaggcacctttgggaaggtgggaaggatgggtaaaggtacttagcacgtattcaacccatgcaaggcctgggttaaaaggaaagctagagtcaccacagcatgagggtgaacataaatacttcttctactgggcagagtgtgctatgctagcagaagagaagtagataatgtccaaaggctcagggtcaggctccttgatacaactacactgatgtgtgatgtgtgttgggtgcagagggaaaaaaaacttgctaatgccttagtagtgcctcctccctaggtgaaaaggtacctgctgccagatgggctgagagatactggattctttcaaacttttatataagacatctgctgccagatgaactgagagatgctgcattctttcaaacttttgcaataaacaaaataattctggaacaaataatgtgaaatatctagttaccatggttcacatactcagagaaaatttggatgactagggatgcatgacataacttacaaatatttcggaaaacatatgtctgagaacgtacgccagatattttacaaagtattagctaagtcagcaaatacacatggcagcagaatatagccttgtggtatgaaagacaaggaaacttccaaaaaaaaaaaaaaaagaaaggcaggctgaggattaggaagaagtgagtgggaagagggagtacattaatatctagagaactcaaaatacacacacccagacccagtcctggagcctctaattcaaaagactgggacatggctcaggcatccgtgttttgaaaaggctgccctagttcttctgtgccaaccagccaggtgaggctgagagtcattgacctacagtgcctcagtagaatgttgtagctcactaacccatatagaatcctcagaaagcagcaacttggggcaccttgcaaccctgtagccaagcattttgtttgtacatcaaactctggcttttcttacaacccctcatctagtagaggagacagattagaaacttacatgtgaaacccctagtcaaagggaagtgatgggaacccagatgttcaattgccaaaagatttaagggtggctgccccctctctgcactctgtgactttgggggcttacctgttcctcctctcgtacgcaaggtccccgtatgagacgaagagttcacacctccaaagacggtgagtccttggcccccggctgcgtggaagttgttgtagttggggatggaggtcacaccgaagctggggtagtgctgaggggtggggtctgtgccatagcggtacccagagctctggttcaggctgccgtccctctcctccgtcagttttgttgcttctttatccttacattgcacacagcccattatctaaattcctgccaaagacaaaaaagggggcacgtaagctgggatgctccctagttgctgggttgctctacagtaaacgaggagtaattgacaaggctcactgttggctatttcaggcctattagggggcatgaggaaaggcagtggctggggagatggttaggaggaagttcagttccttgaccccacaatcgcatttgttccccatatgttctggatgacagcatcatcacggagcacaatgttcaccatgcagcaactttcctcgaataaggcctgtatctcgtaaaattctgtaacagcatacacctgcctacagacggtccaatcatatttaccaattctgcctttagccatctaaaaaaaataatacatgctctgtagaatgagtctatgcaacattagaataaaaacttccatcagggcacaggaaatttaaggaagagggcacaggagtgttggataagccagaatacaaccttcaatcaagtcactagactgcttcactcatgggtaccacatcttcaggcacaaaactggtcaattttaagcactaagatgatgctaagtatcaaaactaagaactagttactggatgaaaaataaaatcggcagaacctaagaggtcagagtatatttgcaggatgtcatgatagtctacagtaatgaaatcacttaaagctgctaattaacttttcaaatttccattagcttttgacatccttcaaaaacattaaaaaaaaatcattcccatgttacagagttagtggcggattaaaaactcgagttgttgccaccccaccctcctcaaaccctcttctcccaggctcctcatctaagtaaatgggaccaccagtgtcccagttgctccagtcagcatcctgagaagcatcctcatttcctcctccttgtttacttcccactcttcctgtctcggctctcctattcaaacacgcccaacttctcagatcctcaaagactccattcccccacccgcttcgggccttggaacataaccttgaacactttttccccttcctctttgatatgtgacgtatccatgtcctagttaataaggcaccgcttcctctgcaaggcgttctccgactgccctgcccttccaggctgggttgtgctttctgaagtgctcccatggcatcctcatctccctccttctggcacccttggcgccatattaaaacagggcctgtttatttgtctcattgcccaatggactgcaagttccaggaaagcgggaccctgtctgttttcatcacagctacattgccagtgcctggaacaataaatagcaaccagatgagtgaagattctgtagcctattatgtttctcttttaccctctctgtattaaagccgatccctcctgtgactttgagatggagtctcactctgttgcccaggctggagtgcagtggagcgatcttggctcactacaacctctgcctcagcctcacaagtagctgggattacaggtgcctgccaccacacccagctaattttttgtatttttagtagagatggggtttcaccatgttggtcaggctggtcttgaactcctgacctcaggtgatccgcccgcctcggcctcccaaagtactggcattacaggcgtgaaccaccgtgacaggcccctcctgtgacttttatcagcagtgtaccttgcattttaaaatctactggtatgtgtgtgagaagtgaagaagattcagaaatacaagttggttaaatggtccccctttggacttgcaataccccaacaagccaacaggggtcaggtagaacaggccagtggaggtccctgccaaaaccgcaaactagcccatttgggaccaaagaatcacataagaaacacatgccatcatgtgtaataacatttattcactggggagggcacagctggcacaggatgggaagggcttgaggcagcaaaggagaaggcatgcttttctatactatcttgcaaaccaatgcaggaggtgccatatcagaagagtgctccctgggcactcttctgagcactgcttttctgctggactgggtgatgggagcagtatcagactgttctaaagctctctcatattacacatttcaataaatacttattgaattgaatgtcagttcttgagaatgaaaatgtttggaaaagagacgcctactgcttgagctgagctcaccaaatctggaacacatttactcctaaatcatttgagattaacttacagtataccgtgcccaacatgctttgtaacttatggtaaatggatatgattttaacaagtttccaataggaaatgcaagctatttccaaggcatgatgtactaaaggaatttcatcatttgttgttgatgttgcttcatcagactgataacttgctcatataatattaactctttcgtggtggaaagttgctccacatttctgcaaagaccagacagaaaacacttcttgtcccagatgttttttctttttttccatgaatttcactgatctactgtaattagagaatgtgagacctgaatcacagactcatatcacttacagcagtggttctcagctgggggtaactttaccactcccctgcaagagacatattgggcaatgtctggagacattttgggttgtcacactcagaggggagggatactcctgatacctactgggtagaggccaagaatgctgctaaaacttcctgcaatgcacaggacagcctcctacaaacaagagttacctggccccaaatgttaatagtgtcaaggtcaagaaatcctgatttacacgaaggaaagaatttatatctacatctttgaagcagtttaacagctgtttcccttacatggatgtgattaacatgcaacccatcatgctttcttcaggcgaacaggcatgttaggtagaagcaggcagttttaaagagtgacatgaagtgctctgattttctctagaagcttgtgcactgtgatagagaaacagaacctggaagtaatgagaacactcattgcaaaccactcttccaactccagcaaaacaaaataagccccatataagaaccctgaagaaaacaggatcctacatttaaccaaactaagaaaaaataatctttcaaaatccactttaaaaaagaaatatactataataagcaactagcagcttatctataattttatgaagtaatagagaagaaaaatcatcagctccttgaaggcaggaatttttgtttttttttaactgctgcatcttgcgtggccagaacagtgcctggcacacagtagtcactcaataaatattagttaaataaataaattaaaaataatcaaaatcattttggagaaaacaatcctcttttatagaagagacagcaccatcaccacttcacgcatttgacattctgagttaagtaatgtttctatacagatcttgcttactcttttctcttcaatgacacataggaagaagtgaaaataaatcagtaaatgcagtttcaagtcattaaaagttaatcacaatgaaaatatttatgtaggaacttgtggtcttctttctcccccgtggggcagtcagactaactgcttcgtgacagaagagtcagaagacgctacatgagctgtattcagtgtgcccaggctccttgctacaaggcaaacttttgatcattcatgctaaaataaaagtatcctttattatgcagagttatgtgctgtggctttaatgtccaatgctgtaagtgcatcgtgacatagaatgtactaattcacttgctatagatctctggggcaccgggaaacactgaatgatgccatcgtgaatgtggagccctggagttactctgatcaggaaaataccacatgccatgaactcatggctatagtcttctgcaagttatcatgcctagaaaaactggtgaagggcattttcaccaattggatcctgtgcctgtgatcaaggtgtctggattacagctgtgaagcctctattctccaatccttttgcaaagggaggggccctttttctactaagcaaataaaacttgatctatttaaaatttccctagtcctgtggttctttacagatgtgccaatagtgttaagcaacctgggaagaattgccggacacaggattcaaggaacgccgcaccctgctcccataagcagggcagacattatcaacagatcacagccctttctgctgccatgctatgggagatatgcttctccacatagccctgtagtgattgacggaaactgacctaaaggatagattcaatcctttactaccacaggcacagggtgcttcgatccaagatgagtctggttgaacatacactccctcctcctgatgtagacagaccacagtccagtctacaagatgcacattaaacacagacacattcatatttcgtcatgtgccaatcaataaagcaatgccagtaagcccaagttataagcttgcaggacgtgtgataagatttcaggtgtgtgcaggagctaggtaccaaaatgggaaaaaggccactggcagtcttctgcacaagcaaattactttctcttgagacacatacacttgcaggcagaggaggaatggcaggaagaggaagtgaaaccgacaacaaataactttaatttcaggggtgtatgctcttttgtctcagaagccaacctaggtgggtgtgaagaagtgacagcccttaggcataatccctgcttctgacagcctccagcagactttggagagtgacaggtaaagccacatttggcccgtacttagaggtggcatgtttcctggtatcataatggaagtataagaacaaggaagggaactgaactaagaacctagaaaccaaatgcaagcaactgagatgggggcagttgaaaaaagaatttaaagctgaactgcagatcaactgcatggtttcacacttttctcggaaaaaagcaaaaactggaagcttatcaagcaaacacactttttcagtcagcaggaatagcattaggaaaaggataagatgtggcagagacacatctgaaattatttgacttcaggatagaagattcatggcagagggctcttgatcctcgcaaaattagaaacacccataagaatctacttggggacttttgctacattctcagtggagagagttaatccattgaaagcctaggaaagccttctttagttttcccctgtcattactgggagcagaaggacattcagagacagttgagtaccacatcagcagcaatgaggttgggccacagaaactgtcacccaaatttcctaatttcccagcacctttcaatcctttacaatggggcttttctcctctgtagcatactgcatcagatgatcctgacaccccatgagagagtgcaggcagtgctgccttctggggacagacgggacagaagggccagggaggactggggaggctggacagaaagcagggctatgctggccactcttgggatcacaagcatttcccaaggtactgaagcagagaaaaagtcactgctgggttggccctctggagatgttaatacttgagggatgaaacactttcagcactgatgctgggttcagccaatggccccagcccagctatgaaaaaaagcatgcaggactctgccaatgtgggaaagtcctctctttgctgccaactggagggagtgaaaatatgtgccttgctaaatgacattgtggtagggagaattctgagctgtcccccaggactcctactcccggtgtatgtgccctgcaaatccctaggatttatgaatgatggggtagtcactccatcatcgggttgttatttggcacagccgactttgagagatcatcctgggtggacctgacctaatcaggtgaacccgtgaacggtatgccagttcctggaaaagtagattaaaagtgagagaggccttcattgtgggggagattctccacagctgcctttaaagatgaaggggctatgtggccagacacatgggtggtcagagctgagaacagctcggtcaagaacctgaatgaacctggaaatggattcctccctagtcaagccttcaaacaacaacataatcagctaacatttgatttcggctttgctgagcagagaatcccctccgtgcctggatttgtgactgacagaaatgtgagctaacagatggatgttgttttaagctactaagtttgtagtactttgttaggcagcagcagaaaactaatacatgttttggtgggatgggcaccatggggatgatggctccaatttcagcagtcatgaccaatatccaatcagtgttccctgtagcctaggtgcaggctggactctgcaaaatgctgtcccattaaaatctagtaacaactctaaaacacaggtattactatttccccacactttacaagggaggaaaagaggggttggggaatttgtccacagctatgtcagtcatagagatgggatttgaaaccagatagcctgattccatggccaacacacagagtctctatactagagctatttcctgaccatggaatcctggccagtccatgcaagggtgtgggtgtgagggctggaggtgttgagggaaaaatcctatagggaagaattggttccacagagctcaatatctcacacattatgatatggtttggttgtgtccccagccaaatctcacctcaaattgtaatccctataatctccatgtgtcaagggcaggaccaggtggaggtaatcgaattatgggggcagttccctcatgctgttctcgtgatagtgagtgagttctcatgagatctgatggttggttttataagcatctggcatttccactgcttgcacttactccgtcctgccgccctgtgaagaaggtgcctgcttctcctttgccttctgccataattgtaagcttcctgaggccttcccagcaatgcggaactgcaagtcaattaaacctctttcctttataaattacccggtctcaggtatttcttcacagcagtgtgagaatggactagtatacattactaacggaggcactgatttcagggactaggtctcacctccatccccaatgcacattccattcccccaagacagtggattctgtagagatgctggaccatactaggtgcagtgagtcaccatcttccttcgtgcggtttggcatattaatgactatttgggccgatgacactgaagcagcccttaatttcctcatctttcctagtcatggcaagggtattcataagtaccatgaaggagttggcactggtttccttggtataaaaatcagctttcctattgcacttaaaatatgatttgctttacaggcaaaactttctggaacatatttactgcataaactgagatacacatataatgcctccaccaagcacaaaataacagctttctactcttggtgaagcctgtgagggagagcccctcgccaaatgcaagtattaaaatattacagtctctgaggtgagaagatagatgtaaaagtgggaatatacacaatgcagacactagccacatgcaatcatgggagaacagagcctacttaaaaatcaaacccaagctttgcttcagaaataagtggagttgaacccattcgatcatttacgcatgactttgcaaaggttctctggagggggaagaggatcaaccttctctcataccgcacagcaagggaaccaaagtaatataaatcactcttaaaaatgtcatgttactttaagaataagccatactgctggcacctagaatatttttgtgggtccccatctctggcttttcttgttcaaatggcccccaggctaagaggcagctgctcacatccctgcaacaaacatgttctttcctttctgcatagccttccatttctcgagcccgaagactcaaaagcgctcaataaaagagaaatggaagcatcagaccccagtggtgagatttaagactgcagtcaactgaatgctggaaccagtcccaaacctaaatggccaaatgaggctttaacaccaaaccatggaaaggctccaagaaaagagtaagaacattttcttcttaaattcattttgctctggatctcagggttaagacaagagtgaaatggtgatgaaaacaaggatgatatgttttaaccccatctatgccaaaggtttcagaaagaattagagcacaggttgtaaagttttttcaggctccaccccctgcccgcaagcctttttggaccatagaaaagccccttgtagttaatatttttaaaatttcatttaaagtgagatataattcatataccataaaattcaccctcttgaagcacacagtccaatggtttttagtacatttacaaaggagaccatttccattatctaattccagaacattttcattgctccagaaagaaacccatgcccattaagcaatcgctacccactcccttctctccccagcccctggcaaccacgaatctaatttctgtctctatggatttgcctattcttgacatttcatatcaacagagtcacatcatatgtggtcttttgtgattggcttcctttgcttggtataatgttctccaggttcattcatgtaacatgtattagtacttcattcctttttatggctaaaagatattctactgtatggatataccagatgttgtttatctattcatcaactgatggacatttgggtttttacgttttggctcttatgaataatactgcaacaaacattcatgctcaagtttttctgtggagatatgttttcaactctcttagattaatatttcaatatataagaaatttatacagataagagaaactctaagtttaggaaacagaaacatatattggcaacaaaaaaaggaaaaacaatttgtgaaacatatgggagaatattgcctttggtagtaatcagagaaatacaatttagattagtgagatactatgtatcacttctaaattcacacattaaaaaaataagtatactcaatagtgatgaagtttccttgaaatgaatatgactctcttacattgctgatagaagaccagaaatcagtgtaaaaccatttggtaaaccaatttggcaatataaaaaattcttaaaaatgggcatactcggccaggtgtggtggttcacacctgtaattccagcactttgggaggctgaagtgggtggatcacttgaggccaggagttcaagaccagcctagccaacatagtgaaaccccaactctactaaaaatacaaaaattagatgggtgtggtggcaggcacctgtaaacctagctactcgagtggctgaggcatgagaatcgcttgaaccaggaaagcagaggtttgcagtgagctgagatggcgccactgcactccagcctgggtgacagagtgagactgcctcaaaaaaaaaaaaaaagggggtcgggggtggcatgtcctttaacctgtaaatgtgtgctaaagacacgccttttaaaaaaatgacatgaagaggttctatgaagtattatttatcatttgaaaaattagaaaacttgttagttgtttagcatgagggcaatggctaaagtaaattgtaaggtatgcccataaagacaagttaagcagaaattaaaacttacatttactgaaattatcagcaatatggaaagatgttcatgttatattaggaaggatcacatgattgcaactatataacaaatgcctagaaaactctttggaaggaaacatgctgagattatggtggtgtgcagatgataacactatgggcaactgttctttctttgctctctgtgtcttttttctcagatttgtctataccaagaatgtactttttttataatgagaataaatcacctttatttttctataagaaagttccctttaatattatcagttactgattgaatttgtatgtaagttgaaacaactacacattgatgaagtatactttgtcaactgaaaaattaagagggagagactgactgattccaaagcctgttgagaggcaactccttctagaaggtgtgaagggtgaaaggtaccaatggacagtgagcctgctgagcgtgtgctcttaactaatctgtgctggaaagtaagcagtgaggcgcagtgctgggagtgggcggtgagtgcacagcaatgaacagccatagatatctaattaagggcacgaaaaaggcaaagccacatgcagaggatcctgtaggggacaagtgtggaatctgggataaccgaaccaaaagcagggtggctggattagtggggttttgagaccctttgggccacacatcctaggtacttggggacacccactaaattcagaatgacggtactcactcaagtctaccttggcacctaaccaaggcaatctgattcctgaggtgtctgtaggagctctctgtgagtgaggtcatgaagaccacgcatgggcttggctctaggaaggtggagaggatgaaacaaagcacttttgttctttggatgccaattggtgggagagggaagggggcctgccctcgctcttgttgccttcaccctttcctgttgggacactgagctgggcattttaatgctttgactttgagccactgcccctagaacctggggcaatccaagcagggcacagaacagtaggcaacactggttcatgtgacctgaaaattttcagaaacactaggcacagaagagatgtttcttcctgatgttgatatccaatcaagtatcttcctaccctccttaccctcattctataaaaacaatcaaccagagaaaaagagaaaagaaaaacaaaaacgtgggcttctattcatgaccagcaaagagaaacaggaaggtcagtgtcacatctgggccacagtggcagagcctagctttctgggctgcgcctgtttaaggaacagtggtggcagaactggccgagggcccaagggtcagggtgtcacctggcagagccacaagaaaacacattagcacaaagcggctgtttgaataggcgtcatcaatgccccctccccaagtacgaggaccgctgagaatgaaagccgaggaggttcactctccaaggccgaacaaaacccgccctgccaatcttcccagtctctatagaggttcctcgccagatgattctgcaaatgtggcctcatcctttcaaaaacagtgcattctttttctctttctttaattcactagttccagtcaagaagatccaattcctttaaagacacagaaaggactttgaagaaggagatttgacttcttttgcctttgagctgatagcacggtgcttgtggtctccatgtctcccattttcgctgatcatttatctggttatgaagtcacagcccaatctaaatctaccagcctgagaatttggctgtgaggccacttgcactgtgtttttggggcagaggctggtgtctttcctttgaagaataacatgaagcccagtcccccggcccctgggtctttgtgttggcactttattcaggctgccagaaatcagcaacaacagcagggataacttttgcatcccctgccgtggtgtagaatttcaaagcttcttgcagctgttttggtgtgaatgcagataaagtagccagtcagaaagcatagtctatctaattccacggcctctatggggacagaatggctcaggaggacgggaacaaaaggagcagagaggcagactccagccagcctcctcctacactttattgcctgaaggaaaggaggatggtctctgccttccctgatgttggtttcctcaccctgggtgagcccagggtggttgaatatgtcgtgcgtgtctcagtaaagttttcactagaggtctgcatttatgaatgcaaattgagtgccaagagagacacagaggaaattaaaggaggaacatcagtaagaggaagagaatgtggaaccaccagaaggtagtgatgctttccccagcagcacacaaaaaacagtatttgggatgacaagctgtggccactctgtgtgggaggaacatgtgctacatgggctagaccacttgtggatgacctacttaacacctgatggaaacccagtcagatttttcttaacaaatccaaaaaaggtaacactgggtttacataccagcatacattctgcgaacactactgcttgtaaaagttatggtgaagcaatttaatagtgacttttcacttggcctatgaatgaggtagagaatacaatgtttttttatactgttgtcctacagagtgattaaaccttaagttcactccttaaaaatggcacagcagttaatcttccctttttcctaggtgcttgcaggattctggtatcaggcagggttgccctgggtctaaagggacacggccttggcaatcttgcagcccaaatccacgtcactgaaagtaagcgagcggtggagggtgaaggcgggtgaaggcaggtgaagggtgtgcaggctgcctgctatcccctcgctgtcccaccaaatccaccccaccctcctccatcataatagctttagtgagcctctggctttgcagctgaagactgcattctcagactctcttgcagctaggtgtggccagatcacttaattctagtcaactccttgtgactgggtataatatattcaactcctgaatccttcaaaagggagctggtcgtcctccactttccttcctgcttcctgtgggctgggaagtgggtgtggtgctggtgaactggcttcaacagacagacaatggcaacccaacagggaacagcaggaccacaggatggaaggaacctgggccccggacagcttcacggagcacagctgctcgtctacccgaaagcacccaccactgaccccaacacgagaggcatgaatattgatcttgtgtgggccactgcttctttgggaggagatgggggagggcatgcagtgggatctttgttataacagggagtctgcagcaacacacggaggaagtgaatctaatacagaggtcaaagggtggctgtgtgggccacgtgtctccccactcccgagaaccaataagaacttctgattacctttgacacaaacagttaaacttgaattaaggcaagttagtaggataacaacaacagtaacaataacaatgcctaccactttttgagaacttattttctgcttgaccttttacatatgctatctcatttaatcctcagagcaaccttacaagtatattttacagtcaaggaaccttgggcccacagaattggagtaactttcccagagttactcaggccgtgggacctggacatgaatctagatctaatacgcttgcatcttctacctactacaccatgctgttttttgagaagcgtgctctgctcctagccattttctaagtccagcttagcatttgttcccaagtctccgggacatcttagtctggaattaagtcttctgttttagagaaggtctgtaagcagtgcattagcccagaaccaggatgctgagtagccctgtggcacagagcgtatcactctgaagttctggagcccagtttcctcatcagtgcattagcccagaaccaggttgctgagtagccctgtggtacagagcgtgtcactctgaagttctggagcccagtttcctcatcagtgcattagcctggaaccaggctgctgagtagccccgtggcacaaagcgtgtcactctgaagttctgaagtccagttccctcatcagtggagcaaagtgggcttccaagccaggcacggtggctcatgcctgtaatcccagcactttgggaggctgaggtgggcggaatacttgaagccaggaattggagaccagcctgggcaacatggagaaaccccatctctacaaatatacaaacattagccaggcatggtggtatgtgcctgtagtctcagttacttggggggctggggcgggaggatcacttgagcccgggatattgaagttgcaatgagccatgttcgtgctactacactccagcctgggtgacagagtgagaccctgtctcaaacaaacaaaaaacaaacaaacaaacaaacaaaaaaatgtgagcttcaacaaggagccctccagggttcacaccaatgctgaaggagcccaaagaccttttgcacacattgagcagaaccactgagtccacagacagacaggcagctcttggccctcagctgaacctcaggaattatgaggactcatggaatgacctgaccaagtgctcaggtttggctctaaatgctcagatgacccctgctgtgccagagccttgagaaggtacattatgagagttttaatgatgtgagaagagctaggcattgctgtgtcctacagtttttatttaattttttgccctatggtttaaagtactctttcttactacagttttcagaagacctatgtcctccactttcctttgttgctaaaatgaagaacaacttatgatctggctcaaccaactctggcattcatgacatgctgtggtcttgaccctcctccctcatcacagggaggctccacttctctctggctctaccctacagggttgctaggtacagctgttctccttctgagctgctggagatgaagttagaagaaaacaataacaagaatgaagaaacgaccccccctaccccaaacaaaagttactccgaaatcaccatagtaacaaatcaccagttttcaactgtttcatttcctttgcatttttgtttctctgcacatacccttttatttatattcagccccagctctagcctttattcaacaagcatattttgatcccctttatgtgacaggcactgtgctaagggctgccggtataaagtcaagtacacatggcctctgtcctcagggagctaatatatacttaagagggagacagacaagtaaatcgagggactcaggttggagaggggacacagagggagttctaattcatccaggtcagcaattgagaaagtgactggatattagcccaggcagggaggagatgggcactgcaggcaagggaatagcatatctgagggcacagaggtgtggaacaccatgataccctcaaagaaccgtaagtgttcttacggcttatttgatttatggccatatttatggagcattcaaatatgtgccaagcatatttcgaggctttgggtgctaaggctgaagaagacaggctccctgctcaaaaggagcttatagtttaatgggattgaaatgtgtagctgggtaagtggctgagcttgagaagcagtcagaagccaaatcttaaacaactatgagtccattctactgagccctcactatggtgcctaaagctttcctaggtgcaatatgcaaatgacctttgatccatcaacatcctgtgctgggtattatcatcatcatcaatgaagggaggtaaagttatttgcctaaggcctcagtgctaggtttaactgcattttaacccagatctggctaaatctgagacctataagcaaaagcatttgcacattatacaactgatacttatccagtattaagcaggagtgaaactgggtcttgatagacacatactgaagctggggagaaaagagaagcatgggggggtgccagatcaagaaggcaagggtagaaagagactgcatgcaagtggctggacagggaggtatctaagtaagctatgacttcctaagtggaccaatgactctatccattctagctacctgtctattcataattcatacctcacaaatcatccccaactgtggcaaagccgtagcttttgttacatgtgagaataaagatctgaaaccataaatggctgcagaggtgatctactttggaactatataagtgacattatctgagagccctggcacacaaaacacttcatatcttttggggctggtaggagtgagaaataggcttgcacagttgtgtaagtggctgcctaaacatgatgaggacaggtaacaccacagatagacatctgcaatgcaggtcatcagaagaaagacaggaatgcccactgaaaagggcatgtaacaagtagaatccaacaacagaccggtgtcacaagaggatcctgaaggagtggctagggttagaggtgcagatgaatgtgaggtcacaggggatcaccactgttctcctccagctgtggaggggtttgctctgtcaagtcaaatacgaatgtctttatcatgatgcagaagtggcagttacacttcagttttgcataaaaaatataatattaacacattctttgggctagaaggcagcttattttttcagcaatgacagctctactcacatatacaggcttagaacagtcagaggatgtaaactcttgctcatccaccagcaagagtcatcaatcggcagctctggcagaagcactttgtcccagcactaagcagaactggcctgtccctgagagctccgatggagctgccttagaagattccaggtaatgatggcccaagggtggcttcatgccctgccccagttctggctcaatacaacccaaactgacccagcaagtaatgatggtacacacatgaaataagcccaggaaacagctctgccataattctttgtgacaaaagctgactcgacatgctgatttccagcccaagtgaaacaaaatggtcctgtgtacaaccagcctacacattctgagtattcaccgttccaccaggtttattccttaatctggacgcactaaatgcactcccctctaagtcccttcatcattttctagccatcttgcttctctcttaagacttgtattttctatataggttcactgctaaaataaaaatactgctaacaattagtggatctgcataactcttatagaagagactgattatttataccatttctacttttccaaacccactaaactgttccctaactttgtttttcttaactatctcaactgtttgaaatctgtttctgttctaacatggttgctggttaatcatccattcttgtcactatttgttttgtgcctcaaacactcgactctttaaaataatggtgtggacagaggaataaacaaacttagtttctcctctactcttacaacatgcttctgacaccagatgtgtgggttttgtttccccacatatcaagcaagcaagcaagcaattttgcagtggacacagctggctgttctccagttcaattcaatttggtgccaatatctacctagagatagtgtcagatcctacaggttgagggcttagtttcacaaaactgctccccacttaagacatgagtcacaggccccaggttgtggtatgtgcttctaacccaccggctataaatcgggatctccacaaccccctccttgggtttgactcatttgctacagcagctcacagaacccagggaaacagttatgtttactacttcattataaaggatgttttaaaggatacagatgaagagatacacagggtgaggtatgaaggaaagggcgtggagcgtccacggcttctgtgccctgccaccctccaggaacctgcacatgttcagctatctagaagctctccaaactctgtcctcttgactttttatggaggcctcattacataagcatgattgattaaatcactggccactggtgatcaacttaaccttcagtccccttttctctccccaaagactgggagataaggctcaaagtcccaaccctctaatcctctctttcccatgaccagtccccatcctctagacgtttactactttggagattccaaggattttaggagctgtttgccagaaaacagtgaccaaatatacacttcacaatatcactaatggcctcaaattttccttaattttgactattttcccataaaaaaacaaataaacaaataattttttctttggtaccagagcatttttactttcctgctaggccaggtgacaaaactctcactcattttcaacctaaacaacacaacacccatcatgaactgtcatcctccatttctatattgcaattccaacataaagtgatgctactggcagaattttcagtctgttaggagcaagtactggtgaaaatgtggaacaagagctccacacacaccgctagcaggacgtcaacaattttacattactagtgaagatgaagatgtacctatcccatgagcagaactccactcctaggcataaaccccaaagaaccatgcctacctgaaacaggaaatacatgcaccctgagggtttaaggtgaggctcaggaatctgaggtatctgcactttttataggtccactggtgatgttacctcctcccctgcaggggtcttggactgaaggcttacaacctcaactcacatctgtttttggagtcaggtgcccccaaggctcatggctgcagccaggcaaagctgctcactggagaggggtaatggggaattgcacatccatcggagatgctcctccctggtcaaaggtaactattctgaggatctgggaaaatccagcacagtatcagcatgcttttgctcaccagctgcctgctcttccctcttggtcacccctagctgtctgagcaagatgtggctcaaaactcacctcacctagtgatgggcttgggtcggcattggcatcatcctcattttcaacacaaagacctaaagtgcccacccagccctggtgctgctatgaatgtgatc

SEQ ID NO: 2209 - DNA, 375 bp, Homo sapiens
  misc_feature (62)..(62): n is a, c, g, or t
  misc_feature (198)..(198): n is a, c, g, or t
  misc_feature (306)..(306): n is a, c, g, or t
  misc_feature (357)..(357): n is a, c, g, or t
gtgattcaatattcaagagtctttattgaagacttgagatgggacttccaactcagaggatntgggaatcccagctcaaatgatacaggataaactgggatgggctaggatggacaggctgtggatatgggagtcatgggtcaaagtcttatcccagatggctccaggtacagtgggcttcctgggctggaactgggncctccccacttcattctgctcaaagcttcttgaaggagctggtttgacttcaacttgctagagcctagcctcatctttcagtcaactgggaaggcttatcagagggantccagcccaaccagattgaagtacattcttctttttgggtcgcccgggganctgctctgcttacggtac

SEQ ID NO: 2210 - DNA, 2031 bp, Homo sapiens
tcgtgcgcacgtcgggccggaggaggcgattcctcggggcctgggtcttgtttttctcgctctctacgcagccccttctcccgcccctcagcccccaccccgcagcccccagcccccgagcctccccggctcccgaccagccgagctccttcactggcggcctcgcctcgccagaggcaccctcgatcttccggaaaacgccaccatttttcactgcccctggagcgtctccagcttctgcccgcctcccgactccgatcttgtcaatgaagaatcgggccaggatcgccgcggagcggacgccgaccctccgacccggctcgcaggctgggagtcccctctgcgaggctggcatggccgcccctaccgggtcccgcgccctctgcggaccctgccccgggttgggcctggcccgcgggcggccccgggaccgggggaccaggagggagagtagacgcgggccgcggacggcgcggactgacagctggcgagagggcgccggggctgggggaaagggagggagggggctcatcggagtaactttccagaaaaacagccaacgtgtggcaggagtgattccaagaggggaaaaaaagttcagctaccacgtcgaacgagaggactcgcaaagtatttttcaaaagggctcggcttttcctgtgcctgtttaaaacattaacatcgtgcagcaaaagaggctgcgtgcgctggtccctccctcccccaccccaggccagagacgtcatgggagggaggtataaaatttcagcagagagaaatagagaaagcagtgtgtgtgcatgtgtgtgtgtgtgagagagagagggagaggagcgagagggagagggagagggagagagagaaagggagggaagcagagagtcaagtccaagggaatgagcgagagaggcagagacaggggaagaggcgtgcgagagaaggaataacagctttccggagcaggcgtgccgtgaactggcttctattttattttatttttttctcctttttattttttaaagagaagcaggggacagaagcaatggccgaggcagaagacaagccgaggtgctggtgaccctgggcgtctgagtggatgattgggggctgctgcgctcagaggcctgcctccctgccttccaatgcatataaccccacaccccagccaatgaagacgagaggcagcgtgaacaaagtcatttagaaagcccccgaggaagtgtaaacaaaagagaaagcatgaatggagtgcctgagagacaagtgtgtcctgtactgcccccacctttagctgggccagcaactgcccggccctgcttctccccacctactcactggtgatctttttttttttacttttttttcccttttcttttccattctcttttcttattttctttcaaggcaaggcaaggattttgattttgggacccagccatggtccttctgcttcttctttaaaatacccactttctccccatcgccaagcggcgtttggcaatatcagatatccactctatttatttttacctaaggaaaaactccagctcccttcccactcccagctgccttgccacccctcccagccctctgcttgccctccacctggcctgctgggagtcagagcccagcaaaacctgtttagacacatggacaagaatcccagcgctacaaggcacacagtccgcttcttcgtcctcagggttgccagcgcttcctggaagtcctgaagctctcgcagtgcagtgagttcatgcaccttcttgccaagcctcagtctttgggatctggggaggccgcctggttttcctccctccttctgcacgtctgctggggtctcttcctctccaggccttgccgtccccctggcctctcttcccagctcacacatgaagatgcacttgcaaagggctctggtggtcctggccctgctgaactttgccacggtcagcctctctctgtccacttgcaccaccttggacttcggccacatcaagaagaagagggtggaagccattaggggacagatct

SEQ ID NO: 2211 - protein, 47 aa, Homo sapiens
MKMHLQRALVVLALLNFATVSLSLSTCTTLDFGHIKKKRVEAIRGQI

SEQ ID NO: 2212 - DNA, 256 bp, Homo sapiens
  misc_feature (212)..(212): n is a, c, g, or t
  misc_feature (244)..(244): n is a, c, g, or t
ggatggtatgtgtatgaaatgttaagatcctacgcaacactgctatttttttcctttaatatttgtgctgcataacaaaagccactagactgttactgtcttgtctgtccatgtgttaacagcatttcttaatgatgtatatatggagtggtcttcaatcatagtgaagaatttaaagagaaagtcaattgtattggcatttttaataagancaaaattagttcgtctaaggggactggctggncacatatttgtt

SEQ ID NO: 2213 - DNA, 3071 bp, Homo sapiens
cgcttggctcggcgcgctccggccggccgcaaagtttcccgggcggcagcggcggctgcgcctcgcttcagcgatggccgcggagctgagcatggggccagagctgcccaccagcccgctggccatggagtatgtcaacgacttcgacctgctcaagttcgacgtgaagaaggagccactggggcgcgcggagcgtccgggcaggccctgcacacgcctgcagccagtcggctcggtgtcctccacaccgctcagcactccgtgtagctccgtgccctcgtcgcccagcttcagcccgaccgaacagaagacacacctcgaggatctgtactggatggcgagcaactaccagcagatgaaccccgaggcgctcaacctgacgcccgaggacgcggtggaagcgctcatcggctcgcacccagtgccacagccgctgcaaagcttcgacagctttcgcggcgctcaccaccaccaccatcaccaccaccctcacccgcaccacgcgtacccgggcgccggcgtggcccacgacgagctgggcccgcacgctcacccgcaccatcaccatcatcaccaagcgtcgccgccgccgtccagcgccgctagcccggcgcaacagctgcccactagccaccccgggcccgggccgcacgcgacggcctcggcgacggcggcgggcggcaacggcagcgtggaggaccgcttctccgacgaccagctcgtgtccatgtccgtgcgcgagctgaaccgccacctgcggggcttcaccaaggacgaggtgatccgcctgaagcacaagcggcggaccctgaagaaccggggctacgcccagtcttgcaggtataaacgcgtccagcagaagcaccacctggagaatgagaagacgcagctcattcagcaggtggagcagcttaagcaggaggtgtcccggctggcccgcgagagagacgcctacaaggtcaagtgcgagaaactcgccaactccggcttcagggaggcgggctccaccagcgacagcccctcctctcccgagttctttctgtgagtcgtggccggtcctggcccccgcccttgccccggcccggactccctgtcccacgtccctagtcccagactaccccggaccctgtccctgccgcggccccagccttgacctgtttgacttgagcgagagggaggaagggcgcgcgggccgcgggcgacgggcgggtgcgcgggcgggcaggggaccttggctaaggcgagagtagcgcacgccagcgccgcctcctagactcgagcagagccggagagagagacgagagggtgggaggtcccggagtaacttctctccaggctgaagggcggcgaggcatactcccgataagtcaccaaggccatctggagactcctggctttctgaactttgcgcgttaagccgggacagctgctttgctgcccggagagtagtccgcgccaggaagagagcaacgaggaaaggagagggactctggcgtcccggcaggcgagaggcgaggctgagcgaaagaaggaaggaccagacggaccctgtctgtcagagttcggagaaacactggctcctcagccctgagacacaggccctcagttagggacgctcggggcacgaggctcatcagttttattgcctgctcgattatatagaaaaatacaaaaaatctgcattaaaaatattaatcctgcatgctggacatgtatggtaataatttctattttgtaccattttcttgtttaactttagcatgttgttgatcatggatcatactccccttgtttctttgggtgagaagggatcgcagtttggaaactccggcggctgcgtgcggggtttcagtcccagctgtaggcttgtaaatacccgccccgccaaaccgcatagagaacgtggcagcaagctgagggtctttgtttgggtttattattacggtatttttgtttgtaagttaaaaagaaaaaaaaaaagaaaaagttccgggcattttgcatcagaaaacaactttgtcttggggcacacttggaagttgcatgttttctttccttcccttatccccattcggtcctctttttcctctctcgctttagttttcaaccttgttggtgctgagagagagaaccgagaggtcccagtacaagggcagggcagggcagggaagctgccaagctccgcaccccagaggagtgttctggactacagccttgtcttatggtcaaattgatacccttaataagaaaggaaaggaaaggaaaacagatcctcccctctgctttttattgtaaccagaatcaccctgaggtcccttctgaaccctctgggcctgcgctaattgtaggagccacagcgctcctagggtgagaggcttagccatccctgaccctggcagtgcactggtaagcagacactgcactgaaccaactgctatgctcagaatgtaccagaaacccaaacattggcaagtaattttgcaactttcaagtgcgttctttagaccaatgcattgcgtttctttccctgcttttgagatagtaggaagagttcttggtggtgtccccccccttcaattcttcagttgtatagtagttatagggaagatatgggtgtttttctttattattacttttttttttctgcaggtcagtaaaaggatttaagttgcactgacaaaaataccaaaataaaagtgtatttttaagttcccatttgaaattgctggcgctgctggccggatgcatttttgagtttgtattagttgataaattaacagtaataacaagattgtatgaaccgcatggtgcttgcagttttaaatattgtggatatttgtcctgcatcagaaacgagctttggtttttacagattcaactgtgttgaaatcaaacctgccgcaacagaaattgtttttatttcatgtaaaataagggatcaatttcaaaccctgcttatgatatgaaaatattaaaacctagtctattgtagttttattcagactggtttctgttttttggttattaaaatggtttcctattttgcttattaaaaaaaaaaaaaaaaaaaa

SEQ ID NO: 2214 - protein, 323 aa, Homo sapiens
MAAELSMGPELPTSPLAMEYVNDFDLLKFDVKKEPLGRAERPGRPCTRLQPVGSVSSTPLSTPCSSVPSSPSFSPTEQKTHLEDLYWMASNYQQMNPEALNLTPEDAVEALIGSHPVPQPLQSFDSFRGAHHHHHHHHPHPHHAYPGAGVAHDELGPHAHPHHHHHHQASPPPSSAASPAQQLPTSHPGPGPHATASATAAGGNGSVEDRFSDDQLVSMSVRELNRHLRGFTKDEVIRLKHKRRTLKNRGYAQSCRYKRVQQKHHLENEKTQLIQQVEQLKQEVSRLARERDAYKVKCEKLANSGFREAGSTSDSPSSPEFFL

SEQ ID NO: 2215 - DNA, 419 bp, Homo sapiens
  misc_feature (370)..(370): n is a, c, g, or t
  misc_feature (403)..(403): n is a, c, g, or t
gattgtcctctttgggggtaccagtccatctcctgaggaaggcctgggagatgaatttgaccttatagatcattctgacttacacattttggactttagccctagtctgaagactctgtgcaaactggccgtgattcagtataacctagaccagtcctgtttgcctcatgatatcaggtgggagctgaatgccatgaccaccaacagcaatatcagtcgccccatcgtctcctcccatgggtaggaggaagtttctgccacctcccctcctgagcctgctgtcatcttcactgcccctgcccatctgtcacccacctgctcctttgacccctgggacttgggtatacctccatgtgggagttgttggggngagaggtgttctctgtggctgtgaaattcagtngggggagctgtagcgg

SEQ ID NO: 2216 - DNA, 418 bp, Homo sapiens
tttttttttttttttttttttttttttttttttttttttgaaatgtctcaatttattatatgaaattatcaacaactgcttttaatattcagatgtcaagaagatgaaaagcagaaatacattttgcaaacatgtagcactccataaatggaaatcatgtatttcctctaatatcccaatttttctatattgggatcttatatggctgtttctatatggctattttgtcccaacttgctgtacaagaattttccccagccaccttagaaaggttggatgtagttcactccaagtttgcagttcactccaagtgtttcagtaccacagaaagctccatggaagcctcaaatgtacgggctaggcaatagaagcagggaggtaggattaagaaattactggccaggtgtggtggctcagg

SEQ ID NO: 2217 - DNA, 249 bp, Homo sapiens
attcacgcggtgagccatcagtgagctgagatcatgccactggcctccagtggccaccacatccggcaaggcagatgggaccatttccttcatccagaacgttctgtggacatcactgctctaggttcctcccttatggagtctcacaagactgtctagccagcaagatctcttttccaaccaggccaggagcacctctccacccactgctgctggtctgaccgccttcctggaagtccctcttgaggc

SEQ ID NO: 2218 - DNA, 351 bp, Homo sapiens
  misc_feature (16)..(16): n is a, c, g, or t
  misc_feature (72)..(72): n is a, c, g, or t
  misc_feature (168)..(168): n is a, c, g, or t
  misc_feature (184)..(184): n is a, c, g, or t
  misc_feature (194)..(194): n is a, c, g, or t
  misc_feature (251)..(251): n is a, c, g, or t
  misc_feature (263)..(263): n is a, c, g, or t
  misc_feature (294)..(294): n is a, c, g, or t
  misc_feature (299)..(299): n is a, c, g, or t
cgccgctagggcggcngggggtcgggacgccgggctaggggcgcgtcatgtggccgctcacggtcccgccgncgctgctgctgctgctgtgctcaggcctggccggacagactctcttccagaacccagaagagggctggcagctgtacacctcagcccaggcccctnacgggaaatgcatctncacggccgtnatcccagcgcagagtacctgctctcgagatggcaggagtcgggagctgcggcaactnatggagaaggtncagaacgtctcccagtccatggaggtccttnagttncggacgtatcgcgacctccagtatgtacgcggcatggagaccctcattcgga

SEQ ID NO: 2219 - DNA, 342 bp, Homo sapiens
  misc_feature (112)..(112): n is a, c, g, or t
  misc_feature (288)..(288): n is a, c, g, or t
  misc_feature (306)..(306): n is a, c, g, or t
  misc_feature (313)..(313): n is a, c, g, or t
  misc_feature (317)..(317): n is a, c, g, or t
ggactattgctaactaacccatgggactcccactaccttcatgaggctcagatgaggtgaagggtccctaaaatcgtgccaactagtcaggaactcagttgtcaataatttntttatttgtgatacaagcaggcgtggggaaagagaaatgaacagacttggaagcttctccgaggccctagagaagacctctgggttccgaacaccagacaccaggagtaaggagggtagttgatgatttcccactctttctccagcccctgctcctctgtttctccccttcacccnctgcagcttcctcaggtnctgggtnccgnggccattcatctcttcgaatgacct

SEQ ID NO: 2220 - DNA, 2933 bp, Homo sapiens
aggggggaaggaagagtagctccttcttcttcttcttttttttttcttccactcttaaaaagcttctttctcttcacccaagcctcactgtccctctccggctctagctctctccatataaaccctcaagattatgtcaattggttagagccagccgggaatttcgtgcgggtgctgaaggagctgcgggagccggagaagaatgaaactgcgtggagtcagcctggctgccggcttgttcttactggccctgagtctttgggggcagcctgcagaggctgcggcttgctatgggtgttctccaggatcaaagtgtgactgcagtggcataaaaggggaaaagggagagagagggtttccaggtttggaaggacacccaggattgcctggatttccaggtccagaagggcctccggggcctcggggacaaaagggtgatgatggaattccagggccaccaggaccaaaaggaatcagaggtcctcctggacttcctggatttccagggacaccaggtcttcctggaatgccaggccacgatggggccccaggacctcaaggtattcccggatgcaatggaaccaagggagaacgtggatttccaggcagtcccggttttcctggtttacagggtcctccaggaccccctgggatcccaggtatgaagggtgaaccaggtagtataattatgtcatcactgccaggaccaaagggtaatccaggatatccaggtcctcctggaatacaaggcctacctggtcccactggtataccagggccaattggtcccccaggaccaccaggtttgatgggccctcctggtccaccaggacttccaggacctaaggggaatatgggcttaaatttccagggacccaaaggtgaaaaaggtgagcaaggtcttcagggcccacctgggccacctgggcagatcagtgaacagaaaagaccaattgatgtagagtttcagaaaggagatcagggacttcctggtgaccgagggcctcctggacctccagggatacgtggtcctccaggtcccccaggtggtgagaaaggtgagaagggtgagcaaggagagccaggcaaaagaggtaaaccaggcaaagatggagaaaatggccaaccaggaattcctggtttgcctggtgatcctggttaccctggtgaacccggaagggatggtgaaaagggccaaaaaggtgacactggcccacctggacctcctggacttgtaattcctagacctgggactggtataactataggagaaaaaggaaacattgggttgcctgggttgcctggagaaaaaggagagcgaggatttcctggaatacagggtccacctggccttcctggacctccaggggctgcagttatgggtcctcctggccctcctggatttcctggagaaaggggtcagaaaggtgatgaaggaccacctggaatttccattcctggacctcctggacttgacggacagcctggggctcctgggcttccagggcctcctggccctgctggccctcacattcctcctagtgatgagatatgtgaaccaggccctccaggccccccaggatctccaggtgataaaggactccaaggagaacaaggagtgaaaggtgacaaaggtgacacttgcttcaactgcattggaactggtatttcagggcctccaggtcaacctggtttgccaggtctcccaggtcctccaggatctcttggtttccctggacagaaaggggaaaaaggacaagctggtgcaactggtcccaaaggattaccaggcattccaggagctccaggtgctccaggctttcctggatctaaaggtgaacctggtgatatcctcacttttccaggaatgaagggtgacaaaggagagttgggttcccctggagctccagggcttcctggtttacctggcactcctggacaggatggattgccagggcttcctggcccgaaaggagagcctggtggaattacttttaagggtgaaagaggtccccctgggaacccaggtttaccaggcctcccagggaatatagggcctatgggtccccctggtttcggccctccaggcccagtaggtgaaaaaggcatacaaggtgtggcaggaaatccaggccagccaggaataccaggtcctaaaggggatccaggtcagactataacccagccggggaagcctggcttgcctggtaacccaggcagagatggtgatgtaggtcttccaggtgaccctggacttccagggcaaccaggcttgccagggatacctggtagcaaaggagaaccaggtatccctggaattgggcttcctggaccacctggtcccaaaggctttcctggaattccaggacctccaggagcacctgggacacctggaagaattggtctagaaggccctcctgggccacccggctttccaggaccaaagggtgaaccaggatttgcattacctgggccacctgggccaccaggacttccaggtttcaaaggagcacttggtccaaaaggtgatcgtggtttcccaggacctccgggtcctccaggacgcactggcttagatgggctccctggaccaaaaggtgatgttggaccaaatggacaacctggaccaatgggacctcctgggctgccaggaataggtgttcagggaccaccaggaccaccagggattcctgggccaataggtcaacctggtttacatggaataccaggagagaagggggatccaggacctcctggacttgatgttccaggacccccaggtgaaagaggcagtccagggatccccggagcacctggtcctataggacctccaggatcaccagggcttccaggaaaagcaggtgcctctggatttccaggtaccaaaggtgaaatgggtatgatgggacctccaggcccaccaggacctttgg

SEQ ID NO: 2221 - protein, 910 aa, Homo sapiens
MKLRGVSLAAGLFLLALSLWGQPAEAAACYGCSPGSKCDCSGIKGEKGERGFPGLEGHPGLPGFPGPEGPPGPRGQKGDDGIPGPPGPKGIRGPPGLPGFPGTPGLPGMPGHDGAPGPQGIPGCNGTKGERGFPGSPGFPGLQGPPGPPGIPGMKGEPGSIIMSSLPGPKGNPGYPGPPGIQGLPGPTGIPGPIGPPGPPGLMGPPGPPGLPGPKGNMGLNFQGPKGEKGEQGLQGPPGPPGQISEQKRPIDVEFQKGDQGLPGDRGPPGPPGIRGPPGPPGGEKGEKGEQGEPGKRGKPGKDGENGQPGIPGLPGDPGYPGEPGRDGEKGQKGDTGPPGPPGLVIPRPGTGITIGEKGNIGLPGLPGEKGERGFPGIQGPPGLPGPPGAAVMGPPGPPGFPGERGQKGDEGPPGISIPGPPGLDGQPGAPGLPGPPGPAGPHIPPSDEICEPGPPGPPGSPGDKGLQGEQGVKGDKGDTCFNCIGTGISGPPGQPGLPGLPGPPGSLGFPGQKGEKGQAGATGPKGLPGIPGAPGAPGFPGSKGEPGDILTFPGMKGDKGELGSPGAPGLPGLPGTPGQDGLPGLPGPKGEPGGITFKGERGPPGNPGLPGLPGNIGPMGPPGFGPPGPVGEKGIQGVAGNPGQPGIPGPKGDPGQTITQPGKPGLPGNPGRDGDVGLPGDPGLPGQPGLPGIPGSKGEPGIPGIGLPGPPGPKGFPGIPGPPGAPGTPGRIGLEGPPGPPGFPGPKGEPGFALPGPPGPPGLPGFKGALGPKGDRGFPGPPGPPGRTGLDGLPGPKGDVGPNGQPGPMGPPGLPGIGVQGPPGPPGIPGPIGQPGLHGIPGEKGDPGPPGLDVPGPPGERGSPGIPGAPGPIGPPGSPGLPGKAGASGFPGTKGEMGMMGPPGPPGPL

SEQ ID NO: 2222 - DNA, 1731 bp, Homo sapiens
gggggaggctgtgatgggttgacaggtgcgtgacagtgggagctgctctcggcacaagcatgtacggcaaaggcaagagtaacagcagcgccgtcccgtccgacagccaggcccgggagaagttagcactctacgtatatgaatatctgctccatgtaggagctcagaaatcagctcaaacatttttatcagagataagatgggaaaaaaacatcacattgggggaaccaccaggattcttacattcttggtggtgtgtattttgggatctctactgtgcagctccagagagacgtgaaacatgtgaacactcaagtgaagcaaaagccttccatgattacagtgctgcagcagctcccagtccagtgctaggaaacattcccccaggagatggcatgccagtaggtcctgtaccaccagggttctttcagccttttatgtcacctcggtaccctggaggtccaaggcccccattgaggatacctaatcaggcacttggaggtgtcccaggaagtcagccattactccccagaggaatggatccaactcgacaacaaggacatccaaatatgggtgggccaatgcagagaatgactcctccaagaggaatggtgcccttaggaccacagaactatggaggtgcaatgagacccccactgaatgctttaggtggccctggaatgcctggaatgaacatgggtccaggtggtggtagaccttggccaaacccaacaaatgccaattcaataccatactcctcagcatctcctgggaattatgtaggtcctccaggaggtggagggccaccaggaacacccatcatgcctagtccagcagattcaaccaactctggtgataacatgtatactttaatgaatgcagtacctcctggacctaacagacctaattttccaatgggccctgggtcagatggtcccatgggtggattaggaggaatggagtcacatcacatgaatggctctttaggctcaggagatatggacagtatttccaagaattctcccaataatatgagcctgagtaatcaaccgggcactccaagggatgatggcgaaatggggggaaatttcttaaatccttttcagagtgagagttactcccctagcatgacaatgagcgtgtgatccattaccaagtctcctcatgaaaaccacagtgagtcagcccttcacagaactactacggaagaaaattattcatcacagtgtacagttaaacaaaggaatctcagtcacaccaaaccaaccttttcatttcctgctctctcccctcttttgtgaagaaagcgggtccagatgtgattcaaacaactgtacggagtggcatattagaattgccctaaactgaactgcaaataattatgtgtgtatgtatatgtgtgggaaagagaatgtactgtatatgtgtatgttatacagacatatacacatacatacattgacccacaggacattgtaaaatattatcacatgacatcttaagtagaaataagtagggacttttattccatcctttttttcacgtttacattttaattattacaagttgctcctgccccctccctgaactattttgtgctgtgtatatcactgctttatataagttattttttaaggtgaactcagatgttatggttttgtatatgtctgcaatcatggataggaataaaatcgcttatttgagagctttcaaaaaaaaaaaaaaaaaaac

SEQ ID NO: 2223 - protein, 361 aa, Homo sapiens
MYGKGKSNSSAVPSDSQAREKLALYVYEYLLHVGAQKSAQTFLSEIRWEKNITLGEPPGFLHSWWCVFWDLYCAAPERRETCEHSSEAKAFHDYSAAAAPSPVLGNIPPGDGMPVGPVPPGFFQPFMSPRYPGGPRPPLRIPNQALGGVPGSQPLLPRGMDPTRQQGHPNMGGPMQRMTPPRGMVPLGPQNYGGAMRPPLNALGGPGMPGMNMGPGGGRPWPNPTNANSIPYSSASPGNYVGPPGGGGPPGTPIMPSPADSTNSGDNMYTLMNAVPPGPNRPNFPMGPGSDGPMGGLGGMESHHMNGSLGSGDMDSISKNSPNNMSLSNQPGTPRDDGEMGGNFLNPFQSESYSPSMTMSV

SEQ ID NO: 2224 - DNA, 3778 bp, Homo sapiens
cctctcgcctgcctgtggggtttctgtcaactagtcgtggagggaaggagactctttaaagaataacatcttattgtggccatgccagaacccactaagaaagaggaaaatgaagtgccagccccagccccacccccggaagaaccaagtaaagagaaggaggccggaactacaccagcaaaagactggacccttgtcgaaactcctcctggggaggaacaagccaagcagaatgccaactcccagctgtccatcttgttcattgaaaaacctcaaggaggaacagtgaaagttggtgaagatatcaccttcatagccaaagtcaaggctgaagatcttctgagaaaacccactatcaaatggttcaaaggaaaatggatggacctggccagcaaagccgggaagcaccttcagctgaaggaaacctttgagaggcacagtcgggtgtacacatttgagatgcagatcatcaaggccaaagataactttgcaggaaattacagatgcgaggtcacctataaggataagtttgacagctgttcatttgatcttgaagtgcacgaatctactgggactactccaaacattgacatcagatctgctttcaagagaagtggagaaggtcaagaggatgcaggagaacttgactttagtggtctcctgaaacgtagggaggtgaagcagcaggaggaagaaccccaggtggacgtatgggagttgctgaagaacgcgaaacccagtgagtacgagaagatcgccttccagtatggaatcaccgacctgcgcggcatgctcaagcgactcaagcgcatgcgcagagaggagaagaagagcgcagcttttgcaaaaattcttgatcctgcatatcaggttgacaaaggaggcagagtgaggtttgttgtggagctggcagatccaaagttggaggtgaaatggtataaaaatggtcaagaaattcgacccagtaccaaatacatctttgaacacaaaggatgccagagaatcctgtttatcaataactgtcagatgacagatgattcagagtattatgtgacagccggtgatgagaaatgttccactgagctcttcgtaagagagcctccaattatggtgaccaaacagctggaagatacaactgcttattgtggggagagagtggaattagaatgtgaggtgtctgaagatgatgccaatgtaaaatggtttaagaatggtgaagagattatccctggtccaaaatcaagataccgaattagagttgagggtaaaaaacacatcttgatcatagagggagcaacaaaggctgatgctgcagaatattcagtaatgacaacaggaggacaatcatctgctaaacttagtgttgacttgaaaccactgaagattttgacacctctgactgatcagactgtaaatcttggaaaagaaatctgcctgaagtgtgaaatctctgaaaacataccaggaaaatggactaaaaatggcctacctgttcaggagagtgaccgtctaaaggtggttcacaagggaaggatccacaagttagtgatagccaatgccctcactgaagatgaaggtgattatgtatttgcacctgatgcctacaatgttactctgcctgccaaagttcatgttattgatcctcctaagatcatcctggatggtcttgatgctgacaacacagtgacagtgattgcaggaaacaagcttcgtcttgagatccccatcagcggagaaccacctcctaaagccatgtggagccggggagataaggctattatggaaggcagtggccggataagaacagaatcttaccctgatagcagcactctggtcattgatatagctgaaagagatgactctggtgtttaccacatcaatctgaaaaacgaagctggagaggcacatgcaagcatcaaggttaaagttgtggacttccctgatcctccagtggcaccgactgtgacagaggtgggagatgactggtgtatcatgaactgggagcctcctgcctacgacggaggctctccaatcctaggatattttattgagaggaagaagaaacaaagctccaggtggatgaggctgaattttgatctctgcaaagaaacaacttttgagcccaagaagatgattgaaggtgtggcctatgaggtccgcatctttgcagtcaatgccattggcatctccaagcccagtatgccctccaggccttttgttcctttggctgtaacaagccctcctactcttctgactgtggactctgtcactgacacgactgtcacgatgaggtggcgccccccagaccacattggtgcagcaggtttagatggctatgtgctagagtattgctttgaaggaactgaggactggatagttgcaaacaaagatctgattgacaagacgaagttcaccatcacaggtctgccaacagatgcaaagatctttgtgcgtgtgaaggctgttaatgcagctggtgccagcgagcccaagtactattctcagcccattctcgtgaaggaaatcatagaacctccaaagattcgcatcccaagacacctgaagcaaacctatatccgcagagttggagaagctgtcaatctggttatacctttccagggaaaaccaagaccagaattaacttggaagaaggatggtgcagaaattgataagaatcaaataaacattcgcaactctgagactgatacaatcatatttattagaaaagcagagaggagccactctgggaaatatgatctgcaagtcaaagtggacaaattcgtggagaccgcatcaattgacatccagatcattgaccgtccaggtccaccccaaattgtgaagattgaggatgtctggggagaaaatgtcgctctcacatggactccaccaaaggatgatggaaatgctgctatcacaggctataccattcagaaggctgacaagaagagcatggaatggtttactgtcattgagcattatcatcgaaccagtgccaccattactgaattggtcatagggaatgaatattacttccgggtcttttctgaaaacatgtgtggcctcagtgaggatgccaccatgactaaagagagtgcagtgatcgccagggatggtaaaatctacaaaaatccagtgtatgaagactttgatttctcagaggcacccatgtttactcagcctttggttaacacctatgccatagctggttacaatgccaccctaaactgcagtgtgagaggaaatcctaagcctaaaataacctggatgaaaaacaaagttgctattgtggatgatccaagatacaggatgttcagcaaccagggagtctgtaccctggaaattcgcaagcccagcccctatgatggaggcacttactgctgcaaagcagtcaatgaccttgggacagtggagattgaatgcaaactggaggtgaaagtcattgcacaataaggatttttgaatgtataatatcatctaaggtgggctctccttctgcagactcctcttgcaaggcgtacctccaaacataattgattcatatctgcgagacttacactcaagcaatcctgaggaatactgagggagggcctggctactgtctctctgcactctgctgctttgaaatctggttgaaatgagaaaaagcattttctgttttcccaccaggcccccaagtgtggtctttttctttcctcctaatgttgaagagaaaaaaaaaaaaaaaaaagtttgcccagattgcttaattaaaaattgcaaacaaaaaaaaaaaaaa

SEQ ID NO: 2225 - protein, 1123 aa, Homo sapiens
MPEPTKKEENEVPAPAPPPEEPSKEKEAGTTPAKDWTLVETPPGEEQAKQNANSQLSILFIEKPQGGTVKVGEDITFIAKVKAEDLLRKPTIKWFKGKWMDLASKAGKHLQLKETFERHSRVYTFEMQIIKAKDNFAGNYRCEVTYKDKFDSCSFDLEVHESTGTTPNIDIRSAFKRSGEGQEDAGELDFSGLLKRREVKQQEEEPQVDVWELLKNAKPSEYEKIAFQYGITDLRGMLKRLKRMRREEKKSAAFAKILDPAYQVDKGGRVRFVVELADPKLEVKWYKNGQEIRPSTKYIFEHKGCQRILFINNCQMTDDSEYYVTAGDEKCSTELFVREPPIMVTKQLEDTTAYCGERVELECEVSEDDANVKWFKNGEEIIPGPKSRYRIRVEGKKHILIIEGATKADAAEYSVMTTGGQSSAKLSVDLKPLKILTPLTDQTVNLGKEICLKCEISENIPGKWTKNGLPVQESDRLKVVHKGRIHKLVIANALTEDEGDYVFAPDAYNVTLPAKVHVIDPPKIILDGLDADNTVTVIAGNKLRLEIPISGEPPPKAMWSRGDKAIMEGSGRIRTESYPDSSTLVIDIAERDDSGVYHINLKNEAGEAHASIKVKVVDFPDPPVAPTVTEVGDDWCIMNWEPPAYDGGSPILGYFIERKKKQSSRWMRLNFDLCKETTFEPKKMIEGVAYEVRIFAVNAIGISKPSMPSRPFVPLAVTSPPTLLTVDSVTDTTVTMRWRPPDHIGAAGLDGYVLEYCFEGTEDWIVANKDLIDKTKFTITGLPTDAKIFVRVKAVNAAGASEPKYYSQPILVKEIIEPPKIRIPRHLKQTYIRRVGEAVNLVIPFQGKPRPELTWKKDGAEIDKNQINIRNSETDTIIFIRKAERSHSGKYDLQVKVDKFVETASIDIQIIDRPGPPQIVKIEDVWGENVALTWTPPKDDGNAAITGYTIQKADKKSMEWFTVIEHYHRTSATITELVIGNEYYFRVFSENMCGLSEDATMTKESAVIARDGKIYKNPVYEDFDFSEAPMFTQPLVNTYAIAGYNATLNCSVRGNPKPKITWMKNKVAIVDDPRYRMFSNQGVCTLEIRKPSPYDGGTYCCKAVNDLGTVEIECKLEVKVIAQ

SEQ ID NO: 2226 - DNA, 3127 bp, Homo sapiens
gtagtgagccggctgagaggcatggagacgcaggaacttcggggggccctggctcttctcctcctttgctttttcacatctgccagtcaggatctgcaggtaattgacctgctgactgtgggcgagtctcggcagatggtagctgtggcagagaagatccggacagccttgctcactgctggggacatctacctcttatccaccttccgcctgccccccaagcagggtggtgtcctctttggcctctattctcgccaagacaacactcgatggctggaggcctctgttgtaggcaagatcaacaaagtactggtgcgataccagcgggaggatggcaaagtccacgccgtgaacctacagcaagcgggcctggctgatgggcgcacacacacagttctcctgcgactccgaggtccctccagacccagccctgccctacatctctacgtggactgcaaactgggtgaccaacatgcaggccttccagcactggcccccattcctccagcggaggtcgatgggctggagattaggactggacagaaggcgtatttgaggatgcagggctttgtggaatctatgaaaattattctgggtgggtccatggcccgggtaggagccctgagtgagtgtccattccaaggggacgagtccatccacagtgcagtgaccaatgcactgcactccattctaggggagcagaccaaggcgctggtcacccaactcaccctcttcaaccagatcctggtggagctgcgggatgatatacgagaccaggtaaaggaaatgtccctgatccgaaacaccattatggagtgtcaggtgtgcggcttccatgagcagcgttcccactgcagccccaatccctgcttccgaggtgtggactgcatggaagtgtacgagtacccaggctaccgctgtgggccctgcccccctggcctgcagggcaacggcacccactgcagtgacatcaatgagtgtgctcacgctgacccctgtttcccgggctccagctgcatcaacaccatgcccggcttccactgtgaggcctgtcctcgagggtacaagggcacacaggtgtctggtgtgggcattgactatgcccgggccagcaaacaggtctgcaatgacatcgatgaatgcaacgatggcaacaatggtggctgtgacccaaactccatctgcaccaacactgtgggctctttcaagtgtggtccctgccgcctgggtttcctgggcaaccagagccagggctgcctcccagcccggacctgccacagcccagcccacagcccctgccacatccatgctcactgtctctttgaacgcaatggtgcagtgtcctgccagtgtaacgtgggctgggctgggaatgggaacgtgtgtgggactgacacagacatcgatggctacccagaccaagcactgccctgcatggacaacaacaaacactgcaaacaggacaactgccttttgacacccaactctgggcaggaagatgctgataatgatggtgtgggggaccagtgtgatgatgatgctgatggggatgggatcaagaatgttgaggacaactgccggctgttccccaacaaagaccagcagaactcagatacagattcatttggtgatgcctgtgacaattgccccaacgttcccaacaatgaccagaaggacacagatggcaatggggaaggagatgcctgtgacaacgacgtggatggggatggcatccccaatggattggacaattgccctaaagtccccaacccactacagacagacagggatgaggacggggtgggagatgcttgcgacagctgccctgaaatgagcaatcctacccagacagatgcagacagcgacctggtgggggatgtctgtgatactaatgaagacagcgatggggatgggcatcaggacaccaaggacaactgcccacagctgccaaatagctcccagctggactctgataacgatggacttggagatgagtgtgatggggatgatgacaatgatggcatcccagattatgtgcctcctggtcccgataactgccgcctggtacccaatcccaatcagaaggactcagatggcaatggcgttggtgatgtgtgtgaggatgactttgacaatgatgctgtggtcgaccccctggatgtgtgtcctgaaagtgcagaggtaacgcttacggattttcgggcctatcagaccgtcgtcctggatcctgagggtgatgctcagattgacccaaactgggttgtgctcaaccagggcatggaaatcgttcagaccatgaacagtgaccctggcttggcagttggatacacggccttcaatggtgtggactttgaaggcaccttccatgtgaacacagtgactgatgatgactacgcaggctttctcttcagttatcaagacagtggccgcttctacgtagtcatgtggaagcagaccgagcagacctactggcaggctacacccttccgggcggttgcccagcccgggctgcagctcaaggcagtgacatcagtgtctggcccaggtgagcacctccgaaatgccctgtggcatactggccacacccctgatcaggtacgactcctgtggacagacccacgaaatgtgggctggcgggacaagacctcctatcgctggcagcttctgcaccggcctcaagttggctacattcgggtgaagctctatgagggaccccagcttgtggcggattctggggtgatcattgacacatccatgcgaggggggcgtcttggtgtattctgcttctcccaagaaaacataatttggtccaatctccagtatcgatgcaatgacacagtgcctgaggactttgagccattccggaggcagctgctccagggaagggtgtgaggaggaggccaccagattcagaattcagaattttagaccctttggccttggggtccatcctggagaccctgaggtctaagctacagcccctcagccaaccacagacccttctctggctcccaaaaggagttcagtcccagaggggtggtcaccccacccttcaggggatgagaagttttcaaggggtattactcaggcactaaccccaggttagatgacagcacattgccataaa

SEQ ID NO: 2227 - protein, 956 aa, Homo sapiens
METQELRGALALLLLCFFTSASQDLQVIDLLTVGESRQMVAVAEKIRTALLTAGDIYLLSTFRLPPKQGGVLFGLYSRQDNTRWLEASVVGKINKVLVRYQREDGKVHAVNLQQAGLADGRTHTVLLRLRGPSRPSPALHLYVDCKLGDQHAGLPALAPIPPAEVDGLEIRTGQKAYLRMQGFVESMKIILGGSMARVGALSECPFQGDESIHSAVTNALHSILGEQTKALVTQLTLFNQILVELRDDIRDQVKEMSLIRNTIMECQVCGFHEQRSHCSPNPCFRGVDCMEVYEYPGYRCGPCPPGLQGNGTHCSDINECAHADPCFPGSSCINTMPGFHCEACPRGYKGTQVSGVGIDYARASKQVCNDIDECNDGNNGGCDPNSICTNTVGSFKCGPCRLGFLGNQSQGCLPARTCHSPAHSPCHIHAHCLFERNGAVSCQCNVGWAGNGNVCGTDTDIDGYPDQALPCMDNNKHCKQDNCLLTPNSGQEDADNDGVGDQCDDDADGDGIKNVEDNCRLFPNKDQQNSDTDSFGDACDNCPNVPNNDQKDTDGNGEGDACDNDVDGDGIPNGLDNCPKVPNPLQTDRDEDGVGDACDSCPEMSNPTQTDADSDLVGDVCDTNEDSDGDGHQDTKDNCPQLPNSSQLDSDNDGLGDECDGDDDNDGIPDYVPPGPDNCRLVPNPNQKDSDGNGVGDVCEDDFDNDAVVDPLDVCPESAEVTLTDFRAYQTVVLDPEGDAQIDPNWVVLNQGMEIVQTMNSDPGLAVGYTAFNGVDFEGTFHVNTVTDDDYAGFLFSYQDSGRFYVVMWKQTEQTYWQATPFRAVAQPGLQLKAVTSVSGPGEHLRNALWHTGHTPDQVRLLWTDPRNVGWRDKTSYRWQLLHRPQVGYIRVKLYEGPQLVADSGVIIDTSMRGGRLGVFCFSQENIIWSNLQYRCNDTVPEDFEPFRRQLLQGRV

SEQ ID NO: 2228 - DNA, 592 bp, Homo sapiens
cgctagtcgcgggtccccgagtgagcacgccaggagcaggagaccaaacgacgggggtcggagtcagagtcgcagtgggagtccccggaccggagcacgagcctgagcgggagagcgccgctcgcacgcccgtcgccacccgcgtacccggcgcagccagagccaccagcgcagcgctgccatggagcccagcagcaagaagctgacgggtcgcctcatgctggccgtgggaggagcagtgcttggctccctgcagtttggctacaacactggagtcatcaatgccccccagaaggtgatcgaggagttctacaaccagacatgggtccaccgctatggggagagcatcctgcccaccacgctcaccacgctctggtccctctcagtggccatcttttctgttgggggcatgattggctccttctctgtgggccttttcgttaaccgctttggccggcggaattcaatgctgatgatgaacctgctggccttcgtgtccgccgtgctcatgggcttctcgaaactgggcaagtcctttgagatgctgatcctgggccgcttcatcatcggtgtgtactgcggcctgaccacg

SEQ ID NO: 2229 - DNA, 280 bp, Homo sapiens
tccccgagtttagggagtgaaatgtgcagattgtggtttgaatgttcataagcagtgtccaagatggtcccaaatgactgtaagccagacttgaagcatgtcaaaaaggtgtacagctgtgaccttacgacgctcgtgaaagcacataccactaagcggccaatggtggtagacatgtgcaacagggagattgagtctagaggtcttaattctgaaggactataccgagtatcaggatttagtgacctaattgaagatgtcaagatggctttcgacagag

SEQ ID NO: 2230 - DNA, 1515 bp, Homo sapiens
ttttttttttttttcatcaggtcagagccaaaggaaagcttgaaaaatgaagacattagcaggacttgttctgggacttgtcatcttggatgctgctgtgactgccccaactctagagtccatcaactatgactcagaaacctatgatgccaccttagaagacctggataatttgtacaactatgaaaacatacctgttgataaagttgagattgaaatagccacagtaatgccttcagggaacagagagctcctcactccacccccacagcctgagaaggcccaggaagaggaagaggaggaggaatctactcccaggctgattgatggctcttctccccaggagcctgaattcacaggggttctggggccacacacaaatgaagactttccaacctgtctttggtgtacttgtataagtaccaccgtgtactgtgatgaccatgaacttgatgctattcctccgctgccaaagaacaccgcttatttctattcccgctttaacagaattaaaaagatcaacaaaaatgactttgcaagcctaagtgatttaaaaaggattgatctgacatcaaatttaatatctgagattgatgaagatgcattccgaaaactgcctcaacttcgagagcttgtcctgcgtgacaacaaaataaggcagctcccagaattgccaaccacttcgacatttattgatattagcaacaatagacttggaaggaaagggataaagcaagaagcatttaaagacatgtatgatctccatcatctgtacctcactgataacaacttggaccacatccctctgccactcccagaaaatctacgagcccttcacctccagaataacaacattctggaaatgcacgaagatacgttctgcaatggtaaaaatttgacttatattcgtaaggcactagaggacattcgattggatggaaaccctattaatctcagcaaaactccacaagcatacatgtgtctacctcgtctgcctgttgggagccttgtctaatttcagataatggttagcattacgatggctactataaataaaccattcttactgctctcttccaaaacaaaactcagcatgatactttgagattgtgttctgagagatgatatgactacataaaatacaattaaaaatgttataatataatgaaaatgtagtaatttaagaaaacaccagatgagttaggaataaacctataacatttacaaaaagagcaaaactaagtgatagaaaatatttcacacatgttcttatagatcatgtatcacttgcaagttttaggagttcatatcctatatcatttcaaattaagtacataataaagtaaaattttgaaatgaacactttaggtatttttgccaagatttagatgtttttaattaaacttttctcttcctttttttttcactaaggcatgtttattcccctaatccattaaagagcatgaaaaaaagaataaatgtatttgaaaaaaaaaaaaaaaaaaaaaaaaaaaa

SEQ ID NO: 2231 - protein, 322 aa, Homo sapiens
MKTLAGLVLGLVILDAAVTAPTLESINYDSETYDATLEDLDNLYNYENIPVDKVEIEIATVMPSGNRELLTPPPQPEKAQEEEEEEESTPRLIDGSSPQEPEFTGVLGPHTNEDFPTCLWCTCISTTVYCDDHELDAIPPLPKNTAYFYSRFNRIKKINKNDFASLSDLKRIDLTSNLISEIDEDAFRKLPQLRELVLRDNKIRQLPELPTTSTFIDISNNRLGRKGIKQEAFKDMYDLHHLYLTDNNLDHIPLPLPENLRALHLQNNNILEMHEDTFCNGKNLTYIRKALEDIRLDGNPINLSKTPQAYMCLPRLPVGSLV

SEQ ID NO: 2232 - DNA, 612 bp, Homo sapiens
gcctactactactactactactactcattcacggccgctcgacttcttcaaaagaaaaactttaagaaaattcgccaatgggcttcattctcagtcatgcccggagatcacccaggagaaataatacaaacaccaccactgtccagagagagtaaagaagcagaaagagaaagaatttgcaaccatgaggaatgttcccacctcccgacggacgtgcatttggaaaacacagaatcagccctcagggtgcactccagccacctcagtgctctaagctcacagaagtgaaataatgtctgtgggttggcaatggctttgtgggatcatatgtcttggccaaagatgggaaaacctatgttgaagaggcagcccttgagtgttaatttgtcttctaaactgtgtaaggccccttcaagttcctcttgttggtttcaattatattaattatacaacaagtggatgtggtgaccatccacttgtgtttccctaatgatgggcagttgagcagggcactgaccagagctgggaaatttgtatctccaaggcggctctgtctctgaaataaatggcatccagtgcatgtgtgtatgcgacatgccctgcctgaacagg

SEQ ID NO: 2233 - DNA, 1314 bp, Homo sapiens
gagctccgggtacctggagaacatgaatctcccgggtgtactgtccccatgagggtcaccgaggaacctatggatcttccactcttcgcccagaatgtcttccctctatcccctccacctccccaaattccagcaccaggggccacctcagagccacaaatcctgaaaggaccacccaggtgactcgggcccacacacccctctttcggggtacacttggtggcaggctaggagcttttggcctcagctggtggtgccacacaccagattcgtcacagagacccattttttatcagtcccaggccagaagtacgaagactgatcttaacgatgtggcctgcctgggaggtaaggcggcaggcgttgcagaattgatgggaactgtggcacaggtgggaaacctggtttaacaaattcttcattgattcaggggaccactttccttgagccaagtcttggcaagcggccggcgaaactcacaggtccctttcctggctgcgtccccagcctccagccttccccgccccagagatgccccaggagcggcccctcggtgtaggtaacgggtgcccgggcggctccgtccgccgcctagagcctggaagccgccactgcggcccaggacaatccggctacgcggccggcgccgaccccgcacgctggagtccgctgccgcacggcgctggcagtcgggggtggtgtctgaagtcaggcgcttcctgccttttcgtcggcccgggtgcccggctcgcgccgccaggctctgggatcccaggtcgccccgcccagcagcccgcgccctgctcggtgcgctcagcgtccccgccccttaccccaaacccccaccctctgtgccctcaggggggcacccccatcggggcgggaggggggggtcagctgtgccccggtcgccgagtggcgaggaggtgacggtagccgccttcctatttccgcccggcgggcagcgctgcggggcgagtgccagcagagaggcgctcggtcctccctccgccctcccgcgccgggggcaggccctgcctagtctgcgtctttttcccccgcaccgcggcgccgctccgccactcgggcaccgcaggtagggcaggaggctggagagcctgctgcccgcccgcccgtaaaatggtcccctcggctggacagctcgccctgttcgctctgggtattgtgttggctgcgtgccaggccttggagaacagcacgtccccgctgagtgcagacccgcccgtggctgcagcagtggtgtcccattttaatgactgcccagattcccacactcagttctgcttccatgga

SEQ ID NO: 2234 - protein, 58 aa, Homo sapiens
MVPSAGQLALFALGIVLAACQALENSTSPLSADPPVAAAVVSHFNDCPDSHTQFCFHG

SEQ ID NO: 2235 - DNA, 2372 bp, Homo sapiens
gcaccgcgcgagcttggctgcttctggggcctgtgtggccctgtgtgtcggaaagatggagcaagaagccgagcccgaggggcggccgcgacccctctgaccgagatcctgctgctttcgcagccaggagcaccgtccctccccggattagtgcgtacgagcgcccagtgccctggcccggagagtggaatgatccccgaggcccagggcgtcgtgcttccgcagtagtcagtccccgtgaaggaaactggggagtcttgagggacccccgactccaagcgcgaaaaccccggatggtgaggagcaggcaaatgtgcaataccaacatgtctgtacctactgatggtgctgtaaccacctcacagattccagcttcggaacaagagaccctggttagaccaaagccattgcttttgaagttattaaagtctgttggtgcacaaaaagacacttatactatgaaagaggttcttttttatcttggccagtatattatgactaaacgattatatgatgagaagcaacaacatattgtatattgttcaaatgatcttctaggagatttgtttggcgtgccaagcttctctgtgaaagagcacaggaaaatatataccatgatctacaggaacttggtagtagtcaatcagcaggaatcatcggactcaggtacatctgtgagtgagaacaggtgtcaccttgaaggtgggagtgatcaaaaggaccttgtacaagagcttcaggaagagaaaccttcatcttcacatttggtttctagaccatctacctcatctagaaggagagcaattagtgagacagaagaaaattcagatgaattatctggtgaacgacaaagaaaacgccacaaatctgatagtatttccctttcctttgatgaaagcctggctctgtgtgtaataagggagatatgttgtgaaagaagcagtagcagtgaatctacagggacgccatcgaatccggatcttgatgctggtgtaagtgaacattcaggtgattggttggatcaggattcagtttcagatcagtttagtgtagaatttgaagttgaatctctcgactcagaagattatagccttagtgaagaaggacaagaactctcagatgaagatgatgaggtatatcaagttactgtgtatcaggcaggggagagtgatacagattcatttgaagaagatcctgaaatttccttagctgactattggaaatgcacttcatgcaatgaaatgaatcccccccttccatcacattgcaacagatgttgggcccttcgtgagaattggcttcctgaagataaagggaaagataaaggggaaatctctgagaaagccaaactggaaaactcaacacaagctgaagagggctttgatgttcctgattgtaaaaaaactatagtgaatgattccagagagtcatgtgttgaggaaaatgatgataaaattacacaagcttcacaatcacaagaaagtgaagactattctcagccatcaacttctagtagcattatttatagcagccaagaagatgtgaaagagtttgaaagggaagaaacccaagacaaagaagagagtgtggaatctagtttgccccttaatgccattgaaccttgtgtgatttgtcaaggtcgacctaaaaatggttgcattgtccatggcaaaacaggacatcttatggcctgctttacatgtgcaaagaagctaaagaaaaggaataagccctgcccagtatgtagacaaccaattcaaatgattgtgctaacttatttcccctagttgacctgtctataagagaattatatatttctaactatataaccctaggaatttagacaacctgaaatttattcacatatatcaaagtgagaaaatgcctcaattcacatagatttcttctctttagtataattgacctactttggtagtggaatagtgaatacttactataatttgacttgaatatgtagctcatcctttacaccaactcctaattttaaataatttctactctgtcttaaatgagaagtacttggttttttttttcttaaatatgtatatgacatttaaatgtaacttattattttttttgagaccgagtcttgctctgttacccaggctggagtgcagtgggtgatcttggctcactgcaagctctgccctccccgggttcgcaccattctcctgcctcagcctcccaattagcttggcctacagtcatctgccaccacacctggctaattttttgtacttttagtagagacagggtttcaccgtgttagccaggatggtctcgatctcctgacctcgtgatccgcccacctcggcctcccaaagtgctgggattacaggcatgagccaccg

SEQ ID NO: 2236 - protein, 491 aa, Homo sapiens
MCNTNMSVPTDGAVTTSQIPASEQETLVRPKPLLLKLLKSVGAQKDTYTMKEVLFYLGQYIMTKRLYDEKQQHIVYCSNDLLGDLFGVPSFSVKEHRKIYTMIYRNLVVVNQQESSDSGTSVSENRCHLEGGSDQKDLVQELQEEKPSSSHLVSRPSTSSRRRAISETEENSDELSGERQRKRHKSDSISLSFDESLALCVIREICCERSSSSESTGTPSNPDLDAGVSEHSGDWLDQDSVSDQFSVEFEVESLDSEDYSLSEEGQELSDEDDEVYQVTVYQAGESDTDSFEEDPEISLADYWKCTSCNEMNPPLPSHCNRCWALRENWLPEDKGKDKGEISEKAKLENSTQAEEGFDVPDCKKTIVNDSRESCVEENDDKITQASQSQESEDYSQPSTSSSIIYSSQEDVKEFEREETQDKEESVESSLPLNAIEPCVICQGRPKNGCIVHGKTGHLMACFTCAKKLKKRNKPCPVCRQPIQMIVLTYFP

SEQ ID NO: 2237 - DNA, 292 bp, Homo sapiens
tgaaaatggactaatgcacctgtactatccttttggggtttatttctccttctttcctcatttccattggatgactaaagtttcttctgctggcttaaaaattacttcttttgttgttcctcttgtgcagttctgctgaacataataaccaagtgtgtatttatttaaatctattgatttgttgaacgtatcactacctgtatcttccctctaacaaaacactttcacatattctcatatccctttgtttttatagaccactcctctccttcatcatttttgtattttggcc

SEQ ID NO: 2238 - DNA, 1502 bp, Homo sapiens
cctgcgtccccgccccgcgcagccgccgcgctcctgcgctccgaggtccgaggttcccgagatgaaggtctggctgctgcttggtcttctgctggtgcacgaagcgctggaggatgttactggccaacaccttcccaagaacaagcgtccaaaagaaccaggagagaatagaatcaaacctaccaacaagaaggtgaagcccaaaattcctaaaatgaaggacagggactcagccaattcagcaccaaagacgcagtctatcatgatgcaagtgctggataaaggtcgcttccagaaacccgccgctaccctgagtctgctggcggggcaaactgtagagcttcgatgtaaagggagtagaattgggtggagctaccctgcgtatctggacacctttaaggattctcgcctcagcgtcaagcagaatgagcgctacggccagttgactctggtcaactccacctcggcagacacaggtgaattcagctgctgggtgcagctctgcagcggctacatctgcaggaaggacgaggccaaaacgggctccacctacatcttttttacagagaaaggagaactctttgtaccttctcccagctacttcgatgttgtctacttgaacccggacagacaggctgtggttccttgtcgggtgaccgtgctgtcggccaaagtcacgctccacagggaattcccagccaaggagatcccagccaatggaacggacattgtttatgacatgaagcggggctttgtgtatctgcaacctcattccgagcaccagggtgtggtttactgcagggcggaggccgggggcagatctcagatctccgtcaagtaccagctgctctacgtggcggttcccagtggccctccctcaacaaccatcttggcttcttcaaacaaagtgaaaagtggggacgacatcagtgtgctctgcactgtcctgggggagcccgatgtggaggtggagttcacctggatcttcccagggcagaaggatgaaaggcctgtgacgatccaagacacttggaggttgatccacagaggactgggacacaccacgagaatctcccagagtgtcattacagtggaagacttcgagacgattgatgcaggatattacatttgcactgctcagaatcttcaaggacagaccacagtagctaccactgttgagttttcctgacttggaaaaggaaatgtaatgaacttatggaaagcccatttgtgtacacagtcagctttggggttccttttattagtgctttgccagaggctgatgtcaagcaccacaccccaaccccagcgtctcgtgagtccgacccagacatccaaactaaaaggaagtcatccagtctattcacagaagtgttaacttttctaacagaaagcatgattttgattgcttacctacatacgtgttcctagtttttatacatgtgtaaacaattttatataatcaatcatttctattaaatgagcacgtttttgtaaaaaat

SEQ ID NO: 2239 - protein, 375 aa, Homo sapiens
MKVWLLLGLLLVHEALEDVTGQHLPKNKRPKEPGENRIKPTNKKVKPKIPKMKDRDSANSAPKTQSIMMQVLDKGRFQKPAATLSLLAGQTVELRCKGSRIGWSYPAYLDTFKDSRLSVKQNERYGQLTLVNSTSADTGEFSCWVQLCSGYICRKDEAKTGSTYIFFTEKGELFVPSPSYFDVVYLNPDRQAVVPCRVTVLSAKVTLHREFPAKEIPANGTDIVYDMKRGFVYLQPHSEHQGVVYCRAEAGGRSQISVKYQLLYVAVPSGPPSTTILASSNKVKSGDDISVLCTVLGEPDVEVEFTWIFPGQKDERPVTIQDTWRLIHRGLGHTTRISQSVITVEDFETIDAGYYICTAQNLQGQTTVATTVEFS

SEQ ID NO: 2240 - DNA, 552 bp, Homo sapiens
gagaggggtatacacagggaggccaggcagcctggagttagtcgaccgttgcgagacgttgagctgcggcagatgagtccaaagccgagagcctcgggacctccggccaaggccaaggagacaggaaagaggaagtcctcctctcagccgagccccagtggcccgaagaagaagactaccaaggtggccgagaagggagaagcagttcgtggagggagacgcgggaagaaaggggctgcgacaaagatggcggccgtgacggcacctgaggcggagagcgggccagcggcacccggccccagcgaccagcccagccaggagctccctcagcacgagctgccgccggaggagccagtgagcgaggggacccagcacgaccccctgagtcaggagagcgagctggaggaaccactgagtaaggggcgcccatctactcccctatctccctgagcagcaactaagtttaggcccagctgccagacctcagagatctcaccagcagggtgcttcccatgttgatgacaataaaatgaatgtgttgcaaaaaaaaaa

SEQ ID NO: 2241 - protein, 125 aa, Homo sapiens
MSPKPRASGPPAKAKETGKRKSSSQPSPSGPKKKTTKVAEKGEAVRGGRRGKKGAATKMAAVTAPEAESGPAAPGPSDQPSQELPQHELPPEEPVSEGTQHDPLSQESELEEPLSKGRPSTPLSP

SEQ ID NO: 2242 - DNA, 498 bp, Homo sapiens
agaatgaaactgcaaatttattagaaagtataaaaaaaaaaaaaaaaaaccaagcctaaccaaaacacaaaaagcaacgacacacaacctttccagtttacattaactttgagcgtcacacactattaaccacttagttgcattttttaaaaatgtcaatttcaaggtagagggagctgagtcaggtaataggccagtcatcacagtgtaactaatttaatgctaaaataaaacacggatctcatttgagaaaaaaagagatgagactattttctggttggcgtagatttaggcaatgtataaaaaagcttcctggttggaatgagttaaaaaatattgctggccactaatgtgccatcttgagttggaaaaaaaaccccctccccccaaaaaaaaccctgccgctttggtgtcctatttatatatttttaaaaacattcattaaaaaaatcaaatctataataaaaatgtccctgtttgttttaaaaaagcattagt

SEQ ID NO: 2243 - DNA, 1839 bp, Homo sapiens
gaattcgcgctcaactcagctcactgagagtctctcccgccagctgtggaaagaactttgcgtctctccagcaatgcatctccttgcgattctgttttgtgctctctggtctgcagtgttggccgagaactcggatgattatgatctcatgtatgtgaatttggacaacgaaatagacaatggactccatcccactgaggaccccacgccgtgcgactgcggtcaggagcactcggaatgggacaagctcttcatcatgctggagaactcgcagatgagagagcgcatgctgctgcaagccacggacgacgtcctgcggggcgagctgcagaggctgcgggaggagctgggccggctcgcggaaagcctggcgaggccgtgcgcgccgggggctcccgcagaggccaggctgaccagtgctctggacgagctgctgcaggcgacccgcgacgcgggccgcaggctggcgcgtatggagggcgcggaggcgcagcgcccagaggaggcggggcgcgccctggccgcggtgctagaggagctgcggcagacgcgagccgacctgcacgcggtgcagggctgggctgcccggagctggctgccggcaggttgtgaaacagctattttattcccaatgcgttccaagaagatttttggaagcgtgcatccagtgagacctttgaggcttgagtcttttagtgcctgcatttgggtcaaagccacagatgtattaaacaaaaccatcctgttttcctatggcacaaagaggaatccatatgaaatccagctgtatctcagctaccaatccatagtgtttgtggtgggtggagaggagaacaaactggttgctgaagccatggtttccctgggaaggtggacccacctgtgcggcacctggaattcagaggaagggctcacatccttgtgggtaaatggtgaactggcggctaccactgttgagatggccacaggtcacattgttcctgagggaggaatcctgcagattggccaagaaaagaatggctgctgtgtgggtggtggctttgatgaaacattagccttctctgggagactcacaggcttcaatatctgggatagtgttcttagcaatgaagagataagagagaccggaggagcagagtcttgtcacatccgggggaatattgttgggtggggagtcacagagatccagccacatggaggagctcagtatgtttcataaatgttgtgaaactccacttgaagccaaagaaagaaactcacacttaaaacacatgccagttgggaaggtctgaaaactcagtgcataataggaacacttgagactaatgaaagagagagttgagaccaatctttatttgtactggccaaatactgaataaacagttgaaggaaagacattggaaaaagcttttgaggataatgttactagactttatgccatggtgctttcagtttaatgctgtgtctctgtcagataaactctcaaataattaaaaaggactgtattgttgaacagagggacaattgttttacttttctttggttaattttgttttggccagagatgaattttacattggaagaataacaaaataagatttgttgtccattgttcattgttattggtatgtaccttattacaaaaaaaatgatgaaaacatatttatactacaaggtgacttaacaactataaatgtagtttatgtgttataatcgaatgtcacgtttttgagaagatagtcatataagttatattgcaaaagggatttgtattaatttaagactatttttgtaaagctctactgtaaataaaatattttataaaactaaacggaattc

SEQ ID NO: 2244 - protein, 381 aa, Homo sapiens [sequence omitted]

SEQ ID NO: 2245 - DNA, 177 bp, Homo sapiens
cgtcgtgctttttttttttttttttccgggggagtttgaatatttgtttcttttcacactggccttaaagaggatatattagaagttgaagtaggaagggagccagagaggccgatggcgcaaaggtacgacgatctaccccattacgggggcatggatggagtggcatcccctcca

SEQ ID NO: 2246 - DNA, 884 bp, Homo sapiens
aactaggctaggtcgaggcctggtgtttaatcggccgaggcgaggcggctctggtgcgatcaggcgcacaaggctgggagagcgccccggggccctgctatccgcgccggaggttggaagagggtgggttgccgccgccgagggcgagagcgccagaggagcgggaagaaggagcgctcgcccgcccgcctgcctcctcgctgcctccccggcgttggctctctggactcctaggcttgctggctgctcctcccacccgcgcccgcctcctcactcgccttttcgttcgccggggctgctttccaagccctgcggtgcgcccgggcgagtgcggggcgaggggcccggggccagcaccgagcagggggcgggggtccgggcagagcgcggcggcggggaggggccatgtctggcgcgggcgcagcggggccgtctgcagcaagtgaccgagcggctgcggacggccgcctgccccctctgccacctgggggcggtgcgggcccggagcccggagcccgggtagcgcgtagagccggcgcgatgcacgtgcgctcactgcgagctgcggcgccgcacagcttcgtggcgctctgggcacccctgttcctgctgcgctccgcctggcgacttcagcctggacaacgaggtgcactcgagcttcaatccacgcggcgcctccgcaagccaggagcgggcgggagatgcagcggagatcctctccatatgttgggtcttgcccccaacgccgcgcccgacctccagggcaagcacaactcggacccatgttcatgctggacctgtacaaacgccactggcgggtggatgagggccgggggccggcggcagggggtttcctcctaaccctaaaaggcggttccaggacc

SEQ ID NO: 2247 - DNA, 1335 bp, Homo sapiens
atgcgcagcacgcgccgcgcagccatggggaggctgctggccttagtggtcggcgcggcactggtgtcctcagcctgcgggggctgcgtggaggtggactcggagaccgaggccgtgtatgggatgaccttcaaaattctttgcatctcctgcaagcgccgcagcgagaccaacgctgagaccttcaccgagtggaccttccgccagaagggcactgaggagtttgtcaagatcctgcgctatgagaatgaggtgttgcagctggaggaggatgagcgcttcgagggccgcgtggtgtggaatggcagccggggcaccaaagacctgcaggatctgtctatcttcatcaccaatgtcacctacaaccactcgggcgactacgagtgccacgtctaccgcctgctcttcttcgaaaactacgagcacaacaccagcgtcgtcaagaagatccacattgaggtagtggacaaagccaacagagacatggcatccatcgtgtctgagatcatgatgtatgtgctcattgtggtgttgaccatatggctcgtggcagagatgatttactgctacaagaagatcgctgccgccacggagactgctgcacaggagaatgcctcggaatacctggccatcacctctgaaagcaaagagaactgcacgggcgtccaggtggccgaatagccctggccctgggccccgcctcaaggaagagccagccgtaatggggactctccaggcaccgcctgcccccagcgtgggggtggccactcctgggccccagaaagcctcagagtccctgccgacggagccactggggtgggagggggcagggggcttggctcgcacccccactttcgcctcctccagctcctgccccgccggccgcgcaccgccatgcatgatgggtaaagcaatactgccgctgcccccaccctgcttctgctgcctgtttggggaggggggcggtgaggtgggcagcggccccgcacccctcctccttgctcatttgcacacattggccgcttcagacacgcacttctggggccagcccctccccgcctcctccctgcctggcggcaggggtcgcgatgatgggctggagcagtttggggcagggggttctgggacccactccgactccccctccccggcatcatttcccctcccgcttctccggctgacctggggtcccccctccctgtaatgcactcctgccccggcccaacctcgccctctctcaccagccttgaactgtggccacctagaaaggggcccattcagcctcgtctctttacagaagtagttttgttcatgaaataaagactcttggacttg

SEQ ID NO: 2248 - protein, 218 aa, Homo sapiens
MGRLLALVVGAALVSSACGGCVEVDSETEAVYGMTFKILCISCKRRSETNAETFTEWTFRQKGTEEFVKILRYENEVLQLEEDERFEGRVVWNGSRGTKDLQDLSIFITNVTYNHSGDYECHVYRLLFFENYEHNTSVVKKIHIEVVDKANRDMASIVSEIMMYVLIVVLTIWLVAEMIYCYKKIAAATETAAQENASEYLAITSESKENCTGVQVAE

SEQ ID NO: 2249 - DNA, 17418 bp, Homo sapiens
  misc_feature (873)..(873): n is a, c, g, or t
  misc_feature (2117)..(2117): n is a, c, g, or t
  misc_feature (4230)..(4230): n is a, c, g, or t
  misc_feature (4317)..(4317): n is a, c, g, or t
  misc_feature (4981)..(4981): n is a, c, g, or t
  misc_feature (5129)..(5129): n is a, c, g, or t
  misc_feature (5668)..(5668): n is a, c, g, or t
  misc_feature (5864)..(5864): n is a, c, g, or t
  misc_feature (5867)..(5867): n is a, c, g, or t
  misc_feature (5893)..(5893): n is a, c, g, or t
  misc_feature (5904)..(5904): n is a, c, g, or t
  misc_feature (5925)..(5925): n is a, c, g, or t
  misc_feature (5977)..(5977): n is a, c, g, or t
  misc_feature (6085)..(6085): n is a, c, g, or t
  misc_feature (6094)..(6094): n is a, c, g, or t
  misc_feature (6124)..(6124): n is a, c, g, or t
  misc_feature (6413)..(6413): n is a, c, g, or t
  misc_feature (6713)..(6713): n is a, c, g, or t
  misc_feature (6729)..(6729): n is a, c, g, or t
  misc_feature (7591)..(7591): n is a, c, g, or t
  misc_feature (7912)..(7912): n is a, c, g, or t
  misc_feature (7994)..(7994): n is a, c, g, or t
  misc_feature (8248)..(8248): n is a, c, g, or t
  misc_feature (8253)..(8253): n is a, c, g, or t
  misc_feature (8257)..(8257): n is a, c, g, or t
  misc_feature (8276)..(8276): n is a, c, g, or t
  misc_feature (8690)..(8690): n is a, c, g, or t
  misc_feature (9035)..(9035): n is a, c, g, or t
  misc_feature (9071)..(9071): n is a, c, g, or t
  misc_feature (9077)..(9077): n is a, c, g, or t
  misc_feature (9097)..(9097): n is a, c, g, or t
  misc_feature (9200)..(9200): n is a, c, g, or t
  misc_feature (9205)..(9205): n is a, c, g, or t
  misc_feature (9266)..(9266): n is a, c, g, or t
  misc_feature (9272)..(9272): n is a, c, g, or t
  misc_feature (9572)..(9572): n is a, c, g, or t
  misc_feature (9592)..(9592): n is a, c, g, or t
  misc_feature (10126)..(10126): n is a, c, g, or t
  misc_feature (11147)..(11147): n is a, c, g, or t
  misc_feature (11159)..(11159): n is a, c, g, or t
  misc_feature (12393)..(12393): n is a, c, g, or t
  misc_feature (12620)..(12620): n is a, c, g, or t
  misc_feature (12627)..(12627): n is a, c, g, or t
  misc_feature (12823)..(12823): n is a, c, g, or t
  misc_feature (12867)..(12867): n is a, c, g, or t
  misc_feature (13047)..(13047): n is a, c, g, or t
  misc_feature (14391)..(14391): n is a, c, g, or t
  misc_feature (14490)..(14490): n is a, c, g, or t
  misc_feature (14510)..(14510): n is a, c, g, or t
  misc_feature (14538)..(14538): n is a, c, g, or t
  misc_feature (14620)..(14620): n is a, c, g, or t
  misc_feature (15921)..(15921): n is a, c, g, or t
  misc_feature (15966)..(15966): n is a, c, g, or t
  misc_feature (16158)..(16158): n is a, c, g, or t
  misc_feature (16923)..(16923): n is a, c, g, or t
  misc_feature (16959)..(16959): n is a, c, g, or t
  misc_feature (17033)..(17033): n is a, c, g, or t
  misc_feature (17043)..(17043): n is a, c, g, or t
  misc_feature (17126)..(17126): n is a, c, g, or t
ggtcaacggwtcagaatcgtccagctgggcttcgacttggatgcccatggaattatcttcactgaggactacaggaccagagtatgtgactgtgtgcktcaggggtgctggggggagggcacaggttgggggagacagggaacttgggaaacagaaataaaaacaaaagaaagawtttccctgcccccacatcccatggagagggcacagggccctggtaaatagtaatatgagggagagagacaggagggaaagagggaggagtgagagggtaaagagggggggagaggagggggaggaggaggaaggaaggagggggaggaggagggggggaggaagagggggaggaggatgaagaggaggaggaagaagaagggtatgagaggtggaaggatctgagcaagaggtaagacaggaagagaaatsctttcctgggggtggaggttggtagagagtgagggtggggatggaccatgtctctcatctctgcttgtaggtcctcaaggcctktgatggccgaccgtatkctggggcagtgcagaaatttctagcttcagtacttccagcctgtggggaccttagtttccagcaggaccaaatgacacagacctttggcttcagggactcagaaatcacgtgagacttgtggaaccaaccaaagtcaggcatctggtgcttccctgcctccctccagttccatccagcctgtcctcctgtttttttggtgaacctgccagaaaagctgccaaaaagctgactcttcttgttaataaaatgacccaagtttgtattcctccccacaagagaggaggcctatcttacctgggccttagaaagagccctgaaatagaattcagttcttggtggcttatnaaaagcacacaggggcctggcaggaagtgtaaaagcttgatgttaatcatactgggactaagaggatagagaatggtaggagctgggatacccctaaacattcacattaaaacaaaaaaaacccaaagctaaaaaacaactgggcaggagctaaataaaaatctaattttgagaggctgtatctggctcaggcctcctactttgtaacccatggaatatgtgaaagcatttgaaaaactatagcactgatctcacatgggcagacacactctcagagagatgtggtgggagccatggcgcagtctgcctaggcagtggcaggagcgcagaagactctgattcctctcctcggtcctaagaccgaatgtgtgtcaggacatgtggtcagggaagagaagctatttaactgaaccagtaatagtagcaggaaaagaaaaagtggagggagggcagtcaaggtagggggcctggaacaagcaactgcaccaacagaggcagttggtgcgagcacagaaccaccccaggctgggattttgttatccagtctctcttgcatggttgcccgtgtttctggagacttgtgtaaacattaatggatgaggaggagagatggttctcagagcccagccctcatctctsctggcttcccactgccctcaggcatctggtgaatgctggagtcctcaccgtccgagatgctgggagctggtggctagctgtgcctggagctgggagattcatcaagtactttgttaaaggtatcccatctgcagctcaagcctgcagcccctcaccttttggtggctcctcaggcctctaggccttattcacctttcccctttcctgtgccacttctcctctagggcgccaggctgtccttagcatggtccggaaggcaaagtaccgggaactgctcctatcagagctcctgggccggcgggcgcctgtcgtggtgcggcttggcctcacctaccatgtgcacgacctcattggggcccagctagtggactggtgagtctttccctggcctctggcagattatggagcaatgacccaaagtgggatttcctcccagctcatgcttagtttcctagtgaaggccagtggctctcattcttctctggaacccgggagcaccccttcccaagttctaagttctcctcacagcttgagcctaggcgtctggctccagccttgtctttctcctgcacagcatctctaccacttcaggaaccctcctccgnctgccagagacatgaagattctgctcatcattgctcagctcctcagagtgggccgggaggggactagaagagctgcatgatggtggctgagacagggtcaccttgggaaggcttgggagccaggatgagtgtcgggctctcgtgtgtgcaaaaggtcagatgtgactgctgctgtttgcctggtttctgacccagtggtggggtttgagcaatgcttctctgcccttccatggaaagtggaaccagaaatggtgccaaggctgtggctgttccctttcgtgtaaaatggtgctgttattactctgtcttgaaataggaaggtgggatttctggggaggctggtgaaggagggcagggttcttttctctacgtgtcatgttaaaattgccaaataaagtacctctgcctgtgatattttctggatgtcctttatttactgtgacgtgtgtttgggtgccttgtttaggggtagaggtgaagtctgagctttgcctcattcagagaggaaaggggtcaggggttcactctgacgttcaggccattctccctgtggagtggtgagggtgtacctaatctcctaaaccacggaatttctgttagggcctaaaaaagcaaaagcctagtatagttcaatttgtgttggaatgaaagtaagagacaagtgtcttagaagcctgtcattgttttgtgagggcctttaaatatcctgtactcgtgggccatgttgggcccttgtacgcccaggtatacatgagcttgtgtgcacctataccctgatacagatatacctggtagggggaggtgctcaggcactggaatgagaggagttaacggggaaggacagggttatttctgggccaagattcaragtttcccatggacacccaggtgtccggggtgcccccacaactctgggcctgaggccagttgcacttcttggctgtcacgtggtttcccagcttagctgggctgggggaggagcaaggtccagagtcaactctgccccgaggcctagcttggccagaaggtagcagacagacagacggatctaacctctcttggatcctccagccatgaggctgctctgggggctgatctgggcatccagcttcttcaccttatctctgcagaagcccaggtcctggaggcgggatgctgggtgcttggattggggcagggctggcatcgggacccgattcaggagtgagggagagcaggggtggaggtgtcagagcgaagtctgactgctgawcctgtctgttctccccaggttgctcttgttctctccttctgtggttcatctgggggtccccctatcggtgggggtgcagctccaggatgtgccccgaggacaggtagtgaaaggatcagtgttcctgagaaacccatctcgtaataatgtcccctgctccccaaaggtggacttcacccttagctcagaaagagacttcgcactcctcagtctccaggtaaccagaccccatgccctcctgctgcttgtgggggcctcctgccctgttcccatctgtcttgtaagtgtcatcatcttcccactggcctcctcccctcctgtcttcccaccctggcattctccttccacgtttctcccttggtctctgtcctttttggtcagctgtctcttgctctgtgacccgctccctctccctctccctctcctgacaggtgcccttgaaagatgcgaagagctgtggcctccatcaactcctcagaggccctgaggtccagctggtggcccattcgccatggctaaaggactctctgtccagaacgacaaacatccagggtatcaacctgctcttctcctctcgccgggggcacctctttttgcagacggaccagcccatttacaaccctggccagcggggtgagtctcagccccagggcctcaacctttaaccccctccgagccctctcaggatgagtttggtgccccctaagtgagataacctgaaagaaagtgccacacagaaggggtgcttaggaaacatttgtcccctgctccctctgtggagtttgacccaccctccccttgcacatggacccctgctcacctctctcctcctccactcccagttcggtaccgggtctttgntctggatcagaagatgcgcccgagcactgacaccatcacagtcatggtggaggtgagtccccgamctctggacttcctgatcctggncactgatgtgacctcctgcctgtgagcacttctccccttgcagaactctcacggcctccgcgtgcggaagaaggaggtgtacatgccctcgtccatcttccaggatgactttgtgatcccagacatctcagagtgagcgctcccaatgtgggggctgcccccaagctacaccaccccaattcctgttaggctctccacctcccacacagaggcacgtccccagatgccctgaccctcagcctcctgagcctctggttaacccccacagtcctcttcccagggaagcaggctgctggctctccgtgccccactgtacagatgggctgagccccttccttgtccattctcaggccagggacctggaagatctcagcccgattctcagatggcctggaatccaacagcagcacccagtttgaggtgaaraaatatggtgagagctggaaactggagggacaggcagctgctttcctgaaggaaataagggtggaaggagaggtactgggagcagctcagggcagggagatatgggtgccacagccctgagcagaggggagtctttgagctggagtctgacctgcctatcccttcaccctgggtcagtccttcccaactttgaggtgaagatcacccctggaaagccctacatcctgacggtgccagnccatcttgatgaaatgcagttagacatccaggccaggtaatacctccctccccacctctgcccaccagcaccgggtcctgctccctactcagtatgaatgggctcctgcttccctgccctcgggccattattccccccagcccttggnccaccctcttctctctgccacgacaggtacatctatgggaagccagtgcagggggtggcatatgtgcgctttgggctcctagatgaggatggtaagaagactttctttcgggggctggagagtcagaccaaggtaggaaggagaataggggctggggaggggaaggggcaagggaggtgaggtgggagactcagtctcaccctatgtcctgtttctttctatgccccagctggtgaatggacagagccacatttccctctcaaaggcagagttccaggacgccctggagaagctgaatatgggcattactgacctccaggggctgcgcctctacgttgctgcagccatcattgagtctccaggtgggtgactttcccttattgtaaccccagacccttgcctctgacctctgagctaaccctctgtcctccggcaccaacaccaccccacttctcacatctcatctcagactcaaaaccaggaaacacccaggagacctggtttctctccaactctgtctctgtgactcggcccttttnccctggctgagtttatttatttctttgctcgttctgctcattccttcactcctccagtggacatgtgttgttcaatgccctgtgctgggcctcagcatgtacagacaggaatacagcagcctgcgccctgggagctcactgtcttgtgggagggaaccactcaagccactccctacttgtcctcctgtccctctcntcntgggctctgtcccccacctctctctncctttgtcttncaggtggggagatggaggagncagagctcacatcctggtattttgtgtcatctcccttctccttggatcttancaagaccaagcgacaccttgtgcctggggcccccttcctgctgcaggtttcttccagaggggaaggatgagtagggaggatgtggtagttaggagggctcagggtctnaccactctnttttgcctgacctcctttacctgactaggncttggtccgtgagatgtcaggctccccagcttctggcattcctgtcaaagtttctgccacggtgtcttctcctgggtctgttcctgaagtccaggacattcagcaaaacacagacgggagcggccaagtcagcattccaataattatccctcagaccatctcagagctgcagctctcagtaggactcctcggacccctgggagatggtgggggaaggggaggagggtgagctggggtcccaaggatccatggcctgacttggggggaaggtggggtacttggmtctganctactaccctattcgcacctgaccccctctccaggtatctgcaggctccccacatccagcgatagccaggctcactgtggcagccccaccttcaggaggccccgggtttctgtctattgagcggccggattctcgacctcctcgtgttggggacactctgaacctgaacttgcgagccgtgggcagtggggccaccttttctcattactactacatggtgtgcatgagctggggagtcacggagggctggggtgcagggaagagccctctgggtggggctgggggggttcaaggctgagnctgtcccatgaagagncaaccactcttgtccctcccattcttggcccagatcctatcccgagggcagatcktgttcatgaatcgagagcccaagaggaccctgacctcggtctcggtgtttgtggaccatcacctggcaccctccttctactttgtggccttctactaccatggagaccacccagtggccaactccctgcgagtggatgtccaggctggggcctgcgagggcaaggtgaccggggtcaggagagatggcacttgtgccgagggggttgaggacagggtgattgccaacagggcatggatttagcttgggggcagtgaggataccgggactgaaggaagctctcccactctgaccgcccccacctgccgcccctgccagctggagctcagcgtggacggtgccaagcagtaccggaacggggagtccgtgaagctccacttagaaaccgactccctagccctggtggcgctgggagccttggacacagctctgtatgctgcaggcagcaagtcccacaagcccctcaacatgggcaaggtttgtccagaccctctccacagctctctcacccctccatggctcatccccctgcttccctgagccttgggcgcagcccctggatcccactgaggctccccacagtctcttccccacttggccctgtggtctccatctcctggctctgtatcctttcctatccccccatgtgctgccctctcacctgtgccgagtgctcagtcctgcccctcagccacacttggctcctagcattcctgcctttcttgcaggtctttgaagctatgaacagctatgacctcggctgtggtcctgggggtggggacagtgcccttcaggtgttccaggcagngggcctggscttttctgatggagaccagtggaccttatccagaaagagtgagaacagagaaggaaggggagtgggtggcgggaagataaggaaggaggaagggcctgaggggaccagctggaagagtccgggcaggaagggctgggcaggggaaggggaggaggggaggaggccgagtgcctgacggctggactgcagcctttctctctaccaggactaagctgtcccaaggagaagacaacccggaaaaagagaaacgtgaacttccaaaaggcgattaatgagaaatgtgagttgcgggtgcctaggcagtagcttggnctctccacctgggatccgggttgggggtcttcctctctgcccctcggctccttkytgaacccacgtgttcttatgttgctgntctcaaggggtcggggcgggggctgaggtgtatgtcctttttgtcctctcatgctcacccccacctggccctgcagtgggtcagtatgcttccccgacagccaagcgctgctgccaggatggggtgacacgtctgcccatgatgcgttcctgcgagcagcgggcagcccgcgtgcagcagccggactgccgggagcccttcctgtcctgctgccaatttgctgagagtctgcgcaagaagagcagggacaaggnccagncggncctccaacgaggtgagggnctgggtggggctagggcacaggtggcggcgcttggaaaggcagaacggtcccctcctcactcccgtccaccgtggtcccccagccctggagatcctgcaggaggaggacctgattgatgaggatgacattcccgtgcgcagcttcttcccagagaactggctctggagagtggaaacagtggaccgctttcaaatgtgagagtgtgtgccggcccggccttttctctgtgctgtgtctcggggccagccggggtagacgggccttctctgcctttccctacacagattgacactgtggctccccgactctctgaccacgtgggagatccatggcctgagcctgtccaaaaccaaaggtgatgtcaccctgtctgggcctcaggtgaccctswttccatttccctgtaccccagntccctgtyccctttgctcttagtgtaggaagagggtccagtgatctggggaggtctgtgtcagcgtgcagatggcgtgggccagagggcagaggcggactgagacagagctgggyacccccacccctccctcctgtggccctgaagctttgatggcccctctgatctctgcccctgtgcccacgcttcctttccctcaggcctatgtgtggccaccccagttcagctccgggtgttccgcgagttccacctgcacctccgcctgcccatgtctgtccgccgctttgagcagctggagctgcggcctgtcctctataactacctggataaaaacctgactgtgagnccccatgggagcctgagcatacaggagttggggganccaggncccagtgaggggtggggagnctaaccgggccaggactctggccatcctcgttttcctgccctcaggtgagcgtccacgtgtccccagtggaggggctgtgcctggctgggggcggaggtctgncccancaggtgctggtgcctgcgggctctgcccggcctgttgccttctctgtggtgcccacggcanccaccnctgtgtctctgaaggtggtggctcgagggtccttcgaattccctgtgggagatgcggtgtccaaggttctgcagattgaggtgaatggagcacccctgaatataagtccccgggcccccagctttgtcctccaccctcagcactctctctgctggccaggccaggggcccaacacccaaaccaatgccttggtctgttcccatcttctacaattctgatccaactctgtccctggagttgaaactcaaagttctgggggagtctgtgctagcagggcaggctgtagtcctgtgtgacctnacaaccatgttttccctganacagaaggaaggggccatccatagagaggagctggtctatgaactcaaccccttgggtgagtgaccctctacctccagccattggtttcctaagtgggtacaggtggtgggggatgtggacagcaggacaggctgccaacttcccccatttccccagaccaccgaggccggaccttggaaatacctggcaactctgatcccaatatgatccctgatggggactttaacagctacgtcaggttacaggtgggagtgcccttgtagtcccttcccagtggccaccttcggattcatgtgggacctgtggatccctgcttggtcccactccccgtgagcctctgacacagagtcctcagacctccaccctctccctcccatgtagcctmagatccattggacactttaggctctgagggggccttgtcaccaggaggcgtgscctccctcttgaggcttcctcgagkctgtggggagcaaaccatgatctacttggctccgacactggctgcttcccgctacctggacaagacagancagtggagcacacttcctcccgagaccaaggaccacgccgtggatctgatccagaaaggttctgggtgcaagggcaagcaggaggggggccaggaaaggacagttactggaagatggacagcccaggaggctacagagggaaaraaagggggcccctgatgaggatggggagcatggccttgggctcaaacagcagaagggtgagtgtcacctgagcggccacctctcctctccaaggctacatgcggatccagcagtttcggaaggcggatggttcctatgcggcttggttgtcacggggcagcagcacctggtgagcttgggagagtggttccagggttctgagggggtcagggctggggcaggggtgggacagagctggtatgatgggagggtggataaccaggcacctgggggcgtgggcataatgagaagcaagtccttatccccaaccctcctttcctgccctccaggctcacagcctttgtgttgaaggtcctgagtttggcccaggagcaggtaggaggctcgcctgagaaactgcaggagacatctaactggcttctgtcccagcagcaggctgacggctcgttccaggacctctctccagtgatacataggagcatgcaggtgcgggcatgctggggctggcccgagaagcgcctgtcggaggactctctttgccccttccccctcctgtttgacatcttttctccccttactaggggggtttggtgggcaatgatgagactgtggcactcacagcctttgtgaccatcgcccttcatcatgggctggccgtcttccaggatgagggtgcagagccattgaagcagagagtggtaagttcagtggcgtttctgccctctgctggcccccagctctctccctttttcctcaggaacccaggggtccaggcccaagaccctcctcccgttttcttccaggaagcctccatctcaaaggcaagctcatttttgggggagaaagcaagtgctgggctcctgggtgcccacgcagntgccatcacggnctatgccctgacactgaccaaggcccctgcggacctgcggggtgttgcccacaacaacctcatggcaatggcccaggagactggaggtgaggggtgaggggctctggcagtgagcctgaggcccaggggaccttaggatccctgagtgtgcccagagggagaggctggatgaagactcagaggaggaatgaagttataagcaggggtgggttgggggagactcaggagagcccagcagggggtggctaagggccaggggaccaggctcttctccctgccttcctgtttactcgtggtctcccttcactttcagataacctgtactggggctcagtcactggttctcagagcaatgccgtgtcgcccaccccggctcctcgcaacccatccgaccccatgccccaggccccagccctgtggattgaaaccacagcctacgccctgctgcacctcctgcttcacgagggcaaagcagagatggcagaccaggctgcggcctggctcacccgtcagggcagcttccaagggggattccgcagtacccaagtaggggccgtccccgggctctggcgggggtgggtagtcctcagaccaagggcttgcttgagtcctggctcaacctccctaggacacggtgattgccctggatgccctgtctgcctactggtttgcctcccacaccactgaggagaggggtctcaatgtgactctcagctccacaggccggaatgggttcaagtcccacgcgctgcagctgaacaaccgccagattcgcggcctggaggaggagctgcaggtgaaccactccctggtgaaccactccctcgcctgggtagccaggacacctgggcctcgtggccaggccagaagccgtccccaccctcccacccgtggaatccccgcagcacttcttcctggggtcttcgggggaagactgacttcctggctgcgtgacctggagctctgagcttcagttttctcacttgtagagtaacatacacagagttcaccctacagggtcgttagaaggctgaagtgagataattcatgtsctggtataaactttgtggaaatgtgaggtggggagaggaggtggggctgttttgaggaaggagataagttattggagccgcaaaaacaggtttgcttgtgcccttctaacatcgccttcccttttctgttgctgaagttttccttgggcagcaagatcaatgtgaaggtgggaggaaacagnaaaggaaccctgaaggtgagggccagggaaggggtggggccaggcactggtggaggagagggtgtggagtgagaggcctgtgggcagaggcacatggtccggggaaggaggcagacacctcagggttggtgtcccgtgcttccgtcctgggtgtttttccccctgcttgctttcgcttgctctccccatctctgggtacctgttgtttcctttacccgcctcagtgntggtggntccgaatcccactcctcagaccagggctcttccctgaaccatgggccccactcgtcccactcccacagcacctcagacgaggcatgtcccaaagcccttcttcattctgtgtctcttgtctggctggtgggagsccctcccagccaggagsccagscactactctagaggccgtgttagtggcccctctcccaagnctgtccttatgtccctagtgactcctcctctgctcccctgctgnctgtggcccttggtgctgcatcctagattctgtgctgagacggccttctccctacctggaacttctctctacctcctgtctcccctgtctgatccactgtccacamgggagtgacactgaccttccaaaagccccagmcagatcagccttggggaaaagtcactccccgctgcccacggntcagatggctgggcctctgcccacccctccggccagacagdtctccttgtctacamagatccccttgcctttcctgtccttccctgcttcttggcccacaggacaagctctttcttctccttcaagccttggccagaagcctttcctgagcttttcagtccagcctcttcccagcacagtctggagtgttggcctctgggggcaggcccctgcttctttacctctctgtctcgcctgacgcctgtggcgaatgtggtgccactcgtgtgtgtggactgtgcagtgacggggaggaaaaggggctgaaggcctcaaatcctgtagcccagggagatgcccttaggtatggcaccagagaggtctgtggcctcacatgtcccacgtcctctccctgccccttgctgagccaggtccttcgtacctacaatgtcctggacatgaagaacacgacctgccaggacctacagatagaagtgacagtcaaaggccacgtcgagtacacgagtgagtgtgggggttgggaggccttggggccaggcaggggctggcgcagggagccgggtggccatcccagccctcctcacaatgcttccctgtgcagtggaagcaaacgaggactatgaggactatgagtacgatgagcttccagccaaggatgacccagatgcccctctgcagcccgtgacacccctgcagctgtttgagggtcggaggaaccgccgcaggagggaggcgcccaaggtggtggaggagcaggagtccagggtgcactacaccgtgtgcatctggtgggcgccgggagctgccctgggccaggggagggagggcaggacccaggctggggctgggcttctggagcccgcgcaggcagaacctggacgacagctcacacgtctccacaggcggaacggcaaggtggggctgtctggcatggccatcgcggacgtcaccctcctgagtggattccacgccctgcgtgctgacctggagaaggtgtggtcagccacccagggcaaccccctctgtcccaggtactgagccctgtcatgtgcagggcctgtgaccaactccccttttccacagctgacctccctctctgaccgttacgtgagtcactttgagaccgaggggccccacgtcctgctgtattttgactcggtgagtggggagagatgaggcaggaagggactcgatggcaccgggtttactgagtatgcgttaggaggtttctcaggagacagctgtgtcagcggctggtgctcttgagaacttgtgatgtcatcagagagaaggacaagaatgtgagcccgtgagacacagcagagtaaggggcagacctgcagncggcagggaccgatgccagtcagcagggaccctcagggtttgagagggagtctttcctaatgctggttttattcagcttgaggggctgcctttgttttnttgttgaacttcctatcttntttttaatattaaagcgtatttyccttnacaaagtgatggtggccatagatgatagttgtatttgtcttttcacgaccttatttggctaaaatagttatcaaccctcttncggctctcaaaacatttttatttatttatttagtaaagacagggtctcgctctgttgcccaggctggtcttgaactcccggcctcaagcgatcctctggcctaggcctttcaaagtaccggatttacaggccagagccaccatgcccggccttcaaaaaaagttttggaacatttactgtaacctctgggagaaaatgtgagaaaggtgtggtggctgtcattagccagctgtttgtaggtcagggagacccctacccagtgtgtgcagaggggccagcccccatcagctggggaagcctggctgacacatctgggttgaacacaatagaaaacacagagccaacaagattcccggatagggagctgacggtgcagcagcctagctcaggagggacactggcacggcaccgtgtggactgggcccscgtggrcacgargaggggtcaggcctgggacctgagtcggggggtcaggcaggatgacagaacctgcagttaggttgtggcaaataaaggaggacccagttgtatccatgacaaagatgaggccgcgaggagggcgagtgggtttgggggcaggcagagtgccttggagaacttacaggtcctgccacaatcctaatgcaaggatggagctgcaagttcagtttgggaatcatcagcctggattggtttggtggaasccagggagtggttgagacccccacaggggagctctgaggaaggaagttccgaaggagggaacgtaagaaatgaccaggtcagaaccaagggtggtccagaagctaacccttagcttagggacagtttcacagagaacacgtccatgatgcaagactctgctgaggccctggagcagtgaagactggggcaaggtcaccctctgggaagtgaagtcaccagagaccttgcggagcagctttgagagttctctgagtaggaaggtaacagaatgtgaaggacactggagagaaggccaataggaagcaaacaaaaacaggccaaggaaacccagtacagggggctgcagggcccagggagtgggtccctcatctctcctccccacgcttggccaggtccccacctcccgggagtgcgtggsctttgaggctgtgcaggaagtgccggtggggctggtgcagccggccagckcaaccctgtacgactactacaaccccggtgagcactgcaggacaccctgaaattcaggagaactttggcataggtgccctcctatgggacaatggacaccggggtagtgaggggkcagagagccctggggctccctgggactgaggagncagaatggaggggcctgtgccctaactcctctctgttctccagancgcagatgttctgtgttttacggggcaccaagtaagagcagactcttggccaccttgtgttctgctgaagtctgccagtgtgctgagggtgagactgagggcctggggcggggcagtggaggcgggatggccggggccccccccacactgtctgatgggttccccaacttcagggaagtgccctcgccagcntcgcgccctggagcggggtctgcaggacgaggatggctacaggatgaagtttgcctgcwactacccccgtgtggagtacggtcagtcttcccaccgaggccctggcctgaccctccctcggggaccggctgttttggtctctctgggtgtagcctgctcctcttacaggtcatgcacgcagcctgtttgctctgacaccaacttcctaccctctcagcctcaaagtaactcacctttcccccttctcctcaccccctcttaggcttccaggttaaggttctccgagaagacagcagagctgctttccgcctctttgagaccaagatcacccaagtcctgcacttcagtatgaagcaaaccggagaggcgggcagggctggggggagacagggaggctgaggtgtggccgaggacctgaccatctggaagtgtgaaaatccccttgggctgtcagaagccttgggcttggccataaatagggaggcagtggcacctctccatgggggtggcgaaggtggaatgagaggatctacacagagtccccagcctgggctcaccctgcaccttctcttcccctctgaccacttttgcgcacgtcatccccgcagccaaggatgtcaaggccgctgctaatcagatgcgcaacttcctggttcgagcctcctgccgccttcgcttggaacctgggaaagaatatttgatcatgggtctggatggggccacctatgacctcgagggacagtgagtcatctggtcccctcagtntcttgtcctccccatgcctcgccacctaggccttgnccctcagaagccagatgcctgtgctctccgtttccacctgccatcctcccgagccctgttgactgtccctttgncccctgcagnccccagtacctgctggactcgaatagctggatcgaggagatgccctctgaacgcctgtgccggagcacccgccagcgggcagnctgtgcccagctcaacgacttcctccaggagtatggcactcaggggtgccaggtgtgagggctgccctcccacctccgctgggaggaacctgaacctgggaaccatgaagctggaagcactgctgtgtccgctttcatgaacacagcctgggaccagggcatattaaaggcttttggcagcaaagtgtcagtgttggcagcgaagtgtcagtgtgtgttgctagggctgagagcagtgcccctgcccgatgcagttctgggcaggccaggttgacataaccttagactctct

SEQ ID NO: 2250 - protein, 170 aa, Homo sapiens
  misc_feature (4)..(4): Xaa can be any naturally occurring amino acid
  misc_feature (32)..(32): Xaa can be any naturally occurring amino acid
  misc_feature (38)..(38): Xaa can be any naturally occurring amino acid
GQRXRIVQLGFDLDAHGIIFTEDYRTRVLKAXDGRPYXGAVQKFLASVLPACGDLSFQQDQMTQTFGFRDSEITHLVNAGVLTVRDAGSWWLAVPGAGRFIKYFVKGRQAVLSMVRKAKYRELLLSELLGRRAPVVVRLGLTYHVHDLIGAQLVDCISTTSGTLLRLPET

SEQ ID NO: 2251 - DNA, 2384 bp, Homo sapiens
tattgagttcttcaaacattgtagcctctttatggtctctgagaaataactaccttaaacccataatctttaatacttcctaaactttcttaataagagaagctctattcctgacactacctctcatttgcaaggtcaaatcatcattagttttgtagtctattaactgggtttgcttaggtcaggcattattattactaaccttattgttaatattctaaccataagaattaaactattaatggtgaatagagtttttcactttaacataggcctatcccactggtgggatacgagccaattcgaaagaaaagtcagtcatgtgcttttcagaggatgaaagcttaagataaagactaaaagtgtttgatgctggaggtgggagtggtattatataggtctcagccaagacatgtgataatcactgtagtagtagctggaaagagaaatctgtgactccaattagccagttcctgcagaccttgtgaggactagaggaagaatgctcctggctgttttgtactgcctgctgtggagtttccagacctccgctggccatttccctagagcctgtgtctcctctaagaacctgatggagaaggaatgctgtccaccgtggagcggggacaggagtccctgtggccagctttcaggcagaggttcctgtcagaatatccttctgtccaatgcaccacttgggcctcaatttcccttcacaggggtggatgaccgggagtcgtggccttccgtcttttataataggacctgccagtgctctggcaacttcatgggattcaactgtggaaactgcaagtttggcttttggggaccaaactgcacagagagacgactcttggtgagaagaaacatcttcgatttgagtgccccagagaaggacaaattttttgcctacctcactttagcaaagcataccatcagctcagactatgtcatccccatagggacctatggccaaatgaaaaatggatcaacacccatgtttaacgacatcaatatttatgacctctttgtctggatgcattattatgtgtcaatggatgcactgcttgggggatctgaaatctggagagacattgattttgcccatgaagcaccagcttttctgccttggcatagactcttcttgttgcggtgggaacaagaaatccagaagctgacaggagatgaaaacttcactattccatattgggactggcgggatgcagaaaagtgtgacatttgcacagatgagtacatgggaggtcagcaccccacaaatcctaacttactcagcccagcatcattcttctcctcttggcagattgtctgtagccgattggaggagtacaacagccatcagtctttatgcaatggaacgcccgagggacctttacggcgtaatcctggaaaccatgacaaatccagaaccccaaggctcccctcttcagctgatgtagaattttgcctgagtttgacccaatatgaatctggttccatggataaagctgccaatttcagctttagaaatacactggaaggatttgctagtccacttactgggatagcggatgcctctcaaagcagcatgcacaatgccttgcacatctatatgaatggaacaatgtcccaggtacagggatctgccaacgatcctatcttccttcttcaccatgcatttgttgacagtatttttgagcagtggctccgaaggcaccgtcctcttcaagaagtttatccagaagccaatgcacccattggacataaccgggaatcctacatggttccttttataccactgtacagaaatggtgatttctttatttcatccaaagatctgggctatgactatagctatctacaagattcagacccagactcttttcaagactacattaagtcctatttggaacaagcgagtcggatctggtcatggctccttggggcggcgatggtaggggccgtcctcactgccctgctggcagggcttgtgagcttgctgtgtcgtcacaagagaaagcagcttcctgaagaaaagcagccactcctcatggagaaagaggattaccacagcttgtatcagagccatttataaaaggcttaggcaatagagtagggccaaaaagcctgacctcactctaactcaaagtaatgtccaggttcccagagaatatctgctggtatttttctgtaaagaccatttgcaaaattgtaacctaatacaaagtgtagccttcttccaactcaggtagaacacacctgtctttgtcttgctgttttcactcagcccttttaacattttcccctaagcccatatgtctaaggaaaggatgctatttggtaatgaggaactgttatttgtatgtgaattaaagtgctcttatttt

SEQ ID NO: 2252 - protein, 529 aa, Homo sapiens [sequence omitted]

SEQ ID NO: 2253 - DNA, 8811 bp, Homo sapiens
  misc_feature (1452)..(1452): n is a, c, g, or t
  misc_feature (1788)..(1788): n is a, c, g, or t
  misc_feature (3357)..(3357): n is a, c, g, or t
  misc_feature (3474)..(3474): n is a, c, g, or t
  misc_feature (3870)..(3870): n is a, c, g, or t
  misc_feature (3897)..(3897): n is a, c, g, or t
  misc_feature (4441)..(4441): n is a, c, g, or t
  misc_feature (5139)..(5139): n is a, c, g, or t
  misc_feature (5883)..(5883): n is a, c, g, or t
  misc_feature (6326)..(6326): n is a, c, g, or t
  misc_feature (8187)..(8187): n is a, c, g, or t
  misc_feature (8211)..(8211): n is a, c, g, or t
  misc_feature (8249)..(8249): n is a, c, g, or t
  misc_feature (8575)..(8575): n is a, c, g, or t
  misc_feature (8635)..(8635): n is a, c, g, or t
ggtacccctgatctcacaaggccctgaagcaggcctggggcatggtcttctgccagccatccctgatacctgcttcttttcctgtgtctctcagggccaggcagagaagagtgcattcactgtgcgaaaaacttccacttccacgactggaagtgtgtgccagcctgtggtgagggcttctacccagaagagatgccgggcttgccccacaaagtgtgtcgaaggtacggtcctcctggcggggaacggcaagcaactgtgtccagcaaaggagtgcctggagggcagagtctggcagcatcttccccaggggccggggagggcatgttgcatcaccccactgtggacaggagcccatttacagagctgctgaggggccttcgtccctttgttcactggatgcatatttgttgggtccctgctgtgggcagacaccgtgcagcagcgggataagatgggaagcagaatagcaaggtgctcacaccccattggtggactacgcgggacgtccctgcccatgtcgcgctcagcatgcatcctttgcactgtcgataatcagagaaaccatgttttgggttaaaaaaaattttttttggagacacactctcactctgtcgcccaggctggagtgcactggtgtgacctcagctcactgcaacctctgcctctgggattcaaacaactctcatgcctcagcctcccgagtagctgggactacaggcgtgcaccacaatgcccagctaatttttgttttttgttttcggtttttttgagatggagtctcgcttgtcgcccaggctggagcgcagtgggcgatctcggctcattgcaagctccacctcccagattcacaccattctcctgcctcaacctgccgagtagctgggactacaggcacccgccaccactccccactaattgtttgtatttttaatagagaccggtttcaccacgttggccaggctggtctcgaactcctggcctcaagtgatccacccacctcagcctcccaaagtgctgggattacgggtgtgagccaccacacctggcctaaaatattttttttagttagatactttagagaaattaaaaagatcctgacaatttcctcattctaaagctgttctctgcacagtccacgtacatctattttcaccctccatatcctcctcttgtgcttcctcccatgtgtccctccacagagtcaccattcttatttgatggccctggacccttctgttgttggacatgagctgttaaaggaggagctgtttgctctggtctcctcttttctggctgaatattgccctatgttgggagatcatgaactcaggacccagaacagggcagggcaacctgtcttattcagggtgggagcaacattgaggagtttgaagggacctgtgagggtgtgacgatggggtgagctgtgaggggtgacgatggggtganctgtgaggggtgatgatggggtggcctgtgaggggtgacgatggggtgggctgtgaggggtgatgatggggtgggctgtgaggggtgacgatggggtgggctgtgagggtgtgacgatggggtgggctgtgaggggtgatgatggggtgggctgtgagggtgtgatgatggggtgagctgtgagggtgtgatgatgcggtgggctgtgagggaagtaccaggcgttagcctgctttcacagtgctaaaaagaaatacctgaggttgggtgatttataaagaaaagaggttgaattggctcacagttctgtaggcttcataggaaacatggcgccanattctgcccagcgtcttcactcctgatggaaggtgaagcaagggcagcacatcacatggcaatagcaggagcaagagagggaaggaggccgggcacggtggctcacgcctgtaatcccagcactttgggagccaaggtgggtggatcacctgagccaggagttcaagaccagcctggccaacatggcaaaaccccttctctactaaaaaaaaaaaaaaaaaaaaatgcaaaaattagttggacgtggatagtgtgtgcctgtaatcccagtctacaggaggctgaggcaggagaatcgcttgaaccaaggaggcagaggttgcagtgagctatgatcgcgccatgcactccagcatgagcgacagagcaagactccatctcaaaagaaaaaaaaaagtcaggagttgccacacacctttaaacaagcagctctcacatgaactcactcatcaccaaggggatggtgtgaggccatttatgagggatcaccccatgatccaaacacctcccaccaggccccacctccaacactggggatcacatctcatcatgacacttggaggggacaaatgttcaaaccatatcggggggcttccgtctgaaaaagactgaaaatgagggagccctcaaaggcttgtgtcagagcaggggaggggtgcccatggctggctgccagctgggtaccatagatggttgcagaaccagaagcatcttaaaagccaccctgcccaaagctggtgctgcccacgaggacccgctgctgggcacggtaatcctgacggaaagcaggagctacacagggtctcccagggagagccgtttgcactggcctaacggggacgggagcatcacccatctccctgagcagcatggtgatggattatttccccagacctccagaggagagcccagcctggccaccaccttgccctgaacctcgtgagaccctaggtggagagcccagctgcacctgcctggacttctgcctgcatagcggggagccgctgagtgggtgttattttcagctgctgagtgtgtggcaacctggttagagcaatggaaaaccgaggcccctgccatcctgctgagctgggtgaggttgtatttgaagaagcaagcaagccgtaacctcctggctgtccaccgcagcgggctcctcaccacagttcttcactgatgaagcagccctcagccgtggcctgggggcactgggcccctgggtcctccagaccactgacatctctttaaatgactcagctcggccctggttctcgtctcaccagtggcattgtctgtaagagaaaccagagggtctgtggggaaagtaataacctgtactggggcataagggtttggtggctgggccacagaaatgtgcaagggcaggtgtggggagggggcagcatgatgggggcagacccctctggcaagtcctctaaccccatcctttcctctggggcggcctggatgggaatattagaaaggctcgtgggtgtgagtttgcctgtggggtttacacatttacaattacagaccaagggcttgagctctaggctcagcatcctcagncacactaggaataaaacccacctcccacccaggctgaagcgatgctgcacctggggctccagagcagcggagtccgtggtgagaccagaccccatcagagggctgctctgcaaagancccacgaggaggcctggtgtctgagcatgggaaggcttcacacagcagggaggggacatctgtataaagcaaagaactgccccccagggaggcccaggcatgagcacaacaaagctccaagccctgcctatggggcctgttccacccttaactggcaacaatggggaggtgggcagctgatgcaagcactgtggagaccgagtcaccgggctctggactcaggacaggcagcagcatagccggggtgcactcacggccccaggatgggaaacgtgctccttcaagacactcagcccgcatcggcaagtgctttctgtagagggcacaatggtcagtcgttcaggcttttggggccacactgcctctgtcacagctactcagctcagccactgctanacaaaagattgtcaatgaatgagtgtnactgtggtccaggataaatgctggatgtggcccttgggctgtagtgcaccaaccgtcccctgaggtcacgtttaccctgcattagaaatagccctggctggttgtccatctctgcgcaggctgggccaggaccgtccgagaggggcaggaattgtggggcatctctcccactccccgagggtaagcaggcatggccacatataggtgacagcagccttctggtcagctcgagtcaggtgtgtcacatccctgggtggagtctggcctggaccccaagcctacagccatcgcagcccggcagccgctggagagagaagactgacacagctctgggagccgtgtggtggggtgggggctgggtgccagggcccaggagggtgtccaggtgagctgcgggaagccttggaggcctggcccctgatcctgggcttgctcctgccaactggccatggctgtctctgccctcccagggcaatagtgaggtcagacaggagaaaagacatgcagacactcagcccctgtgtcagggaatggtgggcgacanagcctctccacagaggaccgaggctgagggggtgggaaggaggtgcagggaggtgagggttctgggaagggagcccggagtggtggagcctcttccccagacttcagcaggaacggtatcttcccacaggtgtgacgagaactgcttgagctgtgcaggctccagcaggaactgtagcaggtgtaagacgggcttcacacagctggggacctcctgcatcaccaaccacacgtgcagcaacggtgagcagcagctgggttaccctggggctgcctgtggaggagctcagctggccagctcgtgctccaaagagaaaagcaaagccacataggcatggcggctccacagacaggcgttcgtgcccctgatccgattgactgtctgggattcctctagctgatatggaagacagctgccctgtctcccagcttccctctaggcctctcacatcgatcagagaggcatcccagccactgctgatctgtttattgagtgactcctaaaaatgattttgtccttgtactggtcccactgccatgccataggccgcggtggcccggatgtgacaacataccataaaagaagcctgacctggggggtcaaagccaggaagcctggagggtctctgctcaggacgagggggacagagcccagagtagagcacacgctcagcagcagcaatcccagctctgcagganagccctgctctgccataggatgggggacaaggacaagttgtaaaaacagaaacttaaaagggcaccaaagctaagtgcccagtttgggaattccaggcaccaaggagggttggcaggactcgggcctggaggtgcagtgcaggagtcattgtagacacacgggcagggaagggggctctggcccagcaagcagcagggtggagccacattctgacagccaggagaggaaggctctctgctccagtgtccagggtcagggcaggtggtccttgggtatgaagctggcactggccctgtccaggcagagcatggagcttgtggagggccctgggatgcctccttgccttgttactggttattatttttggggggtggcgggagggttgtctaattatgtcccttcaaaggcccagaaactacttctttgggaagtcacctgcccaggttatgtatctagcccaaaaaagtgtggttgccactggagggcctcccaggtccacggatgatgcatcctcaaaggcctcttccccttgctgcagcggtgtcctcagcaagtcctgtccacggcggctcccttccccccatccccactcctccctgtccgccccctccaccctggaagcagcttccattccctcctgcctccaggcccgtcctccggcctcccctacagtcttcctcctaagctccactgccagcagttgtccagaaagacaggtgcacatgtgccccacaggcccaggntgggtgttctcctgagatcctcccacaccacccccacatcctgctcatgaatccccttgtcactgagactcagcaagagccccatataccagtgccctcccaccacacagggctcccagagtcaagtgcattgcaggagaggggcttcaagggctgccatcctgctgcccacctctgtctgtgtccctcttgcccagggcaccactgatgcccagcatatgtggaatgattgaaacaatatttatttatgtatttatttatttatttttgagacggagttttgttcttcttgcccaggctggagtgcagtggcatgatctcagctcactgcaacctccgcctcctgggttcaggtggttctcctgctttagcctcccgagtagcttggattacaggtgcccaccaccatgcccagctaatttttatattattagtagagacgnggtttcaccatgttggttagactggtctcaagctcctgacctcaggtgatccacccacctcggcctcccaaagtgctgggattacaggcatgaggcaccgcgcccggccttgaaacaatcttcacaggcaccgaagactgacctttccctcttttgcctttcctgatgcggggccccagctgacgagacattctgcgagatggtgaagtccaaccggctgtgcgaacggaagctcttcattcagttctgctgccgcacgtgcctcctggccgggtaagggtgcctagctgcccacagagggcaggcactcccatccatccatccgtccaccttcctccagactgtcggccagagtctgtttcaggagcggcgccctgcacctgacagctttatctccccaggagcagcatctctgagcacccaagccaggtgggtggtggctcttaaggaggtgttcctaaaatggtgatatcctctcaaatgctgcttgttggctccagtcttccgacaaactaacaggaacaaaatgaattctgggaatccacagctctggctttggagcagcttctgggaccataagtttactgaatcttcaagaccaaagcagaaaagaaaggcgcttggcatcacacatcactcttctccccgtgcttttctgcggctgtgtagtaaatctccccggcccagctggcgaaccctgggccatcctcacatgtgacaaagggccagcagtctacctgctcgttgcctgccactgagcagtctggggacggtttggtcagactataaataagataggtttgagggcataaaatgtatgaccactggggccggagtatctatttctacatagtcagctacttctgaaactgcagcagtggcttagaaagtccaattccaaagccagaccagaagattctatcccccgcagcgctctcctttgagcaagccgagctctccttgttaccgtgttctgtctgtgtcttcaggagtctcatggcctgaacgaccacctcgacctgatgcagagccttctgaggagaggcaacaggaggcattctgtggccagccaaaaggtaccccgatggccaagcaattcctctgaacaaaatgtaaagccagccatgcattgttaatcatccatcacttcccattttatggaattgcttttaaaatacatttggcctctgcccttcagaagactcgtttttaaggtggaaactcctgtgtctgtgtatattacaagcctacatgacacagttggatttattctgccaaacctgtgtaggcattttataagctacatgttctaatttttaccgatgttaattattttgacaaatatttcatatattttcattgaaatgcacagatctgcttgatcaattcccttgaatagggaagtaacatttgccttaaattttttcgacctcgtctttctccatattgtcctgctcccctgtttgacgacagtgcatttgccttgtcacctgtgagctggagagaacccagatgttgtttattgaatctacaactctgaaagagaaatcaatgaagcaagtacaatgttaaccctaaattaataaaagagttaacatcccatggcacaggagcctgtatttctttccacggcacacaaaatgaaacatgagtgctgaccaagtgttaagtggacgttactttaactgtggtttcagatctgtttgatgtcattacgtggaaggtcttcttttgagctttagcaaatgttgatgtaaggaagcaatggaggaaatcccagatcccaaccccagaatgtcactgggcaaagagaccccttcagaccacgttagcctcactgggaggaggttctagagcctcnccagatgtaggggccccttccatntgtcacgggggagctccccagagcccaaactgcctctncaccggttgctgccaagtgtgattgaattaggttacagcttgtcttctatgcagtggctgaaatccctgaacccatggctgatgcactccttgggatgtttaccatggcctctctgtgaagtcagaagcttgtacttgctaggaatcctttggctgcaagtaaaggaacgcaccaactagaaatgacttaggtgaaaacaagagtgggtgaggggcgttgttttgagaatccagagtggattcagaatttcagggaagggtgcagcagagccttgggaaagctggagccggcattaaatgtcacctggaccctctctgtacggcancactgcccttctctccatggcgccttctccagttgatgggacaaatgacaagacctccancatcttccaggtaaaactggtacaaatccaacccctcaggccaactttctgggtctgtttcttggctcttcttttcccagggacaggacttggtcagcctgccttacatgggtactctccctgtgtcatcagctgtggctacaaggacaggcttgtgcagcagaatatggctgcag

SEQ ID NO: 2254 - protein, 969 aa, Homo sapiens
MPPRAPPAPGPRPPPRAAAATDTAAGAGGAGGAGGAGGPGFRPLAPRPWRWLLLLALPAACSAPPPRPVYTNHWAVQVLGGPAEADRVAAAHGYLNLGQIGNLEDYYHFYHSKTFKRSTLSSRGPHTFLRMDPQVKWLQQQEVKRRVKRQVRSDPQALYFNDPIWSNMWYLHCGDKNSRCRSEMNVQAAWKRGYTGKNVVVTILDDGIERNHPDLAPNYDSYASYDVNGNDYDPSPRYDASNENKHGTRCAGEVAASANNSYCIVGIAYNAKIGGIRMLDGDVTDVVEAKSLGIRPNYIDIYSASWGPDDDGKTVDGPGRLAKQAFEYGIKKGRQGLGSIFVWASGNGGREGDYCSCDGYTNSIYTISVSSATENGYKPWYLEECASTLATTYSSGAFYERKIVTTDLRQRCTDGHTGTSVSAPMVAGIIALALEANSQLTWRDVQHLLVKTSRPAHLKASDWKVNGAGHKVSHFYGFGLVDAEALVVEAKKWTAVPSQHMCVAASDKRPRSIPLVQVLRTTALTSACAEHSDQRVVYLEHVVVRTSISHPRRGDLQIYLVSPSGTKSQLLAKRLLDLSNEGFTNWEFMTVHCWGEKAEGQWTLEIQDLPSQVRNPEKQGKLKEWSLILYGTAEHPYHIFSAHQSRSRMLELSAPELEPPKAALSPSQVEVPEDEEDYTAQSTPGSANILQTSVCHPECGDKGCDGPNADQCLNCVHFSLGSVKTSRKCVSVCPLGYFGDTAARRCRRCHKGCETCSSRAATQCLSCRRGFYHHQEMNTCVTLCPAGFYADESQKNCLKCHPSCKKCVDEPEKCTVCKEGFSLARGSCIPDCEPGTYFDSELIRCGECHHTCGTCVGPGREECIHCAKNFHFHDWKCVPACGEGFYPEEMPGLPHKVCRRCDENCLSCAGSSRNCSRCKTGFTQLGTSCITNHTCSNADETFCEMVKSNRLCERKLFIQFCCRTCLLAG

SEQ ID NO: 2255 - DNA, 2545 bp, Homo sapiens
ccagcgtgctgaagccggagcgagctagccgcccggagccgcgccgacccagctgagcccagcccacgggacgccagacctcgaccgtcgctcctaccccggccaccgctcggagccgaggcggacgcgtcccgatcttcccctgtccccaccctgccccgaccctcctctccacctctcgcgtcgtgacaccagcgtctccggcagcctcttggtcatgaaagccctcagattgtcggcttccgccctcttctgccttctgctgatcaacgggttaggggcagcaccccctggtcgccctgaggcgcagcctcctcctctcagctctgagcataaagagccggtagccggggacgcagtgcccgggccaaaggatggcagcgccccagaggtccgaggcgctcggaattccgagccgcaggacgagggagagcttttccagggcgtggatccccgggcgctggccgcggtgctgctgcaggcactcgaccgtcccgcctcacccccggcaccaagcggctcccagcaggggccggaggaagaagcagctgaagctctgctgaccgagaccgtgcgcagccagacccacagcctcccggcgccggagagcccggagcccgcggctccgcctcgccctcagactccggagaatgggcccgaggcgagcgatccctccgaggagctcgaggcgctagcgtccctgctccaggaactgcgagatttcagtccaagtagcgccaagcgccagcaggagacggcggcagcagagacggaaacccgcacgcacacgctgacccgagtgaatctggagagcccggggccagagcgcgtatggcgcgcttcctggggagagttccaggcgcgtgtcccggagcgcgcgcccctgccgcccccggccccctctcaattccaggcgcgtatgcccgacagcgggccccttcccgaaacccacaagttcggggaaggagtgtcctcccccaaaacacacctaggcgaggcattggcacccctgtccaaggcgtaccaaggcgtggccgccccgttccccaaggcgcgccggccggagagcgcactcctgggcggctccgaggcgggcgagcgccttctccagcaagggctggcgcaggtggaggccgggcggcggcaggcggaggccacgcggcaggccgcggcgcaggaagagcggctggccgacctcgcctcggacctgctgctccagtatttgctgcagggcggggcccggcagcgcggcctcgggggtcgggggctgcaggaggcggcggaggagcgagagagtgcaagggaggaggaggaggcggagcaggagagacgcggcggggaggagagggtgggggaagaggatgaggaggcggccgaggcggaggcagaggcggaggaggcggagagggcgcggcagaacgcgctcctgttcgcggaggaggaggacggggaagccggcgccgaggacaagcgctcccaggaggagacgccgggccaccggcggaaggaggccgaggggacagaggagggcggggaggaggaggacgacgaggagatggatccgcagacgatcgacagcctcattgagctgtccaccaaactccacctgccagcggacgacgtggtcagcatcatcgaggaggtggaggagaagcggaagcggaagaagaacgcccctcccgagcccgtgccgcccccccgtgccgcccccgcccccacccacgtccgctccccgcagcccccgccccccgcccccgctcccgcacgagacgagctgccggactggaacgaggtgctcccgccctgggatcgggaggaggacgaggtgtacccgccagggccgtaccaccctttccccaactacatccggccgcggacactgcagccgccctcggccttgcgccgccgccactaccaccacgccttgccgccttcgcgccactatcccggccgggaggcccaggcgcggcgcgcgcaggaggaggcggaggcggaggagcgccggctgcaggagcaggaggagctggagaattacatcgagcacgtgctgctccggcgcccgtgactgcccttcccggtcccgcccccgcgcgcccccgccgcgcgcgcgcgccggcgcccccctccgtgttgcccgctccccctcggtgtttgcatgcgccccggccctgccccttggccctgcccctgtccccgggctgcgtcgggacctgccagacccccctcccgggtcctgagcccgaactcccagagctcacccgcgggtgaccgggggccagcccaggagggcgggtggtttgtgcgagttcccttgccacgcggggccccggccccatcaagtccctctggggacgtccccgtcggaaaccggaaaaagcagttccagttaattgtgtgaagtgtgtctgtctccagcccttcgggcctcccacgagcccctccagcctctccaagtcgctgtgaattgaccccttctttcctttctctgttgtaaatacccctcacggaggaaatagttttgctaagaaataaaagtgactatttt

SEQ ID NO: 2256 - protein, 615 aa, Homo sapiens
MKALRLSASALFCLLLINGLGAAPPGRPEAQPPPLSSEHKEPVAGDAVPGPKDGSAPEVRGARNSEPQDEGELFQGVDPRALAAVLLQALDRPASPPAPSGSQQGPEEEAAEALLTETVRSQTHSLPAPESPEPAAPPRPQTPENGPEASDPSEELEALASLLQELRDFSPSSAKRQQETAAAETETRTHTLTRVNLESPGPERVWRASWGEFQARVPERAPLPPPAPSQFQARMPDSGPLPETHKFGEGVSSPKTHLGEALAPLSKAYQGVAAPFPKARRPESALLGGSEAGERLLQQGLAQVEAGRRQAEATRQAAAQEERLADLASDLLLQYLLQGGARQRGLGGRGLQEAAEERESAREEEEAEQERRGGEERVGEEDEEAAEAEAEAEEAERARQNALLFAEEEDGEAGAEDKRSQEETPGHRRKEAEGTEEGGEEEDDEEMDPQTIDSLIELSTKLHLPADDVVSIIEEVEEKRKRKKNAPPEPVPPPRAAPAPTHVRSPQPPPPAPAPARDELPDWNEVLPPWDREEDEVYPPGPYHPFPNYIRPRTLQPPSALRRRHYHHALPPSRHYPGREAQARRAQEEAEAEERRLQEQEELENYIEHVLLRRP

SEQ ID NO: 2257 - DNA, 990 bp, Homo sapiens
cccatcccgtgggtggccggcgacaagatggcagcagcgtgtcggagcgtgaagggcctggtggcggtaataaccggaggagcctcgggcctgggcctggccacggcggagcgacttgtggggcagggagcctctgctgtgcttctggacctgcccaactcgggtggggaggcccaagccaagaagttaggaaacaactgcgttttcgccccagccgacgtgacctctgagaaggatgtgcaaacagctctggctctagcaaaaggaaagtttggccgtgtggatgtagctgtcaactgtgcaggcatcgcggtggctagcaagacgtacaacttaaagaagggccagacccataccttggaagacttccagcgagttcttgatgtgaatctcatgggcaccttcaatgtgatccgcctggtggctggtgagatgggccagaatgaaccagaccagggaggccaacgtggggtcatcatcaacactgccagtgtggctgccttcgagggtcaggttggacaagctgcatactctgcttccaaggggggaatagtgggcatgacactgcccattgctcgggatctggctcccataggtatccgggtgatgaccattgccccaggtctgtttggcaccccactgctgaccagcctcccagagaaagtgtgcaacttcttggccagccaagtgcccttccctagccgactgggtgaccctgctgagtatgctcacctcgtacaggccatcatcgagaacccattcctcaatggagaggtcatccggctggatggggccattcgtatgcagccttgaagggagaaggcagagaaaacacacgctcctctgcccttcctttccctggggtactactctccagcttgggaggaagcccagtagccattttgtaactgcctaccagtcgccctctgtgcctaataaagtctctttttctcacaaaaaaaaaaaaaaaaaaaaaaaaaaaaaaaaaaa

SEQ ID NO: 2258 - protein, 261 aa, Homo sapiens
MAAACRSVKGLVAVITGGASGLGLATAERLVGQGASAVLLDLPNSGGEAQAKKLGNNCVFAPADVTSEKDVQTALALAKGKFGRVDVAVNCAGIAVASKTYNLKKGQTHTLEDFQRVLDVNLMGTFNVIRLVAGEMGQNEPDQGGQRGVIINTASVAAFEGQVGQAAYSASKGGIVGMTLPIARDLAPIGIRVMTIAPGLFGTPLLTSLPEKVCNFLASQVPFPSRLGDPAEYAHLVQAIIENPFLNGEVIRLDGAIRMQP

SEQ ID NO: 2259 - DNA, 590 bp, Homo sapiens
  misc_feature (197)..(197): n is a, c, g, or t
gtgttttggggcacagaagctgtgggaaggagctggaggcttcaccgtggtaaccacagcgccgctgctgccccgccttgcaggcctcaggactgtcatcgcctctgggtgtgagggtactttggccaccgcccccggaaataaccgcgcctgcctctcaagataccccatcctctccacgccgctgccgctgccgncatgccagggggaggacgccagatacctcaaaaggaaagttaaaggagggaatatagatgtacatccatcagaaaaagcactcattgttcactatgaagtggaagctaccattcttggagaaatgggggaccccatgttgggagaacgaaaagaatgtcaaaaaatcattcgacttaagagtctcaatgccaacacagatataacttccctggcaaggaaggtggttgaagaatgtaaactcattcatccttcaaaactaaatgaggtagaacagctgttgtactatctacagaaccgccgtgattcattgtcaggaaaagagaaaaaagaaaaatcaagcaagcctaaagatccacctccttttgaaggaatggagattggatgaagttgct

SEQ ID NO: 2260 - DNA, 284 bp, Homo sapiens
tttaaccaatgaggaccaacccagccacttatgccacactgatctgaagccagaagaacgaaaaacctgccgtaatgtctataactgtgagttaccccagaattgcaaggaggtaaaaagacttaaaggtgccagtgaagatggtgaatatttcctgatgattagaggaaagcttctgaagatattctgtgcggggatgcactctgaccaccccaaagagtacgtgacactggtgcatggagactctgagaatttctccgaggtttatgggcacaggttacaca

SEQ ID NO: 2261 - DNA, 574 bp, Homo sapiens
cacgagggctgccagggtccctgaagagggaagacacgcggaaacaggcttgcacccagacacgacaccatgcatctcctcggcccctggctcctgctcctggttctagaatacttggctttctctgactcaagtaaatgggtttttgagcaccctgaaaccctctacgcctgggagggggcctgcgtctggatcccctgcacctacagagccctagatggtgacctggaaagcttcatcctgttccacaatcctgagtataacaagaacacctcgaagtttgatgggacaagactctatgaaagcacaaaggatgggaaggttccttctgagcagaaaagggtgcaattcctgggagacaagaataagaactgcacactgagtatccacccggtgcacctcaatgacagtggtcagctggggctgaggatggagtccaagactgagaaatggatggaacgaatacacctcaatgtctctgaaaggccttttccacctcatatccagctccctccagaaattcaagagtcccaggaagtcactctgacctgcttgctgaatttctcctgctatg

SEQ ID NO: 2262 - DNA, 3131 bp, Homo sapiens
gcggagcgcggcgcgcgcggcggttgggccgttggctgttcggccctgggatccgccgccactccgcgatcagaccgctctgtgccgcgagccgccgtgagcactcggattcaagccggcgccaacgagtccgggggcatcgcccgcagcggccaagctcatggccggctgagcgggacgccgcctccgcctcagccaccgccgccgccgccgcctcctcctcctcagccggcggcggcccgggcccagcaaccatggctgaagactactgggacgggcgcctgcggcgaacaggaggagaaggaggtcgcgcggcctcatcccgggccgccgccccaggcgccgccgcgccggccccgcggctctgaggttgctcgcgcgcccccgccgatcgccatggatcggatgaagaagatcaaacggcagctgtcaatgacactccgaggtggccgaggcatagacaagaccaatggtgcccctgagcagataggcctggatgagagtggtggtggtggcggcagtgaccctggagaggcccccacacgtgctgctcctggggaacttcgttctgcacggggcccactcagctctgcaccagagattgtgcacgaggacttgaagatggggtctgatggggagagtgaccaggcttcagccacgtcctcggatgaggtgcagtctccagtgagagtgcgtatgcgcaaccatcccccacgcaagatctccactgaggacatcaacaagcgcctatcactaccagctgacatccggctgcctgagggctacctggagaagctgaccctcaatagccccatctttgacaagcccctcagccgccgcctccgtcgtgtcagcctatctgagattggctttgggaaactggagacctacattaagctggacaaactgggcgagggtacctatgccaccgtctacaaaggcaaaagcaagctcacagacaaccttgtggcactcaaggagatcagactggaacatgaagagggggcaccctgcaccgccatccgggaagtgtccctgctcaaggacctcaaacacgccaacatcgttacgctacatgacattatccacacggagaagtccctcacccttgtctttgagtacctggacaaggacctgaagcagtacctggatgactgtgggaacatcatcaacatgcacaacgtgaaactgttcctgttccagctgctccgtggcctggcctactgccaccggcagaaggtgctacaccgagacctcaagccccagaacctgctcatcaacgagaggggagagctcaagctggctgactttggcctggcccgagccaagtcaatcccaacaaagacatactccaatgaggtggtgacactgtggtaccggccccctgacatcctgcttgggtccacggactactccactcagattgacatgtggggtgtgggctgcatcttctatgagatggccacaggccgtcccctctttccgggctccacggtggaggaacagctacacttcatcttccgtatcttaggaaccccaactgaggagacgtggccaggcatcctgtccaacgaggagttcaagacatacaactaccccaagtaccgagccgaggcccttttgagccacgcaccccgacttgatagcgacggggccgacctcctcaccaagctgttgcagtttgagggtcgaaatcggatctccgcagaggatgccatgaaacatccattcttcctcagtctgggggagcggatccacaaacttcctgacactacttccatatttgcactaaaggagattcagctacaaaaggaggccagccttcggtcttcgtcgatgcctgactcaggcaggccagctttccgcgtggtggacaccgagttctaagccacagaccgaggccccagcaggcagcggctggagggatgccacacccctcacagggcagcccccaactacatcttccctgcttactctctgcctacctgcctgagccatgttcacctgcccacttgtcccctgctgcctgcccaaacaccccaccattggcctgtcaacccacccattggcctgtctgctgggtgctaacaaagctctcatcactccttcacttggtctgtctgtctctgtcttggtagttgccggtggacagcatggccgtgccagcctcccacactgaggccaggtctaccccccatcataccagcccccaggaccactaccccacggccagccaggggtccagagctagcccaggctggggatctcgactcagacaagatggtgacaatgccttgagtctgaggcatcctctgcctgctttcctgcctgccccacctgcctcatattgtgtgggcctttttttgtttgtttcattcattgttttttttttttttaattattttaaatgagatttttgttttttttaaatgcaatatctctgtatacagactggctgggccccaccccctgcgtgtggccctcccacagtattttgtgcaatgaagccctgctcccagcctttcagagacagggacacagcccctatttggaaccctgatcatcaccagaccctgggattggctatgggaaagcatgccacagccactcgccttcctacccccgcccgccatccccagttgcagggggatctggggactaccagagactctgggaaatggacaaggtggggggccccactctttctctcctgcagtcccgtagctggggcctccttccttctcagggtctccccagcccagtccccttgctcccatcccactcggtgctgttgggtaggggccctgccaggaactgaccagctcagcgaggagccataatgtgcatatgtgcacaagcagggttgggggaggggggtgtgaggggttgtgcccaggtgttgccccctatctcctggggagggtgaggcagggcagggacagtctccagggtcagtccctggatgggtggttacctccccttcctccaccctaagccctggggccctgaaatggggtgggagggcaggggtgggagccctcctagtgggtttggggggttgggttcctgaatgcaccataatcgctgtatgaaatattaaaaagtctaaagtgaaaaaaaaaaaaaaaaaa

SEQ ID NO: 2263 - protein, 496 aa, Homo sapiens [sequence omitted]

SEQ ID NO: 2264 - DNA, 5189 bp, Homo sapiens
ggactgcgaaaggagcagggttgcggagctagggctccagcctgcggccgcgcattcttgcgtctggccagccgcgagctctaagggtcggccccgcccggtccgcccccgcggctccctgccaggctctcgcgggcgcgctcggggtggggcctcgcggctggcggagatgcggccggggctgcgcggtggtgatgcgagcctgctgggcggcgcgccggggcagccggagccgcgcgccgcggcgctgtaatcggacaccaagagcgctcgcccccggcctccggccactttccattcactccgaggtgcttgattgagcgacgcggagaagagctccgggtgccgcggcactgcagcgctgagattcctttacaaagaaactcagaggaccgggaagaaagaatttcacctttgcgacgtgctagaaaataaggtcgtctgggaaaaggactggagacacaagcgcatccaaccccggtagcaaactgatgacttttccgtgctgatttctttcaacctcggtattttcccttggatattaacttgcatatctgaagaaatggcattccggacaatttgcgtgttggttggagtatttatttgttctatctgtgtgaaaggatcttcccagccccaagcaagagtttatttaacatttgatgaacttcgagaaaccaagacctctgaatacttcagcctttcccaccatcctttagactacaggattttattaatggatgaagatcaggaccggatatatgtgggaagcaaagatcacattctttccctgaatattaacaatataagtcaagaagctttgagtgttttctggccagcatctacaatcaaagttgaagaatgcaaaatggctggcaaagatcccacacacggctgtgggaactttgtccgtgtaattcagactttcaatcgcacacatttgtatgtctgtgggagtggcgctttcagtcctgtctgtacttacttgaacagagggaggagatcagaggaccaagttttcatgattgactccaagtgtgaatctggaaaaggacgctgctctttcaaccccaacgtgaacacggtgtctgttatgatcaatgaggagcttttctctggaatgtatatagatttcatggggacagatgctgctatttttcgaagtttaaccaagaggaatgcggtcagaactgatcaacataattccaaatggctaagtgaacctatgtttgtagatgcacatgtcatcccagatggtactgatccaaatgatgctaaggtgtacttcttcttcaaagaaaaactgactgacaataacaggagcacgaaacagattcattccatgattgctcgaatatgtcctaatgacactggtggactgcgtagccttgtcaacaagtggaccactttcttaaaggcgaggctggtgtgctcggtaacagatgaagacggcccagaaacacactttgatgaattagaggatgtgtttctgctggaaactgataacccgaggacaacactagtgtatggcatttttacaacatcaagctcagttttcaaaggatcagccgtgtgtgtgtatcatttatctgatatacagactgtgtttaatgggccttttgcccacaaagaagggcccaatcatcagctgatttcctatcagggcagaattccatatcctcgccctggaacttgtccaggaggagcatttacacccaatatgcgaaccaccaaggagttcccagatgatgttgtcacttttattcggaaccatcctctcatgtacaattccatctacccaatccacaaaaggcctttgattgttcgtattggcactgactacaagtatacaaagatagctgtggatcgagtgaacgctgctgatgggagataccatgtcctgtttctcggaacagatcggggtactgtgcaaaaagtggttgttcttcctactaacaactctgtcagtggcgagctcattctggaggagctggaagtctttaagaatcatgctcctataacaacaatgaaaatttcatctaaaaagcaacagttgtatgtgagttccaatgaaggggtttcccaggtatctctgcaccgctgccacatctatggtacagcctgtgctgactgctgcctggcgcgggacccttattgcgcctgggatggccattcctgttccagattctacccaactgggaaacggaggagccgaagacaagatgtgagacatggaaacccactgactcaatgcagaggatttaatctaaaagcatacagaaatgcagctgaaattgtgcagtatggagtaaaaaataacaccacttttctggagtgtgcccccaagtctccgcaggcatctatcaagtggctgttacagaaagacaaagacaggaggaaagaggttaagctgaatgaacgaataatagccacttcacagggactcctgatccgctctgttcagggttctgaccaaggactttatcactgcattgctacagaaaatagtttcaagcagaccatagccaagatcaacttcaaagttttagattcagaaatggtggctgttgtgacggacaaatggtccccatggacctgggccagctctgtgagggctttacccttccacccgaaggacatcatgggggcattcagccactcagaaatgcagatgattaaccaatattgcaaagacactcggcagcaacatcagcagggagatgaatcacagaaaatgagaggggactatggcaagttaaaggccctcatcaatagtcggaaaagtagaaacaggaggaatcagttgccagagtcataatattttcttatgtgggtcttatgcttccattaacaaatgctctgtcttcaatgatcaaattttgagcaaagaaacttgtgctttaccaaggggaattactgaaaaaggtgattactcctgaagtgagttttacacgaactgaaatgagcatgcattttcttgtatgatagtgactagcactagacatgtcatggtcctcatggtgcatataaatatatttaacttaacccagattttatttatatctttattcaccttttcttcaaaatcgatatggtggctgcaaaactagaattgttgcatccctcaattgaatgagggccatatccctgtggtattcctttcctgctttggggctttagaattctaattgtcagtgattttgtatatgaaaacaagttccaaatccacagcttttacgtagtaaaagtcataaatgcatatgacagaatggctatcaaaagaaatagaaaaggaagacggcatttaaagttgtataaaaacacgagttattcataaagagaaaatgatgagtttttatggttccaatgaaatatgttggggtttttttaagattgtaaaaataatcagttactggtatctgtcactgacctttgtttccttattcaggaagataaaaatcagtaacctaccccatgaagatatttggtgggagttatatcagtgaagcagtttggtttatattcttatgttatcaccttccaaacaaaagcacttactttttttggaagttatttattttagactcaaagaatataatcttgcactactcagttattactgtttgttctcttattccctagtctgtgtggcaaattaaacaatataagaaggaaaaatttgaagtattagacttctaaataaggggtgaaatcatcagaaagaaaaatcaaagtagaaactactaattttttaagaggaatttataacaaatatggctagttttcaacttcagtactcaaattcaatgattcttccttttattaaaaccagtctcagatatcatactgatttttaagtcaacactatatattttatgatcttttcagtgtgatggcaaggtgcttgttatgtctagaaagtaagaaaacaatatgaggagacattctgtctttcaaaaggtaatggtacatacgttcactggtctctaagtgtaaaagtagtaaattttgtgatgaataaaataattatctcctaattgtatgttagaataattttattagaataatttcatactgaaattattttctccaaataaaaattagatggaaaaatgtgaaaaaaattattcatgctctcatatatattttaaaaacactacttttgcttttttatttaccttttaagacattttcatgcttccaggtaaaaacagatattgtaccatgtacctaatccaaatatcatataaacattttatttatagttaataatctatgatgaaggtaattaaagtagattatggcctttttaagtattgcagtctaaaacttcaaaaactaaaatcattgtcaaaattaatatgattattaatcagaatatcagaatatgattcactatttaaactatgataaattatgataatatatgaggaggcctcgctatagcaaaaatagttaaaatgctgacataacaccaaacttcattttttaaaaaatctgttgttccaaatgtgtataattttaaagtaatttctaaagcagtttattataatggtttgcctgcttaaaaggtataattaaacttcttttctcttctacattgacacacagaaatgtgtcaatgtaaagccaaaaccatcttctgtgtttatggccaatctattctcaaagttaaaagtaaaattgtttcagagtcacagttccctttatttcacataagcccaaactgatagacagtaacggtgtttagttttatactatatttgtgctatttaattctttctattttcacaattattaaattgtgtacactttcattacttttaaaaatgtagaaattcttcatgaacataactctgctgaatgtaaaagaaaattttttttcaaaaatgctgttaatgtatactactggtggttgattggttttattttatgtagcttgacaattcagtgacttaatatctattccatttgtattgtacataaaattttctagaaatacacttttttccaaagtgtaagtttgtgaatagattttagcatgatgaaactgtcataatggtgaatgttcaatctgtgtaagaaaacaaactaaatgtagttgtcacactaaaatttaattggatattgatgaaatcattggcctggcaaaataaaacatgttgaattccccaaaaaaaaaaaaaaaa

SEQ ID NO: 2265 - protein, 751 aa, Homo sapiens
MAFRTICVLVGVFICSICVKGSSQPQARVYLTFDELRETKTSEYFSLSHHPLDYRILLMDEDQDRIYVGSKDHILSLNINNISQEALSVFWPASTIKVEECKMAGKDPTHGCGNFVRVIQTFNRTHLYVCGSGAFSPVCTYLNRGRRSEDQVFMIDSKCESGKGRCSFNPNVNTVSVMINEELFSGMYIDFMGTDAAIFRSLTKRNAVRTDQHNSKWLSEPMFVDAHVIPDGTDPNDAKVYFFFKEKLTDNNRSTKQIHSMIARICPNDTGGLRSLVNKWTTFLKARLVCSVTDEDGPETHFDELEDVFLLETDNPRTTLVYGIFTTSSSVFKGSAVCVYHLSDIQTVFNGPFAHKEGPNHQLISYQGRIPYPRPGTCPGGAFTPNMRTTKEFPDDVVTFIRNHPLMYNSIYPIHKRPLIVRIGTDYKYTKIAVDRVNAADGRYHVLFLGTDRGTVQKVVVLPTNNSVSGELILEELEVFKNHAPITTMKISSKKQQLYVSSNEGVSQVSLHRCHIYGTACADCCLARDPYCAWDGHSCSRFYPTGKRRSRRQDVRHGNPLTQCRGFNLKAYRNAAEIVQYGVKNNTTFLECAPKSPQASIKWLLQKDKDRRKEVKLNERIIATSQGLLIRSVQGSDQGLYHCIATENSFKQTIAKINFKVLDSEMVAVVTDKWSPWTWASSVRALPFHPKDIMGAFSHSEMQMINQYCKDTRQQHQQGDESQKMRGDYGKLKALINSRKSRNRRNQLPES

SEQ ID NO: 2266 - DNA, 14985 bp, Homo sapiens
cctaattacatagttgaaaagcgtgaatcgggtacaacagcttggcagcttgtcaattccagtgtcaagcgcactcaaattaaagtcactcatctcacaaaatacatggaatattctttccgtgtcagttcagagaacagatttggtgtcagcaaacctctagaatcagcaccaataattgctgaacatccatttgtcccaccaagcgctcctaccagacctgaggtctaccatgtgtctgccaatgccatgtctattcgttgggaagaaccctaccacgatggtggcagtaaaatcattggctactgggttgagaagaaagaacgtaatacaattctttgggtgaaagaaaacaaagtgccatgcttagagtgcaactacaaagtaactggtttagtagaaggactggaatatcagttcagaacttatgcactcaatgctgcaggtgttagcaaggccagcgaagcttcaagacctataatggctcaaaatccagttgatgcaccaggcagaccaggggtgacagatgtccaaagatcaacagtatcactgatttggtctgccccagcgtatgatggaggcagcaaggttgtgggctacatcatagagcgtaagccagtcagtgaggtaggagatggtcgctggctgaagtgcaactacaccattgtatctgacaatttcttcaccgtgactgctctcagtgaaggagacacttatgagttccgtgtgttagccaagaatgcagcaggcgtaattagcaaagggtctgaatctacaggccctgtcacttgccgagatgaatacgctccacccaaagccgaactggatgcccgattacacggtgatctggttaccatcagagcaggttctgatcttgttctggatgctgcagttggtggcaaacctgaacccaaaattatctggaccaaaggagacaaggagctagatctctgtgaaaaagtctctttgcagtatactggcaaacgagcaactgctgtgatcaagttctgtgacagaagtgacagtggaaaatacactttaacagtgaaaaatgccagcgggaccaaggccgtgtctgtcatggtcaaagtgcttgattcccctggcccatgtggaaagctcaccgtcagcagagtaacacaggagaagtgcactttagcctggagccttccgcaggaagacggaggagcagaaatcactcactacatcgtggaaagacgcgagactagcaggctcaactgggtgattgttgaaggcgaatgcccaaccctatcctatgtcgttaccaggctcatcaagaacaatgagtacatattccgagtgagggcagtaaacaaatatggccctggtgtgcctgttgaatcagagccaattgtagccagaaactcattcactattccatcaccacccggcatacctgaagaagttgggactggcaaagagcatatcatcattcagtggacaaaacctgaatctgatggtggcaatgaaatcagcaactacctagtagacaaacgtgagaaggagagcctgcgctggacacgtgtcaacaaagactatgtggtgtatgataccaggctgaaggtgaccagcctgatggagggttgtgattaccagttccgggtgaccgcagtgaatgcagctggtaacagtgagcccagcgaacgttccaacttcatctcatgcagagaaccatcatatacccctggaccaccttctgctccaagagttgtggataccaccaaacacagcattagtttggcatggaccaaacccatgtacgatggtggtactgacattgtaggatatgttctggaaatgcaagagaaggacactgatcagtggtaccgagtgcataccaatgccacaataagaaatactgaattcactgtgccagaccttaaaatgggccagaaatattccttcagagttgctgccgtgaacgtgaagggtatgagcgaatacagcgaatcaattgctgaaattgagcccgtggaaagaatagaaataccagatcttgagcttgcagatgatctaaagaagactgtgaccatcagggctggggcctccttgcgcttgatggtgtctgtatctggaagaccacctcctgtcataacgtggagcaagcagggcattgaccttgcaagccgggcaattattgacaccactgagagctactcattgctaatagtggacaaagttaatcggtacgatgctggaaaatacacaattgaagctgaaaaccaatctggcaagaaatcagcaacagtccttgttaaagtctatgatactcctggtccctgtccttcagtgaaagttaaggaagtatcaagagattctgtgactataacttgggaaattcccacgattgatggtggagctccaatcaacaattacatcgttgagaagcgtgaagctgctatgagagcattcaaaacagtaactaccaaatgcagcaagacactttacagaatttctggacttgtagaaggaaccatgcactatttcagagtgctgccagaaaatatttatggcattggagaaccttgtgaaacatctgatgcagtactggtctcagaagtgcctttggtgcctgcaaagctagaagtggtcgatgtcaccaaatccactgttacccttgcctgggaaaaaccactctacgatggtggtagccgactcactggatatgttctcgaggcctgcaaagctggcacagagagatggatgaaggttgtcaccttaaaacccacagtcctagagcacactgttacttccttaaatgaaggtgaacaatacttatttagaataagggcacaaaatgagaaaggtgtgtcagaaccaagagagactgtcacagccgtgactgtacaagacctcagagtgttgccaacaatcgatctttctacaatgcctcagaagaccatccatgtcccagctggcagaccagtagagctggtgatacctattgctggccgtccacctcctgctgcttcctggttctttgctggttctaaactgagagaatcagagcgtgtcacagttgaaactcacactaaagtagctaaattaaccatccgtgaaaccactatcagagatactggagaatacacacttgaattgaagaatgttaccggaactactttagaaaccattaaagttatcattcttgacaagcctggtccaccaacaggacctattaagattgatgaaattgatgctacatcaattaccatttcctgggaaccacctgaattggacggtggtgctccactgagtggttatgtggtagaacaacgtgacgctcatcgtccaggatggctgcccgtttctgaatcagtgactaggtccacgtttaagtttaccagactcaccgaaggaaatgagtatgtgttccgtgtggctgcaacaaaccgcttcgggattggctcttacttgcagtctgaggtcatagagtgtcgcagcagcatccgtattcctggacccccagaaacattacagatatttgatgtttcccgtgatggcatgacacttacttggtacccaccagaggatgacggtggctcccaagtgactggatatattgtggagcgcaaagaagtgagagcagatcgatgggtccgtgtaaataaagtacctgtgacaatgacacggtaccgctccactggccttactgaaggcttagaatatgaacaccgtgtcacagccattaatgcaagagggtctgggaaaccaagtcgtccttccaaacccatcgttgccatggatccaattgctcctccaggaaagccacaaaacccaagagttactgatacaacaaggacatcagtctccctggcctggagtgttccagaagatgaaggaggatctaaagtcacaggctacttgattgaaatgcaaaaagtagatcaacatgaatggaccaagtgtaacaccactccaaccaagattcgagagtatactctaacacacctacctcagggtgcagaatacaggttccgcgtcctagcttgtaatgctggtggacctggtgagcctgctgaggtaccaggaacagtcaaagtcactgaaatgcttgaatatcctgattatgaacttgatgaaagataccaagaaggtatctttgtaaggcaaggtggcgtcatcagacttaccataccaatcaaagggaaaccattcccaatatgtaaatggaccaaggaaggccaggatattagtaagcgtgccatgattgcaacatctgaaacacacactgagcttgtgatcaaagaagcagacaggggtgattctggcacttatgacctggttctggaaaataaatgtggcaagaaggctgtctacatcaaggtcagggtgataggaagtcccaacagtccagaagggccactggaatatgatgacatccaagtccgctctgtgagggtcagctggagacctcctgctgatgatggtggtgctgacatcttaggctacatcctcgagagacgagaagtgcctaaagccgcctggtataccattgattccagagtccgaggtacatctctggtggtaaaaggcctcaaagagaatgtagaataccatttccgtgtttcagcagaaaaccagtttggcataagcaaacccttgaaatctgaggaaccagtcacaccaaaaacaccattgaatcctccagaacctccaagcaatcctccagaagtactcgatgtaaccaagagttctgttagcttgtcctggtcccggcccaaagatgatggtggttctagagtcacaggctactacatcgaacgcaaagagacatccactgacaaggtggtcagacacaacaagactcagatcaccaccacaatgtacactgtcacagggcttgttcccgatgctgagtatcagttccgcatcatcgcacagaatgatgttggcctgagtgagaccagccctgcttctgaaccagttgtttgcaaagatccatttgataaaccaagccaaccaggagaacttgagattctttcaatatccaaagatagtgtcactctacagtgggagaaacctgaatgtgatggtggtaaagaaattcttggatactgggttgaatatagacagtctggagacagtgcctggaagaagagcaataaggaacgtattaaggacaagcaattcacaataggaggtttgctggaagctactgagtatgaattcagggtttttgctgagaatgagactgggctgagcagacctcgcagaactgctatgtctataaagactaaactcacatctggagaggccccaggaatacgcaaagaaatgaaggatgttaccacaaaattgggtgaagctgctcaactctcatgccagattgttggaaggcctcttcctgacattaaatggtacagatttggtaaagagctcatacaaagccggaaatacaaaatgtcttcagatggacgcacacacactcttacagtaatgacagaggaacaggaagatgaaggtgtttatacctgcatagccaccaatgaggttggagaagtagaaaccagtagtaagcttctcctgcaagcaacaccgcagttccatcctggttacccactgaaagagaaatattatggagctgtgggttccacacttcggcttcatgttatgtacattggtcgtccagtacctgccatgacttggttccatggtcagaaacttttgcaaaactcagaaaacattactattgaaaacactgagcactatactcatcttgtcatgaagaatgtccaacgtaagactcatgctgggaaatacaaagtccagctcagcaatgtttttggaacagttgatgccatccttgatgtggaaatacaagataaaccagacaaacctacaggaccaattgtgatcgaagctctattgaagaactccgcagtgatcagctggaaaccacccgcagatgacggaggctcctggatcaccaactatgtggtggaaaaatgtgaggccaaggagggggctgaatggcaattggtgtcttcagccatctcagtgacaacctgtagaattgtgaacctcacagaaaatgctggctattacttccgggtttcagctcagaacactttcggcatcagtgaccctctagaagtgtcctcagttgtgatcattaagagtccatttgaaaagccaggtgctcctggcaaaccaactattactgctgtcacaaaagattcttgtgttgtggcctggaagccacctgccagtgatggaggtgcaaagattagaaattactaccttgagaagcgtgagaagaagcagaataaatggatttctgtgacaacagaagaaattcgagaaactgtcttttcagtgaaaaaccttattgaaggtcttgaatacgagtttcgtgtgaaatgtgaaaatctaggtggggaaagtgaatggagtgaaatatcagaacccatcactcccaaatctgatgtcccaattcaggcaccacactttaaagaggaactgagaaatctaaatgtcagatatcagagcaatgctaccttggtctgcaaagtgactggtcatccaaaacctatcgtcaaatggtacagacaaggcaaagaaatcattgcagatggattaaaatataggattcaagaatttaagggtggctaccaccagctcatcattgcaagtgtcacagatgatgatgccacagtttaccaagtcagagctaccaaccaagggggatctgtgtctggcactgcctccttggaagtggaagttccagctaagatacacttacctaaaactcttgaaggcatgggagcagttcatgctctccgaggtgaagtggtcagcatcaagattcctttcagtggcaaaccagatcctgtgatcacctggcagaaaggacaagatctcattgacaataatggccactaccaagttattgtcacaagatccttcacatcacttgttttccccaatggggtagagagaaaagatgctggtttctatgtggtctgtgctaaaaacagatttggaattgatcagaagacagttgaactggatgtggctgatgttcctgacccacccagaggagtcaaagttagtgatgcctcacgagattctgtcaacttaacatggactgagccagcctctgatggtggcagcaaaatcaccaactacattgttgaaaaatgtgcaactactgcagaaagatggctccgtgtaggacaggcccgagaaacacgttataccgtgatcaacttatttggaaaaacaagttaccagttccgggtaatagctgaaaataaatttggtctgagcaagccttcagagccttcagaaccaaccataaccaaagaagataagaccagagctatgaactatgatgaagaggtagatgaaaccagggaagtctccatgactaaagcatctcactcttcaaccaaggaactctatgagaaatatatgattgctgaagatcttgggcgtggtgagtttggaattgtccatcgttgtgttgaaacatcctcaaagaagacatacatggccaaatttgttaaagtcaaagggactgatcaggttttggtaaagaaggaaatttccattctgaatattgctaggcatagaaacatcttacacctccatgaatcatttgaaagcatggaagaattagttatgatctttgagtttatatcaggacttgacatatttgagcgcattaacacaagtgcttttgaacttaatgaaagagaaattgtaagttatgttcaccaggtctgtgaagcacttcagtttttacacagtcataatattggacactttgacattagaccagaaaatatcatttaccaaaccagaagaagctctaccattaaaatcatagaatttggtcaagcccgtcagctgaaaccaggggacaacttcaggcttctattcactgccccagaatactatgcacctgaagtccaccagcatgatgttgtcagcacagccacagacatgtggtcacttggaacactggtatatgtgctattgagtggtatcaacccattcctggctgaaactaaccaacagatcattgagaatatcatgaatgctgaatatactttcgatgaggaagcattcaaagagattagcattgaagccatggattttgttgaccggttgttagtgaaagagaggaaatctcgcatgacagcatcggaggctctccagcacccatggttgaagcagaagatagaaagagtcagtactaaagttatcagaacattaaaacaccggcgttattaccacaccctgatcaagaaagacctcaacatggttgtgtcagcagcccggatctcctgtggtggtgcaattcgatctcagaagggagtgagtgttgctaaagttaaagtggcatccattgaaattggcccagtttctgggcagataatgcatgcagttggtgaagaaggaggacatgtcaaatatgtatgcaaaattgaaaattatgatcagtctacccaagtgacttggtactttggtgtccgacagctggagaacagtgagaaatacgaaatcacctacgaagatggagtggccatcctctatgtcaaagacattaccaaattagatgatggtacctacagatgcaaagtagtcaatgactatggtgaagacagttcttatgcagagctatttgttaaaggtgtgagagaagtctatgactattactgccgtagaaccatgaagaaaattaagcgcagaacagacacaatgagactcctggaaaggccaccagaatttaccctgcctctctataataagacagcttatgtaggtgaaaatgtccggtttggagtaactataactgtccacccagagcctcatgtaacatggtataaatcaggtcagaaaatcaaaccaggtgacaatgacaagaagtacacatttgagtcagacaagggtctttaccaattaacaatcaacagtgtcactacagatgatgacgctgaatatactgttgtggcaaggaacaaatatggtgaagacagctgtaaagcaaagctgacagtaaccctacacccacctccaacagatagtaccttaagacccatgttcaaaaggttactggcaaatgcagaatgccaagaaggccaaagtgtctgctttgagatcagagtgtctggcatccccccaccaacattaaaatgggagaaagatggtcagccactgtccctcgggcctaacattgaaattatccatgaaggcttggattattatgctctgcacatcagggacactttgcctgaagacacgggttattatagagtcacagccactaacacagctgggtccaccagctgccaggctcacctacaagtggaacgcctgaggtacaagaaacaggaattcaagagtaaggaggagcatgagcgacacgtacaaaaacaaattgacaaaaccctcagaatggctgaaattctttctggaactgaaagtgtaccactgacacaggtagctaaagaggctctgagagaagctgctgtcctttataaaccggctgtaagcaccaagactgtaaaaggggaattcagacttgagatagaagaaaagaaggaggagagaaaactccggatgccttatgatgtaccagagccacgcaagtataagcagactaccatagaagaagaccaacgcatcaagcagttcgtgcccatgtctgacatgaagtggtataaaaagatacgtgatcagtatgaaatgcctgggaaacttgacagagttgtacagaaacgacccaagcgcatccgcctttcaagatgggaacagttctatgtgatgcctcttccacgcattacagatcaatacagacctaaatggcgtattcctaaactgtcccaagatgatcttgagatagtgagaccagcccgccggcgtacaccttctcctgattatgacttttactaccgacctagaagacgttctcttggggacatctctgatgaagaattactcctccccattgatgactacttagcaatgaaaagaacagaggaagagaggctgcgtcttgaagaagagcttgagttaggtttttcagcttcacccccaagtcgaagccctccacactttgagctttctagcctacgttactcttcaccacaagctcatgtcaaggtggaggaaacaagaaaaaacttcaggtattcaacctatcacatcccaacgaaggctgaagctagtacaagttatgcagaactgagggaacggcatgcccaggctgcgtacagacagccaaagcaacggcaaagaatcatggctgagagggaggatgaagagttgcttcgcccagttacgaccacccagcatctctcagaatacaaaagcgaacttgacttcatgtcaaaggaggaaaagtctagaaagaaatcaaggcgacaaagagaagtgacagaaataacagaaattgaggaagaatacgaaatctcaaaacatgctcaaagagaatcatcctcatctgcgtctagactactgagacgacggcgctccctgtctccaacttatattgagttaatgaggccagtgtctgagctgatccggtcacgtccacaaccggctgaggaatacgaagatgacacagaaagaaggtcacctactccagagagaactcgcccacgatcccccagccctgtgtctagtgagagatcactctcgagatttgagaggtctgcaagatttgatatcttttccaggtatgagtccatgaaagctgctttaaaaactcagaagacatcagaaaggaagtatgaagttttgagtcagcagcctttcacactggaccatgcccctcgaatcacactgagaatgcgctcgcacagggtaccatgtggccaaaatacacgttttattttaaatgttcagtctaagccaactgccgaagttaaatggtaccacaatggtgtggaactccaagaaagcagtaagattcattacaccaacacgagtggagttctcaccctggaaattctggactgtcatactgatgacagtggaacctaccgtgctgtgtgcaccaactacaagggcgaacgttctgactatgcaacgttggacgtgacaggaggggattataccacctatgcttcccaacgcagagatgaagaggtccccagatctgttttccctgagctgacaagaacagaggcgtatgctgttccatcatttaagaaaacatctgagatggaagcttcgtcttctgtcagggaagtgaaatcacagatgacggagacaagggaaagtctctcctcatatgaacactctgcatctgcagaaatgaaaagtgctgcattagaagaaaagtcactggaagaaaaatccacaaccagaaagatcaagacgactttggcggcaagaattctaacaaagccacggtccatgaccgtctacgagggcgagtctgcaaggttttcttgtgacaccgatggtgagccggtaccaactgtgacctggctgcgtaaaggacgagtgctaagtacttctgcccgccaccaagtgaccaccacaaagtacaaatcaacctttgagatctcttcagtccaggcttccgatgagggcaattacagcgtggtggtagaaaacagtgaagggaaacaagaagcagagttcactctgactattcaaaaggccagggtaactgaaaaggctgtgacatcaccaccaagagtcaaatccccagagcctcgggtgaaatccccagaagcagttaagtctccaaaacgagtgaaatctccagaaccttctcacccgaaagccgtatcacccacagagacaaaaccaacaccaatagagaaagttcagcacctcccagtctctgccccaccaaagattactcagttcctgaaagcagaagcttctaaagagattgcaaaactgacctgtgtggttgaaagcagtgtattaagggcaaaagaggtcacctggtataaagatggcaagaaactgaaggaaaatgggcatttccagtttcattattcagcagatggtacctatgagctcaaaatcaataacctcactgaatctgatcaaggagaatatgtttgtgagatttctggtgaaggtggaacgtctaaaaccaacttacaatttatggggcaagcctttaagagtatccatgagaaggtatcaaaaatatcagaaactaagaaatcagatcagaaaaccactgagtcaacagtaaccagaaaaactgaaccaaaagctcctgaaccaatttcctcaaaaccagtaattgttactgggttgcaggatacaactgtttcttcagacagtgttgctaaatttgcagttaaggctactggagaaccccggccaactgccatctggacaaaagatggaaaggccattacacaaggaggtaaatataaactctctgaagacaagggagggttcttcttagaaattcataagactgatacttctgacagtggactttatacttgtacagtaaaaaattcagctggatctgtgtcctctagctgcaaattaacaataaaagctataaaagatactgaggcacagaaagtctctacacaaaagacttctgaaattacacctcagaagaaagctgttgtccaagaggaaatttcccaaaaagccctaaggtctgaagaaattaagatgtcagaggcaaaatctcaagaaaagttagccctcaaagaggaagcttcaaaggttctgatttctgaagaagtcaagaaatcagcagcaacctccctggaaaaatccattgtccatgaggaaatcactaaaacatcacaggcatcagaagaagtcagaactcatgctgagattaaagcattttctactcagatgagcataaacgaaggtcaaagactggttttaaaagccaacattgctggtgccactgatgtgaaatgggtactgaatggcgtagagcttaccaactctgaggagtaccgatatggtgtctcaggcagcgatcagaccctaaccatcaagcaagccagtcacagagatgaaggaatcctcacctgcataagcaaaaccaaggaaggaatcgtcaagtgtcagtatgatttgacactgagcaaagaactctcagatgctccagccttcatctcacagcctagatctcaaaatattaatgaaggacaaaatgttctctttactcgtgaaatcagtggcgagccatcccctgaaatcgaatggtttaaaaacaacctgccaatttctatttcttcaaatgtcagcataagccgctccagaaatgtatactcccttgaaatccgaaatgcatcagtcagcgacagtggaaagtacacaattaaggccaaaaatttccgtggccagtgttcagctacagcttccttaatggtccttcctctagttgaagaaccttccagagaggtagtattgagaacaagtggtgacacaagcttgcaaggaagcttctcgtctcagtcagtccaaatgtctgcctccaagcaggaggcctccttcagcagtttcagcagcagcagtgctagcagcatgactgagatgaaatttgcaagcatgtctgcccaaagcatgtcctccatgcaagagtcctttgtagaaatgagttccagcagctttatgggaatatctaatatgacacaactggaaagctcaactagtaaaatgcttaaagcaggcataagaggaattccgcctaaaattgaagctcttccatctgatatcagcattgatgaaggcaaagttctaacagtagcctgtgctttcacgggtgagcctaccccagaagtaacatggtcctgtggtggaagaaaaatccacagtcaagaacaggggaggttccacattgaaaacacagatgacctgacaaccctgatcatcatggacgtacagaaacaagatggtggactttataccctgagtttagggaatgaatttggatctgactctgccactgtgaatatacatattcgatccatttaagagggcctgtgccttatactctacactcattcttaacttttcgcaaacgtttcacacggactaatctttctgaactgtaaatatttaaagaaaaaaagtagttttgtatcaacctaaatgagtcaaagttcaaaaatattcatttcaatcttttcataattgttgacctaagaatataatacatttgctagtgacatgtacatactgtatatagccggattaacggttataaagttttgtaccatttattttatgacattttacaatgtaagttttgaaactaactgttggtaggagaaagtttcttatggaacgaataccctgctcaacatttaatcaatctttgtgcctcaacatactgttgatgtctaagtatgcctcagtgggttgagaaaatccccattgaagatgtcctgtccacctaaaagagaatgatgctgtgcatatcacttgatatgtgcaccaatacctactgaatcagaaatgtaaggcattggtgatgtttgcatttaccctcctgtaagcaacactttaacgtcttacattttctctgatgatgtcacacaaaattatcatgacaaatattaccagagcaaagtgtaacggccaacactttgttcgctcattttacgctgtctctgacataaggagtgcctgaatagcttggaaaagtaacatctcctggccatcccttcatttaaccaagctattcaagtattcctatgccagagcagtgccaactcttggaggtcccagagtgcagccaatgcctttgtgtggtagttctaaattttaattgcacctgaaaaacctgggcacctaagcaatgagccacagcaaaaagtaaagaacaacaacaaaataaagctgttgttaaattttaaacaatattactaattgcccaaaatgtcaatttgatgtagttcttttcatgcaagtataaattcaattgttagttataattgttggacctccttgagatagtaacaacaaaataaagcaagctatctgcacctcaaaaaaaaaaaaaaa

SEQ ID NO: 2267 - protein, 4650 aa, Homo sapiens
PNYIVEKRESGTTAWQLVNSSVKRTQIKVTHLTKYMEYSFRVSSENRFGVSKPLESAPIIAEHPFVPPSAPTRPEVYHVSANAMSIRWEEPYHDGGSKIIGYWVEKKERNTILWVKENKVPCLECNYKVTGLVEGLEYQFRTYALNAAGVSKASEASRPIMAQNPVDAPGRPGVTDVQRSTVSLIWSAPAYDGGSKVVGYIIERKPVSEVGDGRWLKCNYTIVSDNFFTVTALSEGDTYEFRVLAKNAAGVISKGSESTGPVTCRDEYAPPKAELDARLHGDLVTIRAGSDLVLDAAVGGKPEPKIIWTKGDKELDLCEKVSLQYTGKRATAVIKFCDRSDSGKYTLTVKNASGTKAVSVMVKVLDSPGPCGKLTVSRVTQEKCTLAWSLPQEDGGAEITHYIVERRETSRLNWVIVEGECPTLSYVVTRLIKNNEYIFRVRAVNKYGPGVPVESEPIVARNSFTIPSPPGIPEEVGTGKEHIIIQWTKPESDGGNEISNYLVDKREKESLRWTRVNKDYVVYDTRLKVTSLMEGCDYQFRVTAVNAAGNSEPSERSNFISCREPSYTPGPPSAPRVVDTTKHSISLAWTKPMYDGGTDIVGYVLEMQEKDTDQWYRVHTNATIRNTEFTVPDLKMGQKYSFRVAAVNVKGMSEYSESIAEIEPVERIEIPDLELADDLKKTVTIRAGASLRLMVSVSGRPPPVITWSKQGIDLASRAIIDTTESYSLLIVDKVNRYDAGKYTIEAENQSGKKSATVLVKVYDTPGPCPSVKVKEVSRDSVTITWEIPTIDGGAPINNYIVEKREAAMRAFKTVTTKCSKTLYRISGLVEGTMHYFRVLPENIYGIGEPCETSDAVLVSEVPLVPAKLEVVDVTKSTVTLAWEKPLYDGGSRLTGYVLEACKAGTERWMKVVTLKPTVLEHTVTSLNEGEQYLFRIRAQNEKGVSEPRETVTAVTVQDLRVLPTIDLSTMPQKTIHVPAGRPVELVIPIAGRPPPAASWFFAGSKLRESERVTVETHTKVAKLTIRETTIRDTGEYTLELKNVTGTTLETIKVIILDKPGPPTGPIKIDEIDATSITISWEPPELDGGAPLSGYVVEQRDAHRPGWLPVSESVTRSTFKFTRLTEGNEYVFRVAATNRFGIGSYLQSEVIECRSSIRIPGPPETLQIFDVSRDGMTLTWYPPEDDGGSQVTGYIVERKEVRADRWVRVNKVPVTMTRYRSTGLTEGLEYEHRVTAINARGSGKPSRPSKPIVAMDPIAPPGKPQNPRVTDTTRTSVSLAWSVPEDEGGSKVTGYLIEMQKVDQHEWTKCNTTPTKIREYTLTHLPQGAEYRFRVLACNAGGPGEPAEVPGTVKVTEMLEYPDYELDERYQEGIFVRQGGVIRLTIPIKGKPFPICKWTKEGQDISKRAMIATSETHTELVIKEADRGDSGTYDLVLENKCGKKAVYIKVRVIGSPNSPEGPLEYDDIQVRSVRVSWRPPADDGGADILGYILERREVPKAAWYTIDSRVRGTSLVVKGLKENVEYHFRVSAENQFGISKPLKSEEPVTPKTPLNPPEPPSNPPEVLDVTKSSVSLSWSRPKDDGGSRVTGYYIERKETSTDKVVRHNKTQITTTMYTVTGLVPDAEYQFRIIAQNDVGLSETSPASEPVVCKDPFDKPSQPGELEILSISKDSVTLQWEKPECDGGKEILGYWVEYRQSGDSAWKKSNKERIKDKQFTIGGLLEATEYEFRVFAENETGLSRPRRTAMSIKTKLTSGEAPGIRKEMKDVTTKLGEAAQLSCQIVGRPLPDIKWYRFGKELIQSRKYKMSSDGRTHTLTVMTEEQEDEGVYTCIATNEVGEVETSSKLLLQATPQFHPGYPLKEKYYGAVGSTLRLHVMYIGRPVPAMTWFHGQKLLQNSENITIENTEHYTHLVMKNVQRKTHAGKYKVQLSNVFGTVDAILDVEIQDKPDKPTGPIVIEALLKNSAVISWKPPADDGGSWITNYVVEKCEAKEGAEWQLVSSAISVTTCRIVNLTENAGYYFRVSAQNTFGISDPLEVSSVVIIKSPFEKPGAPGKPTITAVTKDSCVVAWKPPASDGGAKIRNYYLEKREKKQNKWISVTTEEIRETVFSVKNLIEGLEYEFRVKCENLGGESEWSEISEPITPKSDVPIQAPHFKEELRNLNVRYQSNATLVCKVTGHPKPIVKWYRQGKEIIADGLKYRIQEFKGGYHQLIIASVTDDDATVYQVRATNQGGSVSGTASLEVEVPAKIHLPKTLEGMGAVHALRGEVVSIKIPFSGKPDPVITWQKGQDLIDNNGHYQVIVTRSFTSLVFPNGVERKDAGFYVVCAKNRFGIDQKTVELDVADVPDPPRGVKVSDASRDSVNLTWTEPASDGGSKITNYIVEKCATTAERWLRVGQARETRYTVINLFGKTSYQFRVIAENKFGLSKPSEPSEPTITKEDKTRAMNYDEEVDETREVSMTKASHSSTKELYEKYMIAEDLGRGEFGIVHRCVETSSKKTYMAKFVKVKGTDQVLVKKEISILNIARHRNILHLHESFESMEELVMIFEFISGLDIFERINTSAFELNEREIVSYVHQVCEALQFLHSHNIGHFDIRPENIIYQTRRSSTIKIIEFGQARQLKPGDNFRLLFTAPEYYAPEVHQHDVVSTATDMWSLGTLVYVLLSGINPFLAETNQQIIENIMNAEYTFDEEAFKEISIEAMDFVDRLLVKERKSRMTASEALQHPWLKQKIERVSTKVIRTLKHRRYYHTLIKKDLNMVVSAARISCGGAIRSQKGVSVAKVKVASIEIGPVSGQIMHAVGEEGGHVKYVCKIENYDQSTQVTWYFGVRQLENSEKYEITYEDGVAILYVKDITKLDDGTYRCKVVNDYGEDSSYAELFVKGVREVYDYYCRRTMKKIKRRTDTMRLLERPPEFTLPLYNKTAYVGENVRFGVTITVHPEPHVTWYKSGQKIKPGDNDKKYTFESDKGLYQLTINSVTTDDDAEYTVVARNKYGEDSCKAKLTVTLHPPPTDSTLRPMFKRLLANAECQEGQSVCFEIRVSGIPPPTLKWEKDGQPLSLGPNIEIIHEGLDYYALHIRDTLPEDTGYYRVTATNTAGSTSCQAHLQVERLRYKKQEFKSKEEHERHVQKQIDKTLRMAEILSGTESVPLTQVAKEALREAAVLYKPAVSTKTVKGEFRLEIEEKKEERKLRMPYDVPEPRKYKQTTIEEDQRIKQFVPMSDMKWYKKIRDQYEMPGKLDRVVQKRPKRIRLSRWEQFYVMPLPRITDQYRPKWRIPKLSQDDLEIVRPARRRTPSPDYDFYYRPRRRSLGDISDEELLLPIDDYLAMKRTEEERLRLEEELELGFSASPPSRSPPHFELSSLRYSSPQAHVKVEETRKNFRYSTYHIPTKAEASTSYAELRERHAQAAYRQPKQRQRIMAEREDEELLRPVTTTQHLSEYKSELDFMSKEEKSRKKSRRQREVTEITEIEEEYEISKHAQRESSSSASRLLRRRRSLSPTYIELMRPVSELIRSRPQPAEEYEDDTERRSPTPERTRPRSPSPVSSERSLSRFERSARFDIFSRYESMKAALKTQKTSERKYEVLSQQPFTLDHAPRITLRMRSHRVPCGQNTRFILNVQSKPTAEVKWYHNGVELQESSKIHYTNTSGVLTLEILDCHTDDSGTYRAVCTNYKGERSDYATLDVTGGDYTTYASQRRDEEVPRSVFPELTRTEAYAVPSFKKTSEMEASSSVREVKSQMTETRESLSSYEHSASAEMKSAALEEKSLEEKSTTRKIKTTLAARILTKPRSMTVYEGESARFSCDTDGEPVPTVTWLRKGRVLSTSARHQVTTTKYKSTFEISSVQASDEGNYSVVVENSEGKQEAEFTLTIQKARVTEKAVTSPPRVKSPEPRVKSPEAVKSPKRVKSPEPSHPKAVSPTETKPTPIEKVQHLPVSAPPKITQFLKAEASKEIAKLTCVVESSVLRAKEVTWYKDGKKLKENGHFQFHYSADGTYELKINNLTESDQGEYVCEISGEGGTSKTNLQFMGQAFKSIHEKVSKISETKKSDQKTTESTVTRKTEPKAPEPISSKPVIVTGLQDTTVSSDSVAKFAVKATGEPRPTAIWTKDGKAITQGGKYKLSEDKGGFFLEIHKTDTSDSGLYTCTVKNSAGSVSSSCKLTIKAIKDTEAQKVSTQKTSEITPQKKAVVQEEISQKALRSEEIKMSEAKSQEKLALKEEASKVLISEEVKKSAATSLEKSIVHEEITKTSQASEEVRTHAEIKAFSTQMSINEGQRLVLKANIAGATDVKWVLNGVELTNSEEYRYGVSGSDQTLTIKQASHRDEGILTCISKTKEGIVKCQYDLTLSKELSDAPAFISQPRSQNINEGQNVLFTREISGEPSPEIEWFKNNLPISISSNVSISRSRNVYSLEIRNASVSDSGKYTIKAKNFRGQCSATASLMVLPLVEEPSREVVLRTSGDTSLQGSFSSQSVQMSASKQEASFSSFSSSSASSMTEMKFASMSAQSMSSMQESFVEMSSSSFMGISNMTQLESSTSKMLKAGIRGIPPKIEALPSDISIDEGKVLTVACAFTGEPTPEVTWSCGGRKIHSQEQGRFHIENTDDLTTLIIMDVQKQDGGLYTLSLGNEFGSDSATVNIHIRSI

SEQ ID NO: 2268 - DNA, 1039 bp, Homo sapiens
  misc_feature (313)..(313): n is a, c, g, or t
  misc_feature (481)..(481): n is a, c, g, or t
  misc_feature (1005)..(1005): n is a, c, g, or t
  misc_feature (1027)..(1027): n is a, c, g, or t
  misc_feature (1029)..(1029): n is a, c, g, or t
tttttttttttttttttttatatccatatctttatttaaacaagtttccataatagctaggagaatacagcattaatgacacacatttactaagcacaacaatggacaactacaaatttagagcataaatgtaattctgatattgttttggtttttatcttagcactaggtgatatctagtgaaaacccatgtttcaaaggcttttgttgatatgagatgaattattaacttatttttaaaaattgcacgtgagatatgctagaatgggttctagagtctagagttagttgataatgcctttcatgtctcagnatttctgcttcctttttaatgggtaaatgtttcacctaagaactttcaaaaaattgtatcaaaattttctatgcagatcaaagtagaattccttttccagacccaacaaggaaaaatatttgaaaactgcaatgttcaattccattttagttaaaaaggtgtccattncatagtaaattaatacagttaataattaaaataccatatgttaaatgcatgaactcatttttgcgcacactgttagcgcattttaaattcccaagacacaaaaagtcattttacctgagatcccacaaaataccatacccggatctaatttccacattttttcccatttaagaaaaaattcccatggtgggaaaaataaggctcaatgattaggggcctaaatgggctaaatttttacatgataccataaatttgaacggtgctttgaaaggctaaatttctacctcgcaggcctatttatatccgttcactaaaaaactttttttttaaattaaagcttacatggggagaggttttttgatccacgccctttgtagctaacttttagccacatcacaaaaagttaagctttgagattttaaattttgccccggggcggatcggatagccggcaccgctttttatattttttgtaaaaaaaaaatgtatgtttttgaaattttccccccccccaaccggggggngccggttttttaaaaagggggngnccagcacata

SEQ ID NO: 2269 - DNA, 6028 bp, Homo sapiens
ggtgtggacgttgtctaaatttcggtagccatggcacaagaatataagaaagcatgggattatggcaaccacagaatctcagtagtacaagttccattcagttttttctgaaagaaagccctctgttaaagtgaagcaaagaaactgttgtggattataacgtttagaagttccaatttttcagtgctttacaaataaagcatcatttaaccttttaaatgaaaaagattaagatctcatgcaactgttgtattttctggaagccattctccaaaagggaagtgcacatttaaaacacagatatgatggtccttgctgcagggatttaagtctacttgcttttacatcatgaccagcttgaaacggtcacagacagaaaggcctcttgccactgacagggcctctgttgttggcacagacggcacccccaaagtccacactgatgatttctacatgcggcgcttccggtcccaaaatggcagcttaggatcatcagttatggctcctgtaggacccccccgaagtgaaggttctcaccatataacctcaacccccggagtcccaaaaatgggggtaagggcaaggattgcagattggcccccaagaaaggaaaacataaaagaatctagccgttcaagccaggaaatagaaacctcaagttgccttgatagcctgtcctccaaaagcagtcctgtgagtcagggaagttctgttagcctcaattccaatgactcagccatgctgaaaagcatacagaacacgctgaaaaacaagacaagaccgtcggagaacatggactccagatttctcatgcctgaagcctaccccagctcccccagaaaagctcttcgcagaatacgccagcgaagcaacagtgatatcaccataagtgaacttgatgtggatagctttgatgaatgtatctcacctacatacaagactggaccatcactgcacagggaatatggtagcacatcttcaattgataaacagggaacatctggagaaagcttttttgatttgttaaagggctacaaagatgacaaatctgatcgaggtccaactccaaccaagctcagtgactttctcattactggtggtggcaagggttctggtttctctttggatgtaatagacgggcctatctcacagagagagaacctcaggctttttaaggaaagggaaaaaccactcaagcgacgttcaaaatctgaaactggagactcctctatttttcgtaaattgcgcaatgccaaaggtgaagaacttgggaagtcatcagatcttgaagataaccgatcagaagactctgtcaggccctggacatgtccaaagtgctttgcccactatgatgtccagagtatattatttgatttgaatgaggcaattatgaacaggcacaatgttattaagaggagaaacaccaccactggagcttccgcagctgccgtggcatccttggtctctggacctctgtctcattcagccagttttagctccccaatgggcagcacagaggacctgaattccaaaggaagcctcagcatggaccagggagatgataaaagcaatgagcttgtaatgagctgtccatattttcggaatgagataggtggagaaggggagaggaaaatcagcctttcaaaatcaaattctggctcctttagtggatgtgaaagtgcctcctttgagtctacccttagttcccattgcacaaatgcaggagtggcagtacttgaagtgcccaaggagaacttggtgttgcacctagatagagtgaaaagatacatcgtggaacacgtagatctgggtgcatactattatagaaaatttttctaccagaaggaacactggaactattttggggctgatgagaatcttggtccagtggctgtgagcattcgaagggaaaaaccagatgaaatgaaagaaaatggatctccgtacaactaccgaataatttttagaactagtgagctcatgacactgagaggttcggtcctggaggacgccattccgtcgacagccaagcactcgacagccagaggcctgcctctcaaagaagtgctggagcacgtggttcctgagctcaatgtccagtgcctgcggttggccttcaacacacccaaggtcacagagcagctcatgaaactggatgaacaagggctgaactaccagcagaaagtaggcatcatgtactgcaaagctggacagagcactgaagaagagatgtacaacaatgagtcagctggcccagcctttgaagaattccttcaactattgggagagcgagttcggctcaaaggatttgagaagtatcgagcacagcttgataccaaaactgactccactggaacccattctctgtacacaacatacaaagattatgaaattatgttccatgtttctaccatgctgccatacacacccaacaacaaacaacagctcctgaggaagcggcacattggaaatgatatcgtaacaattgttttccaagagcctggagcacagccattcagcccaaaaaacatccgatcccacttccagcacgttttcgtcatcgtcagggtgcacaatccgtgctctgacagtgtctgttatagtgtggctgttaccaggtccagagatgtgccttcctttgggcctcccattcctaaaggggtcactttccctaagtcaaatgtgttcagggacttccttttggcgaaagtgattaatgcagaaaatgctgctcataaatcggagaagtttcgggccatggcaactcggacccgccaggaatacctgaaagatctggcagaaaagaatgtcaccaacacccctatcgacccttctggcaagtttccgttcatctctctggcttccaagaagaaggaaaagtctaagccatatccaggagccgagctcagcagcatgggggccattgtatgggcagtccgggctgaagactacaacaaggccatggaactagactgccttttagggatctccaatgagttcattgtgctcattgaacaggaaacaaagagcgtggtcttcaattgttcctgtagagatgtgatagggtggacttcaactgacaccagcctcaaaatcttctatgaacgaggagaatgtgtttcagtgggtagttttattaacattgaggagatcaaagagattgtcaaaaggttgcagtttgtttcaaaaggctgtgaatcggtggagatgactctgcgaagaaatgggctaggacagcttggcttccatgtcaactatgagggcattgtggcggatgtggagccctacggttatgcctggcaggcagggctgaggcagggcagtcgcctggtggagatctgcaaggtggcggtagccactctgagccatgagcagatgatcgacctcctgagaacatctgtcacggtgaaggttgtcatcattcccccgcatgatgactgcaccccgcggaggagttgctctgaaacctaccgcatgccagtgatggagtacaaaatgaatgaaggtgtttcatacgaattcaagtttcccttccgaaataataacaagtggcagaggaacgccagcaaggggcctcattcacctcaagtcccgtcccaggtgcagagtcccatgacctcgcggctgaatgctggaaaaggagatgggaagatgcctcctccagaaagagccgccaacatccctcgaagcatctccagtgacgggcgcccactagagaggcggctgtctcctggttcggacatctatgtgacggtctcatccatggctttagcaagatcccagtgtcggaactctcctagcaacttgtcttcatccagtgatactggttctgtggggggcacttacaggcagaagtccatgcccgaagggtttggagtgagccgtagatccccagcctccattgacaggcagaacacccagtcagatattggtggcagcggaaaatccacgcctagctggcaaagaagtgaggatagcattgctgaccagatggcttacagttatagaggacctcaggatttcaattcttttgtcctcgagcagcatgaatatacagagccaacatgccatctcccagcagtatcaaaggtactgccagctttccgagagagccccagtgggagattaatgcggcaggatccagtggttcatttgtctccaaacaaacaagggcattctgatagccactactcgagccactccagtagcaatactctctccagcaatgcgtcaagtgcccatagtgatgagaagtggtacgatggggaccgcacagaatccgaactcaacagctataactatctgcaaggcacctctgctgacagtggcattgacaccacctcttatggccccagccacggcagcacagcctcgctgggggctgccacatcgtcacctcgctcagggccaggcaaggagaaagtggcacccctatggcacagctccagtgaagtaatctccatggcagatcggactttggagacagagagccacggcctggaccggaaaacagagtcttccctgagcttagacatacacagcaagagccaagccggctcgacccctctgacaagggagaacagcaccttcagtataaacgatgctgcttcccacacaagtaccatgagctcccgacactctgccagcccagtggttttcaccagtgcccggagttcacctaaagaagagcttcatccagctgccccctcacagctcgcaccatccttctcctcctcttcctcctcctcctctggtcctaggagtttttaccctcgccagggcgctactagcaagtacctgattggatggaaaaaacccgaaggaaccataaactccgtgggatttatggacacgagaaagcgtcatcagagcgatggcaatgaaatagcccacaccaggctgcgtgcctcaaccagagacctccgggcatctcctaagccaacctccaagtccaccattgaagaagatctaaagaaactaattgatcttgaaagcccaactcctgaatcacagaagagttttaagttccacgcactctcctctcctcagtctcctttccccagcacccccacctcacggcgggccttgcacagaacactgtcggacgagagcatttacaatagccagagggagcactttttcacctccagggcgtcacttctggaccaagccctgcccaacgacgtcctcttcagtagcacgtacccttctctccccaagtcgctcccgttgaggaggccttcttacaccttaggaatgaaatcgctgcatggagagttctcagcctcggacagctccctcactgacatccaggagacccgcaggcagcctatgcccgaccctggcctgatgcccctgcctgacactgctgcagacttggattggtccaacctggtagatgctgccaaagcctatgaggtccagagagcctcattttttgctgctagtgatgaaaaccatcgccccttgagtgctgcatccaacagtgatcagctggaggaccaggctctggcccagatgaagccttacagcagcagtaaagactcctctcccactctggcttctaaagtggaccagctggaaggtatgctgaagatgcttcgggaagatttgaagaaggaaaaagaagacaaagctcaccttcaggcggaggtgcagcacctgcgagaggacaacctgaggctacaggaggagtcccagaacgcctcggacaagctgaagaagttcacagaatgggtcttcaacaccatagacatgagctagggaaggctgaggaggacaggagaagggcccagacactccctccagtgagtgtcctgcagcccttattccctccatagaaagcatcctcagagcaccttccctggcttcctactctgccccctttcggggagtgcacaacacaatagttgcagatcaacaatcatcacctgccttttgtagaaaagaaaaacaaaaaaagtaaataaaaattttaaacagtaaaataaaagtttaactgctaaaaaaaaaaaaaaaaaaaaaaaaa

SEQ ID NO: 2270 - protein, 1804 aa, Homo sapiens
MTSLKRSQTERPLATDRASVVGTDGTPKVHTDDFYMRRFRSQNGSLGSSVMAPVGPPRSEGSHHITSTPGVPKMGVRARIADWPPRKENIKESSRSSQEIETSSCLDSLSSKSSPVSQGSSVSLNSNDSAMLKSIQNTLKNKTRPSENMDSRFLMPEAYPSSPRKALRRIRQRSNSDITISELDVDSFDECISPTYKTGPSLHREYGSTSSIDKQGTSGESFFDLLKGYKDDKSDRGPTPTKLSDFLITGGGKGSGFSLDVIDGPISQRENLRLFKEREKPLKRRSKSETGDSSIFRKLRNAKGEELGKSSDLEDNRSEDSVRPWTCPKCFAHYDVQSILFDLNEAIMNRHNVIKRRNTTTGASAAAVASLVSGPLSHSASFSSPMGSTEDLNSKGSLSMDQGDDKSNELVMSCPYFRNEIGGEGERKISLSKSNSGSFSGCESASFESTLSSHCTNAGVAVLEVPKENLVLHLDRVKRYIVEHVDLGAYYYRKFFYQKEHWNYFGADENLGPVAVSIRREKPDEMKENGSPYNYRIIFRTSELMTLRGSVLEDAIPSTAKHSTARGLPLKEVLEHVVPELNVQCLRLAFNTPKVTEQLMKLDEQGLNYQQKVGIMYCKAGQSTEEEMYNNESAGPAFEEFLQLLGERVRLKGFEKYRAQLDTKTDSTGTHSLYTTYKDYEIMFHVSTMLPYTPNNKQQLLRKRHIGNDIVTIVFQEPGAQPFSPKNIRSHFQHVFVIVRVHNPCSDSVCYSVAVTRSRDVPSFGPPIPKGVTFPKSNVFRDFLLAKVINAENAAHKSEKFRAMATRTRQEYLKDLAEKNVTNTPIDPSGKFPFISLASKKKEKSKPYPGAELSSMGAIVWAVRAEDYNKAMELDCLLGISNEFIVLIEQETKSVVFNCSCRDVIGWTSTDTSLKIFYERGECVSVGSFINIEEIKEIVKRLQFVSKGCESVEMTLRRNGLGQLGFHVNYEGIVADVEPYGYAWQAGLRQGSRLVEICKVAVATLSHEQMIDLLRTSVTVKVVIIPPHDDCTPRRSCSETYRMPVMEYKMNEGVSYEFKFPFRNNNKWQRNASKGPHSPQVPSQVQSPMTSRLNAGKGDGKMPPPERAANIPRSISSDGRPLERRLSPGSDIYVTVSSMALARSQCRNSPSNLSSSSDTGSVGGTYRQKSMPEGFGVSRRSPASIDRQNTQSDIGGSGKSTPSWQRSEDSIADQMAYSYRGPQDFNSFVLEQHEYTEPTCHLPAVSKVLPAFRESPSGRLMRQDPVVHLSPNKQGHSDSHYSSHSSSNTLSSNASSAHSDEKWYDGDRTESELNSYNYLQGTSADSGIDTTSYGPSHGSTASLGAATSSPRSGPGKEKVAPLWHSSSEVISMADRTLETESHGLDRKTESSLSLDIHSKSQAGSTPLTRENSTFSINDAASHTSTMSSRHSASPVVFTSARSSPKEELHPAAPSQLAPSFSSSSSSSSGPRSFYPRQGATSKYLIGWKKPEGTINSVGFMDTRKRHQSDGNEIAHTRLRASTRDLRASPKPTSKSTIEEDLKKLIDLESPTPESQKSFKFHALSSPQSPFPSTPTSRRALHRTLSDESIYNSQREHFFTSRASLLDQALPNDVLFSSTYPSLPKSLPLRRPSYTLGMKSLHGEFSASDSSLTDIQETRRQPMPDPGLMPLPDTAADLDWSNLVDAAKAYEVQRASFFAASDENHRPLSAASNSDQLEDQALAQMKPYSSSKDSSPTLASKVDQLEGMLKMLREDLKKEKEDKAHLQAEVQHLREDNLRLQEESQNASDKLKKFTEWVFNTIDMS

SEQ ID NO: 2271 - DNA, 778 bp, Homo sapiens
tctctcctaggaccaggagctggagagcctgtcggccattgaggcagagctggagaaagtggcccaccagctgcaggcactacggcggggctgagacaccggctggcagggctggccccagggcaccctgtggccctggctctgctgtccccttggcaggtcctggccagatggcccggacgctgcttccggtagggaggcagcctccagcctgcccaagcccaggccaccctatcgccccctacgcgccttgtctcctactcctgactcctacctgccctggaacatcctttgcagggcagccccacaactttaaacattgacgattccttctctgaacacaggcagctttctagaagtttcccttcctccatcctatccactgggcacaactgcaataacttctgaccttttggtgaaagctgagaactcctgactgtaacatattctgtatgaactttatctaaagaaaaataaatctgttctgggctctttcctctgaattttttcgcctctcaagagtggagtgagatgcactggatttgggcgaagggacaaagggaggttcagtcctcctggggacctcctttctgggccacttcctggctgtgggatcttgagcaagtgactttgttagctctgagcctcagtttcctcatctgtaaaacgggaatgctgacctgcctcaaagagtgtgtgcagggattaaagcacacttgctgagggcctccaggttccttcctctcccgtcccagccacacctgagctgggccatgca

SEQ ID NO: 2272 - protein, 457 aa, Homo sapiens [sequence omitted]

SEQ ID NO: 2273 - DNA, 5190 bp, Homo sapiens
ggaattcccgcgaggccggggtgggccaggctgtggggacgacgggctgcgacgatggccgcagcggcgggcggcggcgggccggggacagcggtaggcgccacgggcttcggggattcggcggcagccgcaggcctagctgtttatcgacggaaggatgggggcccggccaccaagttttgggagagcccggagacggtgtcccagctggattcggtgcgggtctggctgggcaagcactacaagaagtatgttcatgcggatgctcctaccaataaaacactggctgggctggtggtgcagcttcttcagttccaggaagatgcctttgggaagcatgtcaccaacccggccttcaccaaactccctgcaaagtgtttcatggatttcaaagctggaggcgccttatgtcacattcttggggctgcttacaagtataaaaatgaacagggatggcggaggtttgacctacagaacccatctcgaatggatcgtaatgtggaaatgtttatgaacattgaaaaaacattggtgcagaacaattgtttgaccagacccaacatctacctcattccagacattgatctgaagttggctaacaaattgaaagatatcatcaaacgacatcagggaacatttacggatgagaagtcaaaagcttcccaccacatttacccatattcttcctcacaagacgatgaagaatggttgagaccggtgatgagaaaagagaagcaagtgttagtgcattggggcttttacccagacagctatgatacttgggtccatagtaatgatgttgatgctgaaattgaagatccaccaattccagaaaaaccatggaaggttcatgtgaaatggattttggacactgatattttcaatgaatggatgaatgaggaggattatgaggtggatgaaaataggaagcctgtgagttttcgtcagcggatttcaaccaagaatgaagagccagtcagaagtccagaaagaagagatagaaaagcatcagctaatgctcgaaagaggaaacattcgccttcgcctccccctccgacaccaacagaatcacggaagaagagtgggaagaaaggccaagctagcctttatgggaagcgcagaagtcagaaagaggaagatgagcaagaagatctaaccaaggatatggaagacccaacacctgtacccaatatagaagaagtagtacttcccaaaaatgtgaacctaaagaaagatagtgaaaatacacctgttaaaggaggaactgtagcggatctagatgagcaggatgaagaaacagtcacagcaggaggaaaggaagatgaagatcctgccaaaggtgatcagagtcgatcagttgaccttggggaagataatgtgacagagcagaccaatcacattattattcctagttatgcatcatggtttgattataactgtattcatgtgattgaacggcgtgctcttcctgagttcttcaatggaaaaaacaaatccaagactccagaaatatacttggcatatcgaaattttatgattgacagctatcgtctaaacccccaagagtatttaactagcactgcttgtcggaggaacttgactggagatgtgtgtgctgtgatgagggtccatgccgggggagagcagtggggactcgttaattaccaagttgacccggaaagtagacccatggcaatgggacctcctcctactcctcattttaatgtattagctgatacccctctggcttgtgcctctgatcttcgatcacctcaggttcctgctgctcaacagatgctaaattttcctgagaaaaacaaggaaaaaccagttgatttgcagaactttggtctccgtactgacatttactccaagaaaacattagcaaagagtaaaggtgctagtgctggaagaggatggactgaacaggagacccttctactcctggaggccctggagatgtacaaggatgattggaacaaagtgtcggaacatgttggaagtcgtactcaggatgaatgcatcctccactttttgagacttcccattgaggacccataccttgagaattcagatgcttcccttgggcctttggcctaccagcctgtccccttcagtcagtcaggaaatccagttatgagtactgttgcttttttggcatctgtggtggaccctcgcgtggcatctgctgcagcaaaagcggctttggaggagttttctcgggtccgggaggaggtaccactggaattggttgaagctcatgtcaagaaagtacaagaagcagcacgagcctctgggaaagtggatcccacctacggtctggagagcagctgcattgcaggcacagggcccgatgagccagagaagcttgaaggagctgaagaggaaaaaatggaagccgaccctgatggtcagcagcctgaaaaggcagaaaataaagtggaaaatgaaacggatgaaggtgataaagcacaagatggagaaaatgaaaaaaatagtgaaaaggaacaggatagtgaagtgagtgaggataccaaatcagaagaaaaggagactgaagagaacaaagaactcagtagtacatgtaaagaaagagaaagtgatactgggaagaagaaagtagaacatgaaatttccgaaggaaatgttgccacagccgcagcagctgctcttgcctcagcggctaccaaagccaagcacctggctgcagtggaagaaagaaagatcaagtccctggtagctctcttggttgagacacaaatgaagaaactagagatcaaacttcgacattttgaagggctggaaactatcatggacagagagaaagaagctctagaacaacagaggcagcagttgcttactgaacgccaaaacttccacatggaacagctgaagtatgctgaattacgagcacgacagcaaatggaacagcagcagcatggccagaaccctcaacaggcacaccagcactcaggaggacctggcctggccccacttggagcagcagggcaccctggcatgatgcctcatcaacagccccctccctaccctctgatgcaccaccagatgccaccacctcatccaccccagccaggtcagataccaggcccaggttccatgatgcccgggcagcacatgccaggccgcatgattcccactgttgcagccaacatccacccctctgggagtggccctacccctcctggcatgccaccaatgccaggaaacatcttaggaccccgggtacccctgacagcacctaacggcatgtatccccctccaccacagcagcagccaccgccaccaccacctgcagatggggtccctccgcctcctgctcctggcccgccagcctcagctgctccttagcctggaagatgcagggaacctccacgcccaccaccatgagctggagtggggatgacaagacttgtgttcctcaactttcttgggtttctttcaggatttttcttctcacagctccaagcacgtgtcccgtgcctccccactcctcttaccacccctctctctgacactttttgtgttgggtcctcagccaacactcaaggggaaacctgtagtgacagtgtgccctggtcatccttaaaataacctgcatctcccctgtcctggtgtgggagtaagctgacagtttctctgcaggtcctgtcaactttagcatgctatgtctttaccattttctctcttccagttttttgctttgtcttatgcttctatggataatgctatataatcattatctttttatctttctgttattattgttttaaaggagagcatcctaagttaataggaaccaaaaaataatgatgggcagaagggggggaatagccacaggggacaaaccttaaggcattataagtgaccttatttctgcttttctgagctaagaatggtgctgatggtaaagtttgagacttttgccacacacaaatttgtgaaaattaaacgagatgtggaaggagaacctcagtgattttattccctagtgaggcctctgagggcctccacactgcctggcagaacataccactgaactagtatgtgctagaggagggcacaaacatccgctccttccctaggcctgctggctctggttttctatgcagatgattcattggattgggggtgagtgttttgtttttctgggggcagtgtgagctttgagggttggaatattgggaggcattccttagtttcctcaactagcctggaaagttaggagtctagggtaattaccccccaatgagtctagcctactattcactgctttgtgtgcatttttttctccctctttaaaaaaccctttaaaagaaaaaaaaaagtagatagtgctaaatatttagctcatgaaacttggttaggatggctgggggtacaagtccccaaactacctcttgttacagtagccagggagtggaatttcgtcaaccggtacttttaaggttaggatgggacgggaaaagtgaagcaggatattagctccttataccttctcccttccatttctgagatctcacattccatctatcacagggttttcaaagagatgctgagggtaacaaggaactcacttggcagtcagagcatcatgctttgaggtttggggtgctcaggctgggagggtagaatgccattccagaggacaagccacaaaaatgccttaatttgagctcgtatttacccctgctgataagtgacttgagagttcccggttttttcctcttgtccttccctcccttctgtccttccatgtgtggggaaagggtgtttttggtagagcttggtttccaaagcgcctggctttctcacttcacattctcaagtggcagtttcattatttagaatgcaaggtggacatcttttggatatctttttctatatatttctaaagctttacatatgagagggtatagggaggtgtttataaaacacttgagaacttttttccttaatatcagaaagcaaaaaaataaaaccacaattgagatttgcctttcaaaccctcaggtttgcctctaaccaggtgtccctggtcaccatcagagtactggaatacgggaaccgaggaggaccttggtccttttgtttttgttctggactcttgggagtggaaatgggatgagtttatccactggagcttaagtcccatgcatttgctccagaaag

SEQ ID NO: 2274 - protein, 1104 aa, Homo sapiens [sequence omitted]

SEQ ID NO: 2275 - DNA, 325 bp, Homo sapiens
  misc_feature (203)..(203): n is a, c, g, or t
  misc_feature (264)..(264): n is a, c, g, or t
  misc_feature (270)..(270): n is a, c, g, or t
  misc_feature (273)..(273): n is a, c, g, or t
ctcctgacttcaagtgatctgccttcctcggcctcccaaagtgctgggatgacaggcgtgagtcactgtacccggctgggaaatgaatttttaaaaaaaaaactttatgtatttctacttcttcattggaaagtcattcgtatttacttaagttttcaaatatcacagtgcagattagaacaaagtagttgtttataattctnccgcatcctccaagtgtatggagaagctcgcattcttcttgttttgtgctgtcattatttnagtttngtnatcttcgtctactttagttttctcagataatggtttaaattattttggcaat

SEQ ID NO: 2276 - DNA, 1463 bp, Homo sapiens
gggggagcaggacgtgccaatggtgaagtcctccccacacctggccaggaaacccccacgcccatccatgacctctctgcctctgatttccttaagaagcttgattcacagatcagcctgtccaagaaggctgctgctcagaagctgaaaaaaggggaaaatggggtacctggggaggatgcaggtctccacctgagctccccttggatgcggcaacgagcagtcctaggtcctgtgccgctgacccgtacctctcggacccggacactacgggaccaggaggatgaaatcttcaaactctgatgtccccagaactgactgagagaagcaagatgttgaaagagaaacttcagggggagaggagcctgaggtgaggctcaagaacatggcttatgagcctgcctccctccactccagccatcctccccagcctccttgtctgccaaaaattccttggcctggggcagttttattggcaagattagggaatgggaactggacctttcccagttcttgggctgaatctagagatgagtcctttagactcaaaaggctctttttatatccttgttgcctttcctatcctttttacctttccctggccttagaacagggaagcagagactccccctcagcttcttcctcatctccaactatgtgacataatttatttggtgctaatattgaagtaatatttatttgctatattttatttcttcccactcttagctgaaaaatggaatttctatagccctggggtgaggagaacccgggaacagtgagccagtgactgctggttctccactttccccaccttgttagccaaacatgttattgaggatgaggcaatcggtgatatagcccaccacagagaatggatgactgttggccttttctccaatctcaaagtgacagatttgggctgattcttttttttttttttttttttttttggtaccccattcctgttgaatgggctcagtcttgacaaaccaattccctgtaactttttcacaattcttgactctgagaaaaagcagcactgtagggacctgaactctccattctaccagttcacccttctgacctgttctgctcagcctgtggtgaggggaacagatggaagaaggctttccttggggtttgaagaggaagccagttgtgggagtctctttgttacaccccctcccctccagaccctctctctctatgccttcctcctcactgcatatttatttgcgatttgtagcactgatctatggtacagttgttttgtttcttaaacagaagtaggtaagggaacctcagtaataatggaaatctgcctcagtctcctgtttggaaatgatgagaggtgagataagtaatgtttatatacctcctttcttctgtgatgattataaggtatacgaagctggacagattaaacattgagccctgtgcaaaaaaaaaaaaaaaaaaaa

SEQ ID NO: 2277 - DNA, 305 bp, Homo sapiens
  misc_feature (224)..(224): n is a, c, g, or t
  misc_feature (241)..(241): n is a, c, g, or t
  misc_feature (246)..(246): n is a, c, g, or t
  misc_feature (255)..(255): n is a, c, g, or t
  misc_feature (275)..(275): n is a, c, g, or t
aaatgaaagcaccataaaaattaactttgtcatttaaaatatattgtatttcagtttagtttaacaattattgtatgaatttacttttaggatctctgatttggatatgtctcatatatttttatacctaaacacttgcttttcatttcccacccattgcacagtatttagaaaatataggtaagcaaatttaagtagtaattcccaaaacaataataaccaangacaagtcagaattaangtttngacgtgtanctttccagtctttcatctangcctatttttggggcttacccgctttttat

SEQ ID NO: 2278 - DNA, 540 bp, Homo sapiens
gccacgcgcatatccctgctcggcgctgcccgcccagttcctgttcccagactgaggcccagcccccttcgcccgtttccatcacgagtgccgccagcatgtctgacaaactgccctacaaagtcgccgacatcggcctggctgcctggggacgcaaggccctggacattgctgagaacgagatgccgggcctgatgcgtatgcgggagcggtactcggcctccaagccactgaagggcgcccgcatcgctggctgcctgcacatgaccgtggagacggccgtcctcattgagaccctcgtcaccctgggtgctgaggtgcagtggtccagctgcaacatcttctccacccaggaccatgcggcggctgccattgccaaggctggcattccggtgtatgcctggaagggcgaaacggacgaggagtacctgtggtgcattgagcagaccctgtacttcaaggacgggcccctcaacatgattctggacgacgggggcgacctcaccaacctcatccacaccaagtacccgcagcttctgc

SEQ ID NO: 2279 - DNA, 3597 bp, Homo sapiens
catgccagttacttcctcaggaaaatattttcttgccttcttctttcagtatggttttaaatttgggaacagtggataacccaagtgtcccacaggccaaggtatattccaatggcagcatgatccctgcacccaaagccagcccctaaagcctaccccttgtgcacccgcagcctggtaagtgagcttggctgcttgtgaggagctacaagtgaaagagaagttattttaaataaatcccaaagtttgaggcagactgtccaggactgttcccaggaagaagcaggagttacccacaggaaaagtctctgacctggtcccctcaggcccagctacctgcgcccaccagcagtgaaggttgatgtactggcccagcatctccacctcccccatgcaaccaggtccctggtaccgtgtctcccgttgcatgtctggcttctgcctgtgctcctcctgccacgagcatcctccctgtccctcctcattccaccgtgtctctcctgcacacatagcctctgtcccagggcgatttatccacttgagtacaggagctgctcagacctctcagcccagccctctgtgactgccccagccccatcctaccccacccaaagctgccttcctggctgtaggagctccctcgtctagccaaggccctatgggtccccatccgaggatccacaagcaatgacttcccaaatgacctccactgcaagaagaatccttaccactgtttccagagccgtgaacgatgctgtgatggcccaggtctcagcaccaccctctgtgacctaaaaagaaaagctcaatttccatctgtcttctttcccaggaccaaggggacacagtaatgtgaagtcaaatacttaaccgagcaaagggccagtgttgttatcagtcaaggacaaacctcccacctcacagacagccaagcagtgagggaaagacagacagacataggtaggaaggtgctctgcaggcacaaggcccagagaagcccctctccgggaacttcccctgctccttccaggaacagtgagcccagtgagcagtcccagccagctcttcaaggccttcaaggggtctttccatgactgagtcacctccaggagctcacctgacccccagagaagacctaccccaggcagctccgtgccctggcttctccccatgccccaaatcccccccagccatccctcctggtcctcgtctacatcaagggcctcttcccctcttcctcccagctctcaggacaggtgactgggagaccttgaaccctcagcctcttcctttaaaaaaaacaaaacaaaacaaaactgtgggccatttatttgggattttggagttgtttggtttttgtttttatatcttaatagttcgaaagtaagaagggagccctgctatggatgttaagtccaaattactcggttagtgggagcaaaacctatgacttccaaggggatgaggagaggttcagaggacaggaggagcctcccccattgaaaaaaaaaaaatgggtcaggacattccctggatgaggacaatgctaggggtggcatctcacatggctgctgctattcctggtgcttccccacacttttgacagatggagtccttctcctaccgcctcctgccacctcaccctacaggcattctctatgtaggaaacaagagccttatcttatagagtggggagctgagacacagcctcaggtaacactgacacagctcccgaatgaggctgggacactctgcaaacctctcctcatggtgctaagggtggcatgctcttgacaggaaacctaaatgaccactcctctcatttggaaagtaatccactgcagtaaaagtttcagacatgcaagagagagtttttttttttttttactacaaatttttgctcccccataaaattatttttttattagagggagtatccaagttttaaaagtatatagaattttttggttgtaagagaaatacatactcattaggatcccgattaaattccttgagtagactggtgcctaccagaaagcaaagcaaagttaaacaaaacgaaacaaaatccttcatatacaaaaagaactttctgtttgtattggcagaggtagtgaggtgattcaggtaggctgaaaatcctgggttgcgggagcctcactttattccattcccacccgctttgatgtctatgcttggctctctgggctgcccctggtactgccgaatcctacacatctcttatcagctttcctcaaactttaaggaggctctgtgagggatgggtcatgggaagacccaagctttccctccgccaggattgcaaaagcaagtagacttggtctatgcagctcttcttccaacaatttctttatttggaattagaacttcctttgttagtatctttgatcttttgactcaagcacattttggaagggctcccttacaaaagtagaatttaaaacagaggatacagttaaagagcaacccaaaggacgcttaagaaaccgagaccacttcaccgaacaggactaaggaacactttcgtgcacagaagtcagccgcaatccaggcacaggacgaagatgggatacacgtgctcatctgtctgtcctcctttcctctccctccccgacgttctagttagcttgttgacttgttaaaccttctgttcttaaaatgaaaagctagcttacctcaaagaatcttgtttccattcggaaaccaacgattttgtgttttagaatggacagccctcccctcaccactccctaccttggcctggtgtccttgagacatacggtctttgcttagtcgtgtgttggctgctttgagcaggaacgaggcctccaggccctgaggtgggaaggaaggattggatgccactgccctcctccccactttagcatgtaggggccagcccatctcttccagcagggtcctgctgagttaccatagcaaccagcaactccagggtaccacaacagacaatggctcagcgagccgacgtgtggggatgatgcaggggttttggcccagccagaggacccagagttgagcttcaaatgctagagaaggggagaaacaggatggaagggtggtttaaggaactggcaggggtctttgagtcacatagagaagccgttgaaggaggtagggcaggttatctctgttccagtcacccccttccagccccatcccacttctgtttcaaactaaagctcccacctcgaacattgaccctttgttagaacaaagcaaagcatatctttaaacaacagtgttaaaatgagcctcaaatgtatgtggatgagatctctaagaagagggtcttctggttttgatttttaaagaagagtatcctagtaaaatattaaaaaaaaattaaaaagtttttaaaaaggaaacctatgctatttaaattggagcccagttgtaacttggtaaaggcaagcttctgtacctttgttataattaattgtatacctgtgtatgtaaatataaggcattcctattttgcagttcagaacaaaaaaaacttatttgtaatatagaataaagtttattaaaaaataagaaaaaaaaaaaaaaaaaaaa

SEQ ID NO: 2280 - DNA, 575 bp, Homo sapiens
cggaagccgcggttcctaccaaccgttcttattgctggcggcctgaggagcccatcatggcgacgccccctaagcggcgggcggtggaggccacgggggagaaagtgctgcgctacgagaccttcatcagtgacgtgctgcagcgggacttgcgaaaggtgctggaccatcgagacaaggtatatgagcagctggccaaataccttcaactgagaaatgtcattgagcgactccaggaagctaagcactcggagttatatatgcaggtggatttgggctgtaacttcttcgttgacacagtggtcccagatacttcacgcatctatgtggccctgggatatggttttttcctggagttgacactggcagaagctctcaagttcattgatcgtaagagctctctcctcacagagctcagcaacagcctcaccaaggactccatgaatatcaaagcccatatccacatgttgctagaggggcttagagaactacaaggcctgcagaatttcccagagaagcctcaccattgacttcttccccccatcctcagacattaaagagcctgaatgcctttg

SEQ ID NO: 2281 - protein, 157 aa, Homo sapiens
MATPPKRRAVEATGEKVLRYETFISDVLQRDLRKVLDHRDKVYEQLAKYLQLRNVIERLQEAKHSELYMQVDLGCNFFVDTVVPDTSRIYVALGYGFFLELTLAEALKFIDRKSSLLTELSNSLTKDSMNIKAHIHMLLEGLRELQGLQNFPEKPHH

SEQ ID NO: 2282 - DNA, 472 bp, Homo sapiens
tttgacctataagaaaaaacttttatttgtgaaaacagcattaaagtgattccatatcaactccaaaagtttaccacaatggttcagtttacatgaaacaatgatggaaatatacatagcaagtcttagcagggagaacaaagcttactatgattttcacacacttccatgagcaatatccactgcacaacatgccttcctgcagctattaaccagcagcgtctgacatgatctagtatttgtgaggtgccaactaagagaaatatattgttcagaaacttgaaaagactatttccttcctatagctaatttaaaggcactgctctatggttattcattatattattaatattatttctctgaaggcctcattcatgacctttttaagttaaacaggtaatttgtcatttttgatgttattgaaatcaccagaatttctatttctatttaggcagtgtctacaaaagtaaac

SEQ ID NO: 2283 - DNA, 491 bp, Homo sapiens
tcgtcctgtggagcagagctttcttcaacactagccgggattaccatatgctgcacatgtcaggtattctctccacaatctcggagacacgggctctgctcagcttcaccgaggaggtccccacagttacgtaacacttggggctgagctggaaacagtgtggagaaattggcaataataggggtctgggagtctgcaacccagagaagaccaggaagggtgtacctggaaaaatagcaacctgccagaattcaagtgtgctaaataaagatagagggaattatgtaaaataggtgtggagggacttcctgtttcagccccaacatataaagaactttccatctcttcttaataacagtgcaagattttgtaaattcttttttgtgtttaatgtttaataaaacgagtattaagcttaaattactgaagtacctgggagaagtaatgatgtgtactttcaaaaaaatggaaaatgcttttattttattttc

SEQ ID NO: 2284 - DNA, 728 bp, Homo sapiens
  misc_feature (686)..(686): n is a, c, g, or t
  misc_feature (688)..(688): n is a, c, g, or t
  misc_feature (690)..(690): n is a, c, g, or t
  misc_feature (724)..(724): n is a, c, g, or t
tcatatgacacctagtgagcttttaaaatttaccaggaaatttgcagcggttggaaaatttagaaagatttatggtgtagaaaatacttttgagatctttgtatgaaaggagtagaatcaatggggggaaacactgctggtttcatttttgtaatcaccagtggagcgtctgatcatcctggttattatgtgataggtggctcacattgatttgtgattttgaaacaaataaaaaaaatttacaaaagaatatataagagcaggcaagaaatttaaattaccgagagatgggggaaaaaatctgttcttcctaaagaaatcccttcagatagagctcatggtgtttagtgatgtacttgcagtattgtttgaagaattgttttgtcttaaggaaaaaagacgttgcacatgatttgtactgcagcaaatcagcaaaagtgatctgagttggatatatttgaaggtattttgaaagttacgttcaaggctaacacctgagctttgtgtaatgtaaataagaccttgtgtttatgaacctttcagctaatttaattttttttcccttacatgccaagtgatgttcaggttttgaatgtttttgtatcagttttttcctttgtaaatggcattaacattggtacttgaggtcttgcttaatcacttttgttgtcctgaggacttgaatncncnggcattaaattggttgcaaaatttggctgtaganagcc

SEQ ID NO: 2285 - DNA, 6330 bp, Homo sapiens
  misc_feature (5357)..(5357): n is a, c, g, or t
  misc_feature (5448)..(5448): n is a, c, g, or t
ccaggttttccctcccttcccccactcagctgcaggaactcctttttggggtttggatctggtatttttctattcagctccgagcttggctctcctggggaatcctgggagtgaaaggaaggagctgggtttatttgcatgtactggtagtcatttgcatcacatccaaaaatggccaaaattataacccctgattcttggctgaactgggactgctgcaatggaatattattcccggaaaccacccccaactagctggagctaatctcctccctcctccaaccccccattttggcccaggcctacataaaccaaaaaaagctggaccataaggtgaaaaccctacaggtccaggctgcccaatttgccaagcaaacaggccattggatcgaaatggtgaaaaacttcaaccaggcactcaaggtgggccatactccctacctcaccaccccaatcctgggcccccattggctgcctccagtcaggttacctcaggtttaggttaaggaggaagtagggtggtcccagaaaccccatctatagccccagtgtcagaaaaggttgagaaagaaagaaaagcagttggtgggtccaagttaaagccttttccaggagatgaataaaacttattccccaatggaagccatagtctacccattctgattcctgggtcccaactcctctccccctttccaggaaattggggatgtggagaatgggcttggagcattgagctggaaatgcgcaccattgccaatgcaatggaatatgtttacaaagggcagctgcagtttgccccttcctagcccctgttccctcccccaaccctatccctcctacctcacccgcagggggaaggagggaggctgacaagccttgaataaaaaacaagcctccgtttttttgtggtgtgtttcagagaggtaatagctccagtgtcgggggtgggagtggaaggttcaaaggtggtttccctgagggacaggtaccttttggggagagggtggaaatagcttccttttactatcccaaattttttttcctccatggcccttgtgcaggtgtttgttaggcaagcagagggtgggagttcccatccctcctgagagaaggtcctagtagccctgccccaagcttcctaattcaggaattgtttcctacagaagagaaacaaggcaagtacacctggtccccagctctggctttctgcctctccacgtgctcatggcctctccccaggctaactctaagcagtgtcatgagtctgagccaggtgggagattaattcctgggggcacttcagggctgagaagggggaggaatgacaggtccagtaaccgttaccaacagagcagtgcagctgccatccttgacagctccctcctccttggagaccatgacatagatggtcaggaacccaggctgagaaagacagccaaggggtggggggagcctaggcaaatctggcctctgccaagtcctggcttcagccaggcaagctccagcctccctggctcctcctcctcctcagtcctatccccaccctgtcacacatacacttaatacgcctggcatccaagtccacccactccggactttggccttagcagtagttagtgtgggaggctgggaagactgggagcagtctcttaaacaaaagcaaaagaataagcttcgggcgctgtagtacctgccagctttcgccacaggaggtaagtggatctgggagctgggggaactgagaagactagccagatattacatgtattgccaactcaaaactttcagcttttaacatgcttcctcacacattatcccctttgatcctccacaactctgaggtggacctggtgggtcttagccccacttggtagatgagaaaataggttgagagagacagtgagatgctcagtatcacacagcaaacctcttggccctatacatcattccaaacacaagacccaggttgcatatagaaggttcagtgtccctggtttagaaggagaggtggtgtgaggcaagcaagaagatgcctctgctgcactccagcctgggcgacagagtgagactccatctcaaaaaaaaaaaaaaacgatgcctctgctccatacagcaggtctgtacacaggatctggctcatgtggttttagttaagttagccacaaatacagggtctgcccacatctttgctttgaacagatgagccatggttggccaattatctgccaaccagataatttctcaatatgctcacaccagatgcttccagctagggagggtattaggggaaagggcttgagggccacagtaaactggacaagtttttctgcccagcctaggctgccacctgtaggtcacttgggctccagctatgtggctgcctcttctgctgggtgccttactctgggcagtgctgtggttgctcagggaccggcagagcctgcccgccagcaatgcctttgtcttcatcaccggctgtgactcaggctttgggcgccttctggcactgcagctggaccagagaggcttccgagtcctggccagctgcctgaccccctccggggccgaggacctgcagcgggtggcctcctcccgcctccacaccaccctgttggatatcactgatccccagagcgtccagcaggcagccaagtgggtggagatgcacgttaaggaagcaggtaagtatggtagaccaccaggaatatggtgtggggtgtcctgatccccacagtcaccccaggagtcacctgcaagggctgtggtaagctaaagggacaatttgaggagaagcagttttcagatgctcccaggaagaagagggagctgtgggagtgcctcacctacccccagcatccttttcatctccccacagggctttttggtctggtgaataatgctggtgtggctggtatcatcggacccacaccatggctgacccgggacgatttccagcgggtgctgaatgtgaacacaatgggtcccatcggggtcacccttgccctgctgcctctgctgcagcaagcccggggccgggtgatcaacatcaccagcgtcctgggtcgcctggcagccaatggtgggggctactgtgtctccaaatttggcctggaggccttctctgacagcctgaggtgaggggtacagggctctgggttccaggactaacagcagcccactcaacaaacgtgggccagcagaggtggttaaaatacagcacattggaatagttaaaaagagacagtttagggctaaacttcatgggttcaatgaagtctacccttatgtaagctttgtgaccataagtagattacttctctttacccatttttaacgtgtttgttttttgttttttgagatggagtcttgctctgtcgccaggctggagtgcagtggcgcgatcttggctcaccacaatttccacccccggggttcaagcgattctcctgcctcagcctcccgagtagctgggactacaggcatgcgccaccatgcctggctaatttttgtatttttagtagagacagggtttcactatgttggccaggttggtctcaaactcctgacctcgtgatccgcccacctcagcctcccaaagtgctgggattacaggtgtgagccaccacgcccggccttgcctctcgtctttaaacaataaggttcaaagttccgtgggagcacaaaggagacatgatgaggacaacgggagttagggcctgagtttttttggttttttttttttaagcgttttgctcttgttgcctaggctggagtgcaatggcgagatctcagctcacagcaacccctgcctctcaggttcatgtgattctcctgcctcagcctcccgattagctgggcttacaggcacgtgccaccactcccagctaaatttttaggtagagatggagtttataccatgtggccagggtgggtttgaattcctgacctcacctgatccaccggaccggccttcccaaagtgctgggattacaggcatgagccaccacacacggcccaaggcctgagttcttagcaggagtataaggcgcctaagcttagtctaccttctaaggaagcctgcgtttgtcaccatcactcagcaaataaccggaattgtctcctgtctctcagccttaatttttcaggcagcatcatgggacacatacttttagttttgagacaaggccttgctctcacccagggtggagtgcagtggtgcagtcacggcccactgaacttcaaactcctaggctcaagcagctcaagcgatatccgcctcagcctcctgagtagctgagaccacaggcgcgtgccagcatgcctggctagtatttttttacagatggggtcttgctgtggtgaccagacttgtctccaactcccggcctcaagcgatgcttccgcctgggcctcccaaagtgttgggattataggtgtgagccactgcatactggaacacatactttatacttgaatttttttttatccccttccttcgtgctcctaacctatacttggatttctacatctgtgccagggcagtgggatgtatccccactttccccatcagcttaccctccagcaaatacgagactatacccttcaatatccagcactcagggctcaaccatgtgttttgggagcaagggaatggggttcctctaggtcaggaatcggcaaactcagtactcaagccagatttggccagctgcctacaagctgataatggttttttttatttttaaatggttacattgtaaactgttatataagtacctgataatatcattaattttgtttcttggcctgccatgcttaaaatattaactctctggccctttaagaaaaaaacgtgctgacccctgctctagatcaaagaaaacaaacctcaaaaatactttcctccctctaccccacttgacccttgtcccggggcagtaggcatctccgtcaaaactcttgtccctggtctgtggtaactttctcagctccccaacccatgtccctcaaagtcccctccctatagggcaagaacccagcaacttcgctctgccccgactctaggcgggatgtagctcattttgggatacgagtctccatcgtggagcctggcttcttccgaacccctgtgaccaacctggagagtctggagaaaaccctgcaggcctgctgggcacggctgcctcctgccacacaggcccactatgggggggccttcctcaccaagtgtgagtagccaggcccacacaggggcacatgaagggaaacaagtaccagaaaggccagtcctgcataagcctgctaggaggtgggtggggcacccagggcagggttgagggtgaacaggatgttacaanagtgcccaggccatgtggaacctgcccactccccacactgaggaggggactgagggtgacaagcccagggccccaaaaaacagtacctaanatgggctggagtgaggaagggaaactgattgcaaccacctatggggctgcagacctgaaaatgcaacagcgcatcatgaacctgatctgtgacccggacctaaccaaggtgagccgatgcctggagcatgccctgactgctcgacacccccgaacccgctacagcccaggttgggatgccaagctgctctggctgcctgcctcctacctgccagccagcctggtggatgctgtgctcacctgggtccttcccaagcctgcccaagcagtctactgaatccagccttccagcaagagattgtttttcaaggacaaggactttgatttatttctgcccccaccctggtactgcctggtgcctgccacaaaataagcactaacaaaagtgtattgtttaaaaaataaaaagaaggtgggcagaaatgtgcccagtggaaggctgaccccatttaagtgccaactactccaaaccgacatgctcacggtctctggcctgttcagtccctgcaaaacagctagcacccacagtggggcgccagggaactgcctcacatctacagctgcacgtcggggagtggccatcaaagggcactttaatacatttcccttattttctgaaggggagtaaggttgcaattcagtgtctgtactgggaatggtcttcatatttcttgggggagaagagcaggtgatgagggttctgggccaggctgggtggcttccatggaagaaaaggcaatattcacataaattctcctgctaaggacactgaccacacaggtgtgcaaggcaacttatcatacttcgaaaggagctggatcccttgaggattggccaggaagggaggtgctgggcccttagcggtgcacagaaggccaggaag

SEQ ID NO: 2286 - protein, 318 aa, Homo sapiens
MWLPLLLGALLWAVLWLLRDRQSLPASNAFVFITGCDSGFGRLLALQLDQRGFRVLASCLTPSGAEDLQRVASSRLHTTLLDITDPQSVQQAAKWVEMHVKEAGLFGLVNNAGVAGIIGPTPWLTRDDFQRVLNVNTMGPIGVTLALLPLLQQARGRVINITSVLGRLAANGGGYCVSKFGLEAFSDSLRRDVAHFGIRVSIVEPGFFRTPVTNLESLEKTLQACWARLPPATQAHYGGAFLTKYLKMQQRIMNLICDPDLTKVSRCLEHALTARHPRTRYSPGWDAKLLWLPASYLPASLVDAVLTWVLPKPAQAVY

SEQ ID NO: 2287 - DNA, 478 bp, Homo sapiens
tttctgttactttcttaagatgtagtttttaataactcacatctcggttaatttagttagtagtgagtacatattacaatgaaatgccatatgtattaacccttttgtgacttccttcacccccccaatctgaataagcaaaatgttcatttgcattgatgggagtgcaggctcagtgtggtgggggaatgtgtccctcagggctgcaagtgccgcaaactcagtccaaaaatgagttcagttagatcattgattcactaaatcagagaaaggaggaattttgtttcgttttgctttgaatcagctactggttccagtaaggcaattaaagagtccagttttggcatagttgtaggtattttaattttgagccaggcactcttagatttgaagaatccgaattataaatgaaataataaaatttggtgcaagatgaaattcgtagagtctaggaattacagccctgtgggatttaatg

SEQ ID NO: 2288 - DNA, 5921 bp, Homo sapiens
agcagacgggagtttctcctcggggtcggagcaggaggcacgcggagtgtgaggccacgcatgagcggacgctaaccccctccccagccacaaagagtctacatgtctagggtctagacatgttcagctttgtggacctccggctcctgctcctcttagcggccaccgccctcctgacgcacggccaagaggaaggccaagtcgagggccaagacgaagacatcccaccaatcacctgcgtacagaacggcctcaggtaccatgaccgagacgtgtggaaacccgagccctgccggatctgcgtctgcgacaacggcaaggtgttgtgcgatgacgtgatctgtgacgagaccaagaactgccccggcgccgaagtccccgagggcgagtgctgtcccgtctgccccgacggctcagagtcacccaccgaccaagaaaccaccggcgtcgagggacccaagggagacactggcccccgaggcccaaggggacccgcaggcccccctggccgagatggcatccctggacagcctggacttcccggaccccccggaccccccggacctcccggaccccctggcctcggaggaaactttgctccccagctgtcttatggctatgatgagaaatcaaccggaggaatttccgtgcctggccccatgggtccctctggtcctcgtggtctccctggcccccctggtgcacctggtccccaaggcttccaaggtccccctggtgagcctggcgagcctggagcttcaggtcccatgggtccccgaggtcccccaggtccccctggaaagaatggagatgatggggaagctggaaaacctggtcgtcctggtgagcgtgggcctcctgggcctcagggtgctcgaggattgcccggaacagctggcctccctggaatgaagggacacagaggtttcagtggtttggatggtgccaagggagatgctggtcctgctggtcctaagggtgagcctggcagccctggtgaaaatggagctcctggtcagatgggcccccgtggcctgcctggtgagagaggtcgccctggagcccctggccctgctggtgctcgtggaaatgatggtgctactggtgctgccgggccccctggtcccaccggccccgctggtcctcctggcttccctggtgctgttggtgctaagggtgaagctggtccccaagggccccgaggctctgaaggtccccagggtgtgcgtggtgagcctggcccccctggccctgctggtgctgctggccctgctggaaaccctggtgctgatggacagcctggtgctaaaggtgccaatggtgctcctggtattgctggtgctcctggcttccctggtgcccgaggcccctctggaccccagggccccggcggccctcctggtcccaagggtaacagcggtgaacctggtgctcctggcagcaaaggagacactggtgctaagggagagcctggccctgttggtgttcaaggaccccctggccctgctggagaggaaggaaagcgaggagctcgaggtgaacccggacccactggcctgcccggaccccctggcgagcgtggtggacctggtagccgtggtttccctggcgcagatggtgttgctggtcccaagggtcccgctggtgaacgtggttctcctggccccgctggccccaaaggatctcctggtgaagctggtcgtcccggtgaagctggtctgcctggtgccaagggtctgactggaagccctggcagccctggtcctgatggcaaaactggcccccctggtcccgccggtcaagatggtcgccccggacccccaggcccacctggtgcccgtggtcaggctggtgtgatgggattccctggacctaaaggtgctgctggagagcccggcaaggctggagagcgaggtgttcccggaccccctggcgctgtcggtcctgctggcaaagatggagaggctggagctcagggaccccctggccctgctggtcccgctggcgagagaggtgaacaaggccctgctggctcccccggattccagggtctccctggtcctgctggtcctccaggtgaagcaggcaaacctggtgaacagggtgttcctggagaccttggcgcccctggcccctctggagcaagaggcgagagaggtttccctggcgagcgtggtgtgcaaggtccccctggtcctgctggaccccgaggggccaacggtgctcccggcaacgatggtgctaagggtgatgctggtgcccctggagctcccggtagccagggcgcccctggccttcagggaatgcctggtgaacgtggtgcagctggtcttccagggcctaagggtgacagaggtgatgctggtcccaaaggtgctgatggctctcctggcaaagatggcgtccgtggtctgaccggccccattggtcctcctggccctgctggtgcccctggtgacaagggtgaaagtggtcccagcggccctgctggtcccactggagctcgtggtgcccccggagaccgtggtgagcctggtccccccggccctgctggctttgctggcccccctggtgctgacggccaacctggtgctaaaggcgaacctggtgatgctggtgccaaaggcgatgctggtccccctgggcctgccggacccgctggaccccctggccccattggtaatgttggtgctcctggagccaaaggtgctcgcggcagcgctggtccccctggtgctactggtttccctggtgctgctggccgagtcggtcctcctggcccctctggaaatgctggaccccctggccctcctggtcctgctggcaaagaaggcggcaaaggtccccgtggtgagactggccctgctggacgtcctggtgaagttggtccccctggtccccctggccctgctggcgagaaaggatcccctggtgctgatggtcctgctggtgctcctggtactcccgggcctcaaggtattgctggacagcgtggtgtggtcggcctgcctggtcagagaggagagagaggcttccctggtcttcctggcccctctggtgaacctggcaaacaaggtccctctggagcaagtggtgaacgtggtccccccggtcccatgggcccccctggattggctggaccccctggtgaatctggacgtgagggggctcctgctgccgaaggttcccctggacgagacggttctcctggcgccaagggtgaccgtggtgagaccggccccgctggaccccctggtgctcctggtgctcctggtgcccctggccccgttggccctgctggcaagagtggtgatcgtggtgagactggtcctgctggtcccgccggtcccgtcggccccgtcggcgcccgtggccccgccggaccccaaggcccccgtggtgacaagggtgagacaggcgaacagggcgacagaggcataaagggtcaccgtggcttctctggcctccagggtccccctggccctcctggctctcctggtgaacaaggtccctctggagcctctggtcctgctggtccccgaggtccccctggctctgctggtgctcctggcaaagatggactcaacggtctccctggccccattgggccccctggtcctcgcggtcgcactggtgatgctggtcctgttggtccccccggccctcctggacctcctggtccccctggtcctcccagcgctggtttcgacttcagcttcctgccccagccacctcaagagaaggctcacgatggtggccgctactaccgggctgatgatgccaatgtggttcgtgaccgtgacctcgaggtggacaccaccctcaagagcctgagccagcagatcgagaacatccggagcccagagggaagccgcaagaaccccgcccgcacctgccgtgacctcaagatgtgccactctgactggaagagtggagagtactggattgaccccaaccaaggctgcaacctggatgccatcaaagtcttctgcaacatggagactggtgagacctgcgtgtaccccactcagcccagtgtggcccagaagaactggtacatcagcaagaaccccaaggacaagaggcatgtctggttcggcgagagcatgaccgatggattccagttcgagtatggcggccagggctccgaccctgccgatgtggccatccagctgaccttcctgcgcctgatgtccaccgaggcctcccagaacatcacctaccactgcaagaacagcgtggcctacatggaccagcagactggcaacctcaagaaggccctgctcctcaagggctccaacgagatcgagatccgcgccgagggcaacagccgcttcacctacagcgtcactgtcgatggctgcacgagtcacaccggagcctggggcaagacagtgattgaatacaaaaccaccaagtcctcccgcctgcccatcatcgatgtggcccccttggacgttggtgccccagaccaggaattcggcttcgacgttggccctgtctgcttcctgtaaactccctccatcccaacctggctccctcccacccaaccaactttccccccaacccggaaacagacaagcaacccaaactgaacccccccaaaagccaaaaaatgggagacaatttcacatggactttggaaaatatttttttcctttgcattcatctctcaaacttagtttttatctttgaccaaccgaacatgaccaaaaaccaaaagtgcattcaaccttaccaaaaaaaaaaaaaaaaaaaaaagaataaataaataagtttttaaaaaaggaagcttggtccacttgcttgaagacccatgcgggggtaagtccctttctgcccgttgggttatgaaaccccaatgctgccctttctgctcctttctccacaccccccttggcctcccctccactccttcccaaatctgtctccccagaagacacaggaaacaatgtattgtctgcccagcaatcaaaggcaatgctcaaacacccaagtggcccccaccctcagcccgctcctgcccgcccagcacccccaggccctggggacctggggttctcagactgccaaagaagccttgccatctggcgctcccatggctcttgcaacatctccccttcgtttttgagggggtcatgccgggggagccaccagcccctcactgggttcggaggagagtcaggaagggccacgacaaagcagaaacatcggatttggggaacgcgtgtcatcccttgtgccgcaggctgggcgggagagactgttctgttctgttccttgtgtaactgtgttgctgaaagactacctcgttcttgtcttgatgtgtcaccggggcaactgcctgggggcggggatgggggcagggtggaagcggctccccatttttataccaaaggtgctacatctatgtgatgggtggggtggggagggaatcactggtgctatagaaattgagatgcccccccaggccagcaaatgttcctttttgttcaaagtctatttttattccttgatattttttctttctttttttttttttttgtggatggggacttgtgaatttttctaaaggtgctatttaacatgggaggagagcgtgtgcgctccagcccagcccgctgctcactttccaccctctctccacctgcctctggcttctcaggcctctgctctccgacctctctcctctgaaaccctcctccacagctgcagcccatcctcccggctccctcctagtctgtcctgcgtcctctgtccccgggtttcagagacaacttcccaaagcacaaagcagtttttccctaggggtgggaggaagcaaaagactctgtacctattttgtatgtgtataataatttgagatgtttttaattattttgattgctggaataaagcatgtggaaatgacccaaacataa

SEQ ID NO: 2289 - protein, 1464 aa, Homo sapiens
MFSFVDLRLLLLLAATALLTHGQEEGQVEGQDEDIPPITCVQNGLRYHDRDVWKPEPCRICVCDNGKVLCDDVICDETKNCPGAEVPEGECCPVCPDGSESPTDQETTGVEGPKGDTGPRGPRGPAGPPGRDGIPGQPGLPGPPGPPGPPGPPGLGGNFAPQLSYGYDEKSTGGISVPGPMGPSGPRGLPGPPGAPGPQGFQGPPGEPGEPGASGPMGPRGPPGPPGKNGDDGEAGKPGRPGERGPPGPQGARGLPGTAGLPGMKGHRGFSGLDGAKGDAGPAGPKGEPGSPGENGAPGQMGPRGLPGERGRPGAPGPAGARGNDGATGAAGPPGPTGPAGPPGFPGAVGAKGEAGPQGPRGSEGPQGVRGEPGPPGPAGAAGPAGNPGADGQPGAKGANGAPGIAGAPGFPGARGPSGPQGPGGPPGPKGNSGEPGAPGSKGDTGAKGEPGPVGVQGPPGPAGEEGKRGARGEPGPTGLPGPPGERGGPGSRGFPGADGVAGPKGPAGERGSPGPAGPKGSPGEAGRPGEAGLPGAKGLTGSPGSPGPDGKTGPPGPAGQDGRPGPPGPPGARGQAGVMGFPGPKGAAGEPGKAGERGVPGPPGAVGPAGKDGEAGAQGPPGPAGPAGERGEQGPAGSPGFQGLPGPAGPPGEAGKPGEQGVPGDLGAPGPSGARGERGFPGERGVQGPPGPAGPRGANGAPGNDGAKGDAGAPGAPGSQGAPGLQGMPGERGAAGLPGPKGDRGDAGPKGADGSPGKDGVRGLTGPIGPPGPAGAPGDKGESGPSGPAGPTGARGAPGDRGEPGPPGPAGFAGPPGADGQPGAKGEPGDAGAKGDAGPPGPAGPAGPPGPIGNVGAPGAKGARGSAGPPGATGFPGAAGRVGPPGPSGNAGPPGPPGPAGKEGGKGPRGETGPAGRPGEVGPPGPPGPAGEKGSPGADGPAGAPGTPGPQGIAGQRGVVGLPGQRGERGFPGLPGPSGEPGKQGPSGASGERGPPGPMGPPGLAGPPGESGREGAPAAEGSPGRDGSPGAKGDRGETGPAGPPGAPGAPGAPGPVGPAGKSGDRGETGPAGPAGPVGPVGARGPAGPQGPRGDKGETGEQGDRGIKGHRGFSGLQGPPGPPGSPGEQGPSGASGPAGPRGPPGSAGAPGKDGLNGLPGPIGPPGPRGRTGDAGPVGPPGPPGPPGPPGPPSAGFDFSFLPQPPQEKAHDGGRYYRADDANVVRDRDLEVDTTLKSLSQQIENIRSPEGSRKNPARTCRDLKMCHSDWKSGEYWIDPNQGCNLDAIKVFCNMETGETCVYPTQPSVAQKNWYISKNPKDKRHVWFGESMTDGFQFEYGGQGSDPADVAIQLTFLRLMSTEASQNITYHCKNSVAYMDQQTGNLKKALLLKGSNEIEIRAEGNSRFTYSVTVDGCTSHTGAWGKTVIEYKTTKSSRLPIIDVAPLDVGAPDQEFGFDVGPVCFL

SEQ ID NO: 2290 - DNA, 2377 bp, Homo sapiens
cggctctcagctgcactcctgtacatccacctgtcttcaggagagcactgtttgtgtgtgcccagccccgctgcgcgctctgctcttcgcagctccccggacccgcagccatggccgacatcaagacgggcatcttcgccaagaacgtccagaagcgactcaaccgcgcgcaggaaaaggtcctccaaaagctggggaaagctgatgagacaaaagacgaacagttcgaagaatatgtccagaacttcaaacggcaagaagcagagggtaccagacttcagcgagaactccgaggatatttagcagcaatcaaaggcatgcaggaggcctccatgaagctcacagagtcgctgcatgaagtctatgagcctgactggtatgggcgggaagatgtgaaaatggttggtgagaaatgtgatgtgctgtgggaagacttccatcaaaaactcgtggatgggtccttgctaacactggatacctacctggggcaatttcctgacataaagaatcgcatcgccaagcgcagcaggaagctagtggactatgacagtgcccgccaccatctggaagctctgcagagctccaagaggaaggatgagagtcgaatctctaaggcagaagaagaatttcagaaagcacagaaagtgtttgaagagtttaacgttgacttacaagaagagttaccatcattatggtcaagacgagttggattttatgttaatactttcaaaaacgtctccagccttgaagccaagtttcataaggaaattgcggtgctttgccacaaactgtatgaagtgatgacaaaactgggtgaccagcacgccgacaaggccttcaccatccaaggagcgcccagtgattcgggtcctctccgcattgcaaagacaccatcaccgcctgaggagccttcacccctcccgagcccgacagcaagtccaaatcatacattagcacctgcgtctcccgcaccagcacggcctcggtcaccttcacagacaaggaaagggcctcctgtcccacctctacctaaagtcaccccgacaaaggaactgcagcaggagaacatcatcagtttctttgaggacaactttgttccagaaatcagtgtgacaacaccttcccagaatgaagtccctgaggtgaagaaagaggagactttgctggatctggactttgatcctttcaagcccgaggtgacacctgcaggttctgctggagtgacccactcacccatgtctcagacattgccctgggacctatggacgacaagcactgatttggtacagccggcttctggtggttcatttaatggattcacacagccccaggatacttcattattcacaatgcagacagaccagagtatgatctgcaacttggctgaatctgaacaggctccacccacagagccaaaagcagaggagcctctggctgctgtcacacctgccgttggtctggaccttggaatggacactcgggctgaggagccagtggaggaggcagtgatcatacctggagctgatgctgatgcagctgttggaaccttggtgtcagcagctgagggggccccaggagaggaagcagaggcggagaaggccactgtccctgccggggaaggagtaagtttagaggaggccaaaattggaactgaaaccactgagggtgcagagagtgcccaacctgaagcagaggagctcgaagcaacagtgcctcaggagaaggtcattccttcggtggtcatagagcctgcctccaaccatgaagaggaaggagaaaacgaaataactataggtgcagagcccaaggagaccaccgaggacgcggctcctccgggccccaccagcgagacaccggagctggctacggagcagaagcctatccaggaccctcagcccacgccttctgcaccagccatgggggctgctgaccagctagcatctgcaagggaggcctctcaggaattgcctcctggctttctctacaaggtggaaacactgcatgattttgaggcagcaaattctgatgaacttaccttacaaaggggtgatgtggtgctggtggtcccctcagattcagaagctgatcaggatgcaggctggctggtgggagtgaaggaatcagactggcttcagtacagagaccttgccacctacaaaggcctctttccagagaacttcacccgacgcttagattagggcaacaagtactgcaagaaggagctcagttacggggtttttaaaccttcatgaaaacctgaagagttcacttttgttattatgctcttaatgatttacagactgatgccagacaaaccttgggaagatgtatcaatggagcatgtgtgcaaaaaaatgtaagaggaaaaaaaaaaccg

SEQ ID NO: 2291 - protein, 695 aa, Homo sapiens
MADIKTGIFAKNVQKRLNRAQEKVLQKLGKADETKDEQFEEYVQNFKRQEAEGTRLQRELRGYLAAIKGMQEASMKLTESLHEVYEPDWYGREDVKMVGEKCDVLWEDFHQKLVDGSLLTLDTYLGQFPDIKNRIAKRSRKLVDYDSARHHLEALQSSKRKDESRISKAEEEFQKAQKVFEEFNVDLQEELPSLWSRRVGFYVNTFKNVSSLEAKFHKEIAVLCHKLYEVMTKLGDQHADKAFTIQGAPSDSGPLRIAKTPSPPEEPSPLPSPTASPNHTLAPASPAPARPRSPSQTRKGPPVPPLPKVTPTKELQQENIISFFEDNFVPEISVTTPSQNEVPEVKKEETLLDLDFDPFKPEVTPAGSAGVTHSPMSQTLPWDLWTTSTDLVQPASGGSFNGFTQPQDTSLFTMQTDQSMICNLAESEQAPPTEPKAEEPLAAVTPAVGLDLGMDTRAEEPVEEAVIIPGADADAAVGTLVSAAEGAPGEEAEAEKATVPAGEGVSLEEAKIGTETTEGAESAQPEAEELEATVPQEKVIPSVVIEPASNHEEEGENEITIGAEPKETTEDAAPPGPTSETPELATEQKPIQDPQPTPSAPAMGAADQLASAREASQELPPGFLYKVETLHDFEAANSDELTLQRGDVVLVVPSDSEADQDAGWLVGVKESDWLQYRDLATYKGLFPENFTRRLD

SEQ ID NO: 2292 - DNA, 493 bp, Homo sapiens
  misc_feature (448)..(448): n is a, c, g, or t
ggaaacacatgaagacagcacaccctgaccaatatgctgcatttaaaatgcagcgcaaaagtaaaaaaggtcagaaagctaacaactttccattattttttgccatcaccggtgaacagctcaaatccattttttacatcacagaccaaagccaatgggaatcctgcttgttcggcccagttgcagcatgtctcgccacccatttttccagctcatttagcaagtgtgtcaactccattgttgtcctcaatggaaagtgtcataaatccaaatataacttctcaggataaaaatgaacaaggtggtatgttatgttcccaaatggaaaatttacctagtactgccttgccagcacaaatggaagatctaaccaaaacagttctgcctttgaatattgacagtggctcagatcctttccttcctttacctgcagaaagtagttcaatgnctctcttccttcaccagcagatagtgggactaattctgttttttc

SEQ ID NO: 2293 - DNA, 412 bp, Homo sapiens
tttccattgccactgcagaatgaagccagtgcacatggtattagtcatcagccagaacttcctgttctgtgggtctggggtcaccagctgagatgtcacctgctttatttctggctttggcctgtggtctgtgatacccatcctccttgatgttctgcagaatggcacttgactgctgggcatgcatgaagttaagggcaagaaacagtatgccatgtgttctgtaccatcatgtgtctcttcttccttctgggcccttctactggtgaactttcatcaagatctgcgccatgccgtgtcactatcaagccattaagttttgtctgggttgctgtcagccccagttggcttcctggtcaacaaggacctcaagaactgcctgtggaccgaggccccctaccagtgcatgaga

SEQ ID NO: 2294 - DNA, 2449 bp, Homo sapiens
tatatgtgacctttttaaaaaatgagctgtaagcagtctcccagacagtagctcagcctccagaactctctttctgcatagttgaagacccctcttcacacaagatggtagcaacaaatcataggtgcaattgcaccaaattcacagaagatcaattgaaaatcctcatcaataccttcactcaaaaaccttacccaggttatgctaccaaacaaaaacttgctttagcaatcaatgcagaagagtccagaatccagatttggtttcagaatcaaagagctaggcatggattccagaaaacaccagaacctgactttagatttaagccacagccatggacaagattaacctggtgtggagtttcaaaatagagaagccagatggtgttgtaccacctatagcacctttcaattacacacaatcatccatgcatttatgaaaaacccataccctgggattgattccggagaacaacttgctgaagaaattggtgcttcagagtcaagagtccaaatttggttccaaaatcaaagatctagatttcatctccagagaaaaagagaacctgttatgtccttagaatgagaagaccagagaagaccaggggcaaggtttctgagggacttcaaggtacagaagatacacaaagtggcaccagcctcactagcactctcatttctcaagagccagaacatggtgaatacagtcaagttcagtgtatttgataatatcaatttgggccccaaatctctctcacagtcttcctgggagtctattcttcttccaaaagtgcaagctaagccttctgaagatggtaaagaacttggccgggtgtggtggctcatgcctgtaatcccagcactttaggaggctgaggctggaagattgcttgagcctaggagtttgaaaccagtctgagcaacatagtaagaccctgtctctattctaaaaaacaaaataagtaaaaaggactgtaggaggccaagacaggtacaggaggcaccacactaccctgttgacacagcctggatccagagttcagcagaccttgagacaatgaaaacaaacttagtaataatcatttttcaatcattgcagtaattattgatttggacaaaaatcaattgacgtcaaaaccttaaagtgacgtttctctgcctatggagtggtcattcttttattcctttagtttcataataaattttcttttacttaaaaaaacttatagtttgatgaagagtgagatatatacctcatctcaaagaatcttcacacacacacttattaattacaaaaggaaaatcagtaattttgcagtggagacatatggccaactccaccttacccaagtggctgaaagtcactgcaccagtaatggcacaaaccaatgtgagatgattcctgatatgatacactaaaaagggcactgtctcttctgcatgttgcagacaaaaagtgggtaagctgacactgaaactaataattaggcaatgtcaagcaaatacaaattcaagttgacagtctgcaaagtaacatccatgtactcttcaacaatggatcgaccctagctactcaggaggctgaggtggaataattgtttgaggccaggagttccagatcagcctgggcaacatcatgcgaccccatctctaaaaacatctttttaaaaatgagccaggtgtggtagcatgcacccgtagtctcagctactcaggagcctgaggcaggaggatggtttcaacataggagatcgaggctgctgtgagctatgatcgtgctactgcactccagcctgggtgacacagcaagttcctgtttccaaacaacaacaagaaaacaaaacaaaacaaaacaaaaaatagatagaatagtgacaataaaaatggagaaaaagtaggctgactcaggaaatgcttagaaagtacagccatacctcaaagatattgtagatttgattcgagaccaccacaataaagcagatattgctacaaagtgagtcacacaaattgttttgtttccttgtgaatatgaagttatattggctgggtgtgatggctcatgcctataatcccagtactttaggagacggaggcgggagggtcacttgagcccaggaattgtgagatcaacctgggcatatagggagatcctgtctctatttaaaaaaagaagctatgtttacactacactatagtctatttaaagtgtgaaatggcgttatgtccttaattttaaaactcttgatgctggctgggttcggtggctcatacctgtaatcccatcactttgggaggccaagacaggttgattacttgaattcaggagttcaagaccagcctggacaacatggcaaaacacgtctttaaaaaaagaaaagaaaaaagaaaaacagaaagaaaaagaagaaaaactacttgctgcccttacttgaagctcaattatttaaaac

SEQ ID NO: 2295 - DNA, 623 bp, Homo sapiens
aagcttgcgggcgcgtgactcagtttccctcccttctccctccatccgcagccacaggggaactcgtctcttacatactctcatcttctcccccgctcccttccactccaaggagcgaggagggcaagcggcctcccagctccctggtacctcgaggcaccattccagccagggacgctgccgggtagactctccactccccctgccgcccacactgcagcagccacatccatacacacacgctcgcacagtgttctgaggaaggaaccttcgccacagactcctgtactattaacaatctgtaaccaagctaactgtctcatccatgtgttgatttcctgtttcctcctcccccgcctcttccagttcaaaggagtctgcaattggaactgctgattttcggtgggttttgtagttgatttttccaagagcgtcgaagactctctttctcttggttcaccttgcctgtcgctagcaagcatctggttcagcggaaatgggatgtgagaatgatgaaacccgacagaagtatctcagcctgcagtcagttattatggtataggaggtgagctagttaacaaacttgtaccacaaaacaatatcgttttaacttttctaaagca

SEQ ID NO: 2296 - DNA, 210 bp, Homo sapiens
gtagcctgaaagaagcaggaactccaggatcccaaaccagagcagaccctatagtaaagtatttttacatcttttcctttccccagaagagatccctaacctattgttttattgacagccttgctgttagaggctctttcccagaagttggacgaagaggctcaggcgttgctgtttcttgtcttccaagtcaagtggttactctggtaa

SEQ ID NO: 2297 - DNA, 647 bp, Homo sapiens
aatcagttacacaaaagaaatcctttgaagtgatgctgctttttacaaagcatcgttttaaagcacatggccttttttttttaattattagtggtagtaatatatagaaggtattacataactgtcactgaagtggtgggggaaaatgtggtgacggaggtacaggaaactactaatcttgccatctggcttaaaggtgtcatggtggcacagttacggctcgccggtaaaatttcaaatgtccggttggatactacggtagaacactatttttaatacagaaaaagctccctataacgcacttcagagaaattaaaaatcacagagtatttattaccaatgcggcaggtacattaatgaactcgagatggctcggtaagcctgacgggcaataacgcacggtacggttctggaaatacctaagggctggaaattctagtcggttggtgaaagaggggtactatcatgatttcctcttctattcctatattcttttcgggattttttttcaataattagggatataagcatggtttttattgcagccatatccacttatccatcttaagatctgtagctgggattttctgacttgtaatgagcagggggattgctttctcacttggtgacactctttagagctttaa

SEQ ID NO: 2298 - DNA, 1416 bp, Homo sapiens
ccgcggggagggagcccccgcggtgccgccgaggccccgacgcggggccgcccctcggctcgccgccccgcgcccgcgcccgctgggaatgatgaagaagaacaattccgccaagcggggacctcaggatggaaaccagcagcctgcaccgcccgagaaggtcggctgggtccggaaattctgcgggaaagggattttcagggagatttggaaaaaccgctatgtggtgctgaaaggggaccagctctacatctctgagaaggaggtaaaagatgagaaaaatattcaagaggtatttgacctgagtgactatgagaagtgtgaagagctccggaagtccaagagcaggagcaagaaaaatcatagcaagtttactcttgcccactccaaacagcccggtaacacggcacccaacctgatcttcctggcagtgagtccagaagagaaggaatcgtggatcaatgccctcaactctgccatcacccgagccaagaaccgtatcttggatgaggtcaccgttgaggaggacagctatcttgcccatcccactcgagacagggcaaaaatccagcactcccgccgccccccaacaaggggacacctaatggctgtggcttccacctctacctcggatgggatgctgaccttggacttgatccaagaggaagacccttcccctgaggaaccaacctcttgtgctgagagctttcgggttgacctggacaagtctgtggcccagctggcagggagccggcggagagcggactcagaccgcatccagccctccgcagaccgggcaagcagtctctcccgaccttgggaaaaaacagacaaaggggccacctacaccccccaggcacccaagaagttgacgcccacagagaaaggccgctgcgcctccctggaggagatcctatctcagcgggatgctgcctctgcccgcaccctccagctgcgggctgaggaacccccaacccctgccctccccaacccggggcagctgtcccggatccaggacctggtagcaaggaaactggaggagactcaggagcttctggcagaggttcagggactgggagatgggaagcgaaaggccaaggacccccctcggtctccgccggattctgagtcagagcagctgctgctggagacggaacggctgctgggagaggcatcatcgaattggagccaggcaaagagggtgctgcaggaggtcagggagctgagagacctgtacagacagatggacctgcagaccccggactcccacctcagacagaccaccccgcacagtcagtaccggaagagcctgatgtgagggcagggtggggtctggaacttgtcgggttggacagactcttatctccgtgttgctggataaagcttttttatttacctcaatcaaaaaaaaaaaaa

SEQ ID NO: 2299 - protein, 409 aa, Homo sapiens
MMKKNNSAKRGPQDGNQQPAPPEKVGWVRKFCGKGIFREIWKNRYVVLKGDQLYISEKEVKDEKNIQEVFDLSDYEKCEELRKSKSRSKKNHSKFTLAHSKQPGNTAPNLIFLAVSPEEKESWINALNSAITRAKNRILDEVTVEEDSYLAHPTRDRAKIQHSRRPPTRGHLMAVASTSTSDGMLTLDLIQEEDPSPEEPTSCAESFRVDLDKSVAQLAGSRRRADSDRIQPSADRASSLSRPWEKTDKGATYTPQAPKKLTPTEKGRCASLEEILSQRDAASARTLQLRAEEPPTPALPNPGQLSRIQDLVARKLEETQELLAEVQGLGDGKRKAKDPPRSPPDSESEQLLLETERLLGEASSNWSQAKRVLQEVRELRDLYRQMDLQTPDSHLRQTTPHSQYRKSLM

SEQ ID NO: 2300 - DNA, 461 bp, Homo sapiens
tgagtggtaccttcgaggtgtctgggaggagtacggaggcagggttgtggttgctggctgttacaggacaaccggaggcgatgaccgttatctgcggttggagccgttagcgggagaggcagagatattcagaggtcttttaggatgtgctaaagggtcgtgagggctctcttaaaattttcttcacaagcggttatccagtcgtgccccgcggccctgctgctggccccggggatctgagtcgtaccctcttgtttttctctgagtcagtcttaaggtgaaatgaagtgtggcccagtggctcctcactgtcgcttctctagttttctgcctccttttagaaaattgaattgaaaagacaggatgaagtggacacagcatgtgaagacaattctttcaagaagtttggctgtcaaggaaaacagagaatgtgctaaagaacatacagaacaccgtcgaag

SEQ ID NO: 2301 - DNA, 253 bp, Homo sapiens
gacagacagcccagagcagtaatgtgacagacagctgtgtagtacaaactagtaatgacacacagtgcttaaataagtctgacaacatagatggaaaggcatctcttcagattggtgagaaaacgccagtcacagccagtgtattgtctgaggaggaacaaactcattgcttggagataggaagtaacacacgtcatggcaagagtaatttatctgaaggcaaaaagtctgctgaactcaattccccgttacg

SEQ ID NO: 2302 - DNA, 7781 bp, Homo sapiens
gcagagtgcgacgtgcccatgaatcagtgcatcgatccttcctgcgggggccacggctcctgcattgatgggaactgtgtctgctctgctggctacaaaggcgagcactgtgaggaagttgattgcttggatcccacctgctccagccacggagtctgtgtgaatggagaatgcctgtgcagccctggctggggtggtctgaactgtgagctggcgagggtccagtgcccagaccagtgcagtgggcatggcacgtacctgcctgacacgggcctctgcagctgcgatcccaactggatgggtcccgactgctctgttgaagtgtgctcagtagactgtggcactcacggcgtctgcatcgggggagcctgccgctgtgaagagggctggacaggcgcagcgtgtgaccagcgcgtgtgccacccccgctgcattgagcacgggacctgtaaagatggcaaatgtgaatgccgagagggctggaatggtgaacactgcaccattggtaggcaaacggcaggcaccgaaacagatggctgccctgacttgtgcaacggtaacgggagatgcacactgggtcagaacagctggcagtgtgtctgccagaccggctggagagggcccggatgcaacgttgccatggaaacttcctgtgctgataacaaggataatgagggagatggcctggtggattgtttggaccctgactgctgcctgcagtcagcctgtcagaacagcctgctctgccgggggtcccgggacccactggacatcattcagcagggccagacggattggcccgcagtgaagtccttctatgaccgtatcaagctcttggcaggcaaggatagcacccacatcattcctggagagaaccctttcaacagcagcttggtttctctcatccgaggccaagtagtaactacagatggaactcccctggtcggtgtgaacgtgtcttttgtcaagtacccaaaatacggctacaccatcacccgccaggatggcacgttcgacctgatcgcaaatggaggtgcttccttgactctacactttgagcgagccccgttcatgagccaggagcgcactgtgtggctgccgtggaacagcttttacgccatggacaccctggtgatgaagaccgaggagaactccatccccagctgtgacctcagtggctttgtccggcctgatccaatcatcatctcctccccactgtccaccttctttagtgctgcccctgggcagaatcccatcgtgcctgagacccaggttcttcatgaagaaatcgagctccctggttccaatgtgaaacttcgctatctgagctctagaactgcagggtacaagtcactgctgaagatcaccatgacccagtccacagtgcccctgaacctcattagggttcacctgatggtggctgtcgaggggcatctcttccagaagtcattccaggcttctcccaacctggcctacaccttcatctgggacaagacagatgcgtatggccaaagggtgtatggactctcagatgctgttgtgtctgtcgggtttgaatatgagacctgtcccagtctaattctctgggagaaaaggacagccctccttcagggattcgagctggacccctccaacctcggtggctggtccctagacaaacaccacatcctcaatgttaaaagtggaatcctacacaaaggcactggggaaaaccagttcctgacccagcagcctgccatcatcaccagcatcatgggcaatggtcgccgccggagcatttcctgtcccagctgcaacggccttgctgaaggcaacaagctgctggccccagtggctctggctgttggaatcgatgggagcctctatgtgggtgacttcaattacatccgacgcatctttccctctcgaaatgtgaccagcatcttggagttacgaaataaagagtttaaacatagcaacaacccagcacacaagtactacttggcagtggaccccgtgtccggctcgctctacgtgtccgacaccaacagcaggagaatctaccgcgtcaagtctctgagtggaaccaaagacctggctgggaattcggaagttgtggcagggacgggagagcagtgtctaccctttgatgaagcccgctgcggggatggagggaaggccatagatgcaaccctgatgagcccgagaggtattgcagtagacaagaatgggctcatgtactttgtcgatgccaccatgatccggaaggttgaccagaatggaatcatctccaccctgctgggctccaatgacctcactgccgtccggccgctgagctgtgattccagcatggatgtagcccaggttcgtctggagtggccaacagaccttgctgtcaatcccatggataactccttgtatgttctagagaacaatgtcatccttcgaatcaccgagaaccaccaagtcagcatcattgcgggacgccccatgcactgccaagttcctggcattgactactcactcagcaaactagccattcactctgccctggagtcagccagtgccattgccatttctcacactggggtcctctacatcactgagacagatgagaagaagattaaccgtctacgccaggtaacaaccaacggggagatctgccttttagctggggcagcctcggactgcgactgcaaaaacgatgtcaattgcaactgctattcaggagatgatgcctacgcgactgatgccatcttgaattccccatcatccttagctgtagctccagatggtaccatttacattgcagaccttggaaatattcggatcagggcggtcagcaagaacaagcctgttcttaatgccttcaaccagtatgaggctgcatcccccggagagcaggagttatatgttttcaacgctgatggcatccaccaatacactgtgagcctggtgacaggggagtacttgtacaatttcacatatagtactgacaatgatgtcactgaattgattgacaataatgggaattccctgaagatccgtcgggacagcagtggcatgccccgtcacctgctcatgcctgacaaccagatcatcaccctcaccgtgggcaccaatggaggcctcaaagtcgtgtccacacagaacctggagcttggtctcatgacctatgatggcaacactgggctcctggccaccaagagcgatgaaacaggatggacgactttctatgactatgaccacgaaggccgcctgaccaacgtgacgcgccccacgggggtggtaaccagtctgcaccgggaaatggagaaatctattaccattgacattgagaactccaaccgtgatgatgacgtcactgtcatcaccaacctctcttcagtagaggcctcctacacagtggtacaagatcaagttcggaacagctaccagctctgtaataatggtaccctgagggtgatgtatgctaatgggatgggtatcagcttccacagcgagccccatgtcctagcgggcaccatcacccccaccattggacgctgcaacatctccctgcctatggagaatggcttaaactccattgagtggcgcctaagaaaggaacagattaaaggcaaagtcaccatctttggcaggaagctccgggtccatggaagaaatctcttgtccattgactatgatcgaaatattcggactgaaaagatctatgatgaccaccggaagttcaccctgaggatcatttatgaccaggtgggccgccccttcctctggctgcccagcagcgggctggcagctgtcaacgtgtcatacttcttcaatgggcgcctggctgggcttcagcgtggggccatgagcgagaggacagacatcgacaagcaaggccgcatcgtgtcccgcatgttcgctgacgggaaagtgtggagctactcctaccttgacaagtccatggtcctcctgcttcagagccaacgtcagtatatatttgagtatgactcctctgaccgcctccttgccgtcaccatgcccagcgtggcccggcacagcatgtccacacacacctccatcggctacatccgtaatatttacaacccgcctgaaagcaatgcttcggtcatctttgactacagtgatgacggccgcatcctgaagacctcctttttgggcaccggacgccaggtgttctacaagtatgggaaactctccaagttatcagagattgtctacgacagtaccgccgtcaccttcgggtatgacgagaccactggtgtcttgaagatggtcaacctccaaagtgggggcttctcctgcaccatcaggtaccggaagattggccccctggtggacaagcagatctacaggttctccgaggaaggcatggtcaatgccaggtttgactacacctatcatgacaacagcttccgcatcgcaagcatcaagcccgtcataagtgagactcccctccccgttgacctctaccgctatgatgagatttctggcaaggtggaacactttggtaagtttggagtcatctattatgacatcaaccagattatcaccactgccgtgatgaccctcagcaaacacttcgacacccatgggcggatcaaggaggtccagtatgagatgttccggtccctcatgtactggatgacagtgcaatatgacagcatgggcagggtgatcaagagggagctaaaactggggccctatgccaataccacgaagtacacctatgactacgatggggacgggcagctccagagcgtggccgtcaatgaccgcccgacctggcgctacagctatgaccttaatgggaatctccacttactgaacccaggcaacagtgtgcgcctcatgcccttgcgctatgacctccgggatcggataaccagactcggggatgtgcagtacaaaattgacgacgatggctatctgtgccagagagggtctgacatcttcgaatacaattccaagggcctcctaacaagagcctacaacaaggccagcgggtggagtgtccagtaccgctatgatggcgtaggacggcgggcttcctacaagaccaacctgggccaccacctgcagtacttctactctgacctccacaacccgacgcgcatcacccatgtctacaatcactccaactcggagattacctcactgtactacgacctccagggccacctctttgccatggagagcagcagtggggaggagtactatgttgcctctgataacacagggactcctctggctgtgttcagcatcaacggccccatgatcaaacagctgcagtacacggcctatggggagatttattatgactccaaccccgacttccagatggtcattggcttccatgggggactctatgaccccctgaccaagctggtccacttcactcagcgtgattatgatgtgctggcaggacgatggacctccccagactataccatgtggaaaaacgtgggcaaggagccggccccctttaacctgtatatgttcaagagcaacaatcctctcagcagtgagctagatttgaagaactacgtgacagatgtgaaaagctggcttgtgatgtttggatttcagcttagcaacatcattcctggcttcccgagagccaaaatgtatttcgtgcctcctccctatgaattgtcagagagtcaagcaagtgagaatggacagctcattacaggtgtccaacagacaacagagagacataaccaggccttcatggctctggaaggacaggtcattactaaaaagctccacgccagcatccgagagaaagcaggtcactggtttgccaccaccacgcccatcattggcaaaggcatcatgtttgccatcaaagaagggcgggtgaccacgggcgtgtccagcatcgccagcgaagatagccgcaaggtggcatctgtgctgaacaatgcctactacctggacaagatgcactacagcatcgagggcaaggacacccactactttgtgaagattggctcagccgatggcgacctggtcacactaggcaccaccatcggccgcaaggtgctagagagcggggtgaacgtgaccgtgtcccagcccacgctgctggtcaacggcaggactcgaaggttcacgaacattgagttccagtactccacgctgctgctcagcatccgctatggcctcacccccgacaccctggacgaagagaaggcccgcgtcctggaccaggcgagacagagggccctgggcacggcctgggccaaggagcagcagaaagccagggacgggagagaggggagccgcctgtggactgagggcgagaagcagcagcttctgagcaccgggcgcgtgcaagggtacgagggatattacgtgcttcccgtggagcaatacccagagcttgcagacagtagcagcaacatccagtttttaagacagaatgagatgggaaagaggtaacaaaataatctgctgccattccttgtctgaatggctcagcaggagtaactgttatctcctctcctaaggagatgaagacctaacaggggcactgcggctgggctgctttaggagaccaagtggcaagaaagctcacattttttgagttcaaatgctactgtccaagcgagaagtccctcatcctgaagtagactaaagcccggctgaaaattccgaggaaaacaaaacaaacgaatgaatgaacagacacacacaatgttccaagttcccctaaaatatgacccacttgttctgggtctacgcagaaaagagacgcaaagtgtccaaaaggaacaaaagaacaaaaacgaataagcaaagaagaaaacaaacaaaaacaaaacaaaacaaacacacggaccgataaacaaagaagcgaagataagaaagaaggcctcatatccaattacctcactcattcacatgtgagcgacacgcagacatccgcgagggccagcgtcaccagaccagctgcgggacaaaccactcagactgcttgtaggacaaatacttctgacattttcgtttaagcaaatacaggtgcatttaaaacacgactttgggggtgatttgtgtgtagcgcctggggaggggggataaaagaggaggagtgagcactggaaatactttttaaagaaaaaaaaacatgagggaataaaagaaattcctatcaaaaatcaaagtgaaataataccatccagcacttaactctcaggtcccaactaagtctggcctgagctaatttatttgagcgcagagtgtaaaatttaattcaaaatggtggctataatcactacagataaatttcatactcttttgtctttggagattccattgtggacagtaatacgcagttacagggtgtagtctgtttagattccgtagttcgtgggtatcagtttcggtagaggtgcagcatcgtgacacttttgctaacaggtaccacttctgatcaccctgtacatacatgagccgaaaggcacaatcactgtttcagatttaaaattattagtgtgtttgtttggtccagaaactgagacaatcacatgacagtcaccacgaggagagaaaatttaaaaaataaaaataaaaacaaaaaaaattttaaaaattaaaaaaacaaaaataaagtctaataagaactttggtacaggaacttttttgtaatatacatgtatgaattgttcatcgagtttttatattaattttaatttgctgctaagcaaagactagggacaggcaaagataatttatggcaaagtgtttaaattgtttatacataaataaagtctctaaaactcctgtgg

SEQ ID NO: 2303 - protein, 2144 aa, Homo sapiens
AECDVPMNQCIDPSCGGHGSCIDGNCVCSAGYKGEHCEEVDCLDPTCSSHGVCVNGECLCSPGWGGLNCELARVQCPDQCSGHGTYLPDTGLCSCDPNWMGPDCSVEVCSVDCGTHGVCIGGACRCEEGWTGAACDQRVCHPRCIEHGTCKDGKCECREGWNGEHCTIGRQTAGTETDGCPDLCNGNGRCTLGQNSWQCVCQTGWRGPGCNVAMETSCADNKDNEGDGLVDCLDPDCCLQSACQNSLLCRGSRDPLDIIQQGQTDWPAVKSFYDRIKLLAGKDSTHIIPGENPFNSSLVSLIRGQVVTTDGTPLVGVNVSFVKYPKYGYTITRQDGTFDLIANGGASLTLHFERAPFMSQERTVWLPWNSFYAMDTLVMKTEENSIPSCDLSGFVRPDPIIISSPLSTFFSAAPGQNPIVPETQVLHEEIELPGSNVKLRYLSSRTAGYKSLLKITMTQSTVPLNLIRVHLMVAVEGHLFQKSFQASPNLAYTFIWDKTDAYGQRVYGLSDAVVSVGFEYETCPSLILWEKRTALLQGFELDPSNLGGWSLDKHHILNVKSGILHKGTGENQFLTQQPAIITSIMGNGRRRSISCPSCNGLAEGNKLLAPVALAVGIDGSLYVGDFNYIRRIFPSRNVTSILELRNKEFKHSNNPAHKYYLAVDPVSGSLYVSDTNSRRIYRVKSLSGTKDLAGNSEVVAGTGEQCLPFDEARCGDGGKAIDATLMSPRGIAVDKNGLMYFVDATMIRKVDQNGIISTLLGSNDLTAVRPLSCDSSMDVAQVRLEWPTDLAVNPMDNSLYVLENNVILRITENHQVSIIAGRPMHCQVPGIDYSLSKLAIHSALESASAIAISHTGVLYITETDEKKINRLRQVTTNGEICLLAGAASDCDCKNDVNCNCYSGDDAYATDAILNSPSSLAVAPDGTIYIADLGNIRIRAVSKNKPVLNAFNQYEAASPGEQELYVFNADGIHQYTVSLVTGEYLYNFTYSTDNDVTELIDNNGNSLKIRRDSSGMPRHLLMPDNQIITLTVGTNGGLKVVSTQNLELGLMTYDGNTGLLATKSDETGWTTFYDYDHEGRLTNVTRPTGVVTSLHREMEKSITIDIENSNRDDDVTVITNLSSVEASYTVVQDQVRNSYQLCNNGTLRVMYANGMGISFHSEPHVLAGTITPTIGRCNISLPMENGLNSIEWRLRKEQIKGKVTIFGRKLRVHGRNLLSIDYDRNIRTEKIYDDHRKFTLRIIYDQVGRPFLWLPSSGLAAVNVSYFFNGRLAGLQRGAMSERTDIDKQGRIVSRMFADGKVWSYSYLDKSMVLLLQSQRQYIFEYDSSDRLLAVTMPSVARHSMSTHTSIGYIRNIYNPPESNASVIFDYSDDGRILKTSFLGTGRQVFYKYGKLSKLSEIVYDSTAVTFGYDETTGVLKMVNLQSGGFSCTIRYRKIGPLVDKQIYRFSEEGMVNARFDYTYHDNSFRIASIKPVISETPLPVDLYRYDEISGKVEHFGKFGVIYYDINQIITTAVMTLSKHFDTHGRIKEVQYEMFRSLMYWMTVQYDSMGRVIKRELKLGPYANTTKYTYDYDGDGQLQSVAVNDRPTWRYSYDLNGNLHLLNPGNSVRLMPLRYDLRDRITRLGDVQYKIDDDGYLCQRGSDIFEYNSKGLLTRAYNKASGWSVQYRYDGVGRRASYKTNLGHHLQYFYSDLHNPTRITHVYNHSNSEITSLYYDLQGHLFAMESSSGEEYYVASDNTGTPLAVFSINGPMIKQLQYTAYGEIYYDSNPDFQMVIGFHGGLYDPLTKLVHFTQRDYDVLAGRWTSPDYTMWKNVGKEPAPFNLYMFKSNNPLSSELDLKNYVTDVKSWLVMFGFQLSNIIPGFPRAKMYFVPPPYELSESQASENGQLITGVQQTTERHNQAFMALEGQVITKKLHASIREKAGHWFATTTPIIGKGIMFAIKEGRVTTGVSSIASEDSRKVASVLNNAYYLDKMHYSIEGKDTHYFVKIGSADGDLVTLGTTIGRKVLESGVNVTVSQPTLLVNGRTRRFTNIEFQYSTLLLSIRYGLTPDTLDEEKARVLDQARQRALGTAWAKEQQKARDGREGSRLWTEGEKQQLLSTGRVQGYEGYYVLPVEQYPELADSSSNIQFLRQNEMGKR

SEQ ID NO: 2304 - DNA, 498 bp, Homo sapiens
  misc_feature (433)..(433): n is a, c, g, or t
  misc_feature (471)..(471): n is a, c, g, or t
  misc_feature (489)..(489): n is a, c, g, or t
agcacttgaaaatcaacaaatccagaatttaaaaaaatgccacagacttttcaaagcccaactgtacttttttgagaatttgtcccgtacctactaatatgccttattcttcttcacctagtgttttaaaagtcctggggtagaaagagttttagaaatgtaatcagttgttcagcttcaataatatagagatctaacatagtcagtcctcaggccccctaaagaaacaagcaagaaagtgagggccatcactagggttggctttggggaggggaaaactaaggactgcttttgccaaatgatatttttgataatgtaagggaaacacagggaccacaaaaccttttttttttttaagtgtgaaagattagtgccttttggcatactttttgattttagagggatatagtatccggcattgacaaaatcacgntaggaaaccaaagaatgctattaggtggaccaccaggnattaaatgtttactcccnggatttctg

SEQ ID NO: 2305 - DNA, 3410 bp, Homo sapiens
gcaccaggcgcccagtggagccgtttgggagaattgcctgcgccacgcagcggggccggacaggcggtaaggatctgattaggctttcgaacttgagtttgactgatgtcttctgtgtggtgtccgctaaatcccacagcatataggatcagtcgcattggttataaggtttgcttctggctgggtgcggtggctcatgcctgtaatccaacattgggaggccaaggcaggcggaccacctgaagtcgggagcttgagtccagccactgtctgggtactgccagccatcgggcccaggtctctggggttgtcttaccgcagtgagtaccacgcggtactacagagaccggctgcccgtgtgcccggcaggtggagccgccgcatcagcggcctcggggaatggaagcggagaacgcgggcagctattcccttcagcaagctcaagctttttatacgtttccatttcaacaactgatggctgaagctcctaatatggcagttgtgaatgaacagcaaatgccagaagaagttccagccccagctcctgctcaggaaccagtgcaagaggctccaaaaggaagaaaaagaaaacccagaacaacagaaccaaaacaaccagtggaacccaaaaaacctgttgagtcaaaaaaatctggcaagtctgcaaaaccaaaagaaaaacaagaaaaaattacagacacatttaaagtaaaaagaaaagtagaccgttttaatggtgtttcagaagctgaacttctgaccaagactctccccgatattttgaccttcaatctggacattgtcattattggcataaacccgggactaatggctgcttacaaagggcatcattaccctggacctggaaaccatttttggaagtgtttgtttatgtcagggctcagtgaggtccagctgaaccatatggatgatcacactctaccagggaagtatggtattggatttaccaacatggtggaaaggaccacgcccggcagcaaagatctctccagtaaagaatttcgtgaaggaggacgtattctagtacagaaattacagaaatatcagccacgaatagcagtgtttaatggaaaatgtatttatgaaatttttagtaaagaagtttttggagtaaaggttaagaacttggaatttgggcttcagccccataagattccagacacagaaactctctgctatgttatgccatcatccagtgcaagatgtgctcagtttcctcgagcccaagacaaagttcattactacataaaactgaaggacttaagagatcagttgaaaggcattgaacgaaatatggacgttcaagaggtgcaatatacatttgacctacagcttgcccaagaggatgcaaagaagatggctgttaaggaagaaaaatatgatccaggttatgaggcagcatatggtggtgcttacggagaaaatccatgcagcagtgaaccttgtggcttctcttcaaatgggctaattgagagcgtggagttaagaggagaatcagctttcagtggcattcctaatgggcagtggatgacccagtcatttacagaccaaattccttcctttagtaatcactgtggaacacaagaacaggaagaagaaagccatgcttaagaatggtgcttctcagctctgcttaaatgctgcagttttaatgcagttgtcaacaagtagaacctcagtttgctaactgaagtgttttattagtattttactctagtggtgtaattgtaatgtagaacagttgtgtggtagtgtgaaccgtatgaacctaagtagtttggaagaaaaagtagggtttttgtatactagcttttgtatttgaattaattatcattccagctttttatatactatatttcatttatgaagaaattgattttcttttgggagtcacttttaatctgtaattttaaaatacaagtctgaatatttatagttgattcttaactgtgcataaacctagatataccattatcccttttatacctaagaagggcatgctaataattaccactgtcaaagaggcaaaggtgttgatttttgtatataagttaagcctcagtggagtctcatttgttagtttttagtggtaactaagggtaaactcagggttccctgagctatatgcacactcagacctctttgctttaccagtggtgtttgtgagttgctcagtagtaaaaactggcccttacctgacagagccctggctttgacctgctcagccctgtgtgttaatcctctagtagccaattaactactctggggtggcaggttccagagaatcgagtagaccttttgccactcatctgtgttttacttgagacatgtaaatatgatagggaaggaactgaatttctccattcatatttataaccattctagttttatcttccttggctttaagagtgtgccatggaaagtgataagaaatgaacttctaggctaagcaaaaagatgctggagatatttgatactctcatttaaactggtgctttatgtacatgagatgtactaaaataagtaatatagaatttttcttgctaggtaaatccagtaagccaataattttaaagattctttatctgcatcattgctgtttgttactataaattaaatgaacctcatggaaaggttgaggtgtatacctttgtgattttctaatgagttttccatggtgctacaaataatccagactaccaggtctggtagatattaaagctgggtactaagaaatgttatttgcatcctctcagttactcctgaatattctgatttcatacgtacccagggagcatgctgttttgtcaatcaatataaaatatttatgaggtctcccccacccccaggaggttatatgattgctcttctctttataataagagaaacaaattcttattgtgaatcttaacatgctttttagctgtggctatgatggattttattttttcctaggtcaagctgtgtaaaagtcatttatgttatttaaatgatgtactgtactgctgtttacatggacgttttgtgcgggtgctttgaagtgccttgcatcagggattaggagcaattaaattattttttcacgggactgtgtaaagcatgtaactaggtattgctttggtatataactattgtagctttacaagagattgttttatttgaatggggaaaataccctttaaattatgacggacatccactagagatgggtttgaggattttccaagcgtgtaataatgatgtttttcctaacatgacagatgagtagtaaatgttgatatatcctatacatgacagtgtgagactttttcattaaataatattgaaagattttaaaattcatttgaaagtctgatggcttttacaataaaagatattaagaattgtta

SEQ ID NO: 2306 - protein, 410 aa, Homo sapiens
MEAENAGSYSLQQAQAFYTFPFQQLMAEAPNMAVVNEQQMPEEVPAPAPAQEPVQEAPKGRKRKPRTTEPKQPVEPKKPVESKKSGKSAKPKEKQEKITDTFKVKRKVDRFNGVSEAELLTKTLPDILTFNLDIVIIGINPGLMAAYKGHHYPGPGNHFWKCLFMSGLSEVQLNHMDDHTLPGKYGIGFTNMVERTTPGSKDLSSKEFREGGRILVQKLQKYQPRIAVFNGKCIYEIFSKEVFGVKVKNLEFGLQPHKIPDTETLCYVMPSSSARCAQFPRAQDKVHYYIKLKDLRDQLKGIERNMDVQEVQYTFDLQLAQEDAKKMAVKEEKYDPGYEAAYGGAYGENPCSSEPCGFSSNGLIESVELRGESAFSGIPNGQWMTQSFTDQIPSFSNHCGTQEQEEESHA

SEQ ID NO: 2307 - DNA, 2233 bp, Homo sapiens
tcccacgctcccattttaccgaggtggatctgaggcccagagtgggcaaagggcttgccaaggtcgcagagcgcgcagaggattagaaccctgattccgtccagcacctgcggagttggagacgcccacaggaaacgcccacctgaccgggtgagtgagggggcgggcgagccggaggggtggagtttattcgcgccccgctccgccaccagggcttgggggcggggccttcctgcaacctttgcggctccaacatggctccgcggctgtgcagcatctctgtgacggcgcggcggctgctggggggcccggggcctcgcgctggggacgttgcgtctgcagctgcggcgcgtttctattccaaggacaatgaaggcagctggttccgctccctctttgttcacaaagtggatccccggaaggatgcccactccaccctgctgtccaagaaggaaaccagcaacctctataagatccagtttcacaatgtaaagcctgaatacctggatgcctacaacagcctcacggaggctgtgctgcccaagcttcacctggatgaggactacccatgctcactcgtgggcaactggaacacgtggtatggggagcaggaccaggcagtgcacctgtggcgattctcaggtggctacccagccctcatggactgcatgaacaagctcaaaaacaataaggagtacctggagttccgaagggagcggacgcagatgctgctgtccaggagaaaccagctgctccttgagttcagcttctggaatgagccacagcccagaatgggtcccaacatctatgagctgaggacatacaagctcaagccaggaaccatgatcgagtgggggaacaactgggctcgggccatcaagtaccggcaggagaaccaggaggcagtgggcggcttcttctcacagataggagagctctacgtggtgcaccatctctgggcctataaagacctgcagtctcgggaggagactcgaaacgctgcctggaggaagagaggctgggatgaaaatgtctactatacagtccccctggtgcgacacatggagtctaggatcatgatccccttgaagatctcgcctctgcagtgatgctgcctacacctccacctccttccccttctccctcaggcaaccccgacagacagtggcactcctggtcctgctgtcttggttttgtcttggctctgggaggactctgaggggcagtgctcagttcagacaagggggaactgaaggctgacaagttctgaggattacagctctgcccaggccctttctactttccctgcctgcctccctccccctgctagaagtagtttctgatttccctgaatgaaagatagtgatcttttaggccttcatatatcttctaaaattcctcatctcaaggccaccagtccccagttatcacccttggaaatcctctgtttagcttagttgcacaaaaggtagtatgtccagtggctagaggtggggtgggaagagaggaggccaggccaggccctcaggaattccctggtttccactgggccacccacttgctggacagtctgagccaagtccctcctgctggagaaaagcctggaactgccaaaacaaaaaaacaaatacaaacaaacctcgtcaccacggtcaggaggaggttcagacattctgcccagaggggctggggaaagggatgggagccaggaaagatttaggggcaggagacagacacgtaacaggaactcggaaggtagaacttagaattcagaacttgggtttcaattgtagaatttggaatctggaatacagaattgggaagaagaacagagatgacaaaagaccacttgaagagaggttcctaatactagacagatggagagtggcttggctgtttccccctgcatattggggttgaaaacttaaatgtgtagttccagtccttctatgcagagtctctcctgccctccctccttcctgcaggcaaatatacaagctagaccctgttccctcaccctgtatcctgtctcccctaattgacattctatcagcccaaccctcattctgcagggccacctggtgtgtggaggtggcgggaggggtcagtgactctgggggtctcctcagtgacccccatacctcatcatgaacccttgggtagcttgattctgcctaccatccaggaaaacttgtgctggaattgctgatggaaacaattaaatatttactat

SEQ ID NO: 2308 - protein, 284 aa, Homo sapiens
MAPRLCSISVTARRLLGGPGPRAGDVASAAAARFYSKDNEGSWFRSLFVHKVDPRKDAHSTLLSKKETSNLYKIQFHNVKPEYLDAYNSLTEAVLPKLHLDEDYPCSLVGNWNTWYGEQDQAVHLWRFSGGYPALMDCMNKLKNNKEYLEFRRERTQMLLSRRNQLLLEFSFWNEPQPRMGPNIYELRTYKLKPGTMIEWGNNWARAIKYRQENQEAVGGFFSQIGELYVVHHLWAYKDLQSREETRNAAWRKRGWDENVYYTVPLVRHMESRIMIPLKISPLQ

SEQ ID NO: 2309 - DNA, 499 bp, Homo sapiens
  misc_feature (121)..(121): n is a, c, g, or t
  misc_feature (255)..(255): n is a, c, g, or t
  misc_feature (279)..(279): n is a, c, g, or t
  misc_feature (290)..(290): n is a, c, g, or t
  misc_feature (334)..(334): n is a, c, g, or t
  misc_feature (361)..(361): n is a, c, g, or t
  misc_feature (373)..(373): n is a, c, g, or t
  misc_feature (404)..(404): n is a, c, g, or t
  misc_feature (413)..(413): n is a, c, g, or t
  misc_feature (445)..(445): n is a, c, g, or t
  misc_feature (460)..(460): n is a, c, g, or t
  misc_feature (468)..(468): n is a, c, g, or t
  misc_feature (473)..(473): n is a, c, g, or t
  misc_feature (495)..(495): n is a, c, g, or t
tttttttttggaaaagaggtacttaatgtcacaaagtagactgtgcaaaaaaaaaaaaaagtacacccattaagttttcgtcattacctggcaagcccatggggtataatttttagaagantacggaggaaaatctgttaacagtaatgttgggtagcaatttggaatgtttactagtagacagaactcctaattaggtaaatgtgtattagaaatgaccttaaagtcttcagagtggaaggtaagtaatttgancatgaatacttagttggtaaatancattttaaganttctatttaggtttcacagactgaggcattaggtaaccctgtgnctagcctttaacattattataggttanccttcttaaaancccaaggggttacctttttggaccattgccntcccctccnccctaaaacctggggtaaaaccccggtaaagnggccactttggaccnggggttcncctcnccggtttctaaaagggggctgnccaa

SEQ ID NO: 2310 - DNA, 147 bp, Homo sapiens
tttatattcaccacatgtaaaactttatttatgcataaaaccaccacacacacacaacctacacaaggaatgtgcagtcctgagtctatttagctacatgtgagtatatactccataaggcatataaaaccagtgcacagaaaatgc

SEQ ID NO: 2311 - DNA, 588 bp, Homo sapiens
cggctaggtcgaggcctggtgttgcgggcaccggggcggcgggttggtctacgctgtgcgctggcggacgtcggaggcagcggggagcggagcggggccgcggggcctctcaggccgcagcggcagcagttgggccccccgccccggccggcggaccgaagaacgcaggaagggggccggggggacccgcccccggccggccgcagccatgaaactccaactgtggagaacctacccccgcacatcatccgcctggtgtacaaggaggtgacgacactgaccgcagacccacccgatggcatcaaggtctttcccaacgaggaggacctcaccgacctccaggtcaccatcgagggccctgaggggaccccatatgctggaggtctgttccgcatgaaactcctgctggggaaggacttccctgcctccccacccaagggctacttccttgaccaagatcttccacccgaacgtgggcgccaatggcgagatctgcgtcaacgtgctcaagagggactggacggctgagctgggcatcgacacgtactgctgaccatcaagtgccttgctgatccaccctaaccccga

SEQ ID NO: 2312 - DNA, 233 bp, Homo sapiens
acgcaatccagtttcaattttattcagaagtaggtcacctaattctagaaaatggttattaggtctagtgtcgcttagcaaggtacttaaaagaaaatctgcacatatccttgtgctgcccttcttaaaaacagaaaacaaaaagtgtaagatcatcattgcttcccacataggaaaaataaaatgtcttcagacttgatgtgactcaaaaataaaaaaaaaaaaaaaaaggg

SEQ ID NO: 2313 - DNA, 3985 bp, Homo sapiens
gaagggcagacagagtgtccaaaagcgtgagagcacgaagtgaggagaaggtggagaagagagaagaggaagaggaagaggaagagaggaagcggagggaactgcggccaggctaaaaggggaagaagaggatcagcccaaggaggaggaagaggaaaacaagacaaacagccagtgcagaggagaggaacgtgtgtccagtgtcccgatccctgcggagctagtagctgagagctctgtgccctgggcaccttgcagccctgcacctgcctgccacttccccaccgaggccatgggcccaggagttctgctgctcctgctggtggccacagcttggcatggtcagggaatcccagtgatagagcccagtgtccctgagctggtcgtgaagccaggagcaacggtgaccttgcgatgtgtgggcaatggcagcgtggaatgggatggccccccatcacctcactggaccctgtactctgatggctccagcagcatcctcagcaccaacaacgctaccttccaaaacacggggacctatcgctgcactgagcctggagaccccctgggaggcagcgccgccatccacctctatgtcaaagaccctgcccggccctggaacgtgctagcacaggaggtggtcgtgttcgaggaccaggacgcactactgccctgtctgctcacagacccggtgctggaagcaggcgtctcgctggtgcgtgtgcgtggccggcccctcatgcgccacaccaactactccttctcgccctggcatggcttcaccatccacagggccaagttcattcagagccaggactatcaatgcagtgccctgatgggtggcaggaaggtgatgtccatcagcatccggctgaaagtgcagaaagtcatcccagggcccccagccttgacactggtgcctgcagagctggtgcggattcgaggggaggctgcccagatcgtgtgctcagccagcagcgttgatgttaactttgatgtcttcctccaacacaacaacaccaagctcgcaatccctcaacaatctgactttcataataaccgttaccaaaaagtcctgaccctcaacctcgatcaagtagatttccaacatgccggcaactactcctgcgtggccagcaacgtgcagggcaagcactccacctccatgttcttccgggtggtagagagtgcctacttgaacttgagctctgagcagaacctcatccaggaggtgaccgtgggggaggggctcaacctcaaagtcatggtggaggcctacccaggcctgcaaggttttaactggacctacctgggacccttttctgaccaccagcctgagcccaagcttgctaatgctaccaccaaggacacatacaggcacaccttcaccctctctctgccccgcctgaagccctctgaggctggccgctactccttcctggccagaaacccaggaggctggagagctctgacgtttgagctcacccttcgataccccccagaggtaagcgtcatatggacattcatcaacggctctggcacccttttgtgtgctgcctctgggtacccccagcccaacgtgacatggctgcagtgcagtggccacactgataggtgtgatgaggcccaagtgctgcaggtctgggatgacccataccctgaggtcctgagccaggagcccttccacaaggtgacggtgcagagcctgctgactgttgagaccttagagcacaaccaaacctacgagtgcagggcccacaacagcgtggggagtggctcctgggccttcatacccatctctgcaggagcccacacgcatcccccggatgagttcctcttcacaccagtggtggtcgcctgcatgtccatcatggccttgctgctgctgctgctcctgctgctattgtacaagtataagcagaagcccaagtaccaggtccgctggaagatcatcgagagctatgagggcaacagttatactttcatcgaccccacgcagctgccttacaacgagaagtgggagttcccccggaacaacctgcagtttggtaagaccctcggagctggagcctttgggaaggtggtggaggccacggcctttggtctgggcaaggaggatgctgtcctgaaggtggctgtgaagatgctgaagtccacggcccatgctgatgagaaggaggccctcatgtccgagctgaagatcatgagccacctgggccagcacgagaacatcgtcaaccttctgggagcctgtacccatggaggccctgtactggtcatcacggagtactgttgctatggcgacctgctcaactttctgcgaaggaaggctgaggccatgctgggacccagcctgagccccggccaggaccccgagggaggcgtcgactataagaacatccacctcgagaagaaatatgtccgcagggacagtggcttctccagccagggtgtggacacctatgtggagatgaggcctgtctccacttcttcaaatgactccttctctgagcaagacctggacaaggaggatggacggcccctggagctccgggacctgcttcacttctccagccaagtagcccagggcatggccttcctcgcttccaagaattgcatccaccgggacgtggcagcgcgtaacgtgctgttgaccaatggtcatgtggccaagattggggacttcgggctggctagggacatcatgaatgactccaactacattgtcaagggcaatgcccgcctgcctgtgaagtggatggccccagagagcatctttgactgtgtctacacggttcagagcgacgtctggtcctatggcatcctcctctgggagatcttctcacttgggctgaatccctaccctggcatcctggtgaacagcaagttctataaactggtgaaggatggataccaaatggcccagcctgcatttgccccaaagaatatatacagcatcatgcaggcctgctgggccttggagcccacccacagacccaccttccagcagatctgctccttccttcaggagcaggcccaagaggacaggagagagcgggactataccaatctgccgagcagcagcagaagcggtggcagcggcagcagcagcagtgagctggaggaggagagctctagtgagcacctgacctgctgcgagcaaggggatatcgcccagcccttgctgcagcccaacaactatcagttctgctgaggagttgacgacagggagtaccactctcccctcctccaaacttcaactcctccatggatggggcgacacggggagaacatacaaactctgccttcggtcatttcactcaacagctcggcccagctctgaaacttgggaaggtgagggattcaggggaggtcagaggatcccacttcctgagcatgggccatcactgccagtcaggggctgggggctgagccctcacccccccctcccctactgttctcatggtgttggcctcgtgtttgctatgccaactagtagaaccttctttcctaatccccttatcttcatggaaatggactgactttatgcctatgaagtccccaggagctacactgatactgagaaaaccaggctctttggggctagacagactggcagagagtgagatctccctctctgagaggagcagcagatgctcacagaccacactcagctcaggccccttggagcaggatggctcctctaagaatctcacaggacctcttagtctctgccctatacgccgccttcactccacagcctcacccctcccacccccatactggtactgctgtaatgagccaagtggcagctaaaagttgggggtgttctgcccagtcccgtcattctgggctagaaggcaggggaccttggcatgtggctggccacaccaagcaggaagcacaaactcccccaagctgactcatcctaactaacagtcacgccgtgggatgtctctgtccacattaaactaacagcattaatgca

SEQ ID NO: 2314 - protein, 972 aa, Homo sapiens
MGPGVLLLLLVATAWHGQGIPVIEPSVPELVVKPGATVTLRCVGNGSVEWDGPPSPHWTLYSDGSSSILSTNNATFQNTGTYRCTEPGDPLGGSAAIHLYVKDPARPWNVLAQEVVVFEDQDALLPCLLTDPVLEAGVSLVRVRGRPLMRHTNYSFSPWHGFTIHRAKFIQSQDYQCSALMGGRKVMSISIRLKVQKVIPGPPALTLVPAELVRIRGEAAQIVCSASSVDVNFDVFLQHNNTKLAIPQQSDFHNNRYQKVLTLNLDQVDFQHAGNYSCVASNVQGKHSTSMFFRVVESAYLNLSSEQNLIQEVTVGEGLNLKVMVEAYPGLQGFNWTYLGPFSDHQPEPKLANATTKDTYRHTFTLSLPRLKPSEAGRYSFLARNPGGWRALTFELTLRYPPEVSVIWTFINGSGTLLCAASGYPQPNVTWLQCSGHTDRCDEAQVLQVWDDPYPEVLSQEPFHKVTVQSLLTVETLEHNQTYECRAHNSVGSGSWAFIPISAGAHTHPPDEFLFTPVVVACMSIMALLLLLLLLLLYKYKQKPKYQVRWKIIESYEGNSYTFIDPTQLPYNEKWEFPRNNLQFGKTLGAGAFGKVVEATAFGLGKEDAVLKVAVKMLKSTAHADEKEALMSELKIMSHLGQHENIVNLLGACTHGGPVLVITEYCCYGDLLNFLRRKAEAMLGPSLSPGQDPEGGVDYKNIHLEKKYVRRDSGFSSQGVDTYVEMRPVSTSSNDSFSEQDLDKEDGRPLELRDLLHFSSQVAQGMAFLASKNCIHRDVAARNVLLTNGHVAKIGDFGLARDIMNDSNYIVKGNARLPVKWMAPESIFDCVYTVQSDVWSYGILLWEIFSLGLNPYPGILVNSKFYKLVKDGYQMAQPAFAPKNIYSIMQACWALEPTHRPTFQQICSFLQEQAQEDRRERDYTNLPSSSRSGGSGSSSSELEEESSSEHLTCCEQGDIAQPLLQPNNYQFC

SEQ ID NO: 2315 - DNA, 262 bp, Homo sapiens
tttttttttttttttttgggggcctctaaagtacccttcattcatgaaactaaagcaagcctggatcaatgacatccatggaataagtgagtcttttttatgaaacaaggaaatctactaagacttattttgacactggagtgtcatgcccccatcctcaatctaacatgctactgcgttgttagagggtaaaaagggcgtcttcgtcttcccttccatgctgcacgtcattgaggacatttttactatctccaatgtagtc

SEQ ID NO: 2316 - DNA, 540 bp, Homo sapiens
  misc_feature (52)..(52): n is a, c, g, or t
  misc_feature (60)..(60): n is a, c, g, or t
  misc_feature (62)..(62): n is a, c, g, or t
  misc_feature (87)..(87): n is a, c, g, or t
  misc_feature (92)..(92): n is a, c, g, or t
  misc_feature (98)..(98): n is a, c, g, or t
  misc_feature (118)..(118): n is a, c, g, or t
  misc_feature (125)..(125): n is a, c, g, or t
  misc_feature (172)..(173): n is a, c, g, or t
  misc_feature (175)..(175): n is a, c, g, or t
  misc_feature (182)..(182): n is a, c, g, or t
  misc_feature (336)..(336): n is a, c, g, or t
  misc_feature (402)..(402): n is a, c, g, or t
  misc_feature (410)..(410): n is a, c, g, or t
  misc_feature (458)..(458): n is a, c, g, or t
  misc_feature (520)..(520): n is a, c, g, or t
  misc_feature (533)..(533): n is a, c, g, or t
gggtggctgcctggagagtccagagccctggcaggggattggaggcctctgngcctcggngntcatggcgggtggtctggccgccgngacangggacntctgggaggtcggcggaaangcagtgngcgactggtggtgtttgggcctagagggggagagcagcccggccacnnangctggcntccggggtgcctgatcccagcctcgcggcccggggttggtggtgacgcctggaatcaggggtcggtactggaccgggctcttgagcagccaggcgccactgccattgtctacggccacaccacctggaaaacgacgagagacccaagccgcganccgtgggttatgctcagcgccactgctcctgccacagtgaggggcacactctacaactttcagggnccacagancaagaggacagggagaagccaacaaaggaatgacgctacgaaaagcanccccaaaggaaccaaccaatctaagtaaaatcacgtcttagggctccgttgattgttccgcntggggcttctgtncctttgt

SEQ ID NO: 2317 - DNA, 419 bp, Homo sapiens
cgcccgacgtgaagaacgccagggagctgtgaggcagtgctgtgtggttcctgccgtccggactctttttcctctactgagattcatctgtgtgaaatatgagtaggcgaggaagatcgacctattattggcctagaccaaggcgctatgtacagcctcctgaagtgattgggcctatgcggccagagcagttcagtgatgaagtggaaccagcaacacctgaagaaggggaaccagcaactcaacgtcaggatcctgcagctgctcatcgcggagaggatgagggagcatctgcaggtcaagggccgaagcctgaagctcatagccaggaacagggtcaccacagactgggtgtgagtgtgaagatggtcctgatgggcaggagatggacccgccaaatccagaggaggtgaaaacgc

SEQ ID NO: 2318 - DNA, 3037 bp, Homo sapiens
aagcttcccatcctgttgcagtcccttactctcctcctgtgctctctcctcttcttcctatctagcccacccttttggtagctaagaattcctccctccattggagagtcacagaccaaagaggagtcaaataagaaaataagacctcaaagaaggaaaacaaagtgaaggccttgcatcagaagtcacgtggcagaaagccacctggatatctgaaaagaagaaagaattgagggatatccgctttttgcctcagagaccatccttagccctgaaggctttgtttctgctttaggtttcccagatgagcatctgaagtgctacagcaaggaacttcaagtttccagatacttgtctggattttgcaaggcgtagatgagtcacttgagaaggagaactggaatggcggcctgggttcatttccgttgtgcaatccaagggcctgtggagaaggggctgctgcaagactctgtgtgtggcagggggaggggtgggtacgtggatggcaatgggaggatcaattaactccacccaggagccaaatgaaacacacaaataaaaaacaaaacctgagtagtggtttttaggtcattctggagtagaaagagcattcatttatagcaaaggttggcgggcacctgtgtcagcccctgcctccactccacccctaacaagtatcaggtgcccacacgggcctgctgctcgcctcctgggcttttctaagccaagtgagacctgtcccagatgtccacgaatccactgggggagtggcactatcaagcagagtcatctgattttctgcctgggacctggaccattgtgagagtaaccaacatggggttacgggggagaatctggagagaagagaagaggttaacaaccctcccacttcctggccacccccctccaccttttctggtaaggagccctggagccctggagccctggctcctaggctgacagaccagcccagatccagtggcccggaggggcctgagctaaatccgcaggacctgggtaacacgaggaaggtaaagagttcctgtcctcacccctccccacccccaccttttctgtgatcttttcagcctttcactggtgacttgttcttccagggcccatttctctaccctacctgggtttcttctaacctggaaatctaatgatcaaatcacactaaaaagtcagctcctgtggattacatatcccaggagcatatagattttgaattttgaattttgaaagaaattctgcgtggagataatattgaggcagagacactgctagtggtcaaagatttgaaaggacaactttctgtgtgcaggcagggcctcggctggagatagatgggtctggacgaggcaggagagtgagaagttctgaggtgaaatgcaggaagccctcagagaatgctcctcccaccttgaatctcatccccagggtcttgctgtcccattcttggtgctgggtggatctaaatccaggagatgggggcaagcatctgggaaagctgagggcacactctggcagattctgtgtgtgtcctcagatgctcagccgcagacctttgggggagtaaagggggcacacccacccaccttgcctccaggctctttccttcctattcctgttctatggtggggctccattgcgagacttcagattgagaaatcagatgaagtttcaagaaaaggaaactggcaggtgacagagatgggtggagggactggggaaaggctgtttactccctcctgtctagtcggcttggtccctttagggctccggatatctttggtgacttgtccactccagtgtggcatcatgtggcagctgctcctcccaactgctctgctacttctaggtaagtcaggatatccctggttgagggagaagtttgagatgccttgggttcatcagagaccccttttcaggctacgaatgagactcccacaaagggatgggacccctcaccacatctatagctgtggattgagctaccaggacaagccaagatggggctagaaatgaggagaatgctggttccaattgggtcatagtcatgagtgaggccagtcacttcacccctctgggtcccagaatcactatgtggaactgaagagcttcgactagatggtccctagggtctgtctctttcagtttgacattccagggttctcctctatggtttttaatttctaccctttcttgtggggatatgggttgaggctgtttctgtggcttggtttagggaaattcaacctgtacccttaatttgtgagtttgcacagggagcaaggggtaagggagcagtgttgaaaatagggatttgtgttgacagtggcgcaagaggcatgaacagtagagaccagagagcaggtagcaaggtttccaccagaaacatcctgattcttgggaaaattgggctcctggggcagaggagggcaggggagttttaaactcactctatgttctaatcactctgatctctgcccccactcaatatttgatttactcttttttcttgcagtttcagctggcatgcggactggtgagtcagcttcatggtcttggattgacccagtggggcacatatggggacaatggccataagatattgggaaatgcttgttgaatgggaaaatgctgatgtggggttagcagggatagttcctccaacacagcagaacttggccctgtgcttctctggccagctttccttaagatactgaacaggccaaaaatggggccaagatgctctaagactgagccaccaagcatgggtttgcaatgagctcattctggctttgaggctccctgggaatggcagtgtagagcctgctcctctccctgtcctcaccccacattatcttggctcctcagaagatctcccaaaggctgtggtgttcctggagcctcaatggtacagcgtgcttgagaaggacagtgtgactctgaagtgccagggagcctactcccctgaggacaattccacacagtggtttcacaatgagagcctcatctcaagccaggcctcgag

SEQ ID NO: 2319 - protein, 72 aa, Homo sapiens
MWQLLLPTALLLLVSAGMRTEDLPKAVVFLEPQWYSVLEKDSVTLKCQGAYSPEDNSTQWFHNESLISSQAS

SEQ ID NO: 2320 - DNA, 135005 bp, Homo sapiens
gatctagaactagaaataccatttgacccagcaattctattactgggtatatacccaaaggaatataaatcatgctgctataaagacatatgcatgggtatgtttattgcggcactattcacaacagcaaagacttggaaccaacccaaatgtccaacaatgacagactggattaagaaaatgtggcatatatacactatggaatactatgcagccataaaaaaatgatgagttcatgtcctttgtagggacatggatgaagctggaaaccatcattctcagcaaactatcgcaaggacaaaaaaccaaacaccacatgttctcactcataggtggaaattgaacaatgagaacacatggacacaggaaggggaacatcacaccccggggcctgttgtggggtggggggagggatagcattaggagatatacctaatgtaaatgacaagttcatgggtgcagcacaccaacatggcacatgtatacatatgtaacaaacctgcacgttgtgcacatgtaccctagaacttaaagtataataaaaaaaaaaaaaagaggaagctgttaaccacttacggttgcatcacttggccaccagcacctcaggcttatccatgaagtaactacagctgagaataagtcagtaacttgcctactgagttcaggtctccagaccccaagtccggtgttctttccaccacatggcacattccaaggacctcgctcccccaggccaagcagccattgaaggttaaggaaagagagagcttaagacctctctccccaacaccaggaataggcctgggtgacacagcagagtagggataggtgacaagggataggtgtggggggctctttttatttttattttttaagacagagtctcgctctgtcacccaggctatagtgcagtggcgcaatatgggctcactgcaactttcacttcccaggttcaagcaattctcctgcctcagcctcctgagtagctggaactacaggtgcgtgccaccacacccagctaattttttgtatttttagtagaaacagggtttcaccatgttggccaggctgacctcaggtgatccacctgccttggcctctcaaagtggtgggattacaggcatgagctaccgcgcccggctgggagctcatctctttggggcaccctgtgggaccccacataggcaatccatcatgagtttctgacctctacctcccagacaagtattcatccacaaatatttatccttcaaggactattcacagcactatggatacagaaaagaagaaaagaatcaaacatcttcatctgtaagagctacaggccagtaaatgatagcacttttctattaagaaacgcatccctccccactgaacttgttttagtttaggtcttcattatctcttacctgaactgttcctacccaactccaggtcccaccagaagatctagattttgggagacctgaagcttatacaattggaggagtaactccttaagaagaatacaaaattatgaatacacaattatatgtaaccatgtgaacctgtcacgaggaatattcgagggtccttggaaggggccggtgtagatgaaagcctgaagattaagcctcatggagaatcagcctctgccaagtcctctccccacttcacccgggacaaggggaaaaatagctccctcctgcctaccctatattcccctcaccccctacccctaccgcaccctgctctacctcaaggataatagtttcctttcttctagacccccactcccccaccctcctcctacctccccagcaatttgggtttttgtttttgttttttgagacagtctcattctgttgcgcaggctggagtgcagtggcacgattggctcactgtaacagcctcttcctcctgggttcaagcacttctcatgctttttttttttttaaatattatgctcttgcttttttgcttttaatgtaatagtttaagtataaatatttgtccctagtatctatttggaaaatgaaataagctgcttaatgtctccaacaaagacagttatatatctttcccacttccacaggaaaacccaaggtgctgaacgcccagaatagcaaccttacacaggtatagtgttcaaaagtttgtaaaattgttttcctcgtgtttaattttatttcaccttcacaactgtgtgctatcattctcatttgatgggaaactgaggctcagtataagtttacaaatccagtgagtggcagagatgggattctgacttaagttcagcattttaggaaactcaaggcaggcgcggtggctcatgcctgtaatcccagcactttgggaggccagggtgggtggatcgcctgaggtcagaaggtggggaccagcctggccaacatggcgaaaccccgtctctactaaaaatacaaaaattagccaggcgtggtggcccactcctataatcccagctactcgggaggctgaggaaggagaatcacttgaacccgggaggtggaggttgcagtgaccctagctcgtgccactgcactccagcctgcgcgacgggagcgagactccatctcaaaaaaaaaaaaaaaaaagagactcaaacgtgatctagaataaacgcacctactgccaaccggatgttgggtcaagtgagaatgaagacaatgtagccatagtactgaagttcaatttacgccagtggcgagacattgatttaaaccaagtaacttgaactcaggtttgctccccatgtacttggaatttaactgcgctgagcttttacttatttatttcaagtactctatagtagttctgagcccctgcctcctgtgttgctgggactagaggcacatgccactgcacccggataatttttgttttctttgtattgtttttgtttcattttgtttgtttttttcagtagaagcgggtttttgccatgttggctgggctggtctcgatctcctggcctcaaatgatccaccctccttggcctcccaaagtgctgggattacaggcgtgagccaccgcgcctggccctccccaacaatttgaaaatgaatttgatcttgccccaccggtaaatatatatatatatgtgtgtgtgtgtgtgtgtatataatatttcaaaattgttgccattgcctatgagtagctaaggggcagccgtcagggatagtgttgggtgctgctgcagttttaggtttgagactgcagggaacagccgtgctctgcaaaatagcagggagtgggcatagcttgctgcactgggaaaacggtccccttcctcttcctcaatgggcattgagaccgggtgtctttgaagtggtttgtgattggcaggtgtgtgaacaaccaggaccaatgatcccagagcctggggataggagctcgactctcctgccaaagggtccaccacgatagctcctattgttttattattcaagattgaataactgggcctagatgtgggatggaatggatcctaaggcaagactaatacttgtggtgtggggttttcttgaagcaattgaagaggcctcaggaatcaacagcgaggaaggcccagagctggcgcatacctaccagaccaccttcttggatggcccttgtcattctggatttcttcatggaactatgagaattgccataattaatgcgcgctttagtttttgtattcctcctttcattttaattaccatcggggatctgacaggaagtggatccaagtgccggcatcacactctggggcctccggggggcgctatggcccaacacacagcgtggccaagcgcgcctcagcctaactcaccacttcctatctgttttatacggtttgcacccgcttaaggcggcggaggcgtgggggagttctgctgatgtaaaaaaaaaaaacattgttttatgactagacctacagaaaaaatgtccaaactccttagcatggcatgttaggcaccagcatgaccctcccggtgctgggtgctaaaacctccaccttgaaggaagtgcagcaaacccattcattccgctctgctagtccttacacaagctgctcccgggcccctcctcaccttcaggctcaggccctttttctgtgcttgtcccaggacttgctccgcttctgtaacagcccaggtcactccagagtgacattgagcattcatgagtctcctgccacctgactgtgagctcataagggcgccacctgggtttcattatctgctcactctctagcactggccactcacaaaaaagcccttctcgtggacatgagcacaatgaaagggtagaatgagacccaaggctctggcctaagggtttgtggtgagcccctgccagaaaagagtggcattctctgcaggcgtgcaccacgcttcctctgtcatcaccacccctgtagctctctgtggccacagttggagcacttcgccccaccccacccaccaaattcctttctcatggagaagatgcagcagttggaacgggacaatatacaaaggaactaagataaataatgcatggccggcacagtggctcacacctataatcccagcactttgggaggccaaggcatgaggatcacttgaggccaagagttcgagaccagcctgggcaacatagcaagacctctgtctcaaaaaaaaaaaatatatattagccaggcatggtggtgcacacctgcaatcccagctacttgagaggctaaggagggaggacttgagcccaggagtttgaggatgcagtgagctattatcgcgcgactgcactccagcctgggtgacagggtgagaccctgactctaaaaaaataaataaataaaaggttaaaaaataagataactaatgcaaaataaaagcgcacagagggttccaagaaacaacagactttcacctggatctaaagcagagacactcacctctgacccccaagtgctgccccagaactgctcattgaccttcctcccttcatcaccccttggttcagcagctctaacccaggagcccttctctggggctgcaggctctgggaagcctcaaacaccatcctggctggttttctgttccatgtggttaggatagaacagaaacccacgcaagttgggagtctgccccagctatgactgagccttaactcagtgccactttcctgggctgactgattccaccttctgcgcaggttaattctgagcatctatcccccaatctatcttggggacaaccttccagaatgaaaagcactccaaccaaatcacttcaaccatcacaaaaaggaatgctgcaaagtgagggcattccggcaggaagggccagccagcatgaaggctggagctgggagacagggagctgggtttgggaaacggtgtgatctcccatgctggataagcaagaaactcacacagcaagggagtggaggtaaggctggccggcaagagaaattggatagggcatcaaagggcctagaatgttcccaaactaagggcctaaatgtttatttgagaagccacaaaagacatttaagtttctaagcaggcgatggcccaatccaagcaacactttttaaaactgtggcaggaggatgggggtgtttgggggtgagcagctggggacgggagctaagggaggaggctgtgggcagaactgggaattccatatctgctccaagccagggtggagtccagtggaggaaaagtacgttttgctgttagatattctctgtgggcactggggtagggaggaaagggaagggggacccgttaagaccaaacaaacaggtagctgcaggacagggagagaaaagtattggagatgattcccaaactccaagcctggtgggcagcaggaggaggtgcccagcacagacacaggggagtcaggaagaagagctggctggtggagagtgaacctgtggagaccaagaagccccatcccagcctagggacagagcctcttgggatagggaccctccccggaggcaggtgctcctctcctctctgagggccaagcccagccctgtcctcacccactgatgttcaggactgacagaagtgagagtcccatatggggagaccatttcctcaaagatgttctctgagactgtggaggaacgtgaattctgtgaggggagaacagaagaagagcgccaggcacagcagcttgaggtgctcagagggcagaggagaaagacagtgtgctctggtcatcagggcagtttcccaggtgtgtgtaaatatatatacaccagatatatatatttcccaggtgtgtgtaaatacatacacatgcatatatatatgtgtatatatatatatatatatatatctggtcaccagggtggtttcccgtgtgtgtggggttggggggtggggtagcccactgctgccaggaggtcccaggccctgaagcccaagagagaccacggagtctgagagcagaagcaggaaggcagggctggaagggagccagcacacaagggccccaggagtggcttgctgggggccagtcaggcatccttggcagagcgttcctgtgaacggtctcagacacaggaggggcagaaattgaagaaggaggcgaggaggaggggacagttcttttaagaatggggagatctgagcagagaaaagaacatattgagacacaaacaggagatcggtggggtaatctcaggaaaggcagaagacaggactaagcaaaaaggttccacatccatctccacagtggaagaccgagagaagagaacgggtgaaaagacagaaacgaggaggagcatacgccgctgatggtgccagcagggttctgccaagattccctgagtcctctccactgggtaagaggaagggtgtctgctggaaatgagagagccagaggtgggtctgaatgttggggagaggagtggagcaagtgtggaacagctctgggggggcttctcacatgtaatgtgtgtacaggtcttggtaaattgcaggttccgattcagcaggtcccggcagggcctaagagtctggattcctcaccagctcccaggtgatgtcaatgctgctggtccggggaccacactgtgagaagcaagatttagagaggcagatcaggagatggagaaagagactggcttaagaattgtcttaaggagaaacccatgtttgataatcccacctagggtaaaagctgagacctgaaggagtcctggtgggaatggcagccccctgtgggtgatggggagaggcatagagagaaggggtggtaaagagaccaggaaaggaggtgagagggcctctgtgatggcaggagaaccagcagtgcccccaggacgcctcatctgggccaatgtgtgacagaacgctaactcacacttggaggccccccagaagaggatgggagtgagttggagcaggaaggtgttattgcaggggtgtctgagcgtgaacatggcaggcagggcaggtggcccccatgctgttctgcaggaaagtgctggactcagtctgggcttgctcgaagcctggccaggacaacgtggggagaggggcagaaatgtctctgccccacggtcaagggccagacgacttctgtgccaggaactaataaaaaaaaaggaatgggatctgagacgggacgcggctggggagaaacaggaggtgagctgggctctgagcctacctgtccaactcgcaatcagaaatcaggaggttcctgaaaggcacagatggaaactgaaaatgctttaggcttaggtaacccagcatcaggaatcgggatggttggatgcagggacctcgcccagcttgtctggggccgcagcctacggcagggacgtttcagtccttagctggggtgaaagtgaggtcagggtcgccggggaaatgcgggagtacagtcacgcgggagaaagacgtcaagagcgaaagctcggaggcgtcaaaatgagcagcaagtccaggcacaaggcgtcgggcgcggagagtacggcgggtgccgggggagggagatgaggccgcgaagacgccggggcttcgtccggcggcgacggggaggccgcggaggttcccgagcgcagcggggcgcgcacctcccgctcgggccgggctccctcgccgcgcggccccggatcctccctgcgcgggtttccgtggcccccgccgggctcttccgttccctcccgcggcctcgaccaggccgcagcccccagcccaggcgaccgactcgccagggtccgccccgccgccgcggcccgggcccggccgctcctcccccgatgatgtcacgtccccggccgcccctcggccggccgcgccgccccgcccccgcctcccccgggcccccgtcccctgggcccgcccgctcccgacatccctcctcccgcctgcgctccctcccttcggctaccgctcccccgggagcggcggcggcggcggcggcggcggcgggatggcccgggcccgaggccaggccccggggagcggcgggcggcggcggccgcggcggggcggcgcgggaaccgggccccggggggagtcggccgggctgctgctgctgctgctccaggtgctgccgcccggggctacggcagggccgggacgccggggcacgcggggcgctggcgctggcggcggcggcgtctgctggcccggcgcggccccagcctttccccgggacgcgcggctgctgctgctcctgccgccgctgccgccactgtcgccgccgccgccgagctccgcgcccgcagcctccgcctcccggatggtaatcagcgccccgcgctggcgccgcgggcgggcgggcgggcgggaggtgggggcggcgagggggaaagggcgggcggccccgcgcccccgccttgcccgaggcagctcccggggcgctcgggccccccctccgacgaccgcggccccgggcagccgccagagcgcgcctctggggcgcctccgcgcggaccgggtgcgggctccgctccccgccctccccgccccgctcgcagtccgcccgccagcgctcaggccgcgggggaatccctccatctccccgcccagcgccccaggaggggaggggacagcgccggcgcccgcggacccgctttctccgagggagcgcccaagaggcgagcgcgcactgagccacccggactcggcgctgcgctgctggaggcgcctggtgccgtcgggtcgggctgagctagacgcccgcagcctcagcgggaccggatccggggcggcgggggcgctcactcaccgcgcgccctcatgttccctgcgcaggacgctctgccccgcagcgggctgaacctgaaggaggagccgctgctgcccgccggcctgggctcagtgcgctcctggatgcagggcgcgggcatcctggacgccagcaccgcggcgcagaggtaagcgctcggaccggacccggtgcgctcgggttggacggctgcgcgccgcctcagctcagcttgctggagctgctggagccaggggcggaaggagccctaactctggacggtcccggcgagctccccggcccaccccgtccggagtgcctgtgctgcctcctgaggctgtggggcgggctggggcggggcttctgcctccactccgggctgccccggtagatttctgacggccgctcgcgggtgcggcggtgaacgccaccccagccgggctgtctatggctctgagagaagaggcagagctcccagccatgacccacagccaccggccgtctaggaacgtccagcccctccttcctgggcagtcccagtgactctccttgtccaattccgcagctctctgtcaggaaaggcacgaaacccagccccctttttcctttcccacgcccctcagagttggcggatgggggtgtgcagagccagagaagcggctgggggctggacggtggcgaagagatgaggtgggcagtcggcctggctggactgattggcctgggaactgggcagggcccctgcctttccctcgggtgtttttctggtaggtcctttggaaggcagagagtccctgggaacccagcacccgcgccggtctcctctgactcctttgcaggggtctgggagtctcagtagggggttgactccaggatttgaaagcgaactttaaaagtttattgacctgcccccaaagcccctgcaccccctggctttttgcaccttcagctgtgaccatggagggaggcatttaggtatcctatggggagtcacagtggttaggattagggaggtgccagctctgctgacagctgggacagggtgggcacttggcttcccagaagtctgagctgttgcagcagcccgaagggattctgaatggggggcttaatgcagaccgggcctgacacaggagcccacattcacactccgcaggacgcctcaacctcaccgtgtaacagacacacaccgcgcttcatgtgcaaactgaagccgtttctgcacgccggtcctttcctggctgtcgggagggaacgctggggggctctggagctgatctcttacggaagagaaagggtcttgtggatgaattaatttccaaaacttttacaagggatatagctatattctagaaaaattggaaaataaaaaatttagtccctcctctgtaatacaactactgtcaacattttagtgtatttccttcctatttttcttcccattaacttgtgttttcctgtgctatgcttacaattccacctcctgcctattcttctgttggttctggcttttttttttttcaacttgagaaggttagtttcttaacatggccccctctttggccccaccacctgctgtgtggcgagagctctttgtaagagtgggtgaggagtgctgatgggggcctctgggagttaaggttccatttctctgcaacctttccctctgtgcctacccagaggcaggtctgatgaaggggaagcagacgtgaaggaggcagtgcccttggagactgcgtggggttcaagaagtgtggggataaggcttcccccagagcatgggccacagcagtggtgtctgcgcatagtggggttgagtgggcttggggtgtccagtctgactccccacattgtgagggccacattgctgggatgcagagggcttccgcaatgtgaacaggggctttcttcaggctcggtctgctaatccccaagtgtggagacttctctgtctcaggacatagactaggagcccccactcgctttgttgttcagctgactttcctccctgtcccagagggagctgcctcatccttcctccccactcttccccgtgttgtctgtcatcactacagttgtatctggttcctcagtcagtcctctgcacgggtcttctcatcccaaaacagcaacaatgaaaattcctccccctggccctgcctccgccttcatcacggcctggtttctctccctctcatctctgagaaactttcacggaagtgctctcccaaaagactccctgggatccgagagttggctttgacaccttcctcagcctcaccccacagttgcctgattgtcaaggcttaggaatgttcttttccgtgtcctagtcccaatctcagtgccctcagccaccacttttagcaatgaaaccccctggccctccacccgcttcctccctggcttgaaggttaactgcaccctggttaccacctcagcctcctggcccagtgcctagccccagccattcaccactcccctaaaaccatcttccctgcattggggaccaaagcagtatttccaaagtacttttttaagatcatgtctctctccgattacaaataaagtgaccaggctgggcgcggtggctcacgcctgtaattccagcactttgggaggccaaggtgggcgtttcacttgaggccaggagttcgagaccagcctagccaacatggtgaaaccctgtctctactaataatacaaaaattagctgggcgtggtgaagcatgcttgtagtgccagctacttgggaggctgaggtgggaggattgcttgagcccgggaggcagaggcttcggtgagccaagatcgcaccactgtactccagcctgggcggcagagtgaaactgtgcctcaaaaataaataagtaaataaataaaataaaataaaataaagtgaccaacccccaagccccactgcttcctcatggatatctccaacattcaaggcctatcatggtctgactccagccttcctccccagcctcctctgcatgatgcttggcaggcagtggatacttggagaattagctgcgcctccagtaagtgctatggtctattgaaacaatccctctgccctcagcacccgcacatcccctggattaagtctcaccagcctcaggactccctcttacacccaccgaccccagcaactgctctttctgtgccctcccaccctgcccacgggagtggctttaatgctgcctacgaatgcttaccataggccagcatctgctctcctctgcctgtcccggtcctccttgccctgccagctggggccttcccctaaggcaagggtagcggtccgttcatccttgtgtccacagcacccagggcaggctcaggcagtccatgggggatgggggtgatgactgtctgccggaggaagcagtaatgtttctcagaggctcccaagtccccttatattggttcccctcttgactttggaagactccaggttctacctgacccaggaatcagctactggagcagcttctcctgcccagttctacagcttgacttttacaacaatgccaagattttacagaaggtgggtggggaggaaaaggcccagaaggcctgctaagatcagcgagggaggctctgccaacaggaaggaaagttctgagcaaaagaggggtagggagggccgggtgcgatggctcacgcctgtaatcccagcactttgggaggccgaggcaggcagatcacgaggtcaggagatcgagaccatcctggctaacacggtgaaaccccgtctctactaaaaatacaaaaaattagccgggcgtggtggcgggcgcctgtagtcccagctactcaggaggctgaggcaggagaatggcgtgaacccgggaggcggagcttgcagtgagccgagatcgcgccactgcactccagcctgggtgacagagcgagactctgtctcaaaaaaaaaaagaaagaaagaaaaagggggtagggagagcagaggggctgcatacccttaaactggaggcaatggggatgggaacgctggtggagagggctgccctctccctaccaatgtcttcctaccagggaagtctgcacaaggaccccctgcccctgccctgagccaacaggacgttatctctgagatccatttgcccagccccagcccatcttcccctgactcccctgaagactcaagtcctcctgctggcacactcagcacagaagtagctctcttctccttctgatgtgcttcccagtctggggagacctctggaaggcccaggccagacctccccctggagctgatccctgcacactagcagggccccggagagggaggccagctggggctgcctttcctgtaagcagctgcaggctagcatccctgctaggaaatgcttttgtttgctttaataattcatagccgattctcagcctgggacctggcaggcaggcctgtgggtgggtggcgagagggtgggcagagagcagtggagtggggagtctttaggtagaattgagggccaaaagaagagggggagagcaggcctgtgagattcttccccctccctttcccctgccctcagggactttggtcactgtgccaatttcctggggcaggtgagcagggcagctgctgggggcagtgggaagaggggatagggaccctccccagacccaaacctcatctccagcaggaccaactggacacaggctctgggcagctgcctgcagccaccaggtcctccctgtgcaagcattgttgaggtgggtgtgccccactgggctactgcttttatcttccccagtctgcaccatggccaggggctggcatgtcaggggctgggcagggccaggccaatagatcttgtctggggcaggagggccaggcccagcttgatcatcatcagcagtcccggggtccagagggtgcctgcaggggagagcaggggccaatgggatgcttggaggaaggggggatgtagaggaaagggactggtggagccctgtcaggatggggctaagaagagctggacttagcagagagagactttggggaaatctgcgaaaagggatgagatgcaggagtttttgctccctccacttcctggggtgatgggtgtcaacaaagagcctccccccattactgatgaaagtagggcttgtcccccgtagccctagcatcccagactcaaagacaaattaggaccagggcaaggcacggctcaaaaccttgagttatcaaggcagccaggagttaggttttggtggggagaagggaaggcaagacgcctgggggtgcctctgagaggaggccgaggctccagccttggtcacttgtcctctgtgggatttgagctggctgtggttaaattgcttactataacaagcatgcagtcaaggatgtgaagagccgtgagtggccttgggaagagagaacagagactgtgaggggggctttgtctgtaccagacagttatgctgtggcaggggagagcagctgccgcgaaaagggccctggagtgtcctgctcagccttgcaaaggagcatctcccgggacctgctgggcagccccagcaatagcagtcagacacctctgcagctgctggcatctccccacaggcatctgcatacactctggagcacagtccacctgaatgacctagtctgtgaaggtcaggttgcccttggtgttgacttgaacctggattcccaacagtgctcaggaagtccatgcacacccatgctcactacaaagcatgttgactctgaccaaaatgcatctgtgcaacgtaaatcttttttggtgtctcaaacagtctcctttaattttcggtctatttaagaatgaaagatggaaaggaggtgagtggggcacaatgaaaatacaaaagcgagcatattctcttcccaaatctgggttctttagtacgggggcaaatgtcccactgcctcaggacactctggagttgagaagaaagtgttttgaacattgtgctttaaacaatctttttaagaaagcgaggaaatgtataattcattttgcagtcttgcagaagtggttaatgtggctgattttgtcactcagctgcatttctctggaaaaggcgtttatgtggcatggtttgttcactaatgatgctaagtgaataagctgtttctgaattatgggtgccagcagtacatgtgccaggtgaggcagttcttacttgtatttgtcataaactgatacctgccaagctgcactcaggcccttggggctgtagctttgctggcatccatcgtaccccaggcctctgaatggctggcagttggtacccacccacatcccctcaggaccattggtcaaggctctgcctcccctgctgttagctgcttccctttgcttgaggacttgctcaggctgccagagcctgctctgctcagcccagaagtacctgagaagtaacagccgtagaagccctccaccagtgactgactggagttggtggataaataccccagctccctcacccatccctctggtgggataatgctgaggcacacattccatgctgtttccagagttccccgtgggatggagctccaggtgcctacagtggggacttgaaaatgcaccctctataggctgctttctcatctttgtctcacccccaacccccagtgtttccgaatcactgcccagataacactgttggtatttgcatccttgtccccaggtctgcttctcggggaacccaaataaaatacttgcctctccaggcttcagaggctctattcccccttctctccccctttctttcttttaaattaaggatacatatcaaaagacatacgtgcagtttctctccacaccccaatgtttgtcttaggcagcgccactttggagcggcaccatgagatcaaagactttggccttggtccacatctctctgtctctaagccagtctgagagcagacagtggcccccacatcccacctgtgtccccacacatctgcacccaggatgtgctcatcaggggccctcagaccactcagcacctcctgagctgtttgagtctctatccctgtttctttttttctgttctttagtccgggtttgttttctcattacaagagcatcagcttgtaatcagcttgtaatctccccttccccttccccagccctctctctttggaacttgcatttccattctacaagtgttgattggtcacctcctgcatgttggggtcaatcaggagaaggaggcaccgtccacacctgcctctgttgctctcgagtcctattccccgcaacatgctgttcctcgtgtccttctccgtctcttgttcataggaagtatcctttgcttgagcttctccaagcctggcagggctatgaacagggtgagccggagacattcccaggcaaggggcagccccatgtgcgctgcagggctcttgcccactctgcagtcctcctctggttggaaggggcgggggccgtcattaacactgccctgttgttgtccatggcacggatcttgtcctgcagctgtaaactaaccagtgctgctccatgggtgggtgtgagcctgggaggatgagtgtgcctcagacccactgagccgtgctggggaagtgcaggatgccgctctgggctgcctcggggcagtggactgatcctaaacctactatggggcagggcacaggcatgcaaagcagggcagcccctccatgcccccagctggcaggagacactggcccagagaccccaggggaacctgctgtcttcccccctcccaggtccctgtgcccttgctcctgtgtaatcccctcctgcagggatgctgagccctgggaaggaagcttggcttggggcttatgccagacttcccaggtctggtcctcagcagcctggcaggagctggggggcagccaggacccagcaatggctgatatttgggtgggacaggaagctcaggccagcatctgtgatttatgctgcaccagtctggaatttggcctgagcacttgcagggtgtctgtgtagaaagggcatgtccagtggtctgggagattccgttatttctcagcacccaccactcctctggcaaggcttccttttctctctatagcctccctccccactgcctgagagccttccaggccccttcgctgggctagatgacaggatataaaagccacagggacctgggagtgcttcacaaacccatctcctctggccttctctcccactaggtggtcctggaacccatccccagtggagttcaagttaagctggtcctgggagcaggagggaggagctcagggttgaggcctcattagcatattcatcaacagtaatcagggccccgctgtgatcgaaagccctcttagggcttccctgcctcttgctggctggggagcgggtgaggggcgatcaaggcctcaacttgaaaggactgcagcctgagggcaagggggtggagggagcagggaaagatggagggacagtgaattccctagggaaaggagcatctgtaaaaagaatctgtggtcagaaagaaaggtgttgaggccgggcgcagtggctcaagactataatcccagcactttgggaggccaaggcaggaggatcgcttgagcccaggagttcaagatcagcctggataacacagtgagaccccatctctccaaaattaattagctgggcatggtggctcatgcctgtagtcccagctactcggacggctgaggtgggaggatcacgtgagcctaggaggttgaggctgcagtgagctataattgtgccaccgcactccagcctgggtgacagagcaagatcctgtctcaaaaaaaaaaaaaagatactggaggtcccctcccctcatcttgatcagggacaagaagacttatggcttctgcctcctaagtcagcatttcatgtggataactgagggaggctccggggcaagctttcaagaggaggaaacattttccattttactatttattataacttgtatgtgtaaaacaatagcaagtccctcatgcccatgacatcccaggtgttatggcttagcctgaagccaagtaaaagaataaattgatttaaagttatatgaagaaaaatagtaagtagtggtgactgtggcagccattgtcacaggagcatgctcatgatgggcacctggacaagctgacctaagtggtcctcaaggcagttccccatcctggtcactcccctgcatccctgcagcagcctctctcttgtcccccacactgcaccctcctttcccccatagcatctttaagccctgcctggcttcagaactttctagtggcctttagtcatgtttccgaaaccatgaccctcaacaaaagtgctccgtagtcaggtaagcagggtgtgttagttggccaggtgtagtggttggcacctgtaatcccagcactttgggaggccaagatgggagaaagctggagcccagaagttcaagtccagcctcatctctacaaaaagtaaacaaaattatccaggcatggtggtgcatgcctgtagtcccagctagtcaggaggctgaggtgggaggattgcctgagtcccagaggttgaggctacagtgagctgagatcacaccactgcactccagcctggacaacagagcaagaccctgtcttaaaaaaaaaaaaaaaaaaaaaaagttactccaagctgagtatggtggctcacacctgtaatcccagctctttgggaggctgaggcaggaggatcgcttaagtctaggagttcaaggttgcagtgagctatgatcacgccactgcactccagcccggatgacagagcaaaaccctgtctcaaaaaaaagtattccaggttgggcatggtggctcatgcctgtaatcacagcactttgggagtccaaggcagaaggatcatttagccgggtgtggaggcatgcacctgtagtcacacctacttggaggactgaggcagcgggatcatttgagttagtaggtcgaagctgcagtgagctgtgattgcagcctgcactccagcctgcgtgacagagtgagatcctgccttgaagaaaaaaaggcggggcaggtcttgagcccaagtcttcaaatttgtatctaaaaagaaaaaaaaaaccgactccaaaacttagcaacttaaaacaacaaacatttattatctcacacaatttctgaggtcagaataagggagcagactagcctggtggttctggatcagggcctctcatgaggctgcagcaagatgagagctggggccgcagtcgtctgaaggattgactgaggcgggtggatctgcttccaaggtcgctcatgctggcaagtcagggctggctatcggcaggaggcctcagttattctccctgtggacctctccatagggctacttgagtgtcatcaagacatggcagctggcttccccctgaatcactaatccaaaaaagggaagaagtcagaagctgcagtgcttttatgatctaaccttggaagttatatgctattactcctgccatagtctattgacctcacaggccaatcccaacacaatacaagagggggctaactaagggcatgaatcccagggggtggggctcactgggaaccatcttgtaggctggcttccacacatgcagagcaccagccctagccaactcaagcagggtacattcctggagggtgtcctaggggcccccaaatacacccatgtctgtggccacagcacccttttctaaagggaggctctggagccatgagagatctaaggaacacactttggaaggccgtggctcagagaagagaatctaaccccttcccctggtgtctgtgtccttccatgatctggcacgaacttccagtacaaactttcctcctttcacttcgctttttgacacctgcggtacagcagcagcctctacacatccagccattccttgtgctgtttattctgccctttttcttgttcatctgttgagctcctgtttattcctcaaggacttaggggaaagccaccattccatgaagccttcccttcatctcccataaaaagaattaatattttcttcctttgcttctccagtttttttgcatggacatctttggggggcacctgcccctttgtctgatgttgtacctctctctctgtctcccctcttccaggcatttgctcctagccccagttgttgccatgtgtccagtgcttggtgtatcactgggatgcaggggatatttggggaagagggaatgccttcctcctgctctcactctggccttgcttctgggcatggtttctgatgagccaggagagatcccttagcaaggccagaagagaagttcctcctgcccaagggagcctgtggttgtctctcccaaagcctggaggcaggttcctctacactttgggggtgctccctaccttcagccagggcccaggccaggcagactagtggtcctgagccagtttgatgcctccaagggtctgatggacatcgccattccccaggcaacaccacaggctcatgacagcctcagcctgggctggggtttagtgggatatttgttctagggcccccggggtctccttgaagccctaaagggcagtcacaagagcctctggtcagaaagacagattggttcatacttttgatttttgagactggccttgcaaaatgtgctgcccagggaaaagcctgggagggagactgacagggcctcctcctttgcagtcaccactctgcctcttgttttccagggggcaggctggggtgccctaggtgctgagagacctctatctggaagcgagatggccctggtcaggctggaaagggcctgtctagttggattttttgcccaaactcttggcatcttggagccatgtcctggctagcatgcctgcctggcccgaggcgctggagtctttctcactggggggccttccagtggttttccagctcttttcctcccacagtggcgtgggtctggcacgagcacattttgagaagcagcctccctccaacctcaggaaatccaacttcttccacttcgtgctggccatgtacgaccggcaggggcagcccgtggaggtggagcgcacagccttcatcgacttcgtggaaaaggaccgagtgagaggctcatgggcttggctgggactggccccgggagggaacccccaaccacacacacacacacacacacacacacacacacacacacacacacacacacactgggacagatgaatggatggaagctggctgagtggctggaagggtgggaaagaagttggggttaggagaaggggtggacaagggaggctggaggatccctgagcacccgagcatcctcccatcttgtccctgcaggagcccggggcggaaaagactaacaatgggatccattaccgcctccggctggtgtataacaatggtgagtggaggcccctgccctacccagccctgcccctgaagtctgggcactgcagcatcatgcgacacctaatgccccctgtgccagggctggggagggtgtgatgtggtctggtcattgaggctgcacatgctcccccagcagcaagccctctccatcttcccatcctaggactgcggacagagcaagacctctacgtgcgtctcatcgactccatgtccaaacaggtgagtcagcgcagagggtgctgaggcccatctcactctcttcccggaccctgcctccccctggtctgagtgagcctccttgttcctgccctcatctccctatgccctccgtccccatcagcctagctcccccagttcccaccccagcctgtgccggagggtgtgtggcttttgccctctgttctagaaaagacaatatttgtacaaaaaccctggcttgggtcatgtttcctagcagcccagccttagatgggaactcaggtgcaggtagtttatttggggagatgggaggggctcctaggagcaggggagggaggtaagctggacagaaaactgcacagggagctctggagaaggaatggcaccagaagtgtcccccctcgaagcaagtaccaggattttgcaccccgtatcaattagtcattggctgggaaccactcctaagggtagcacgtaacctctgagacattttcagaccaggcagttcctgtccactgagagcagttctcaggaggaagccctctgcagctgacatcagccacagccacgggaaggtgcacatttccagtaaaggggatgtgggcacagccctgggaatttccactgcagacccttgcaccttgctgatgtgacggttacgggaaggaggctcagaggccagcacaaggagctggaggaaactgaaacctgaacaggctctgatggattctgccaacacagggccccaaatctcagggcttttcagagaagctgtgcatgctggcaaggagggggctgagtctcaaatgggccagattagtgggctaggaatgcaagctggagatctgggcttcctacataggcagggtcttttggcagcctccacccaatcccagggcagagggaagaatggtttgtttctagaatacccatggccactgggctgggggaggcaggccaggcagtgcctagtggaactgtcaaggggacgggtgtggaaggggttcgaggaagtccacagagagagggatcccacaaatgggggaaggcacagagggttataaactaggaaggcagatttgcagttaggaagctcacttcttgcttctgggcagagggaggctggaagactggtgaggaggtgatgcagcagtcccaggggaagaccgagcctgggctagggatggtatgggggaagaggcgatagttatctagggggaagaggcagctgtgcagccctcggagctgactgggctggcagggatagctgagaaggacaacactcatcaacagaagcagaggtccgtcaggacatggaggatgcacacaggaggatgctgggggaggggaggggcctggtgctgggtgggcacaggagtatgtctaccccaccagccacctgacctttgtcctggcaccctgaggaaccccctgccccaagcagagccagctctggaaagagccacctacagacagacagaatctgcagacttcataccattcttgccagccggtggtggtccggtttgggaggaggggttatcccccgcctgggcagcccagagcaaggcagagggcgtgctcttccctggggcagggtctccctgggcctaggcttgggagatgccaggtccgtctgtgctgccacctgcacctcagaggagcctccttcccctccagcctgtgcacctccctctccccaggccatcatctatgaggggcaggacaagaaccccgaaatgtgccgagtgctgctcacccatgagatcatgtgcaggtgagatggccatgtcactcacacctcacccctctgccaaggcgtttctgaggactctacccaggccctgccccctcgccgcccttgcccctggctgctctctgctgctgctccctggagaagcctggtggcaggtgatgaagggagtggtgaggcccctgggcacagcgctggctgaggagagggtccttgaggccccattagcctggcctgtttatgtggcttctccgagtgtttttgtaagagaggcctcctgctgccactgggaagcttagctaataaagctcaggggagggctgctggggttgcgggaacagggtctgggaaggcctctgggattagctcagaagctaatctttgaggaaattttgaatcctagggcagctctctggcagggcagggtgggagtgaaggggtgcacagcccttggctcccttttccccattatcccagagcttggcatttctagtaaggtctccccaagagatgccagtcgtacagggtcctcggaggcagttcctgatgcatggaaaagagaacagggttctgaaatctgtggttggtagccaggcgcctgtaatcccagctacttggaaggctgaggcaggaaggctgaggcatgagcgcaggagttcaaggctgcagtgagctatgattgcaccactgcattctagcctgggtgacagatccagaccctgtctctaaaaaaataaataaagtaaaataaatttaaattaaataaatctgtggttggaactgtggctacccttggaaaagggagtgacaaggaagaggcatgaccggcatctgggctgctggccacgcagcacttcttggtgtggatgctgctttcatgggcagattcactttgtggccatccattggccaggcacaatggctcacgcctgtaatcccagcactttaggaagccgaggcgagcggatcacttgaggccaggagttcaaaagcagcctggccaacgtggtgaaaccccgtctctaccaaaattacaaaaattagccaggcgtggtggtgcacacctgtaatcccagctatgttaggaggctgaggcacaagaattgcctgaactcaggaggcagaggttgcagtgagccaacatcacgtcactgtactccagcctgggtgacagaatgagactctgtctcaaaaaaaagaaaaaaagattcactttgtggtcattcatgagctcaccgtttgagctcctgtctctgcgtagactgtgcttccatagagagaaaccctgtaggtgacctgcagcctgccctttcctgggtcctccaggaacgaggtgcctttggggcaggggtctctggccagcctcatccccaggctaggctctcagggtccctgcggaggagcccacagcctttctcccccaagccctgggagtgagcccctccagcccagggattccacacccagagacaggacatcagcaccctcagctcagggcgccccccacaactcacacactgtcgtggccccctccttccttggcttctgccttccctccttcctcatctttccttcagccggtgctgtgaccggaagagctgtggcaaccggaatgagacgccctcagaccccgtcatcattgacaggtacaggctcagggagggggcctggaagctcagaggagagtgggggaggggcagctgttttcaaccacagagcaccaaggctcaagggaggagcggagcagcccccccggggcaccaggttgggtggctctgagcagagagggaaactgccaggcaccagggagcctccagccgtggcccctgagtgaggccccaggtggccaactttctggagctgctttccccgactccctgagagaaggagccagggagggcagggaggttgagaggggggtgggaagggaggggaggaaccagcactcaggaaccgtccaggtggagtggccagcgtggtcatgtcagcaaaaaccaggctcaggttcccagttcacccctgtgctgtctgacctgacttctctgaacattcgtttctttcactggaaaagtggggaaagagctggcaggtttcagtcatagaattgtcgaggtgatgcatgtaaaagtgcatttgcacaccatgatttctatttctttattttgtgtgtgtgtgtttgttttgttttgtcgcccaggctaaagtgcagtggtgtggtcatggctcactgcagcctcaatctccgaggttccggtgatcctcccacctcagcctcccaggtaattgggactacaaggacacgcctccacacctggctaattttttgtattttttgtagagaccgggttttgccatattgctcaggctggtcttgaactcctgggctcaagcaatccacccacctcgaccttccaaagtgctgggattacaaacatgagccactgtgcctggcctacttctttttgaagaggaaatgcataaataaggtgtaaaattcaaatggtacaaaacagtaaataatgaaaaggaagtctccctccacccctatgtagagcatactgtacatgttttttttttttggtaacaatatattttagatattccacacaggaacataaaccatatcttattctccttttaatagaaaaagcattcataggtgcaaaaattcaagaagcttaaaagggtttacagcaaactgtctcccacctctgtctcccacccatccattccccaccaaataagctaccactattagcagtttctgttgtatccttcctgagatagtctgtgcatatacaacaaaatagttatatgttctttttgtaccctttccttttgtttttataaaaatggtgacagtggctgagtgcagtggctcatgcctgtaatcccaacactttgggaggctgaggcagggggattgcttgagcccatgagtttgagaccagcctggccaacagggtaaaatcccatctcaacaaaaaatacacacacaaaaattagctgggcatggtggtgtacatctgtggtcccagctactcaggaggccgaggtgggaggatcacctgagcccaggaggtctagactgcagcgagctgtgattgtgccactgcactccagtctgggcaacagagtgagaccctgtctaaaataataataataataataataataataataaaattaaattaaaattaaaatggtggcaggaagcagaactttcagcacctttctttttccttgaaaaatttagatctgggagtttacatcaggacacaagaagtctccttattcttttttgccactgcaaaatatttcattgtatgggtatgccataatttatttaaatagtcagatattgctggacattttggttgttttcatcccttttcagggatttaaaaatgctgcagtgaattactttgtccatgtgccatttcacacgtgtaaatttatatgaaggctattactaagtagaattgctgggacaaagaatatgtgcatttgtagttttgatagctactgccaattcgatctctgtaggggttataccaacagcattgaaaccagcaattttgagaatgcctattccttacactctggccaattaagtatttttgtttatttgttcaatcaacaattcttgagcatctactctgtgctaagaacttttctacatgctgtggattaagcaatgaccaaaatagacaaaaagccttgtgttcacgggcttacaatctggtaggggaaatagacattaacaaactaaatgaaaaaaatacatagcatgttagatggtgataacagctaagaaaaataaagccattgaggaagatctgggagtgcctaggaaggaaggtttgaagctttagggtatttaaggtctcactgaaaagatgacatttgagccaagacctcaaggaagtaagagagtgagcgatgtatttatgtatctgggggaagaatattctcggcaagagtgtgcctgctgtgtttaagggaaaacaaggaggcccaggtggctggagcaaggaaggtagtaggaggaaatgatgtcaggaataatgaatggggcagaggaaggcacgaccatgcagggtcttataggctgcatggaggccacacttgtgggtcattgtaagggctttggcaggacatggaagccattgaggggtgttgagaatgataagacctgccttatattttagcaagatcactctagctgccatattgacaatgacctgtacaaggcagggagatgagttaggaagccagtacaatagcccaggtgaaggatgatggaagctgagactagggatgctataggggaggttgtaagaagcggctgcattctgtgtacatttcatttcataggcaggactgacaggatttgttatggaaggagagagagagagtcaaagactcaaagatgtctccaaggtttctgacctatcaacttagaaggatggagtttcctgagaagggtgtgatttggggaagagcaggttttggaggagaaagatctggagtttggtttgagcatgttatgtttatgatgctcactaaacatccaagtgaggagctgaaaaagccacagaaaacatgaggatgggactcaagagaaaggttcaggctgcagatgtaaatttgaatgaatgaaatcatcgaggggatgagtgttgatagcaaacagaagaggcctaagaactgaatcctgaggtgtctagtatttagaggtcatggagatgtggaaccagcaaaggagaatgagaagaagtgaccagcaaggtaagagggaagtcaggggagtgtcgtgtcctgaagccaagataagaaaatgttccaagaaggaggcatctgtgtccagtgctgctcatgggtatgataacaaagactagggactgaccattagatttagcaatgaggaggatattggtgactgtcacgggagtcatttcagtggagttgaggggcagaagactgatagaattgtgtctaagagagaacaggaggagagagattggagacagtgagtagaggaactcttttgagttttgctctaaagaaatcaaaggaatcagatgatgtctggagcactgtgtagtgccaagaaaaaatacagcttgctcatatgctgacgagaaacagccaggagggaaggggaaaatgaggatgcaagagagaggggagaattgctgaagcaatatccttcaggtggcaaaagggatgtgacctagtgcataggtagagaggctggttttagctgggagcatagacagttcatccatggaaaagcagggaagacagagacatggacacagaagtggataaatgggtatatccaagtgggagcttggatgttgtcttctgattgctttgttttctccatgaactgagaaccaaggtcaacagtggaagataaggatagagagggagacactagagggcgtgatatagttatccaagagagtgagtgaaccagggggatgaatgtcatgtgattgacaagcggcactgagggtacccttgacgtttatgatcataaatttggtgataactttctccagccatgttgagctgcacaggtgcaggtgcagaacaggtgagtggttgcataaaaccagagttagaggtttgtcagttgagtagaaggaaacatgagagggcaagagactgaaatgtatgtgcaagggatatttattttttaaaaatggaaggatttaagctgggtaaagagacgagtatgatgagagtgtggacatcaattctgatggggccaaaggattgttggagttgagatatgagacaggggttgaactggatgttaggtggatggagaatgggttgcctgcagatgggattcagggttgaattggtaatgcgtggccagggaaggtggagacaagatcgttggagaaaagatgctcacggaatggagaagagagtgcattggaataattatctgtctatactgacattgaaataaccaagaattatgacagggacaaatgttcaagggtgtatataatgatccaggagtaaagcttcatggagtgaaggtaagtgatcttggggaagataaatggcagcaacaagcagtggttaccgtaactattttttctcatatttctccatcgtgtaagcgaacagcagtatcccagtgatttccgtttctcttactctgagtgaggttgagcccaccagggctatttaaaggctatttgtgtttcctttactgtgaactgtctgttcatatcctgtgcttatttttcttttctccttccttccttccttccttctttccttccttccttctttccttctctctttctctctctctttctttctttcttttctttctttcttcttttttgacagggtcttgctctgttgcccaggctggagtgcagtggcgcaatcatagctcactgcacctcgacctcctgggctcaagccatccactcaccttagcctctgaagtagctgggaccacaggctcacgccaacaagcccagctaacttgtgtattttttgtagagatggggttttgccatgttgcccaggctggtctcgagctcctgggctccaggaattcttctgccttggcctcccaaagtgctgggattacaggcatgagccacaacaccccaccatgtgcttatttgtatgtaaattattgactttttaaaaaactgatttgtaggagtgtgtattaatgaaattatccctttgtgatgagttgtccatattttttcaagtcatttaactttgcctatggtgaaatttgcccagttcctaaatcttttacatactccgggttttcattatatttagaaaggcctttatcactccaatattattttttaaatgtatcctgtggttgcttccagtatttagatggtttcattgtttacatttaaatgtttgattcatttgaaaaatatcttgttactatatcctatatgatacatgcaaaagaaaagtaaaacaaaataaaaattataaggtataattaaaaattataaggtataataaccaatgtacacctgtgaacctaccaacaaacttaaaattagaacatgagaaataccattgaagccagctccccccagtccccataccactgcctaaccctctcctacaggtaaaccaagttttgtgtttatcatgacctggcttgttaaaaaaaaattcatcacagattgcataatcctaaaaaaagtgtgttggtgtagtttagttgtgcttgtgtttaactttataaaaaaaaatgataccatgttgcagcaaccttctgcaatgctctttttaaattcagcatatttctaagatttatctatcttgttgtatttagctgtagtttgttgtatttagctgtagtttgtcatatttagtttttgctattataagcaaagctgctatgagcattcttgtttgtgtctcttaatttgagtaagtacaagagtttgtttaggatataaactaggtcaggaattgtcaggtcatggatacgcacatgatcatcttaacaagttgatgtcaactgttttccaaggtggtttgactaagtaacactcccacccacaatactgagtttctatcgctccacatcctcaccaacacttaataatgtcacacttcttatcgtttgccaatctggtgggtgtacagggcattttgtgatggccttaatttgcattttccagattactattgaagttgaacatcttttaatttgttggcttatttatttatttatttatttttgagacacagttgcactccgtcgcccaggctggagtgcagtggcgcaatctcggctcactgcaacctctgcctccctggttcaagtgattcctgtgcctcagccttccgagtagctgggattacaggcgcacgccatcacaccctgttaatttttgtatttttagcagagatgggatttcgccatgttggccaggctggtctcgaactcctgacctcaagtggtctgcctgccttggcctcccgaagtgctgggattacaggcatgagccaccgcgcccggccttactctgtattttactttaaaaatcttgccaggcacaatagctcatgcctatagtcccagttactcagaggttgaggtgggaggattgcttgagcctggaaaattgagggtgcagtgagccataatcccatcactgcactccagctggggaacagagtaagaccctgtcttaaaaaaaaaaaaaaaaaaaatccttgccaggcgcagtggctcacgcctgtaatcccagcactttgggaggccgaggcgggcagatcaccggaggtcgggagttcgagactaggctgaccaacacggagaaaccctgtctctactaaaaatacaaaaaaatcagccgggtgtggtggtgcatgcctgtaatcacagctactcgggaggctgaggcaggagaatcgcttgaactcaggaggcggaggttgtggtgagccgagatcgtgccactgcactccagcctgggcgacaagagtgaaactccgtctcaaaaaaaaaaaaaaaaattctttttctctgctgaggtcatgaagatattcttctatattttcttccaaaggtttcacagttttccctttcacatttgtcatccctatggaactaattaggggtatggtgtgaattaaggaatcaatgtaattattttttacttaggaactaccaattattccaataccatttattaaatagctcatcctttcccactgagttgtagtaccagctatgtcctatatcaagttttctgctatttgtgggtctgttcctagactctctattttattcctttgatctatttgataactcctatgtaatcatcactttttaaaatcactatatctgtataataccaatgcaaggacaagtgtatagggcaagtcttccaccttccctgaacattcttcagttgaatattggatattttggccttttgtgtttccatgtaaacaccacactcctcttagagttttaagcaatattacaatgaacctatacgtcaatttgaagaagaatttgtctttatgctactgagtcttctgatccatgaatatggtttatctcaccatttttgtagatcttctttaatgcttttcaatatagttttataattttttcaataacggccacaaatactcattactttcactaattcatttattcaataaatatttattgagcatctactatgtaccaggcactaggtaaacagtacacttaccaggttctaggctttaggaatacaagagtaaacaaagcagacaaaaaaaacctgttctcctggagagagaatatatagggatggggaataaataattattgtaagtctttagaaggtaataaatgaaaaaatagagaaaaataaaacaaattaggattgggggaatgtacaattttaaatgaggtagtcaattaagccaaattgagaaagtggagttacaggaaacactgaagagatgaagaaatgagctatttagttgtatgggtagcttatttccaggtactatttgtattttgttgctattgtaaatggcatcttttgttatgttttctaattctttgtttatattatagagaaatgcaactatttttgcattgatctttgtctttagatttgccttgtttttatttttttatgtagacagccatcttatacaaacaaatactgttttattttatctatccagtccttatatattttatttctttttcttgctttattgcactggctaggacctcagttacagctttgaatatacgcagtggtagtgggcattctttttttttttttttgagacagagtctcgctctgtcgctcaggctggagtgcagtggcatgattgcagcttactgcaacctctgcctcctgggttcaagtgattctcctgcctcagcctcctgagtagctgggattacagatgcatgccaccatgcccggctaatttttgtatttttagtagagacggagtttcaccatgttggtcaggctggtctcgaactcctgacctcgtgatccacccacctcagccttccaaagtgctggaattacaggcgtgagccaccgcacccggctggttaatgttaagccaattctacatttcccagataaaccccacttaataaggatgtattatctttttaaatatactgtttgattctactttacattttgttaagaatttttgcatgtatgttcataatggatatttttctgtagttttcttgtaatttctttggttttgggattggggtaatgctggcctcatttgaattgattgggaagcatttccttctcttcaaatttttttgaagagcttgtgtggaaccagtataatttcttctttaagtgtttggtggaattcaccataaagccatctggggctggagttttctttgttggaaggattttaactgtaatctcaatttctctaatagatatagaaggttattcatttctttctgagtgagctttggtaatttatgtgtttcaaagaatttgtcaatttcttatgagctgttgaatctgttggcataaaatgtttataatattcccttatcatccatttagtatttctagaacctatagtgatgtcacctctctcattcctgatactggcaaattgtgtcttctctttttcctcatcaatctggctacaggtttatccattttattgagcttctaaacaaaccagcttttggtttcattgattttctctatcatttttctgttttttgtttcattgatttccactttggtatttatttcctttcttctgcttacttttggttaattccttctccttctggtgtcttaaggtggaagctaagttattggcttaaaatctttcatttttgtcttaaaatagacttttagagacatacacttctcctcaagtactgctttcggagcatacccaaaattctgatatgttttcatttttattcagtttagaatgctttcaaatttcccttttgaggtcttttttgacccacatgttacttaatttccaaaaacttggggggattctcctagaatctttttattatcaatttgttttatttacttatttattttgagactgagtctcactctgtcacccaggctggagtgcagtggcattatgatggctcactgcagcctcaacctcctgggctcaagcactccctctgtctcagcctcctaaatagctgtgactacaggtgtgtgccaccatacccagctaatttttgtattttttgtatttgtttgtttgttttgagacggagtcttgctctattgcccaagctggagtgcagtggcgcaatctcggctcactgcaacctccacctcccaggctcaagcgattctcctgcctccgcctcctgagtagctgggactaaaggtgcccaccaccacgcccagctaatttttgtatttttgttagagacggggtttcaccatattggccaggctggtctcaaactcctgacctcaagtaatccaggccctggcctcccaaagtgctgggattacaggcatgaaccaccgtgcctggccttttgtattttttgtagagacgaggtctcaccatgttttccatgctggtctcgaactacagggctcaagcaatctgcccacctcagcctcccaaagtactgggattaaaggcgtgagtcaccatgcccagcccttcattattaatttctaatttaattgcattgtttgtcagacaacatgtactttgtgtgacttgaatccttttgaatttattgaaacttgctttatggcatagaatatggcccacgttggtaaatattttgcctgcgcttgtgaagaatgtttattctgttgttattgcgtgaaatgttctataaatatcaaacaggtcaagttaattgatagtgttgttcaagtgttgttttagctgattttcttcctatttattctactattgaaagaagggtattaaaatcactgaccattattgtacatttgtctatttctccttgaggttctatcaattttccttcatataatttgaaaattcattgttaggtacatggatgtctagaattattatgtcttcttgtttaattgacttctttatcataaaattcacaaaatctactttgataatatatagtcacactagctccctgcaacctccgcctcccaggttcaagcaattttcctgcctcagcctcccaagtagctgggattgcaggcacccactaccacgcccagctgaatttttgtatttttggtaaagacagggtttcactatgttggccaggctggtctcgaactcctgatctcatgatccccctgcctcggcctcccaaagtgctgggattacaggtgtgagccaccgcccccggcccattcttcttttctttatctttttcttcattttttttccccctttctttagatgacttgggtttttcagattatcttatttttgtctcctgtgttggcttcttagcaaaactctatattttgttatttcagttgtttatttagaacttattgtatatatcctaaacttactgcaatctaccttcaattataccccttcttgtattgtatgctattactgtcgcagactttatttttacgtgttataaaatccaaaatacattgttattattttgctttgtcaattgcttttaatgagatttaaataatatttaaaatattttatctatttatccatgtagttaccatttcctttctgttgatccaaatttccatccagtatcaattttcttaggcctgaagggcatccttaaatatttcttgtattgtttgtgaaagctattttgctgggtatagaattataggtgatagttgggtttcttttttattggtttgtaagatgtcgctccactgtcttctctcctgtgtttctgataagaaatctgatgtttatccttatctttgttcctctgcacataacatgtctttcatttctagctgcttttaagatattcttataattcattttgagcaacttgattatgatgtacattgatggagttttcttcatgtttcttgtgcttagggtacattgatctttttgtttctgggagtttacagttttcattcaatttggaaagtttttgaccatgatttattcagttatttttttctacccctcttctttggggactccaattactcacatattggaacttcttgaagtttttctgcagctcactgattctcttctttttttttttttttttttggatttttttccctctgtgttcgttctgaatagttttaactgttatgccttcaagttcactaatctttttttctgccagttttcatctgccattaatcccattccatgcaattttaaaaatctcagacattgtagtttttatctctacaagtttgatttgatttgtatcttttttatatcttccttgtctctaagtttctttttttttagatggagtctcgctctgtcacccaggctggagtgcagtggcacgatctcggctcactgcaacttccacctcctgggttcaagtgattcttctgcctcagcctcccgagtaactgggtttacaggcaagtgccaccatgcccagctaatttttgtatttttagtagagacagggtttcaccatgttggccaggctggtctcgaaatcctgacctcaggtgacccgcctgcctcagcctgccaaagtgctggaattacaggtgtgagccactgcacctggccccatgtctctaactttctgaacatataaaacacagttataataactcttctattatatttttctgctgattctaacatctgtgtctgttctgagtcagtttcaattgactgattattctcttccttacagatctttttttaagcatcttggcatgcctggtaatgtgtaattggatgtcagatattgtgaactttttcttgttgggtagtagatatttttgtatttctgtaaatcttgagctttgttctgggatgtagttaaattacttggaaccagttttgtctttttgagccttggtcttgtttttgtttttgttttttcttttttgagatgggagtctcactatgttgtccaggttggacttgaaatcctgggctcgagcagtcctcccacctcagcctcctgaagtaaccaggactacaggtatgtgccactgccctcattgagccttgcttttatgatttcttagatggtccacagagtactcagtctggggctaattattcctcactactaaagtaagactttcctgagtactctacccaatgccctatgaattacgaggtgtttttttttttcagtctagttggtagaaacaagcactattttcatccttatgtgagcaccaagtcatgcttcctttattcgttttgagtaattctttacttggcttcagatagttttctcacatgcatgcctttatcagtactctactaaatgttcaaggaggttcctccgcaaatctctaggatactctttgtatgcagctgtctcctctccaagaaatctagctaccttggtctccctggaccctgagctctatctcctcaactctgggagtctgctgggaagtgcctcagttccttctccctatgccacagcctgaaaacactcagagcattatgctgggatatttgtaaggtttagcctgtttatttctcatctcttggggatcactgcccttcattgtgtaatatctattgtcttgaaaaatgttttatttatttcatctggtatgttttgttttgttttgttttcaggatacaggtaaatgtggtctccgttactccatcttggctagagcagaagtgtgtttcttaatttccaaatatgtggtatttttctagttatctcttgtcactaatttctaacctaatcgtgtgtcttattggatctactatattacacatgtccattaaatcaagattgtgttgttcaagtctatctttacttataattgtctgcttgatctattggaaactgatagatgaggttataatctcccgcatgagttttcagcttttccctgttgttccatcaatttttgacacatatatattattactattcgataaattgtggacaggcttttaaaaactttataacttccttctgaattgaaccttttatcagtattcattgatactttatttctaataatacttttgcttcaaagtctgttttatctgatattatttacaggctccctcaaaacacttttggtgatatttgcctcagatactttttactctgcatttattttcaaccattatgtgtccttatgtttagatgtttgtcttttatttatttttatttttttttattttttctttgagacggagtctcgctctgtcgcccaggctggagtgcagtggcgcaatctcggctcactgcaagctcagcctcccgggttcacgccattctcccgcctcagcctcccgagtagctgggactacaggcgccgccaccacgcccggctaattttttgtatttttaatagagacggggtttcaccgtgttagccaggatggtctccatctcctgacctcgtgatccacccgcctcggcctcccaaagtgctgggattacaggcttgagccaccgcgcccggccagatgtttctcttttaatagcacgttgctggattttttaaatctagtctattttttaactggcaagtttagttcatttactttattgagattatatttttttcaattttattggtgtataggtgacaaataaaaattttatatctttaatatgtacaatatattttaaccattttctaccatattgctttgtgctttctatttgttccacttctatgtttctttgttttcatttcctgtcatttaaaaaattaagtatttcatttgatgtgtgtgtgtttcttatctcattttctcttctttaatggtttggaactgtattcacttcaattctatcctttgagttattgcccttgaaatttactacatattcttaagaaagtcataattcctttcctgactaatattacagtttttagcaatgatgtgttggagctggtttatactggctcacaagagctgattgttagcatctcttctcagttttatattcagtgacacccattggcagtttgaaatcaaccatgctgggaacatataaccatggaaatcaacaacactataaatcagagttttgcaccctgaaaatttggaaatggttgttaaacattaaccagtacactactgatcttaggccattctatcacacctgccctattttttaaagctgcatatcattgttatgcttttttattatatatgaataattttttttaactctgctaaattttctgctcaccttttccttcttgcattttgcagctttttggagggccattttctttctttctaaagtacatcttttagaagttccttgaaaagattggctggtaataaattgtgttctcacttttgtctttgtatgactccgtttcttgaaagatggttgttctgggaacacaattccacattgacagttattttttacttagtactttgaatatatttccatttttgttgttgaaaagtccagcatgccaggcatgatggctcatgcctttaatcccaacactttgggatgacgaggtacaagaatcacctgagcccaggagtttgagaccagcctgtgcaacatagtgagaccccatctctacaaaaattaaaaaattagccatgtgttgtggtgcatgcctgtagtaccagctacttgggtggctgaggcaggagaatcatctgagcccaggagctggggattacagtgagctatgatggcaccattgcattccagcctgggcaacagagtgagatcctttctcaaaaaagaaaaagaaaagttcagcataattgtcattcttttgtagataaactcactcttctctctggcagtatatgagagcttctttttgtctttaaagttcttcagtttcactctggtatgtctaggtgtggatttttaaaaattctgcttagaatgtgttggcttatttatatctatggatatacatcttttaccacgtctgcaaatttcttagcctttgtctctcctaatgttacatctcatttgctttctctcttttctcttctggcactccaaagaacactccaatttagatctttttatttcatcctccatgtatcctaaacaattttatatttcccacctatttttctcttcatattgcattctgggtaattgtttttcattcatctttcaagtcattaattatttctttagctgtatctaatttttaatttatcccatgagttttttatttcaatgattctattttttatttctgaaagttttatttagatcttttgcaatatgtctagttattttgcatggtctcttcttgcttgctcatatttctaagttgatttttatttctttaaatgttttgtagttattttacattctgtatttggtaatttcaatatctgaagtccttggggctttaaatctgttgtccattatttctgctattactcatggtggcttgtttctgtgtttggtctttttgttattgatgtggtggtggttattttagtttatatttggttgaaccaaatctggccccaaaccgggtatgttttcccccagaagaattttgtctgattctgcctggaacaaggggtgctaccaacctcagacttttctaggttcctcagaggatccagggccctcctctcaggtggttcctattctccatcccggtgtttatattggcatttgccacaagtacagttctgatatttgtgtatttgtgttagctcatagcttatggctcccaattagatttcaactcacttatttttgttttttagtatctttggcaatttcccttaccgtttttatgaaagcctggtatctagttctattgccggggggacctcaagatatgtagtctgctattatcctagaagaggaactcattcattcagaatttacactggtgaaaggtagaaaataaggctctacatgtatttttttttcttatggcttccagttgccccaagagcatttatttaataatccatctttcttccatcaattggaaatatcaatcacatcatattccaagttcccaaatgtaattgtatgtttttctggacttttcattcaattttattattccatctgtttttcatggggaaatatgatgctgtggccaggcaaagtggctcatgcctgtaatcccagcactttgggagggcaaggcaggaggtgaggtgtagtaccagctacctgagaggctgaggcaggagaatcctgacttgaagtcaggagtttgagaacagccagggcaacatggtgagaccatgtctctacaaaaatgttttttaattagccaggggtgatggtgtactcctgtagcctcagcttctcaagaggctgagttggaggatcactcgaacccaggagttcaaggttaccgtgagctatgattgtaccactacactctagcctaggtgagaaagaaagaccctgtctcaaaaaaaaaaagaaatatgatgctgtttcaatttttgaagatttaaacgtgttttaataactggtagatctagtccttttcccccattactcttatattttagaattttcccaaatattcttgattatttgttacacaaactttacaattagattatctagatcaccaaaacataacttcttggtgtcatttttttaggttgtggtaaaaaacacataacgtaaaattttccatcttcacattcatgagagtatggttcggtagtgttatattcaaattgttgtgcaacagatctccagaactttttcatcttgcaaacccgaaactctatatttattaagcagctccccatctccctctccccccagcccgtagtagctgccatcctaccctctgtttctatgaatttgactactttagactcctcacataagtggactcacatagcatttatctttttgcgactggcttattttacttggcatactgtcctcaaggttcattcatgtaacatgtgacaggattgccttcctttttaaggcttaataatattccattatatgtatataccaccttttattatatattatatgtttataacatgtatatatattttattatatacatacatcgcattgtatgtatatactacatttatccatcaatgaacccttcagttgcttctatctcttggctatgaacatgggtgtgcagatatctctctgagatcttactcctttccatttttttggatatacagtcatccctcagtatatgcagggattggccaggttccccatcctgcccacacatgtaccaaaagctgtgaatactcaagtgccacagttgtccctgcagaaatgcatatatgaaaagtcatccctctgataagcaggttttgcatcctttgaatactgtattttttaatctgcatttggttaaaataaatccacatataagtgtacccagacagttcaaacctgtgtttttcaagggtcagctgtatacctagaagtggaattgctgaatcaatggtagttctatttctaattttttgaagaaccaccatactgttttctatttaaaaggtcgcaccatttaaaaatcccaccaacaaagtttccagtttccccacatccttgccaacacttatcatcttttttatagtagtcatcctaatgggtgtgaggtaatatttgattataattttgatttgcatttctctaatgatgttgaacatcttttcatatgcttcttgaccatttgtacatgctctttggagaaatgttcattgagatccgttgcctatttttaaattggattatttgggggttttctgagtgttgagtgttaggagttccttctatattctagatagtaacccctcctcagatatatgacttgcaaatattttatcccattctacaggttgccttttcaccctattaattgtgtcacttttattgaaatcatgtttaactcagattaacctggaggaaatggaatatttatgataccaagtctttaaagtgctttgaaaatgtaattcatttattgtataagttgcactaagaagggtgcaaacaaaagcagctttaccatttctaacaactgccctataaacctgctcggtgagatcatttctctccatccctggatgaaataatggactattccttcatcttttttccaccactctcatgaaataaaaatcctctgatcacttaggtaagaaaatgtccagaggagtgtaacaaactccagagattgtctgattctaaagcatctcgtcatcctggcttggtcctgccttgggtttagtggtgaggatgggtttggtaaaagggtcttctccctttcttcattcaccttcacccctacttattacctgtagtctagagtcacctccatggttgaggtggctgaagggaaaagaggttcgggggcggggggttgaagggacaaggtgttcctaggtgacacagtggcaatctgtcatttgtgcctctggaaatggtgaataaccctggctttctttctgagcttttgtagatctctcaaatcccccatccaggaccctctgatggccttttgtgatcccctcagcttctagacctgattctttatccacagcaggattcctaacctgaggtctacaagaatacctgtgggtccataggtagagttctgggaacttagatgggaaaattccattttttttttacacagtttccagtcctggaaacctttagctaatctttagcattccttcaatggtgggaatgggcaacagatcaccatagtattaatactctgtgtaattttatcactagaatggttaatttccatatcatagtagagctgttgcagatattttgaaatcccattatactcactgccacttcaagattactgtagttgttagaacagctactagatcttattacttaataaattaataaagtgtgaatataactatataaccattttaaaatgttttttgataactttcaatataattggtttattttataattctatgaatttattttgtacatatgaaaacaatatgctgagaatgggttcaatgggtccatggcaccaaaaaaaaaaggttaagaactcctgactgaaagccttcgccgactcctattgagcgcattttcgcaacagttcacagccagccacgctcaaagaacccaaatctggctgatgaaaaacaggcatggtccttgccctaatcagctctgaaacagcatccggttcttaaagccacccccaccaatgtctggccccgcttagctactcaggatgagcttgcctttccccagcctcttgctgataaacttcacaagtatgaatttagtatggatctctctgctctttgaattctagtggatgcttgtcaacttctgcaagcagtccttttgaagctcccctactaggccgaagtgagacagacacaccccacacttcctccccattgagatggggggagctacagcatcttgagagctccacctaccacagttcctatttttcaccctagagagagatgatgagctcaaggacagtctatgaccgggtagcataggtggtccagcagctacattgtcgttcttaactttgagacctcagctgaaaccaagacaaaaagagtccgttttcacatcctattacacaaagagtagtaagtagaggttgttactatctatagagattgttaccctctagaagcagaacctgaggtggggattcaatttcctccctcacagggagtgaaggaagcaggaggaggcaggcagcagagctgagtaaggatgtgcattgaactggagtccaacctccagcctcagagccactggaagctctggaatgtggatcccactctgtggcaaggacacagtctttggcagctctttgagagcaagtcagtcagaggctgccggccagccctatggtgagggaataaccacccctggcatttccaggtgccctgtggctgagggcactttgcagctgggggatgaatgcacttgcttagtgtattagtttcctaaggctgtcctaacaaattactgcaagcttggtggtttaaaacagatgttaattatctccccattctggaggccaagtctaaaagcaaggtgttggcaggtccgtgctccctccaaaggccctaggggtgaatcttcccttgcctctcttagcttctggattctgttggcagtccctgtggcggcatcactccaatccctgccttcatcttcacagtgcctcttcctcttctgtctaatctccctctatcctattgttataaggacttcatcactaaatttagggcccactcagataatccaaattgatttcatctccagatcctgcaaagaccctttttccaaataaagtcagtttcacaggttctgggatgtagacataacttttgggggggccaccattcaactcactacccccagtaaagggggttggggtgaggcaacaatgacgtcccctatacaagtaatccttaagccaccatatcactcaaaacaagctctgtggactctgctgtccccttaactgctggagagactcatgagcacacatacatgaagcactgttccctttaggcatgcgaagctggcctgtccaccctctgcaaaaacaggacgcgcagggccctgtcggctgtgcagcagctctgctggtagaaagcattcgctttcttctccaccagacttcttatataccatcctatcagtcagtgctccaatcataaagcccatctcatttccctcctaccagccttgctgggttttttgtttgtttgtttgttttagatggagtctcgctccatcaccaggctggagtgcagtggcgcaatctcggctcactgcaacctccacctccagggttcaagcaattctcctgcctcagcctcccgagtagctgggattacaggtatgtgccaccatgcttagctaatttgtgtatttttagtagagacggggtttcaccatgttggtcaggctggtctcaatctcgtgacctcgtgatccgcccgcctcagcctcccaaagcgctgggattacaggcatgagccactgtgcccagcccagctttgctgtttgatgacactgtaagttagcataatgtgctgtgacaaagaatccccaaatgtggtggcttaaatatttgtttagttctctcaaaacagtccagggcatcagtccagggtggctcttctccataaagtcatccaggaccaagcagtcttttcctcagctctcccctaaggtgacaccctcatctgtatagcccaaacaggctcagagataccaaaaggggatagaagaaatagggcatgcagcttacttataaagacataacctaaaggtcccaccttacctctgctcatgccattagccacaccctgctgcaagggaggctgggaaagatagcgtctaaatgggcatccctcaacctaggtaagactcagagggttctatcatgaaaagaaaggaaggaagctagataacggggacagccagcattctctgctgcggacatctgtctggccacttctactgtccttcttcctacgaacaaaccaagtttttctctgtccgtgggtaccagatgcctctctctcttaagcaaacccctgtaatctatggtattccttttagaacagggaactggcacagaatccaggcctccatctgcctgtgacttgatgggccttgtgcttctgggatgtgaacgtgaattcttaggaatagagctaaagccaggagtacctcacctttcacttgccacttcacattgtgtgtgcagagcttcaacacacagaatgtgagtttctttatcagttgcatgctaggttgggccccagtcaaacttaatagttctatgcattcttgctagtagggtattgaagttgccagttattattgtttgttccttcaattctgttagtttttgcttcatgcattttggagctgttattagatacatgtgctttttttttttttcttttgagacagggtctcactccagttgaccaggctagagtgcagtgatgcagtctcaactcactacagccttagggctcactacagcctcaacctcccaagctcagctgattctgccacctcagccccctgagtagctgggactacaggtgcatgccaccacacccagttaattttttgtatttttagttgagacggggtttcaccatgttgcctgggctggtcttgagctcctggattcaagcaatctgcctgcctcagcctcccaacatgcgggggttatgggcatgagccaccacacccggactgttattagatacacatgcttataattgttatttctttctgatgatagacacttttatcattataacatgtccttctttgtctctcataatttttatcttagtgtctattcataaattagtatagccactccagctatctttcagttagggttcacatgttatctctttttccatccctttattttcaaagccttttgtacatttgaatttaaagtatgtctcacatagacagcatatagttggattgtgttgtagttttcttttttaatccattctgccaatctcttccttttaatgaagcatttcatccatttatatttaatgtaattgctgatagaacaggatttatgtctgccattgtgctttgtgttttctttttcttttattttttctttttcttatttttttttgagacggaattataaagagttcccatatatcccctatccccacaaatgtgcagttgtcttttaaattagataggaaaacaaaatcattacaaacaaaaatacatttatgctgtcttttatgtttacctatgtagtgacttttaccagtgctctttatctgttcatgttaattcatattactgtcttgtcttgtttcatttcagactgaaggactccctttagtatttcttgtaggacaaacctgttagtgatgaatcctctcagtttttgtttatctgaaaatgtctcaatttctccttcatttttgaagttgatcattttagaagttgatagttttgctggacatgcaattttttggtcgatagttgttttcttttaacacaatatatcatctcactgccttctgtccttcatggtttcagaagttatgtggtgatcttattaaggattccttatatatgacgagttacttctctctctctctcattgcttctcagatcctttctttttctttggctttcaaaagtttgagtatgatgtgtctttgtatagatcatacactttgtgttcatactacttggagtttactgagcttcttaagatgtgctcaataatgtttttcattactgagcacatttaggaaatttaggggcattttcttgaatatttttctgtcctgttccatctctactctccttctcagattcccattatacatatactggtatgcttgatggctcccacaggtctcttaagctctgttcatttttcttcattcttttttctttctgcttctgagctagataatctcaattggcctatattcaagtatactgattttttttcgtcccaccaaatgagatatgttgttgagttcctctaggtcaggggtgtccaatcttttggcttccgtgggccatattggaagaagacttgtcttgagccacacataaaatacattaatactagcgatagctgatgagaaaaaaaaaaaaaaagcaaaaacatctcataataagaaagtttacaaatttgcaggctaattcaaagccaacctgggctgcatgtgccccgtgggtcgcaggttagagaagcttgttccaggtatttttaaattttacttattgttcttttctacttcagaatttcatgggtttttaaaaatataatttgaaatcctttattgatttttttggtgtgacttcattctcatacttttcttgaattttttagacatagtttcctttagttctatgaacatatttataattgctcatttaaagtctttatctatgccagctgcagtggctcactcctataatcccagcattttggtaggcagagaagggcagattgcttgagcctaggagtttgagaccagcctgggcaacatggtgaaaccctgtctctacaaaaacctacaaaaattagctgggcatggtggctcatacctgtagtcccagctacttgggaactaaggtgggaggatcacttgaacctgggaggtcaaggcttcagtgagccatgatcacaccactgcacttcagcctgggcaacagagcaagaccctgttccaaaaataaattaattaataaagtatttgtctaaaaattctaacctctgggcttcctcagggatagttcctgttggctgctttattacaatgtatgggtcttactttcctgtaccttgcatgtctcataattgtttgttgaaaactggacattttaatcatataatgttgcactctggcaatcagatcctccctcccaattttgttcttattgctattgctgtttgtttgtttagtgattttcttggactaattatataaagtctatatttcctgtcatgtataatcactgaagtttctgctcttggcttagttatcaggccatgattggacaggcatttctttaaatgccttgaatgccaataagtgttcaacccattgccaaaaggttctgtatgtgtgttaagacatgccttcagtgctccagcgatttacaactctgccttgaccttcacttcctgcttgctcagggccttgggataaaccagaggtgagagaccaggggctttccatgccttttttgggcatgtgcctctccctgcacatatgcatagctttctagatctccaggaatatgtcagagcttttcagagcccctgtgaacatcttattccccactttttcctttaaaatattatggccaaacttttatttgcccccaacttgtattgctgcctcatgtagctgcaatgttaagcaattgccgctggctgttttcaacaaacaccctgaagatagggtctttcccactaagtaagttctgaatcgggtcaaataacaagttctgcaaataaagctgtcagggagttgctagaaaggttaaagagtgaaaactgactgggaatacagcttgttgagaggctccaaacccactctaccccttcctatggttgctagcttgctagttttcacaactacaatagtggttgcaaggtagctggtcttcaacagggctggggagtaggggatgggaatagggcaaattaaaacaccacaaagctttctgttcttattacaactcagccatttttcttgcctcaatgttccttgagttgttgcacacatgttgttaatttttagagttctgagaaagttgattttgaccatgtttgccagtgttcttgtttctttatggaagaatggattttcagaggtctttacttagcaattcccaaagtcctgtccctgtaattgttatttcttacctgggcacaagttaaaagtgccttgggggctttagtccagcattcatccagtcacagtaatttttgactcttgaattctatcatgaatcaatcagcacctgttgtggggctgggactatgatggatgcttgggagaagagaggcttaaacaatgatccctgccctctgagagcttacagagcagttgaggagacaaatataattatgtaaacaacaatttataattttgaaaaaaattcgtgtacttgaagaaaggtcagtagagattatctataattacataataataagaagaaatagaaaacaatgtaaggcttgaagaccacactatccaatagtactttctgcaatgatgaaaatattctgtaccaaccaatatggtagccaatagccacacatatttattgggcacttgaactgtagctaccgtgactgaggaattgaatatttaattgtgtttaatttaaatcaaatttaagaaataacacatggttactgtatctgacatcacagctctaagactttaaatatttgcttgattggccaggatgaccctgtggcaggggtagggaaacataccctcccatgggaggctcatagctcttctctggctcctagggatagatagaagctgggggctatggatactccctggcatttaattgtgcctgctgcctggtgggtgttgttcagtgacactattggaatagtttaggtccgagccacctggcaaaggtaagctctggtctactctattgggggcaaatttagaccctagatcaggcacattataagtgcaattagatgaaaggggctgtgggaactgcaaaagaatcagcccccttcctaatccactggtcaatgcaacattccctgttttcctctacagccacaaaactagcccaatgtcatccatctccttccacgctttccagcaggatctcccacactcatgctgcaagcacagacttctgtccagatccattctggcaatcccccttgaggttccagaacctccctgctgggtcagtgctgaggtgagactaaggtttccctcttgccacctgaatgcactgcacttccttccccattccccccaacccccaccactcttttcagagctgagagcatttgagagagggagaagcagagggggttcaagagagattcgctcatgtgctccgaaggtcatataggctgagatgccagtcataaggacaaaggacccctaatgaagaggaaggacttatgaggagacctctgggcagccgaagccaagcttagggccagactggcctccatgctgagacaggagcagagatttggacagtgcctccatagaaaattgggggaagaggaccgggcgcggtggctcacgcttgtaatcccagcactttgggaggccaaggtgggcagatcacaaggtcaggagatggagaccatcctggctaacacggtgaaaccccgtctctactaaaaataccaaaaaattagccgggcgtggtggcgggcgcctgtagtcccagctactcgggaggctgaggcaggagaatggcgtgaacccgggaggcggagcttgcagtgagccgagatcgcgccactgcactccagcttgggtaacaggagcgaaactccgtctcaaaaaaaaaaaaaaagaaaagaaaagaagattgggggaagagggggaccgcaggcatgaggcagcctgggaaccataataggtggagtggaggcggctagtgagtgaaccgcctgcaacttgaataataagctttctccacaaagtggagagttattgagggctggggactcaagccaacctgggatgtctggctatgtaactgggagcaagttctcacctcccagagcttcagttccctaatgtgtaaaatagagctgaccaatgagcctcctgtgattctgggaaggagaggatgctgtggagttagtaggatgtattcatgcagtgcccagcacagtgactgcctcagagtcatttcttaccctcctgccaccccacccttaccgatcatcttagagtaagtgcagctgagcctggacggcagcaagaaagttcaggccgggcgcagtggctcacacctgtaatcccagcactttgggaggccgaggtgggcggatcacttaaggtcgggactttgagaccagcctggccaacatggtgaaaccccgtctctactaaaaatgtgaaaaaaaaaaaaaaaatggcacctgtagtcccagctactcaggaggctgaggcaggagaatcacttgaacccaggaggcagaggttgcagtgagccgagatcgcgccattgcactccagcctgggcaacagagcgagactccatttcaaaaaaaaaaaaaaaagttcagtgggaaccaaggaggaacgtcctgcctccagaaccagagcccacagtcaggggtagacatcccaggctggggatgggtctttctctgaataggaagggggacattctcacttaatcttctgtctgttctctctgccctgggtgcttggtgaattgtagaagatgccaggccttgctaatacccgctacccacctctcacctgattcatagataagaggtgccaaggtctctggtcttagagcctgggtctcatctacaccaccacctctgcccaaggccagaggaacccacaacttctttccttcagactcccaccttctcctttaaatctctttctgacttgcaagcaccccttccagctctgtggcttctgctgccgtccatgccccatcccccctcctccctcctttttctctatctctccttctcttctgttcgtggactctgatagcctgcattgacagaagactccccaggcttgagaggacttgtgtgggtgcatgtgtacatctgtgtccacacaggcacaccatggtgaccatgcaccagccccttcctgccgctgcatgtggcatgcccagaggcctcccattagtggccactccacccttcctcctctcccctcaggcctggtttggggaaagtggagccactgccactcttggtgggcagctgggggccccttagcagtctctccacaccccctccccttctcctcaggccccatgcccagccctgaggtttggagagcctagtaagtgccctatcaacatgttaatcaaattacttaggagctaaaattgacgctgttcattaattatacaagattatgctaattgtgcatgcaaatgcatgcaggggaacagaaggtgttcaggcgcatggtgggccattagcatagaggatggggtgcgggtgcattggcatgctaatgtatgcgccctggctatttatagtcctccagcccatctgcactgcagccacctctacccgggtggggatcatggtggggaggccaggtccaggcctggcaggtggctgtggccctggggacagtctatcttggcttctaccgcaggctaagaccaggaagcagcctgggccaaccccacatgggcctgaactattacagtaagctcctcatttcccttcccttctctagcgtaggccctttggtgcctgtttctgcctgaagggagacatcccctgtagccttcccatcacccagaggatccaagtcccgcatgatttggtcccaaccccaggccccaagccacgctgccctcctcagtcttgtcaggcaccactgatcgagtgagccgtctgccccgtggtggagctgttagtccctttgcatggagggccctgcctcctacttctcggtgagatcctccaagacccatcacccaagaccaaattggagctctaggaagcattccgcctcccctaggcaaaataagtggccactgcagattacacttggcacatcctcctgccgtgcccaccactctgtcttcctgagtttctctttcctgttgggttgtaatttccttaagattttatacaatgccgcagtgcctaacacatagaaggtatttaataaatctttttaagtgggtgtatggaatgaatgaggggatgaatggcccagccctctgtgtcctcctctgtccctgagctgagggtagagagaagcagacagtgaacacgctggagagccagaaactgcttcagtttcttcggaggctcatgggagcccaagacaaatcttttaggataaaaattagcggagatccctgtccccttatttccccatctcaggctgcagtgccagctttgggcttggaaacacatatccaatttaatctacccttcactcttaacctgctgtctttcccaaggccttcacaggacacactgttgtttggaacatcctgccccagctcgtatatccattcactgcataccttctttctagatctgcactgtccaatatggtagtctcgagccacatgtgactatttagatttatgttcattaaaatggctgggcgcagtggcccacgcctgtaattccagcactttgggaggccaaggcgggtggatcaccagaggtcaggagttcatgaccagcctgaccaatatggtgaaacgctgtctctactaaaaatacaaaaattagctgggcatggtggcagtcgcctttagtcccagctactcaggaggctgaggcgggagaatcgcttgaacccaggaggtggaggttgcagtgagccgagatcacgccactgcactccagcctgggcaacagagcgagactccgtttcaaaaaaaaaatagatttatgttaattaaaatgaaataaaattcagttcctcagttgcactagccacatttccagtgcttagtagccatgcgtggctaatgcatatcattctggaaaaagttcccttagggagcactgtaatctagacacgttcttccttgcccctgacagacctgtagtggaaaatgcactcgggctctccttccagctctttgagttactgacagctttctctttggaagtgagaacataatttcagccctaagtatctcatggggatgcagggaagaaaaagctggtgaaaagccttagctctgtgacctaagttttcttagggtgggattcctggaagcagagcctgagatggggattcttgtgaaagaggtttatcaaaggagagctctcaggagaaaaggaatgagtatagagggagtttaacaaggaggtggtctcggtcggagtctagcgtcagcctatcccatgcagaggtctggagtgtgaatggccagagagttggtcctccttgtaatgtcaatctgtcattggctgtgggctactggtggggagtatatgctcttggctgagggtaattctcagattaccttggggcagctgcgagccatttgacagtctacactgcagctggggcatgagggaatcaggcaggcatcaactcactgtaaagttcctggacgttgtcttccaaaagaagctccaggccaggcatggtggctcatgcctgtaatctcagcattttgggaggctgaatcagaaggatcgcctgagcccaggagtttgagaccagcctgggcaacgtactgagacctccgtctctacaaaaaataaacaaaattagctgagcatggtagtgtgacctgtagtcccacctgctcaggaggctgaggtgagaggatcacttaagcctgggaggtcaaggctgcagtgagccaagatcacaccactgcactccagtctgggtgacagagcgagaccctgactgaaaaaaaaaagcagctccatcccactctgccttctaccccctgaaaacctagaatttaacagtggactcacatcaattgccttcacacttgccttctctactgagtgtctcttttgagtaaagcactgtgcttggggagttaatgcaatggtgtcacccctgagaagtagtgtataagttaaatgtttgcactttagccatactcaacccagagtttgcttctttggtaggaaatactccatggacaagacgtttcttttcatttcatcttgagctgtttttatggggaggaataaaaagcgtttatagacatgattacgaaggctaaaccaagttcaggatgtggtaaggtgggtgtgtgggtgaactactctgagctttcctttaagtcacaggcatcagagtcatgatgcataactaccatcctttagatacttcattagttggatgaccactgttcacagctcttcttctggtctttcattaaagtttttattgagaatgtggaatacaggcagaatggaataatgaagcccatatagccccaatgagctagaacaatttttaactattggttccattgttttttaatactgaagatcttctcgactgatagcagcagtcacaacagccaaaagcccaaaactaggagcaagaggacctgagtttgacctctgcaaccctgttgaatttgtaacctcgaggaaatccccacaacatactatcctggtccccacacagcctgcctctcagagctgcttttgaaggcaggcttgccgctgcagtaccagcctgggtcggactctgagagccccacttagaaggacttctaggactcttgtcggcatcagtggttcataaagacccgttttcatatccttactttagcattgactgtgactttgtcaagtcacagtcaatagcttagccttggttttctcatccgtaaagtgggaatggttgcagaccgacacgacctgggggattgagcaagataatgccaaagtgacaaactcagcagcgttctgggcagttgctaaggtgctgagtgcctgatgggttagacctggttccctgtttttctttttttgttgtttgtttgtttgttttgtttttgcatagttacctccctaatgcatttcatttgtaagtcatgcttgtatttatggtgttttcttccagtaatcctaatggaagcttctgcgacttggcctttcccttactcccttttctgtggggtctggattaggaagccatgccctccaagagcctcatggccacagtgggatggcactgggcactggtcctgcagtggtcaccctccatggggatcctcaggtcagagagggctgtggacttgggctcactttactcctccccactccctgccccctgcccccatcctggtcaggaaaaacgggctttcctagactccttttcagccccatagggccaggagtggggaggggtgctcagagaacacccccaggctcatccaagctttagaggtggggggtggttccatgctgacaagcagggcttcaagcccctcaacaaagtgcacatcccttcctgcctcaagtccctacagggtgtcccaggcccagaaccttgtcctcacttacccagccccttcccaggctctcttctttcaaggggaacacctgcccgcagttcccatgtccacatgtgttccatgtgtgtgtctccctccaactcccctgcccaccaggtctctcactctcccccagtccccagcccccacatctggcctctgtgcagacatggcttggaggacctgctgcccctccttcttcttccctgactccattctcatccttccctgactgctcaggtggaataaagtgtcaccccctgggcgtcagccaagggagaattctcctgggttgttctcacgttcgcccttccagcctctgcggtgtgtctgtctccccctggtgggcaaggagaggaccaggcagcggcacccggagggtcggcagtctctctaggtccaggggagagcccgggcactgctcctggttctagaccccaacggaagtcctctaattccaggtccagccttggaaggcaggagcctttaggggcgggtcacctttgccaaagcacagtcttcaaaatgtcaaaagcgtgattctcatacaaattgctactgagcatgtatcaaagttttctataacttattgatgagggaaccaatgggatgacaaagctgattcaaagaagacgaagagaaagtgatacatgtgcgagtgtgtgagtgcgtgcgtatatggaaaggggttgaggggagggagggagaggcaagggattgtgtggaaaatactggaataagatggccaaattagatataaagctagttaatgtccataggacaattttatcatctttagggctaatttctccaccaaacagaaattatttacttctcctgacaaatatcatttgtttccaagtcatatgaatttgggggcggggagtataaattcacagggtacaagtgaaagtatacaatgtgtggtgatccaatccagatatttagggtgtccatcacacaggtacaatacattttggctaagtatagtcaccccactctgctatcaaacatcaagtttattccttctatcttgctatttgtaccctataacccacttctcttctccctgccccccaactcacccttcccagtctttattatctgtctttccatgctctacctccaggtcatcaaagtttttatttattttttttatttttttttttttgagacgaagtctcactcttgtcccccaggctggagtgcaatggcgtgatctcagctcactgcaacctccgcctcccgggttcaagtgattctcctgcctcagcctcccgagtagctgggattacaggcgcctgccaccacgcccggctaatttttatatcaggtcatcaaaatttttagctcccactgacaaatatcatttgtatcttatcagttttctacaaattagcacttaactttatagtctgtgctccaatcaatcaatagtaaatgcgagtcactttcccctagagacatacactccagtgaagcattgtccgatattaatataatgcaagcaagccacatatgtatgtaaatatgcttttttcttttcttttttctttttttcttttctttttttttttttttttgagacagggtctcactctgtcacccaggctggagtgtagtggctcaaccttggctcactgcaacctccacctcccccgttcaagcaattctcgtgcctcagccacctgagtagctgggactacaggcatgcaccacctcacccagctaatttctatatttttaatagagatggagtttcgcagcattgggcaggctagtctcaaactcctggcctcaagcgatccacccacctcagcctcccaaaatgctgggattacaggcacgagccactgagcaaggcctcaagtcacatatgtaatgttaaattttccagtagccacaagaaactgatacaactaattatcataatgcattttatttaacccaatatatctaaaagatgagcattcccacatgaaatcaacataaaagattactgatgaattattttatattctttttttctaagtcttggaaatctgatgtgtgttttacacttacagcacatctcaagttcggactagccacactgcaagggttcatgccgcgtggggctggtggctatagtaatgggtagcgcagctccagtgcggtagttctcaaacttcagggtgaaccagcatcacctggagggcgtatgaatgcagagatgtgattctgactcagcaggtctgaggggaggcctgagattctacacttgtagcaaggtctcaggtgacgctgacgctgctggtcttagggggtggtgcaggctctctgactgggagaagcctcgtggactaccagctggaagggagtgaggtttcagccacaccatggatggtttcgactatgtgctagctctgaggacaggcccaaagggaagggagaaggggactgaccctcagcccccactgcaggccatggtcttgtgcagctgcttttactcacccacactctgcaggtaatgctagccaggctcaaacactgaggtgtccccatagacagaggtgctggcaggtccctagggctctcagaaaggggtggtccttgaaacctagagtggccagaaaatggtggctgtacagggcgtgagaattggtgtggacccaaaggacaaatgaaacctgtactgtaaagggacagtggcaagacctgctgagcaaaggcttggggaagggccagtgagggagcaggaaaccacagccttggggagggcagaagtaaaggatgtcccagaggcaggactagaaggtgtcacggcagccgtcaatcgctactctcccttcatgggtgtggaaggatttacctaccccgggtcatgcagagagtccaggcctggccagagcccctatcttggccccttcccaaggacccttcctcttgatcctgtaggtttgagtggagtggggtgcagtgggcacatgtgtcatcttttggtgcagtcctatgcttgtcgcatcttcagtggtatccaaaggtgagccttcaatccctttaggacagagaccatgccccatcctggtgtttttccctccatctagcacctgccaaaggaccgagcacacgagtacttaatttaaatgagctggtctgcctgtgtgtgtgagtagggagtctatactctgtcacatgtgaatgtggggcatggatgaggaacatgtcgcacatgtgggtgtagtgtgtttacaccatggggtgtcataaggggtgtagggagtgattagtaactaataagagagaaatggagtgcgcccactgtgcaggtgtacctctcaggagcactgaaggtgtctgcaccttggggtgacccatagggatatatatggcatctacacattggtgactactgtttgggggcataacagctgtctgcactgcagggtatcctgcaggggtaaatggattgtctacactgtaggggtgcaccatttgggaaatatagggggtgcccactgtgggggaacatgacaagtgctgagaatgtagacagaggcaggaccccagggagaggtatctctaggaaggtgactgccaccagctcccaaggaggggctgcctgctggggacacctcagttccagggctggtgcttactcctcccagcacttggtgacctcctttttggggactgggctttcaggacctgtaacaaattttcctctgaacagaaatttaatgtttgcagactttggaggcaactctggtgaattaaatgaacattcaaatttggggtatataagtagtacatgagtaactataccgtggttaaagttccaccccaggtttgggactcttgtatttgctttagtaaatagtatggtaaaaatatctcccaattgggtggaggtaaaatgaggaagctgactgactggagaaactcatacagtggcccaggaggctgttccacatatcaggacctactgcagacgttagccctgcactctacagtttgtaaagggtatcttcccagatgctcacagagtgctataaggcataaggcagacactgatcatattccgagtttaccaagagttaaacagggctgggtgcagtggctcatgcctgtaatcccaacactttgggaggccgaggtgggtgaatcacctgaggtcaggaatcgagaccagcctggccaacatggcaaaacaccgtctctactaaaactacaaaaagtagccaggcgtggtggcaggcccctgtgatccccctgtaatcccctgtaactcgggaagccaagggctgaggcagggacaattgcttgaacccaggaggtggaggttgcagtgagacatggcgagcctgggcaacagagcaagactctgtctcaaaacaaaaaacaaaacaaacaaaaaaaaaaaaacaggaaaaaaaagagtacaacagccagaatgttgtccatggctaccttactggtaggtgacaggaccaaggacccaccctcccagccaactgccaggaaggagaggaggacaaagtgctcatgtgtttgtctaaaaagcaacctcatcagcgcatatgtgtttttttcccaataactctatgtaaaaaagaagacattcacggtgtctctgtaccacatgtctgacagatacaccatgtgtatatggtgggtatgtgctctgtatgattaagcttttcctatgtgtataatggatataaaatgtgtgggaggaggatatgccatgtgggaggtgaatttgctgggggcatctgctatatgggatggctttacagtatttgcaataactatattttgggtaatcatttacaacataaaatgcgtattaatgtatttgttctgtgtatttcctatttctctgtgcatatactgtgtagggtgggcatacaccgtgcatgatgggtacaggctctgtgtctgcttagtatgccatatgtgtgggatgagtgcaggctatatgtggagtacatgttgtttatgcttgtgtgaaggttataccccgagtgtgtgtgatggctgtattttgtgagtaatagtatccaaggcataaacagtgtctacaaagaatgtgctgtgtctgaggagtgtacatggtgtgggtgatgggtatactctggggagggatgtgttgtataacagatgtgctatatgggtgatgagcatatactgtgacgtatacacagtgtgtgataacattacatggggtatgtgtgcgtacacgccacatacggagcatatattgtatgtgtgatgggtatacagtgcgttgggtataatgagtaataagtataggtagtgtatataatggacttactcttcatggtgaatatatactgtgtgggagtgctaagtatacactttgtggcataaataagccctgtgtgatcagcacacggtgtgtatggttgtatagcgaagttgtcattgtgatgggtctgtctggtgtgtatcaggcaccctggtatatggaggccatgatgggaatatgggatgtgtgcctgagtgggagcaggcagaggggactcatcctgtggggagggggcatggcagggagcagttggatcttcatctgtttccagaacccccagacccttgagcccaccgaccacactgtttcaggttcttcctcaagttcttcctcaaatgcaaccagaactgcctgaagaatgcggggaatcccagagacatgcgccgcttccaggtgggtctggagagagggtttccccttgcaaccccaccctttcctgatggaggggaggggagggggaagggaaggctgtgaccctgccaccctgggaaaggcctccaaggcagatctctgcccagccctgtgcctccccagcctggttggtgcctgctgggggtggggcagctccttctcaacttgtgctggctgccaagggaggcttcattagagtcccacttaagaagatgctaattgtgacatttttacatgattaacgacccaggcaatttgcatagcgtgaagcggagagcagctgcccttagcacatccccaagctgcacacccctctcagtgcagggcgggggaagaaggcagccccagttttctccccagaatagggcaggggctcctgctgctgagttctccggctgatgctgcccacctccacttgcctaagaccccattcctggcttggaggtccgtggatacaacccagcattctgtgtatgcaaaaacagtagccattctttgcctaaggagccagttttttcaggggtctttatttttgtagcgcctggggagtcagttcatctgggggtatcacctgatccagctggcccccttccaccagctcagacactgcaggattgaagccctcctcctcccaccagtgaccctaaattccagcatccaaccaccagcctcaaggtgctggttccccaccacattcccctcccgggagcccccgagggccccagccaggctggcctcggctctccccgcaggtggtggtgtccacgacggtgagcgtggacggacacgtgctggccgtgtccgacaacatgtttgtgcacaacaactccaagcatggccgcagggcgcgccgcctggacccctccgaaggtcaggacccccggcccagccccggccgccgcgggcccagccagccccccaggccccacctcagcgcggtcccctgacctgggtcctctcctgcctcccagctgccaccccctgcatcaaggccatcagccccggggagggctggaccacgggcggcgccaccgtcattgtcatcggcgacaacttcttcgacgggttgcaggtcgtgttcggaaacgtgctcgtgtggagcgaggtgggccaaccccgccagtctccctctgggcctaggggctgggccctcccctcgccggtgcgggacctgcaggcctcccctctcccctcgcagctcatcacgccccacgccatccgggtgcagacgcccccgcggcacatccccggggtggtggaggtgaccctctcctacaagtccaagcagttttgcaagggatgccccggccgctttgtctacacaggtaaggagtcgggcgggggagtggaggtctaaggtgcgcggagggagccccaccctgcgcactggtctccgttcttggtgataggagttagccgagctctacgctgtggccacgacccctagacggccccgggcccctttaaccacctatgcctgtgatcgctccgctcgcaggaccgtctttccctggctctgtgtgtttccctccctggcctctggctccttagtcccttccccggggcaaagtcccccccacaaccaacattcttactccctcagccatctcacctcctgaacattgtgtctcccgcccgcactctccagggtttagagcctctccaaagggatgtttattccaaagatgccaatggggtcgctgctccccgaatcttctctgggtctcttggttcccccacgctaccccaggcctcactctgcatgtacacgcacacacacgtgcgtacatacacaccccttgcacgacgccagggcgagcagtgaacacacgtggagaggcagtgtagaaccccccagcctggctctatttggccgctggccgagtcttctccatttccatcctcccgccccgccccagctgagccacccacttctcctctccaccccaccgcagtccccaccatcgcgcagccccccgcaccgatgctcatcgagcccttcgagggacactcggtagtgaccctacttagcctccccggagctccagtctaacgcggaaaggctgagcagagaaccgcatggggtgggtggggtcacgcggtcaaggggctgacaatcaaggaaaacctttggtagggagtgcctgctgagcccggctcaaccgaaacccgagggctgagtggggaggttgacctggggaaggaagggtggttgcagaaggaatgataaggaccgatccccagaagtgagtgctttctctttgccgggaaactaaaggaaatccactaagtcaggatcagaggtgaaggtagggctctgagactggtggattaggtcggggccaggctatctgaaaagggcggtgcggggatcaggaaaaggggaaggaggaggagaagggcgtggggagctgggtcagacgcgcatacacacacacaccccttgcacaacgccagggtaagcagtgaacacaacacacgtggagatgcaatgtagaatctggccgctggccggatcttctctacttccatcctcccgccccagcccaagccacccacttctccagttgcttccctggggtgcatgcaaacctctagccttcagatgctgcagagagtccacttgagccgtgataaatggagattgttaagttttttcttttttataataaactcctgatttgaccagatgaaaagagaaaactctccatcgagtcctgcccttaggactataactcatatgtgtatacggtttcccttttttctaatcacaaatgggtgcatgtgtgttcataccaagcgcctagggccgaggacagaggctggctcagtaaatatttgttgagtaaacaaacgaaagaactgaaacttccctgaatctcgctgccgggggtgcctggagttttccgggggacttgggctgggcctggtggagggggctgcagcgaggctctcggactgggcgctggcctgcttttggcgccctgcgtctcaccctgggagtggggggctgcgggggagacgtcctccaaacgccgcccccttccccagctctgaacgagcccaccattgactacggattccagaggctacagaaagtcattcccagacaccccggagaccccgagaggctgcccaaggtactcagaggggcggggcggggcggggctgagggtgtcctgtgggcaagggggtgaggaggggctcccgagggccccttggtcgcccccaggggctgcccctccgtcccgctgtctctccccctgtccccaggaagtgctgctgaagcgggcggccgacttggcagaagccctgtacggagtgcccggcagtaaccaggtatggcgcctccgccctcccagcgccgccgggaccggggccccccagcacgcggcgcccgcggctgccccggccgtgccccgctcttgtcttcgcaggagctgctcctgaagcgcgcggcggacgtggccgaggctctgtacagcaccccccgcgcacccgggccgctcgcacccctggccccgagccacccacaccccgccgtcgtgggcatcaacgccttcagcagcccgctggccatcgccgtcggggacgccaccccggggcccgagccgggtgcgtgggccgcgcctccccgccgtcctcgggcgccgccaccgcccctccccggccggcaccgccccctgacggccgcgctctctctcgcaggctacgcgcgcagctgcagcagcgcgtccccccgcgggttcgcgcccagccccggctcgcagcagagcggctacggcggcggcctcggagctggcctgggcggctacggcgcgccgggcgtggccggcctcggcgtgcctgggtcccccagcttcctcaatggctccaccgccacctcgcccttcgccagtgagtgtcccccgcccgcgagggaaggtctggggccggggagcggaacgggactcagccccgcccccgcccatcccggagaggttggggcgccggcgccgtgagagtcgaccctggctcagccctcggggtcaggcccaccgtccccgcctgggacctcccctgccgcagaacctcaaccccacccctaggctgcacatcccggggtcctggggccagagtactccgtgcacttttagccttctttgccggtccgttatgcacatcgcttctaggcctccggtccccctgaagtgggctctaatgggtggcgggcgtccatctgaaacctgggacaccgcccccttcccatctcgcgcccggacttggggaggaggctggcgccgcctgccggaagcctaaggaaactcagggctcgagggaagccggcttccagccgccccccagctcccaggactccagaggccaggtgggcgtggggaggatgtggtccccgcgatgtcgtccggcagagcgagcgagttctgtgtgatcagacagaatttgagtttcagtgtccaaatcaggagctgccgggcattcagcaagttacttatttgaacttgtttcctcgcagtcaaatagggtcaattccaccccctgcttaaggttgatctcggatctgaatgtgccactgtgcctaaagggccagtgtgtgatttcggagtcccagccctgactgtgggcgctgaccacatcccatctggcttcttagagtggggagctcagagctgggtggacaggcaatgtctgcatgtcatgagtgagtgaccttccgaacggctttgatgccttgtcattttacactgccctcaagactcttccatcatcaagttccagatcagcatgttcacagctctttttagcttagctattcagcaggcatttataaagcgcccactgtatgcaaagcccagggcttgggggatccccccactcctgtcacctgcaagaagcctccctatcaatcataagagagattgtccctgaagtcccaggcgactctgccgagctggagaggtggtgaaggctgtcccagaaggaactggtcatggctttgcccgtggtgccctctcctctccctgtcccatatttgccattgccgagactgcactgtctgtccaccagcctggctttccttgcagggcgtgtgtcctgcctgctttctggctgaaggcttgagcctggccctgtcctctggcctgggctcaacttctgggacccaaggccccataagccagagtccacataggccatggccttctggtgtccctcccaaggcccctgcctctcctggctctttgctcaggccaggattgactgctcctccttcccttcagttctggggcagtaccctcacagcctctctgtgggcacccccttgggccaacactggtgggggtatggaacatcacatacactgtggtcaacagtagaggaacactctgccccagtgtgcagaacccagcccagctggggtcttctgattcagcaagaagatcaagaattctagagctgcttaaacccagcatcagctggagacacactggacttgagggagggttggtcccatttcatgatattgtcttgaccgaggcttacccaggtacccttccactccccacgttcagggtgctttgtggcccgactccaaggggtgtcattctcattgagtttgcgagaacattcctggagtgacatcagaactgccccagccagaggctcaggggctgtttgcttgggtctctctttgtttttctgcttcagccaccagcaaccctggaatgaatcacaactccccacactacctacccaaggtacaaaatgtggccgtgagccctgggcattgagagctatagtacattttctggcattggtctcaagcccttcatcgggctctggggcctctccagctggcagtaactgttgtcttaaaggagatgaggctgagggcatttggaagaggggcagctgttgaaggcattcttgtatcaagggaggtaggagggccctctgatgccaaaggcagccttctcaggctattgctttcttccaggaagccccacccaccccactgcctgctgcctggacaatactcagatcacagccttaccagtctttacaggagagaggcagggaattgggttcagatgaggatgtagaaaggtgggatccagcgatgccccaggcctgagcccccaggagaggaggctgcaggaagagggggcaggcaaagtctgtgtgcaggaggctcccttgccattcccaggagggcaagccgcagcctgggtggctagggagtttgagagcaggaagatctgaggatgtacatccctgcaatttgctttaaaattgaccagctggaagtgggagattcaggagaccacccccccccacagggcccaggctggagatgacaaggacctgcattaagctgtaaggaaacaaagtaccccagggtgcagggggaagtgggagagggacagaggagcatagggaacattggcaaggagagcatatttgaggaggaagttggagtgctgtttgtgatgctgggcagagaggcttataacaggagcctgtgcgttcccccaaacttcatccctaactacttgttccagctcttctgtgactcctgaactatgactctagccttggcaccccaagcaaggctcataaatgtttcctagcatctcagaatcccaggggttttcagcagaaatcctgaagtagtccagctgttgctcatctcatttttggggggtacctcccactgtttgttttttttgaatgttctggttttgcttttgtctttacctggtctggccctgtcatccccagccccgagaaaaggtctccagaaccgctgagaggtcagggctggcccaggaccctcacagctcccagtgagatctgagcctggtacctgtgtcagcagcccatgtggggccccagccaagctgctcactctggtgctgtctccctgttgtgtctcccaccaccttccctgctgcgcctgcccctccccgccccgccccggagtcatgccctctagccccccgctggcggctgcctcctccatgtccctcccggccgctgcccccaccaccagcgtgttctccttctcgcctgtcaacatgatctccgccgtcaaacagaggagcgccttcgcccccgtgctgcgccccccaagctccccaccccaggcctgccccagagcccacggagaggggcttccaggtgagtgatccaccctgcctcactgtggcaggaaggaagggcccttgtggagcagctgggctacaggggcctgctctgtccacatctcaccagtgcctcatgctggctaacctgctcttcttggaggacggagagcagggagctctgctggggtccagggaggtccctctggccccctctgccctggcctcccagcctgggatggtcaccattctggatgctctcagttgaccacttggccaaggggaagagactcaaatcacagttgatgaggtctagaaactaccccaacactccatccccatccagctgagcccagagcaaagaccctcagagctggtgggctgcacgcctgtacctgtgcctccctgtgtccaccagagggtagcacacaccactgtgagggactgggtcgctgaccatggaaggggactgaccttagaagaggcttagcccagcttccctccccgcattttacagattaggacttgagaccaagtcatcttcccacatcccattcatgaaatggctgttctctcactttacccatgtgcagcagaacctttgaaccagcagagcctttcctatccacgtggtgattggaaactcactgggaggacagaggaagggactggctgtggaaaaggaggaggcaacaggatgtgggtggggcagaacaggtccttgttgatggggatggtgggggccagggccagtgtcttccctaagaggcttacaggtgttttcttttctggctaagggatgcttccacgggatcccctaggactcaatctggcatgcagcaggtgtttaataaatagtcaaattattgaatgaatatatgagtcagaagggcaccgttcacacccacacagaaggctgcagtgcagtttgtggggcactgatctggaagaggttgggttagagcacgtcctattgagtattccccaagacaataatgggtcagagcaacagagcattaggaaagaatcagtgttgaaattacgtaagtggctactgaagaatttgtcagagcctttcatgtgccagggtacgttgtgaaccttctaggaaacaggagatgcaaatttatttgagcacaaaaatgtatttttctaacagcatcttgagattagttcctggggaatgaccttgagatgcaggaagagacaccctcatggtttcctcagcctgatgtaggggctgatcaggctgggatgcctatcacaagagcaaggccagtggcttgggccccagaaccatctccaaatccaaggcaggggcaggtggggcagcctccaggctgagacaggggagggggctgtggaaaatgctctatggagcctctgtgctccagggtccctgtatgagagtccggggacgctggaaagaggatgggaaagctcagggcctgggagaacaactgaggatgatacatgtccgcagcgtcccacagaatcggctaccctgagggcagtcagagcaactaggtgcagcccagaagcttctgagaactgtgctgatgccctgccctgcacacagaatggggtcccttcccaccagggaaccccctctgcacagttcaggcaggcctgtgatggtgactcaaacaataacagacttttgtgccagggagggcgggagggcaagggggctgcttggtgacccatccagagggtagcccatattcagggaaggacttgcccaagcaaggtttgaagaaggcaggggttcttagtgggggaggaatgccctagatagagtagaccttaggctgaaggtatgtgggtgggaaggcagagatttggagcccacgttcaaaacattaagaacataacatggccagatgcagtggctcacacgtgtaatcctagcactttggcaggccgaggtgggcagatcgcttgagatcaggagttcaagaccagtctgggcaagatggcaaaacctcgtctctaaaaaaaatagaaaaatgagctgggtgtggtggcgcatgcctgtagtcccagctactcgggaggctgaggtgggaggatcacttgagactgggaggtcaaggctgcagtaagctgagattgcaccattgcactccagtctgtctagcctggacaagagagcaagactctgtctcagtaaataagtaaataaataaataacatacaaatatatgccaaagatttatttaactcatcagtgagggagctaacaggatgacagagcggcttaaaggagacagtgagagactgaagccagtaaaacaaggagggctggaataagattgctggctgcaaactgcttctacagagcaataaacttgtaaccttcctctggggactgtcttttctaccaatgagaagtcatcagccatttctcagcctcctccaagtgaacatccatccaaccgagcaaagcctgggccctagccagtagcgtgaagtcaaaagacgtcacatgccccagaataagatgactcttaagatgggcttatttgataatgctctacggtggctttgaaaggatacacagtcactttttttgccttatttccaagttttggataatttttcttaggtgtgtctggagcttagaatgtgaaggatggagagaacagagggtcaccaatttctcctgccagcaaagagaaccatgggagggggtcaggtaggggtggggagtggtggagtgacaaacttcgtaggtgtgggaggcacagaggatgctgttgtgggtatgtcagtcagtattcctggaggctggcctctttccttttctgccctggtacatggccatgcgcttgaggaagcagatgggccctctgaaggaggccaccctgggagaaggagcctggggtcgtctctctcttgagggaggtagggagcaagggcgtgggctgcatcccctgagcatctgagaggcacccctcaccccgatctgcagtgctgccatgggccagggctagggatggctgactgccttcagaaagtgctatatcccctgcctgctgtctccagcccagagagtgacaggcaggtggcttcccaggtggcacatggcttatggctcctttttccttgactactgcagaccagtcttttgaggattctgacaagtttcactctccagcccgggggcttcagggcctggcatactcctaattacggtaggtctctggctgggtctggcctcccccgccccacctggccctgagatgtgcttgctctctaaaggccttcatcctgtgctcaagcctccccgctagcagccccacagggatggggagctggggtccaagtcttcctccccggggcccatctagacagctttctgaggtacttggcccaccccagtaacccaagctgaccaggtagagagaagtggcttcctgtcccctggcagccagccttcctccccgaccttcttctctccctctctcgccccaccaggtctgcagctgttcccatggagcccggactggaggtccctctgggattcacagccacaccccggatggtggcacagacagatgcagggccagggccatgggcggacctcaacccgtgagctgaacggggagaggccttcaccccatgctcaagcctccccgctagcagccccacaggcttctctcgcctccctgtcttggggtagtcagaagccccagcactgtgcagatgctcttggcaggacagcatcgcagggaggtgctgggattctgggcctcactgtctgggtcttggttcctctgaaagagatggatcttgtgcagaccagggttgttgagtgaggggagcgtgggatggggaccgtgggaaagaggacagctcagggagaagtgacctggaaaggtcctgtttgcatctgacccatctcaactggcccagcatcccaacttctctgcagcgaaagggtggcgccccgcagcctcgggaggcctgcccaggctcccgtggagcttccaacagctgcttggccccgcagctgcccccacttcctttgagacctgcactctcatgcttgccgcatcatgcctccctgtgggggctttgggcatggaggaggcagaagagggggtgccaggcctcctgtatttggggtcttcccccagtggatgtctcatggactctggccccacacactcacaatgactctggctggccccacgcagcgggcccagccgccccccaggtggcctcacattctgctctgctaagtttggagaaaacagaacaataaaccagatgcaggtggtgcccgcccggcctctcacctgcctccttggtgtgagtttgcttttcttagcagttcagcagctctaggggaggctccaaaccctgcccccggggagccctcttgcgcctcgggctttttaagcagccccagagttcgactaaagcaagtattccctgccccacgtctgttcttggggactgttgggggagggggagcaggctagcaggcctgagctctgcctgggagcataatagggccactgaggactcagctgcccagctctccagtcaagatcaaagtggtggttgtcaggacattgctgagaaccaggacagaccaaaccaaatatgacccagatgtccagaggctcagaaattagatccaatccaacacagaggctgcagggccacgcctgggctgggtggggcagcttgtggctcccagggctgtttatctgagctgcaccccaatcccatcccacggcccccacccccaggcctaggcaccttacggctcacctgcctcagagtttgggtggaaggagggtaaggaggcaagattcctatgcccattcgctccaccacccacccctctaggatgagtcccagttgtccccctgagatatgtcccctggatgatggtctggctgtctgaccctgaaagccacttttttgacccatgatccggtgagccccgtgtctagccccaggcctcaggctttcctctttctcttcctggccctgctcctgggctctggcctctggacaccctggccctttcaacccatgcgtccatgacctgcaaatgcagccttctggacaggcacacttgccagggcacatgggctggtcctgtctttcagaggcctctacttctttctctggtgttcttggctagcacctgggattcatctctcctggacacagggcaagaggtcatgctgccttctggtcatcctgtcccattctcagtgcttgcgtggcctcccactcagagcaccaaagcctgcctgcccacgccctgctttatttggctctgagcagctcccattgcccagggccctcccagctgaggccctgcaaagttctaatctgcactggacacaggtgataactggatagtggtcacactctggttcccaggatgggtcaggtgccatggtggatataaatgagacatgatgtctgtccctaacaatcccacaatgctgctcaagccaccatttgagtccacactgtccttttccttcatccacagcagacatagctaaccagttaccatgtttgcaatggcctggattgtgcctccctaaaatccatatgttgaagcattaacctcccatgtgactgtattgaggatggagcctttaaggaggtgattaaggttggacgaggtcatcagagtagagtcttgatccaatagaagttgtgctcttataagaagaggaagagacaccagagtgcactctctctgtcaggtaaggacacagagaaggcagccgtctgcaaaccaggaagagagccctcaccaggaatcaaatcaactggcaccttggcctgtgacttgcggcctctaggactgtaagaaagcaaaattctgtggtttaagccacccagtccatggtattttgttatggtagcccaagcaaactaatacaacatttttttttccatctgtgagctgagggctgcctccaggaaattaaccctttagtgtttctggcctgcccctccccactacatggaggaaaaatcaccagttaggctttgttgtagaatattgtcagcaaattctgggacagtaatccgagatgatgtggacagggcaccaagagcctctgctatgccacaaaaccaccgtgatgacagaatcattttcaacgaagctactgatcagagttgttatttgagatgaaaactattagccaagtcaatatcacaccaggccttcttgtagtctataatcagtgaggagcaagtcaaactgctgaccatgagtcagtacaagaccggcccaccagcaaaccggggcctgtgtctgggtctgtggcaccttctgcaaagcaactggggcatcttctgggccttgcaaatggaacacctttcagacttcccacatcctgtagtcaaagaggttccattctcaatagcacctgaggatgacattaagccaagtggcagaaacttggcctggagcttacataaatctgtagtggagacccactacccaataaatgctatcaaatgactaggtcttagtttagctcagtcctgaggccttgcacacaagtagaattgattggctcattggcattcatccctacagagcctggatatcccaggcaagtgatgaaaatcctaaccttagctccaattcctatgtgaatattggtcagggtgggatcattcgcctggaatggaagttgtcttcatttcagttcccccagcagcagaccttgggacaggaggtgggtccagatggtttatttgggcaacaattgcagaacgcaccggtcaggggagcagggaggggaggcagcagaaagaaggaagcccaatacagagtgctactgagcacgctactactgtgggtttttctgaagcttaatcccagctgggagctctgggaggctataaaatgcatacctcaggaatttcgcacctgaggagtgaggcagctggggtacttatacactaattctcatcagtcagtggttagggcttctggatggagtgggagggcagcactagctttctggcacctccagtcttccccacaggtggtaaaacagtcccagtagctagagaaaacactcagacaaagagaagcaggagctgacagttggaatcagacaggagtacacagaggaggtacagatgaggggatgtgggtggggcacatacctggaggtggtccctggcagtcatccaggggaagatggttttttctacttaaagtaagtttggagtaggcatggatttttcctatatctgcagatcccacctctacctggcaccaggtgacaaaaactgcccaggctatttcttgttgaagtaccaagatgccaggtgacaaaggggtccctctcagcgtcagcccacccccaggcttctaatgggggtgggaatagaaagggcaccagacgcttggctgctcaccgttcagagagagtgcatctccagtaagtcctctgctttcctcttacaaatttttcccagcagaaccaggctgctacactttgcatctgaccctggggaccagagagcttctggggctacattttggctcagacaggacccgctatagacaggtctcactggctcaagagaagccaggcagcagctttgaccagccctctgctgactattctgcaaaatagcattctccctgccccctccccatattggcagagccttttaacttcttccaaaaagaaaaatcccctagagaaatggaaactgctgcgcagtgtggaaaggatggtcttttaaaaatatgacgttagagcccaggcagctatttgggaggctgaggcaggaggattgcttgagcccaggggtttgaggccagcctgggcaacaagtgagacccccatctctcaaaaaagaaaatggtgttgggttaattggatagccatatgcaaaaattacatttggcctctacctcacaccatacacaaaaatcaatttcaggtggattgtggatggaactgtgaaacctaaagcaataaatctttacgcccctgaagatagactagaagctttttgccagagtgatatccaaggtctgtttttctacccatgtgaccaactttggaatgaagcaagcactggacatatttgaaatggttcaaatggaccctaaagtctcttttcacttctctaggagaacttttccaaataggaaaaagttcacagttcacagtgtctttctacccgaggagagactaggtcttcatggttagtgatttcccaaagctcttaactgcttatcctgggccagccgccttccccaccctgtccacagctccctcctctgctaccacctcagtggtagtaacaacactcactgggtgatggaagggaatgggtcacctccttggagccaccagcctagaagttggccgttcacaagaagaccttcactgtgagagtcctgatgggggcgaggcatcgaccacaaatatggacctagcatcctcttatcacttctcccatgctccccttctcttcactcttactaagaggtgtgtgtgtgtgtgtgtgtgtgtgtgtgtcagggtttcactctgtcacccaggctggagtgcaatggcacaatcatagctcactcctgggttcaagcaaccctcctgcctcagccacttgagtagttgggactacaggtaccacacccagctaattttttagggggtaagagatggaggtctcactatattgcccagactggtctcaaactcctgggttcaagtgatcctcctgcctcagactcccacagtgctggtattacaggcgtaagccaccacgcctgccttcattatgagattttctttttcttttcttttctttttttttttttttttttttgagacagggtcttgctctgtcacctaggctggagcgcagtggcacaatcacagctcactgcagcctcagcctcctggctcaagtgatcctcccgcttcagcccccagagtagctgggaccacagtcacgtaccaccacgctaggctaatttttgggtgtgtgttttgtagagacaagtttctccatgttgcccaggttggtctcaaactcctgggctcaaataatccacctgcctcagcctcccaaagtgctgggattatagttgtgagccacacacccggccattagatttttgataaccagaatgtcttaattgaatgtagtctaagttattaatcttttctttatgattagcgtttctcgtatgcttttaatttatgtattattttgcttcacgcttcacctccccttttgtgtgcttttaaacaaatcttctgccaggtgcggtggctcacacctgtaatcctagcactctgggaggccaaggtgggcggatcacctgaggtcaggagttcaagaccagcctggccaacataatgaaaccccgtctaccccgtctctgctaaaaatacaaaaattagtcgggcatggtggcgcatgcccgtagtcccagctactcaggaggctgaggcaagagaatcacttgaacccaggaggcagaggttgcagtaagctgagatcacgccatagcctgggcaacagaatgagaccccatctcaaaaaaattaattgattaattaaatgaaattaaaataaaataaattttaaaatcttcacttacaccaaagtcaagaagatattttagaatttttcttgtttgtggcttttatatttaggtccacaatccaactaaaatttatttttgtgtacagtgtaagctagagatcaaatttaattttttttcatatggttagccaattggcccagcaccatttactgaaatgagtatattttcccccacttcattgaagtgaaatctttgttataaatcaaatgttcatatatgtatgtgtctgtcctggattctctattctgatccatttgtctttttatctagccttatacccgtgccacattatcttaataactttagatttatagtatgttttgctatgtagtatgtatggcaagtcatccaatttaattcttcctttcaaatttttttatttttatttttatttttttatagaaatagggcctcactatgttacccaggctggtcttgaacttctggcctgaagtgatcctcctgccttagcctcccaaagtgctcgtattacaggcttgaaccactacacccggcctgttcaacttagttcttcacaattatgttggctacatgtggtccttttcatttcaatacaaattttatactcagtttattaatttctattttttaaactggcaggcagattgcctgagctcaggagttcaagaccagcctgggcaacacagtgaaaccccatctctactaaaatgcaaaaaattagccaggcatggtggcatgcgcctgtagtcccagctactcaggaggctgaggcaggagaatttcttgaaccctagaggcagaggttgcagtgagccaagatcacaccactgcactatagcctgggcaacagagcaagactccatctcccaaaaaaaaacacaaaaaaacctgctggattttcattgggattacattaaatttacagactaattaatggagaattgatgtctttaaaatattgtgtgtttcaatctatgaatattgtatatccctccatttatttagatcttttaagacttctcttaataatgttttatagacttctgtatgaaagttttgcacctatttcatttatttctatttgattattttgtgatattataaatagtatcattttcttaattttatttgttgtgaatatatagaaacaatggatttttgtataattaccttgtatccagcaatcttgcttagccacttatccttagattatcttgaattttcttagctacatagttatgtcatctgcaaaaaaaggacagtttcatttcttcacttgcagtccttacttttttatttttacttatttttcttgcttaaatgcactggctgcaacctccaatacaatgttgaatagaagtagtgagagtggacatctttgttttgctcctgattctggagggcaaacttttaatattccatcattaagcatcgtatttggtttatagatatccttctattcctaattttctaaaaatgtttaaaaattataaatagatgccaaaatttgtgaaatatttttcttcatgtattaagtaatcaaattactttctccattatttcgttaatgtgctgaattatattaattacatgtctaattttaagccactgctttagctaattgtatgtttaattgtaaatggccatatattcttttttttttttttttgagtgcaatggcacgatctcagctcactgcaacctcccctccctggttcaagtgattctctcgcctcagcctcctaagtagctgggattacaggctcacaccaccatgcctggctaatttttgtatttttagtacagatgagctttcaccatgttggccaggctggtctggaacccctgacctcaagtgatctgctctccttggcctccgaaagtgctgggattacaggcatgagccaccatgcctggccttattctttatacagggtataccaattattaacacagagcccattttctctttctctctctgcactactctctaagaaggcactcactggccctcgcccttacccgcttctcctggaggagctaggctttctgcagaccacctcggtacctcacactgctacactggctttggctaccttctaggagcagtggagggaaaaacacaagaacaaacacaaattaatctctcactaagtcattctactttgactctaacccatcttttaccattctattctaaccattaagattcaaacccagctgggctccttagctctgggtcccctctgttggaaatccagaacagtcctcgtgagtcctctgttcaggagcccctgaccactcacttccaaaggtgaagatactcaaagcttccctccttgcctcaccttggcagggggtcacagagtggcagcctcaggagggtgggaggtcctgggtttgaagctgcagagactgccaagcagaatgggtaggagggtctcagagacccccactggagacagaacggaagagaattcatggctctaaagatgcaggagaggctgcctagcagggcaggaacagcaacaagacggttttatttgtatacattcctttttgagtattttattccttgagagagaaggcgccaagtgtttatgggggaaggaaagctggccgtccagtagcagatttgctgttccctggggctcagcatcccagcatcttcattctccaaagcctctcctgcccctcccctgccagcctgggagcgagcgctgccctgatgcaccctcatctggtggggtgtgaggaggaggctcgggctaggctgccgcagctccgggcagtcatcccatgagtccagttcctgaagggctgattcgtgtagggcagaaaaaccctctggcttggctcctgcccctgctgcctctctgggggttccacccatgtaggagcctgccccctccacgcacccacccgctcacccagaactgagttcacctttaggtgggtgggggaggctccagccactctcaggctggcactgcctcaagcccagccagcgctggcttctgtggtgaaagctggtttgtctgggctgctccccagggccttcctggagctgggcctggaggctgaccttgccaagacaaactgtggctgccggtggaatgtggtcgagtggctgagcaggcccaaacctggcaggtctgtccatggtgcccctgcaggttccacaacacagagccctacagagtcaggtggggccaggagcaggtaccgagagacttctgggcatctctctgtcccttgttgagtgaggacggggcagcatctcttttggtctcaactgaaagtgtaaaaggctatcatcaagtgtgaaggttgacagaattcctcaacccacttcctctgggaagcagctgtgcaggagaagacatggtggggagggggtgcggggaggagtgtgtgcctgtgtgggtgtgggcataaagcaggagctgccaggggaggagaaagagctctggcaagacctcttcttcccttaacacagcccggtgggatggggctacgttgctgttagagccagagtttaatttttttttttttgagacagggtcttgttctgttgcccaggttggagtacagtggcactgtctcagctcactgccgcctcgacctcctgagctcaagcaatcctacctcagcctcctgagtagctgggactacaggcatgtgccaccatacccgactaatttttctattttttgtagagacaggggtctcactatgttgcccaggatagtcttgaactcctgccctcaagcaatcctcctacctctgcctcccaaagtgctgagattacagatgtgagccactgtgtccagccagatccacaatttgttcagcccataccatcagcccattattttagcgggggttccctggacgcagagcctgaaatggggatttgtgtgcacatgaaagggctctctggacaaaaaggagagaagaaagcagaacagggtaggggaaagagctgggcaagtctctgcaggaggctagcacagtcccacgcggagcctaagcatgaagggcacctcagttggaccctgccatgacaaggagatgcctctaatatccctgagcctgtcagccactggttggaggctgccagaggagagtggagagtgaaacctcctgggcaaagcagctcccatttggccaaggacaatacttgggagaagggggcagctgtgagctgtcagcagccaacactcaccccagttggggatgagcacactggctggtaaggatctggtggaactctaagagcctccactgcacccctctacctagtaaatccgagaccaggagcgacgcccgtctttataccagccctacttcttgggtggcaaggactccccttctgtttcaagtagggcttatagggaatgtcctgggccattgacaaacaaagggcaggaatccactcagggagatcaggtgatgctcaacagagctgtgcagcagaggtggacacacacagcaagcacgcagttgactcaatcatagtcactgcttgggagggccataggtgctgtccacatcagctctgctggctcgggacacccatcattgccttggatgtctctaaaagctgactcgctcttctgcctgtcctcccacctaccccctacccaggctgaaccccatttcccttctcttctacctcccagatcagtgacgctgagccagtccctaaggtagggtgagggctggcagtcttgctgttgctctagtctctttccaagatatcgccttggcatctgctcctgcttccctgtggccttccattttcatactcaagagtctgtttccaggccaggtgcggtggctcatgcctataatcccatcactttgggaggccgaggcgggctgatcacttgaggtcaggagttggaaaccagcctggccaacatggtgaaaccccatctctactaaaaataaaaaactattagccgggcggggtggggcgtgcctgtaatcccacctacttgggaggctgaggcaggagaactgcttgaacccggtaggcggaggttgcagtgagtcgagatcacgccactgcactccagcctcggtgacagagcaagactctgtctccaaaacaaaacaaaacaaaacaaaacacaaacaaaaacaaaaaaaaggagtctgtttcccaaacaaaacaaaaactctgagtctgctctgtttctccctctgcaatgcccggcagcaacactaatttcccttaggcaatagggacactactgactaagtaggggaagctcacagaaattagaacaaagtggcgaagggaagtccaagggactcaatccagtgcccagagaggaaggacagcagtgtcctctgggagggtgagccccagaaagaggcaccccactggaaatatgacaggaggtggaggaagctgaagagaaaagaaaacgtgtgaaaagcacctcatgctccaaagacaaacaaaacaagaaaagtagagacttcccagaagatggaatgatgtaggtttgccatttcttctgctaagtctaatttaaaaccctggatggctcacgcctgtaatcccaacactttgggaggcccaagtaggaggatcacttgaagccaggagttcgagaccagccagtgcaacatagtgagaccacctgactctacaaaagaaaaattagccaggcgcagtagtgcgcacctgtagtcccagctactcgggactgaggctggaggatggcttgaggccaagagtttgaggttatagtagcaccactgcactccagcctgagcaacagcgagaccttgttgcttaaaaaaataaataaataaaaatgaaaaataaaaccctggacattatatataaaacaagcataaacagattctggggggagaaaagggttctgaatgggggagaaaaagaggcagatgatttagaggcctctgcaccccaggaaagacatggcagagaatcccctgggttttctttctgttccacatatcctagatttggaacttaagaaactggcaacacagcaatgccatggcatgccaaaaaataaaaaaaagctccaataaaaacctgctcctctagccaaaggaccaagtgaacagcaacctagtaaggctgaaaccgagacacaaaaaccactttacttcagccaagccccacagaataaactgagaccccacctacatccgcacagcaaaggcgcagtggggagcctaaattccaccctcccaaggctgcagtgaggttccccaacgaccatcaccagagcagtgccagtgaagaccgggcagagagttgagccatccatctgtgtcagccagcaaaggggcctcctccgtgctccacggtatcactagcaccaccaccacgctgggaaccacgtgaagaacctggatttccggcctgtactccccagtaaagaggcgcctctcccgcttcctgctgagatgtgtcacaggaagccttgtggagagtcaggattttcgccatggcccagagcaatttattagaccacctaccctgcctcttcgccctccagcggtggtgtcagtggagatcacaactggagtcagacttcccacctttgcccatcagtaaaaaggagcacctgccccctacaggtgtcaatataggtcattttttactcccacctggcagggaagacccgacctcacccctcccgaccctgccttgccctgccagacagataggtgtcagaaaaaagtcagctaaaacataaagtttatatttatctattcatatttttcaattttatttttaaagagacagggtcttgctctgtcatccaagctggagtgcagtggcatgatcacaactcgctgcagccttgaactcctgggctcaagcaatcctctccactcagcatcccaagtagctgggactacaggcatgcaccaccacgcctggctaaaacataaagtttaaataagatccagagtctggtaacacaatacaaaaaggtccaaatttcaggccgggcgcagtgactcatgcctgtaatcccagcactttgggaggccgaggcgggcggatcacctgaggttgggagttcgagaccagcctgaccaacatggagaaaccccgtctctaccaaaaatacaaaaatagctgggcgtggtgactcatgcctgtaatcccagctacttgggaggcagaggcagaagaatcacttgaacccaggaggtggaggttttggtgagccgagatggcgccattgcactccagcctgggcaacaagagcgaaactccatctcaaaaaaaaaagaaaaaaggccaagtttcaaccaaaaatcacttgtcatgccaggaaccaggaagatctcaaaccaaataaagaaaggccatctattggatgtaacaccaagatgctagaattaaccgatgaagatattaaagtagtcatgatcaagatacttcaacaaacaactaagaatatgcttaaaataaatgaaaaaattgcctcagcaaagaaatagaaagtctctgaaaaagtagatgataacaagagccaaatggaaacactgaaactgacaaaacagaatcactaaaattttaaaattcagtggatgggctcaacaacaaaatggaaggtacaaaggaaaaaatccataaactcaatgacagaataatagaaatggccaaatctgtaaagagagaagagaaactgaaaaaaaaaaaaagataaagagaacctctagagactgtggagctataacgaaagagctaatattagtgtcactggagttccggaaggagagcagggctgggtgtggtggctcatgcctgtaatcccagcactttgggaaactgaggcaggaggattgtgtgagctcaggagtttgagaccagcctgggcaacatggtgaaaccttgcctctacaaaaaatacaaaaattagccacatgtggtggcatacatcttagtcccagctactcaggaggctaaggtgggaggatggtttgagtgtgggaggcagaggttgcagtgagctgagattgcactgttgtactccagcctgggcaatagaatgagaccctatctcaaaaaaaggaaaagaaaaagaaagaaaagaagaaaaatactggaagaaatagtggctgaaaatttgccacttatcactcatgtcataagggccttcagccactgaaacactgttttcattttttttgggggggggtttgttctgttttgtttttttgtttttgttttgagacagagtctcgctctatcaccaggctggagtgcagtggtgcgatctcagctcaccacaacctctgcctcccaggttcaagcaattctcctgctcagcctcccgagtagctgggactataggcacgtgccaccacgcccagctaatttttgtatttttagtagagacggggtttcaccgtgttggccaggatggtctcgagctttgacctcatgatctgctcacctcggcctcccaaagtgctgggattacaggcctgagccaccctgcctggcctctgtttttttttttttttttttaagacacattctcactctgtctcccaggccggagtgtagtggcacgacaataacttactataaccttgaacccttgggctcaaacaaccctcctgctcagcctcctgagtagctgggaccacaggcacgtgccatcacgcccagctaattttttaattttttgtagagatgcagtctcgctatgctgcccaagctgatcttgaattcctggcctcaagcaatcctccttccttgacctcccaaagtttgggattacagacatgagccactgcgcccagccctgaaacactttttgaagctcgtattagtaacctaataagtaacctaagccatcagaggtatctatatttcatatagctgtgtttctaataaagctgtaattaaaagaacatttgtaacttaaagttctaagttgtctcaggggttgggtcactatattgagtgtactcccccaattcttctcctcacatgcagattttagtaagtgatagttttaaattaaattttgaacctgtgctttgctttgttttgttttgttttgtttttttctgatacagggtctcactctgtcttccaagctggagtgcagtggcgcgatctcggctcactgcaacctctgcctcccaggttcaagcgattatagacatgtgccaccatgcccgactaatttttgtatttttagtagagacggggttttactatcttggccaggctggtttcaaactcctaacctcaggtgatccacccaccttggcctcccaaagtgctgagagtagaggcgtgagccactgcatcctgccaagcctgtgctctttgttgcctccatactgcttcacaaacatgggggcattgagcttggaactttctcgcagaggctgaaaccacctttgtcttcctctccatggaaattaaataggtttcatgtcaagcatagtacatatgatgtctgtacaaattagaaaaaggtgtctcttcctcaagccccccccccaaaaaaagtgttatgttaatatttattccttaacgacaataattaagataaacatacaggagcacttgcccctcccccaaagccgacagccttcgtgtcacctgatgtattagctgaagcagtattcctgggtgagaaatgtgttgtttccagaatccagaggccaccaagtgctgtgcttccttctttgtggcaggggatacaaaatacagcaattagtctctaactttggaggagctatcctggcatgcccttggccaacagaccccgtaaaacttgaccaaaatggcaggtccctgaaccctcccagagtttatctcctaccatctggattgcatgtgtctcaccaaggcctccagtgtgctagccatgttgtgctcatcctgcccgcctgcatgacgtcagtaacataaaggatcactgcagtgtctgcatgacatatggatagtacagagaccttcaaactatattatgatacagaccaggaaaattaacatagccctagggcaaaacactgagtaaatatttatgtgaatgaggactgtttctgatcttcttttctaattgggatggaactctaatataaaatccaccaccgtaacaaactgaaagagagaaaatatacggtcacctcaaaagatgcagaaaaagcatttgacaaacctaacatctgctataaaaattctcagccagctaggatgagaagaaaacctctacaacatgataaagggtatctatgaaaacctaacagctaaccctaaactgaatgtttttgccctaaaatcaggaagtaggcaaggatgcccagtcttaccacttttgtttgtgcttctttgatctgaaaatatatggctttcacaaaatttgagcagttttcagccattgtttcttaactttcatttaatatagtactagaagccctagcaagtgtgataaggcaagaaaaataaacaaaagtcttaatattgaaaggaaaaaataaaattattcccactcacaaatgatataatcatctgtgcataaaatcctaaggaatatatatatgtatatatttggaaaaaaacagctccacggccaagcatggtgcctcacacgtgtaatcccagcactttgggaggccaagacaggagaactgcctgaggccagaagttcgagaccagcctgagcaacacagggagactccatctctacaaaaaatgtttaaaatggccagacatagtggtgtgtgcctgtggtcccagctacttgggaagctgaggcaggaggatcacttgagcccaggagtctgaagctgcagtaagctggatcgcaccactgcagcacacagcctgggcaatagagtgagacagctgtcaaaaaaaaaaaaaataaagcttctaactaatattcaagtttatcaagatcacaagatttgagatcaatatacaaaaatcaactacatttcaatatattagcaaggaacaattaaaaatcaaatttaaaaaataacacctgcatttgtttgctaggactgacattaaaaagtaccacagaccaagtggctaaaacgacagagatttattttctcacagttctagagggtggaagtcaaagatcgaagtatcagctgatttggtttctcttaaagcctctctcctggccctacaggtgcctaccttctccctatgtcttcacatggtggacagagaaaactcttgtgtctctctcctctctttttttttttttttttttgagacagtctcactcagttgcccaggctggaatgcagtggtgcaatctcggctcactgaaacctccacctccctcgttcaagcgattcgcctgcctcagcctcctgagtagctggaattacagactcgtgccaccacccctggctaatttttgtatttttagtaaagatggggtttcgccatgttagccaggctggtctcaaactcctgacctcaacagctccgcccaccttggcctcccaaagtgctgggattacaggtgtaagccaccacgccagcctctctctcttcttaaagggacactagtcatactggattagggcccacccatgtgaacttaattacttctttaaggttctgtctccaaatacagtcacaatctgaagtcttgggggttaggacttcagtatatgaattggggtgaaataattcagcccataaaaataccattgataagagctcgaaaaatgaaatacttcaatataaatctaacataagatgtgcaggatctgtatgctggaaactacaaaacgccaatgaaagagctagaagaagacctaataagcgaataaacacacagtgttcaaggattgggaagtacagtatagttttgttttgttgttgttgttgttgtttttgttttttttgagacagagtcttgctctgtggcccaggttagagtacagtggcgcgatcttggctcaccacaatcctgcctcccaggctcaagcgattctcctgcctcagcttcccaagtagctgggactacaggtgcttgccaccatgcctagctaatttttgtatttttagtagagacggggcttcactgtgttggccaggctggtctcgaactcctgacctcgtgatctgcccgcctcagcctcccaaagtcctggattacaggcgtgagccaccacacccagccttacattatagttaagatgccaattgtccccagattgacccacagatttaatgcaattccaatcaaaatcctagcaaaattctttggagatagacaaggtaaatctaaactgtgtatggaaaggtaagaagacggtaatagccaaaacaagtttgaaaagaaaaaggcataggattcacactacccatttgtatgtgtatgtgtgtgtgtttcccagattgatgtttgttgtttgtttgtttttgagacgaagtcttgctctgttgccccggttggagtgcaatggtgcaatctcagctcaccacaacctctgcctcccaggttcaagtgattctcctgcctcagcctcccaagtagctaggattacaggtgcacgccaccacgcccagctaatttttgtatttttggtagagacagggtttcgccatgttggccaggctggtctcgaactcctgacctcaggtgatccacccgcttcagcctcccaaagtgctgggattacaggcgtgaggcactggacccggcctcccagattgttttattgtggtaaagcatggataagatgaaatttaccatttagctttttttttttttttttaaagaaatggagtctcactatgttgccaaggctagattcgaactcccgggctagagtgatcctcctagctcagcttcctgagtagccgggaacacaggcttctgccaccacacccagctctcagccatttttaagtgtataattcaaattcagtggcattaaatacattcacaaggttgtgtagccagcattactatctatttccagaacttgttcatcattccaaacagaaaccctgtacccactggacattaactcctcactccctcccccaagtccctggtaacctctattctactttctgtgtctatgaatttgcctattccagttacttcatataagcggaatcatatatttgtccttttgtgtctggcttatttctcttagcataatatttgcaaagttcatccttgctgtagctgcttgtgtcagaattttattcctttttatggctgagtaatattctattttgtgtgtataccacattttgtgtattcattcatctgtttgaacacatgggttgttttcaccttttggatattgtgaataatgctgctgtgaacacttggtgtacgagtatctctttgagtcactgctttcaattctttggaagaatattgagaagtgaaattgctgggtcatattgtaattctgtgtttaactttttgaggaatcactgaactgtttcccaccacagacgcaatgttttacattctagcaatgcacaaacgttttgatttctccacatcaccaacacctttttgtttgtttgttttgttttgttttgagacagtctcgctctgttgtccaggcttgaatgcagtggcaccatctcagctcgctgcaacctccgcctcctgggttcaaggaattctcatgcctcagcctcctgagtagctgaggctacaggcaagcgcccccacgcccagctaatttttgtagttttggtagagatgaggtttcaccatgtccgccaggctggtctcaaactcctggcctcaagtgatccacctggctgggcctcccaaagtgctgaaattacaggcatgagccaccgtgcccagcccaccaacactttttattgttaattttattgatagtagttattctaatttagggtgtaaagtggtatctcgtttccatttgtatttccctaatgactaatgatgttgagcattttttcatgtgcttattgggcattcgcgtatcgtctttgaagaaatgtttattaaagttccttgtccaggccgggcgcggtggctcacgcctgtcatctcagcgctttgggaggccgaggcgggcagatcatgaggtcaggagatcgagaccatcctggctaacacggtgaaaccccgtctctactaaaaatacaaaaaaaattagctgggcgtggtggcgggcgcctgtagtcccagggctgaggcaggagaatggcctgaacccgggaggcggagcttgcagtgagccgagatggcgccaccgcactccagcctgggcgacagagcaagactccgtctcaaaaaaaaaaaaaagttccttgtccatttttccatttttgaattaggttttttgtttgtttgttttatgttgagttgtagaagttctttacatattctggatatttacatttctgcaaatattttctgccattctgtgggctgtcgtttcattctcttctttgatgcacaaaagtttttaattttgatgaagttcaccttatgtttttttctcttgttgactgtactttggtgacatatccaagaaatgattgacaaattcaatgtcatgaagatttttcactgcttttttctcctaggaattttatggtgttagctcttcagtgcagggtttgatccattgcgaattaatttttggatacggtgcaacaaaaggatccggctgcattcttttgcatgtgcacactacccggttctaagatgtatcataaagctaccaatagtcaaggcattgtgatattggcaaaaagacaaatgccaatggaacaaactaaaaattctagaaatagacccacataaatatggtcagctgatttttgacaaagatgtaaagacaattcaatgaagaaagaacagtcgtttcaacaaaaggtgctggaacaactggacttccacatgcaaaaataaaaacctagacttacatttcatatatatatataaattaactcaaaatatatgataaacgtaaattaatatgtaaaactataaaactcttagacttaggagaaaatattcgtgacctttggttagtcaaagagcttccagataggacacaaaaacaccatctataagaggaaaaaaaggataagtttcactttctcgaaatttaaaacttctgctctgcaaaaaacactattaagagaataaagttgtttcctttcgtcactgcagcagcagctgtatgtccaagcttcagaagagacttgcctctaagattctccactgtggcaaaaagatggtctggctggaccttaacaagaccaacgaaatcgccaatgccaacacctgccagcagattcaaaagctgatcaaagatgggctgataatcccaagcccctgactgtcctttcctgggcttcatgcaggaaaaacaccttgacctgccaagagggcaggaatatgggcgtaagtaagtgaaaggatattgtcaatgctcgagtgccaaagaagttaccctggatggggaggatgcgaattctgcatcagctggtcggaagatactgggaatctaagaagactggccaccacatgtatcacagcctatacctgaaggtgaaagagaacatgttcaaaaatacacggattcttatggaacacatccacaagttgaggtctaagaccaaggaagtatacaaatatattcacctgccgtccaagaaggttcatcaaggctcagtccaaggagaaagagacaaagaaaaacagcgcccccaccctccttgtctgtactcagtggcctcagcaattacatagaccaatcactcaaataaaacaagtctcttttttttccttaagaaagtgaaagagagaatgaaaaaacaaaccacagattgggagaaaatatttacaaatcatatatcagaaaaagcacttgtatctaactctcaaaacttaaaaataagaaaagaaacaatccaattttttttaaatgggcagtttaaaaaaactctgcagttaaaaaaaaataaaaacaatccaattataaaatgggcaaaagatataaacagatatttttccaaagaggagatttaggtggcaaataagcatgtgaaaagatgtccaacatccttagccattagggaaatgcaaattaaagccacactatttcactgtacacctattagaacagctaaaataggtgcgtaatgaacagctaaaataacaagtcatggtaacaccaagtggtgacaagtacgcagagaagctggctctctcgtacattcctgatgggaatgtaaatggcacagacactcacatacacttactatatgatccagcaatcacacccttgggcatttatcccagaaaaatgaaaacttatgtgcatacaaaaatctgttcttgaatgttcctattagccctatttataatagcaaaatactggaaacaactcaaatgtcctttaatgagtgaatggttgaacaagctctggaacatccatataaagcaatataattctgcaatacaaagatatgaactatcgaggcatgcaacaaccttgatgaatgtcaagggcattatgcttagtgaaaaaacagtccatctcaaaaggttacatgctgtattattccattcctataacattctctaaatgacaaaactatagaaatgagagaacaaattaggagtaagcaagggaaagaagtggagatgggggaggcagggacacaaatacaaaaaagtaacataagggagttctttggtggtgagggagcagttctatatcttgatcgtggtggtggttacacaaatctatacataggataaaatcttacaaaactaaacacaacacacacacaccacacgcacacaaatggatacagggttttggggggttttttaatgccaaaaactgaacgaggtctgtaatcgagttgactgtaatgtaccaatgtcagttttctcatttggatgtttgtgttagtttgctagggctgccataccaagtaccacagactgggtagcttaaaccaacaaaattattttctctgccaggtgcggtggctcacgcctctaatcccagcactttgggaggctgaggagcgtggatcacctgaggtcaggagttggagaccagcctggccaacatggtgaaaccctgtctctactaaaaacacaaaaatcagccaggtgtggtagcaagcacctgtaattccagctacttgggaggctgaggcaggagaattgcttggacccgggaggcggaggtttcagtgagccgaaattgcaccactgtactccactctgggtgacagagcaagactctgtcttgggggaaaaaaaaattatttcctcacagtattggagtctggaagtccaaggtcagcagattttattcctcctgaagcctctcttcttggcttgtagatggatatcttctctctatgtcctcacgtggtcttccctctgtgtgtatctgtgtcctaatttcctttgtttttttttttttttttttttttttgaaacagggcctctctttgtcacccaggctagagtgcaatggttcaagcaatcctcccacttcagcctcccaaagtgctgggattacaggcatgagctaatgcacccgacctcctcttcttataaggacaccagtcatattggagggaccatctgtttgacctcatttgaccttaattacgtcttaaaagaccctatcaccacatacattctgaggaagttggggttaggactacaacatatgaatttgggaggaagacgattagggccatacgatattgtactacagctatatgtcacccactggggtaacagtcaaaagcgcatggatctctttgtactatgtgaacaacttcctgtgaacctataattatttcaaaataaaaagttggccaggcatggtggctcacctgtgtagtcccagcactttgggaggctgaggcgggccaatcacttgaggtcaggagttcgagaccagcctggccaacatggtgaaatcccatctctaccaaaaaatataaaaattagccaggcatggtggtgcgcgcctgtagttcccactattcaggaggctgaggtgggaggatctcttgaacctgggagggggaggttgcagtgagccgaaatcacaccattgcactccagcctgggcaacagagactctgtctcaaaaaaaaaaaaaaaaaagtccgggcgcagtggctcacacctgtaatcccagcactttgggaggccgagttgggcagatcacgtgaggttgggagttccagaccagcctgaccaacatggagaaaccccatctctactaaaaatacaaaattagccgggcgtggtggtgcatgcctgtaatcccagctacttgggaggctgaggcaggagaattgcttgaacctgggaggaggaggttgcagtgagccaagattgcgccattgcactccagcctgggcaacaagagcaaaactccgtctcaaaaaaaaaaaaaaagaaaagttaaacaatggggaaaagatgtaaagacattacatcaaagaatatatatgaatggcaaataagcacatgagaagacgtttagcataattagtcattaagagaaatgcaaattaaaaccaaaatgagaaatcattgcatgcctattacgataactaaaattaaaaatactattgatacctaatgctgatgagaatacagagcaacaagaactctcataattgcttgtgggaattcaaactaatacagtcactcaggaacagtatcttatagttacacatacacgtatcacatgacccagcagtcccacctctaggtatttatcctaaagaatgaaaagtatattcacacaaaaacctgtacatgttcacagcagcattattcataatggtcaagacaacctaaaagtccttcaatgggtaaatagagccacaagatgggatactgctcagagataaaagggacaaatgattgacacgccacaacatggatgactctgaaatgcattatgctaagtgaaagaacctagactcaataggttacatactttatgattccacttacatcacactctgggaagggcaaaactacagccacttcggttctcttttggttactgtttgcatagctttttttccatcccaccttcaacctatttgtgtcttcgaatctgaagcatgtctggtgaaaacaacaaataggttttgtttttcctttttctttttcttttttctttttttttttagacagaatctcactttgtcccccaggcttgagtgcagtggcgtgatctcagctcactgcagcctcaacctcctgggttccagcgatcctcctgcctcagtcccccaagtagctgggactactggcatgcgccaccatgcccagttaatttttgtacctttagtagagacggagtttcaccatgttgcccatgctggtctcgaactcctgagctcaagtgatctggccaccttggcctcccaaagtgctgggattacaggcgtgagccaccgtgcctggccaacaaatagttgagtcatattttttaatccattatgtcagtctctgctgtataattagagggtttgtttgtttgtttgttgtttgtttgtttgtttgtttttgagacggagtctcgctctgttgccaggctggagtacagtggtgccatctccgctcactgcaacctccgcctcccggattcaagcgattctcctgcctcagactcctgagtagctgggactacaggtgcgcgccaccacgcccggctaatttttgtatttttagtagagacggggtttcaccatgttggccaggatagtctcaatctcttgacctcatgattcgcctgccttggcctcccaaaatgctggtattacaggcgtgagccaccatgcccggccgagggtttaacccacttacatttaaactgatgaggtaagatttacatctgccattttgctatttgttttctgtcttcttttattcttcttcttccattgctgccctcttctgtattaaataaatattttccacagtatctttttaattcccctgctcttcctttcctatatattttttgaattgttttcttggtggttgtgctgaggattacaataacatcttaacttttaacatctaggttgggttaatgccaaattaatttcaattaataccaacataacttaatttcaattttctctcatttagttccatttctcccctcccctttgtgctcttattgtaatacaaattacatttttaaacactgtacactcatcaatgcagatttttttgaaaacagttttgagataaaattcacaaccatacaattcatccatttaatgtgtacaattcaactttttaaaatatattcataagtatgtattgccatcagcacagtccattttaaaacatttttatcacctaaaataaaaaattaaaaaggccaggtgcagtggctcacacttgcaatccaaacattttgggagaccaaagcaggactatcacttgaggccaggagtttgcgagcagcctgagcaacacagcaagactccacctagtcccagctactcaggaggctgaggcaggaggggcccaggagttcaaggccacagtaagctatgatcatgccactgtactccagcctgggtgacagagcaagactctgtctcttaaaaaaatgaaaataaaaataaaaactgttctctttagctatcatccctcttcctcaattatgcccagccctaagcaaccactaatctgctgctttctgtctctatagttttgcctagtctggatatttcctacaaatggactcatacactatatggcccttgtcactggcatctggcatcttctacttaacataatgttctcaaggtttatccatgttgtagtatgtatttgtacttcattcccttttttttttcttttttctttatatatattttttcagacagggtcttactttgtcacccaggctggagtgcagtggcgccctatcagctcaccgcaacctctgcctcccaggttcaagcgattcttgtgcctcagcctcctgagtagctgggattacagacatgcatgaccacgcccagctaatttttgtatttttaatagagacagggtttcaccacgttggccaggctggtttcgaactcctgatctcaagtgatctgcccacctcaacttcccatagtgctgggattacaggggtgagccaccatgcccggcctttacttcatttgtgaaggatgttttgctggatttagaattcttagctgacagtctttttctttcttttggatatttcctcccgctcctttctcctccaccaccccagccaccatggtttccaataagaagtaagctgttaatattactgaggattccttatacatgatgagttgctcctttcttgctgctttcaagattttctctttgtctttggctttgacagtttgattataatatttctagatgtggatatctttgaaattgtcctgctgagagttcgttgaactaaagcaaaagtataaaaacaggaaatagatcagcggttgcctagggttggagtagaagaaggatccgaatacaaagggacagcataagggaattctgtggtgtgtttctttttttttttgagatgtagtctcgctctgtcgcccaggctggagtgcagtggtgccatctcggctcaatgcaacctccacctccccagttcacgccattctcctgcctcagcttcccaagtagctgggactacaggcgcccgctaccacgcccggctaattttttgtatttttagtagagatggggtttcaccgtgttagccaggacggcctcgatctcctgaccgcgtgatctgcccgtctcggcctcccaaagtgctgggattacaggcgtgagccgcggcacccagccctttgatgtctgtttctatgagggtggtggtagtcgatacaagaatctatgcatgtgactcatagaactgtacatcgaaaaggtgaattttatcatatgcatattttttaaatgccaataaatgaaaattgataatttttttttttagatggagtctcactctgtcacccaggctggatggagtgcagtggcatgatggcagctcaccgcaacctccacctcccaggttcaagcgattcttctgcctcagcctcccgagtagctgggactacctggctaatttttgtatttttagtagagatggggtttcaccatgttggccaggatgctttcaatctcctgaccttgtgatccgcctgcctctgcctccccaagtgctgggattacaggtgtgagccaccgtgcccggccgaaaattgataatttttaaaaatacttagtatgttcactcaacgctgaatatatatttttattttatttttttgaggtggagttttgttcttgttgcccaggttggagtgcaatggcgtgatctcggctcacagcaacctctgactcccgggttcaacctcgtacctcagcctcccaagtagctggtattacaggcactcaccaccaagcctagctttttttttttttttttttttgtatttttagtagagacggggtttctccacgttggttaggttggtcttgaactcctgacctcaggtgatctgctcacttcggcatcacaaagtgctggtattacaggcgtgagacaccacatctggcatgaacacatatgtttaagtgaacactcatgtactctcatccaagtaagggaaaagcacattgtgagcattccagaagctccctatgttcttctccctgaatgttgcctcattgctcccccatagaatcaatcacaattctaaattttatcataatcacgtccctgctctttttttatctttttttgtttgtttctttgtttttgagacaggatctcactctgttggccaggctgggatgcagtggtgcaattcctgctcactacagcttcaacctcctgggtacaagcgatcctcctgcctcagcccctcaagtagcttgaaccacaggcacacaccaccacaaccagctaatttttgaattttgttttttagagaccaggtctcgctgtgttgtgcaggctggtcttgaactcttgcgctcacgcaatcttctcgccttggcctccctcgctgctgggattacagatgtgagccactgtgcccagctgttctttatctttttattattcatgcatcactaaaaaatgcaattcttttccttttgcattttgcttatttactcagaattgttttgcaagaatcatctatgttttgtgtactagtttacttattttcattcttgtataactcaattgcacaaatgtaccatattttattcttcattcttttctccttttttttttttctttttttttttgagacagggtctcactctgtcacccaggctggagtgcagtggcgtgatcactactcactgcagcctcaacctcctgctgggctcgtgatcctcccagctcctcctcccacgtagctaggaccacaagtaggtgccttcatgcctggctaatatttgtattttttgtagagatagcatttttccatgttccccacactggtcttgaactcctgagctcaagcattccacccatctcagcctcctgaagtgctgggattaaaggtgtgagccaccacacctggcctcttcattctatttttagtggacatttggatttcttccaatttggatctatttcaaacaaaactgctatgagcattcatgtacatgtatcttttgtatgtgtataagagtttctctatggtatatattatatatctaagaattgggcatgtgtgtctttaatgctactagattatgctgaggtgttctccatcttctcataccacacatgtcaaatggaatgcaagagcaaatacttctaatgatatgtggtacagacacaggtaagggtttactagaggaaacttccaggcaaagagttggaaaaaaatgtatatgatgccccaaattccctttatccaaaaggaagcttgcttaggtcaggcagggctaaactcactgttgaaagagttccaggagagtggacaccttctcatgacactctacatatttacaaaggcaagcgagggctgggggcccctggaaaactagcaacaacagatgaagatttctggccatggaaatgtcttagctgtaaatgaagagaatccagagcttggacatcacttggggagctcacatgccagttcagtcatgctgaactgttccttttgtgaaacgcatgttcacatcttttgcccattattatattgggttatttattcttcttggggtttgtcaggattcgtgtacctgtgaattggtgtctttcatcagttctgaaaaattctgttagcatctcttcaaaagttgctgttggactgggcacagtggctcacacctgtaatcccagcactttgggaggccgaggtgggaggatcccttgaactcaggatttcaagactagcctgggaaacatggcaaaaccctgtctctacaaaaaatgcaaaaattagctgggcatggtgctacatgcctgcagtcccaactacctgggaggctgaggtggaaggatcgcttgagtccaggaggttgaggctgcatgcaatgggcagtgatcacgccactgcactccatcctatgtggtagagtgagaccctgtctcgaaaataaaaaataaaaaattgctcttgactttggtggtggctaatgcccataatctcaacacttggagaggctgaggcagaaggaccacttgaacccaggagtttgagaccagcctgtgcaacataggaagaccccgtctctacaaaaaatacaaaacttagctgggcatggtggtgcatgcctgcagacccagctactcaggagggtgaggtgggaggatcgcttgagttcaggaggtcgaggctgcagtgagctttgatgactgcactctgggtgagagtgaggccctgtctcaaaaaaaaaaaaaaaaaaaaaaagctgtctctcaccactcttcctctcttcacttgtcagcttttcttccatgtcttttaacatctcttcaatattttctatctctttccacattttcctctatctctctctgtcctttccccagaaaggatattctcttctgtcctaacttctagctcattaattctctctttaactgtctaacccactactatacatacccattcagtttttagtttaggttattgtatttttatttgtagaaattgttaggttatatagatatagatatatagatataaatatatattttttgagacgggagtctcgctctgtcgcccaggctgactgcaaactccacctccgggattcaagcaattctcctgcctcagcctcctgagtagcttggattacaggcacccaccaccatacctggctaatttttgtatttttagtagagacagggtttcaccatgttagccaggctggtcttgaactcgtgacctcaggtgatctgcctgccttgacctcccaaagtgctgagattacaggcgcaagccacagcacctgacccaaatagctcattttaacgtttttttttttctctaatctgaggaggcatcttgtatgacttttattttacacaatgtgaacatggttgttttataatctgtaactggtgattcaaatgtattaaatctttgtaggtctagatctcctatttgttactgctgcctcatttccttgatttttaatgtgatgcttattgtacttaaaaaattatttgtatgacaattgagtaacaagtttactgatgtaaaattttcggttcattttaaaaattatgtgtcacatgtaacagactgaccgatataaaattctctgttcattttacaaacagtgttccctaaagttgtacaatactgtgatcctacttatggatattctacaatatttcagataatataggctgaccagccaggcacggtggctcacgcctgtaatcccagcactttgggtagccgatcacctgaggtcaggagtttagcctggccaacatggtgaaactctatatccactaaaaatacaaaaactagctgggcgtgatggcacacgcctgtaatcccagctactctggaggctgagacaggagaattgcttgaacctgggaggcggaggttgcggtgagctgagattgcgccagtgcgctccagcctggacgacagagctagactctctcataaaaagaaaaaggaaggaaggaaggaaggtatatagacagagactggtccatttaacttcattttaacatctctttggcttgacttcctataatgtaaaggctggaaagctaaaagctaaatatcccagcttcttttctacctggcattcctcgtgtaacctaggtcctgtcaaacagatgcacaggccctgaacttggagctaagaatggcaaaaggaagtgtcaaacacattcagggagatcagattttctgacagtcatggtagtggagctgtatggtttctttggtacgaatatgaaatgttctggcatctagtccccagtatcttagttgccaaatataaagcaatggtgaaagtgattatttctctaggaatattcccatgacatacatggttggggattccctcttgcctttgttgacactgactgtaacgtttctggttatggagcatccaagtccagtttccagccctcctggagagtgtgtgagcttcctaagaccctttaatcaatccctttctgcttatttagagtgctatttagagtggattctatcatctacacctaagaacacttatatccaatgaaaccaaaatagaatccaagaaactgtagaacaaactcaagagtacaataacaagaaatcctagacaaaaaagcaggcaaagttaaactatgatgttagatgtgaggatagtggttacccttgacagacaggggtattgactggaagggtacacaaagggagaattttggagtgctggtagtattggggttttttaaacctgggttatgggtccctgagtgtgctctgtctgtgtacatttatatggctgtgaacttacatgcacttttcattatatacgataaacttcaatgaattaaaaatctgtttttgaaaaatgacactataagtggaggtgaggagaaaaggtgcagggaaatttggtactagatccttcatggcgattaatggatattgacgctgtgtgggagagacagagacatctcaagaaacagtgcaagagccaagcagtaggcagaacttacatggcaaaaggctgcatgatgtctttatgccagattttgcctattactatttgccccattcctgtccttggaagctctactctgaatgacaagggggttgggagactacattttgtaggcttccttgccagctgagttactgttagattttgccagtggacttcatagctcagggactagaaagtgggaggaaatgagaaacggtcctgtttctggctctagccatggcaggtgattgcctgtggttgcaagcagtcacaagtgattacaagcctccagcaccatcagcaaatacaggttataagcaccagaccaagggtgctatcctgatttctgggtaaaattcccttccttttgttcatccagctcttttttgtttattttgttatgaccatccaggttggagtatagtggcgccatcatggctcactgctgcctctgcagcctccacctcccaggctccagtgatcctcctgcctctgcctcccttagccatgcgccactacagctggctatgtttcttatttcttatttttgtagaggcggggtttggctatgttatccaggctggtctcaaactcctgggctcaagcaatcctcccacctcagcctcccaaagtgctgggattacaggtgtgagccaccacacccggcctcatccagctcttccaacaccttcctatccaatttccagcattaaatttccctccactttaagtgcctagaatgggttgtttacctggcaagacacagactgatacacaacttccccttcagtctgatagaaactcagcaaagcctatcagttatcaatactctgagaatggctgaagcaaattcaaatgttctcagctgacccacctttggctgaccctcctccttggagccatccctgtccatactccacaccctgcccacctcccgcctgaacttctagagccactacttctattgcatccttgactgccccagtcctgttgatgtgcagtgctgtatttcacgtgtgcagctcccctgcactctcacggcacctggcctccaccctagcatgtctcacaatgtaccgaactgtcctttcccttgactaggagccccaggagtttgagtgcaggcacggctgatcctgattccttgcacacctggcaatgagcaggcgcttacagaatgcctggcagcagtgtaatggtacctgtagcagaagctgatcagaagaaatgagttgctctgccaggcccttggttcaagaagagcccaggtgggatcctcttttcacacaatgtgtccagaagccaactgatgagagtgtgcaagtgtgcagaataggaactgagggctgggccgaggcccgcccccggggggaggacctggggcacagagacaacacgaagatgagctaaggtgcccggtagctttaatgagcaccttttcctcactttgtccctccctctctactcttccccttcccgtcttgacaggtccagcctgccctagggctcttaaaccgcaggtatcaatccttctgtccccttagccgctccaggcgcctgcgaaggtccgggggcaccttggccccagctgccagcagctcgcgcagcctctgtttgggagtcttggtgagcacgaaattgcaggggaaggggccctcttcaaaggtgacccgacagttccgtgtcactgaatggtagccctcggcactggcagtcaccatgtagtcccctggggtcagcagacgccaataatccccgccccacgctgaggagagtgaagggcacgatcaggacccaattaatgatcttctgcttcttcccgagcctccagccctccagccccttcccttgccctcccggtcaaacacacccgtggtcacgtcatggttaatcccatccacggcaatgacagcgtcagcaatcccaagctccgtgtccttgtccctcaccactcctgcaatgcccatgcgcacctgtgtgggaagaggttatcagagcccttccccttcggcaggataatgtgctgtttagctaacttgctggctctgttgccctgcaaacctgagcaaagtggtaggtctactgtgttcctaggtgacactacttctggaagaaaaaaaaaaaagaaatcctgattgacaaatcacatctggactaagaaaatgataaatacctggtaggaaggcttatctatccttgggctttcccaggttattgggcttgtctttggtagaccctttggaagctctgcttatggagctattacaagggttatgagctccatggaacatgaagcttctatgccaggacagctcctgcacctgcctcacgtgagtctctcctgaggatagctctggggcagcgccacggaccaccacctagactgcaatggaggctcctcccaccggctctaacacgatgccacgctgccagcaaactgcacttcctgtcctgtgtgcttccaagacaatctgataccaagcatggcccatggcatcttgtgagtctgaatgctcagctggaccttagaagaacccctggtaggagctgtagcctaaatggacagcaggagtgattcaggcaggctgggggccgggacgcagatccgacctgctccaggtaggtgaggagggcgtctttgttgttctcccactcctggggcaattcattctcgtgagggaacttgtcacaggacagctccacagtgacctcaaagcagttggtgtgtaggtagctgaagtcattcatgcctaaggggaccacagacactgctgcctaagcaggcgggatgcggtcccatcctcccgctaccctcccttctctgagggacacttcagagtgggaacagacgccagcactgtacgcaaccgcaggctgtcttatcagggcgggggttacggggccagggctaactccaccctcaggcacatactcccggggaccgtgtgccagtcagccccgttgatgatgttgccgtgcacggagaagtcctggctgtggcagggtcggcggctggtgtcctgcatggccagattactgccagcatagacagtgctgagccagcgaaacacagcatcatctggtgtgggcgtgagctcgcgggcagcccacggggtgcgagtcatgtcgaatgggtaggacaccacgagctcacccccgtggaggttggcacttagcacaaaggggatccgcttcatccacttgattactgcccgcgtttcaggagccacctggatggggcaggtcaggaggggcaggagacagagacaaggtccgccccccacagacctccactgccgccctcaaaatactcacggtggcattgggcagggtgtagtaagtgggcaatggcaggtgatggttggggacgatgtggggcaccttcccatcgtcctgtgcttcccacagtggtgtgttgaggtcagcaaaattatggttaagatcgatgctctggttgttccagcggccctcggcccagcccaccagctctgaaccctgccgggcaagaggcttgttcaagtcgagcaggtccagccaccagggcagaaggacagagtggccctcatgctgggtggcctacccggtggtaggcgatctcatagccatcagggttcatggagggcagcaggtgaatgcgcatctcagagagcagccgggtcacccgtgggttccctcgcaggaactcatggcacaggaactgcatcaggagcagaagcaactcccgccccagggcctcgttcccatgcatgccagccacgtagcgcacctcaggctcccctggggacacatgggggcttgcagcgggttcatgcctggggccctgccctgtgcctacctctccccactccccatgccagtacccagctcatgctccccaggcttgtccgacatttccatcacatacagcttcaggccctggtagctcttcccaatgctgtagatgcgggtgatgttggggcattgctcttgtacctgcttcatcagctggtgggcagagtgtagcgtggcatgaggcatgggaggggtacacccaggggcagatcacatgtgccatggaaagacttaaaaagtcagcgatggcccacacagagggggcatcccatcatggtacaggaggggagcggcagcagagccgggaggaaggggtaggactgggggggcgccataataagggaaagtgggatggagcttaggggtccacaggagagaaggctgagacatcaggaggcagcaggggcatacaagcgcagtcacagcaggttgtgccccggtgggaaggtgggaaggggacctgagatgggtgggccctccttcccaggtcataggggttatatctgaccttcctcatggccttgtaattgtgatgctgaaagtctagagggtcagaggatcccgacgcaggggcctcaaggaataggtcattggggtctggtggaggttgagtttatggtaaagggtgtgtccacagtgaaggatgcaccctgcatccaagccctgcccaaccaaccctggcctgactgcccacctgagactgggcaggccaggatctctgcccggaggcaaggcgcgcctccctggagccaggtctggggcagcaggcgaatgaagcgggccacctggggctccggcaggaggttcagcactggagtttctgggtctgaattggcaggaaatacctgggggcagcaagttctctgttgtggctgctcaaaccccagaagcctggcccaggacccagggaaggagctcaggcctccaagcttactgtctccccaccctagtgggctcagctagagacttgcactgtgcatcaaacacagaccccggcccacagcccctgccaatgggcagccctaggcagccttgctctctggattggacacagttcattagaccagtttggccacatgactcgggggaagccaatcctagagctggccaggactccacattgtagcctgctgtaaaaagaggtccatgagatgcggaagtcagaaccacgagaaggcaagaagtgatgtggaccagaggccccgggccagaaggggcacgccaggaggaagctgtaccgtgaagcagcacccaccctgtggtggcattatctggggaggatgtgggcatgtcccaaagcagctggctcccaatggtgcctgccgtgtgccaccctcttgacaacaagccacacccccctgggaagcctaagctggcgtctattccttgtcctcagaggagcctcagcctagcctggactgggtgcccaactcccagcatggaggccccagccacagtgggaccactcactgcgtccatcccactgctgtggttcctacttccccaccaggtccgactgtcattgctgaactggaccttgtatgatgtgacccagtcatacctggcaggagaggtggagagagatcatcggtgcccccaggactcccaccccagtccttctgtgacctcctgacctagggttagtctgcctcacctccagacagagttcctgccctgtgtgataacacccgagaagcgggtggggtgcccagcgtccacctgaaaccatggatcggcgtcctgctcctcagcacaccaggctccatcatatagatcgccgtcctccaggcctgactgcagacacaggacatggtggtcaggcccagttggacagagtggggcaggccaggacagagaggaggcaggagagaagctcccaggggctgccttccctaccctgagaccatggctccgagccaggattactgacctgaatgttgagccgtcctcggtgtggtccaagaccaaaggactggctgctggatgcctcaagccggctatctgaaactcgcagggactccagacccaaaggaggacagcctggggcggggatagaacagtgagacaggaccagagggagggtagccagggcaggtgggaagctgagcctaaggttgctcctgcgctaggcaagcaaggggcgtgccggtgcccatgaggccaagagctgtgctggtaaagtgccccaggggctgcaagtctgggctgggcccctggagaggaagtacctgtttcttgtttctcagcggggtcgagggtccctgctggagtgggggtcacaaggggcccggcagtcaccagtggggtggggcgagttagagttagcttcttccgcttcttcataatgacctttttcttcttgatgactcgaatccggacatgctgttctgaggtcccttggggtccgagaggcacagcatgggggaaaggaagaatggtgaaaccccggatggaaaggtctgccagcccaagaagacatgtgagcccacagcaggccacaccaccaggatctaacagccttcacaggacatcaaaggcctgcaatctgaccccaacctgcctctccagtcacttccttggctcctccttctcctccctgatgtaactacatgcttggccagcctcccctgtgaacctctaatccaatggagagctgcacccagcctctagaaactgttcggttgctccaaagagctgagtctggcactttacctccgggcctctgcactagctatcccctcccctgtaatgctacccctcgcctctgattttttcacctaattcccattcttcctttgcatctcagcccagatgcctttccaaggaggctttcttagctccagactcagcatcatgccccaaaacccctgtgccgcttccattgttgtgtctgctctctgggctcagatggcctgtcctggaatccatgtctgcctgggtgtcgaggctttcagggctgggcctgcccgccggcccttcagcacaaggctctgcccaggcaggtgctgggggtacccatcgaagctccacagctgcctccagaacaggctgcccatttccgcatctggtgcccctgtgcctttgcccgccgcttccttcttggcagccctctctctctctctctctccagactcccctgactcggggacatcacccttcaagaccctcctccacttgcctcctctagaagcccctgagtgccctccgcttgcgctcctcctctcctattccacatctggaaagctgggaggtcgggctgccttcctctcccgctctgccccatcctcccggcagcctcagcgaggggctctcccttctttccttttgttctttctctccagccctcgccttcaaactctctcctacgcagtcttgctctgcaccttgagagcttctgcccctctgtctcccctcctgccagttctggcctgttttgtctttggtgaaaagggaaggtttggggcttggaagaggcagcatcccactggcgcctgtcctgggactgctgactaggtctggcagggaactggggctgccgagtcagcagccattgctcccagcagggagttgagggagtgtgagtgtgtatatgtgtgtgtgcactgtgagtgtgagtgtgcgcgcgcgtgcactgtgtgtgcgcgcacgcgcgtgtgagtgtgcgtgtgtgtgcatgcgtgtgaatgcgcgcgcgtgtgagtgcaagtgtgcgcgtgtgtgaatgtgtgtgagtgcgcgcgcgtgtgtgcgcgtgagtgcgagtgtgcgtgcggggtgagtgtgcatgactgtgagtgtgcgtgggtgtgcgtgtgcccgcgtgttagggagggatcgccccacggggcaggagagccgggcagtcggcttgcgggggagcggaccgtcggtcggggaactcaccgttagctgtctccgccggcggctgtgccgggctgctatgcagggccggggtcgagcctgggaccttggtggtcccgggctgcgcgaggcccagcaccgagttcctgggcgcccccagagccgggccgacggccggcgcgaaggcggccagggcgagcaggagcccccacatggcggggattgagtgccaggggcgcgcgggctacggcgggtggcgggtcggtctcttcctgccgagtgcgccgagccccccgccccttcctgccccccgcccctccgcagcctcctgcccgcccacagcccgctgcccgcctcggacctcggagaggaggagagggccgggaggagcgagcggggctgacctccaaggggccgccccaagtctcaggaccgccgactctgcccttcctctccgccgtctggggccaacccgcctcgttggcgcgctgcgcctttatagtctgcaaagccacactgaagagaccagagatcacctggtggccatcaagtcgaccaacaggaggcaaagccccttatctgagcaattcagaatgacacttccctattgtctaaagccacatctggtaccaagcttccgtcccaagaatttataagtaactagaatttctgtacgtttccggaatgagtgcacgttaagacccattgtgcaaactttgctgacatcaaggcaccaaaatatcgacaaatgtaaccatttaccatgacctaagtgactaatgtggtccaaattaccctgcagttccccgcagggagctcagtcctctcttgctgaagcgcctactgcgctctgctgcctcgtcctttccgtctaataaaactttccttttcagacctacacggttgttgataagttcttttaccacccgggagccaaccacttcccggttccggagctctgacacctcgcctggcatcttggtggcccatacggggacttcactgggatttccctcttcctttttctctctgcttccttccacggtctggttctttactctttggggaactgccggtcccggtggaggcagctcttctgtgggatcctgaagccctagagaagggatacctggctgtccttgcccttaggggtgagggactggccagggctcttttctgttttcggactgccagtgaaccagcttgagttctcgttggcaactgacagtttctggccaagcgccatcccccggtattaccccaaggccaagacaaaagagctattgcctgtcagagtggcagggcactttcattttaacactccataagccttgtcctggaagcggtggatctcaattctacacagggatgcctcagggatcttgtagttccttgtctaaacccaacttcggttcaattaattcagttccatccaactcgcccttggattgcctccttaaaaatggtcccattggtctcattttgacccacaaactcttaaaaataagcatataaggctgagcacaatggcttatgcctgtaaccccagcactttgggaggccaaggcaggcagatcacctgaggtccggagttaaagaccgggagtctactaaaaatgcaaaacttggccgggcacagtgactcacacctgtaatcctagcactttgggaggccgaggcgagtggatcacctgaggtcaggagttcgagatcagcctggccaacatggcgaaaccctgtctctactaaaaatacaaaaaaaaaaaaaaaatcagccagggggctaattatatgtggcgggcacatataatcccagctactagggaggctgaggcaggagaatcacttgtaccccgggggcggaggttgcagtgggccaagatggcgccacagcactccagcctgggcgacacagcaagactctgtctcaaaaaatacaaataaaaaataaataagagtttaaaaagcatatccttttttctaatattgcttgggttcaatacaagctccctaatcaatcaatttggccaattaatgaaacttgggattgcaatgctactttacaacttaactgattttttgccggaaccttggaaaggattcagaagtcccatatgttcaggtcttttttgctttatccccaaatccaaacccaaaattacatacaaattgtcatgtatgcttccaaggaacgtcctcccttcccggttctgatgtcttagatgatccttccttttgcctattacatcctcctcaacctgctcactcttcacctacaccctctccatctgctccattccctagtcaatctcccacccacatacccaaatactttctccccttcacatactctcaggggagtcacatatgctactagtacagagtcctcagaaaaatccccaaaatattttgcctctccctaaggtggctaatgaagatttgggaacaagccaagttcatgtcccttttctgatcatgtctgatcttttgcaaattcaatccaagttgggttcatttagtcaggatccctctaagttcattcaagaatttcagactttaactgttgcctttgatttaacctggcaagatgtatttgtggtattaactacctgctgttcccacacacaaaaaatcacacgtgtgatcttcagcatgggcagatgaagctcatgctcccagtcctaataacagagctgggcagaagctgtccccaacatagaacctattggcaataccaggccaccaattctggcccaaacagaggtaagggcagacaggatcatatggtaacttctctgttggagggaatgaaaaatatataataaaacctgttaatttttctaaattataagaaataatagctgggcgcggtggctcacacctgtaatcccagcactttgggaggctgaggcgagcgggtcacctgaggtttgagaccagcctagccaacacggagaaaccccatctctactaaaaatacaaaatgagctgggcatggtggtgcatgcctgtaatcccagttactccagaggctgaggcaggagaatcgtttgaaccttggaggcggaagttgtggtgagctgagattgcgccactgcactccagcctgggcaacaagagcgaaattccatctcaaataaaataaaataaaaagaaataataattttgtatgtatgaaactatctgaaagccctgcccttttccaagctagactggtggaggccatgcataaatacacaaattgagaccccaggggccaggtgtggttgctcacacctgtaatcctagtactttgggagaccaaggcgaggcgggcggatcacctgaggtcaggagttggagaccagcctggccaacatggtgagaacctgtctctactaaaaacacaaaaatctgtgggcatggaggtgcatgccggtaattcctgccttttaatgcttatatcttccagcttacaatgattccacctacagatgactatgcaatcccaataccagcctgcaacagcaacttctattttcatggggcctcttgatggaatctggtcttccctccatgaacaagtttatcatgacccttcattcccttcatgacagaaagcaagaaaggaatcctttcaatgccccttttcagcaggaagtagccagatagactggacacccctcttcactgtgccattttccctttcttgggatcctaacagacaagtagacatgagcatggagaaatacaaagggtcaaagatttgcccaaaatatttatcagggggaaaatgaggagagcaaggatcacctggtggccatcaagcagaccatcaggaggcaaagcaccttatctgaagaactcagaatggtactttcctattatctaaagccacatctggtaccaggcttctttccctagaatttctatacatctccggaatgcacgcatgttggaacccattgtgcaacctttgctgtcatcaaggtgccaaaatgtctacaaatgtaatcatttactatgacctacaaaactaatgtggtcaaaattacccttcagttccctgcaagtgagctcaggcctctcttgccgaagcatcccgctgcgctctgctgtggagttctttccatctaataaaacttttcaaacctatactgttgttgataaattcttttaccacccgggagccaaccattcgtggctgcggctcccggggctctgacacccagcctggcacacaacatttcacttagcccctcgaggcccttagcctgcagcagacatctactttgtaccatgcactatgccaggagttttacacgtggccgctcaatcaaacttcattttacaaactgataaactgaggctcagagcggctaatgacttgggcgaggtagcaaagctgagaactttgggaaggaaactacaaccggagaggaaaagctatccagagccagaggccccctggcagggcgggtgggacagaagggggaaaagagtgaagggaaaatgaggcggcggggggctagggggcgacccggagcctggggagagggctggtcccggaatcctccagaaagacaacccaaggggcccaagaagaggcggcacggcggcgcttcccaccaccaccatcaccaagcccggccctgcccctcctctcctttcccttccctcccctactccttcgctcactcacccggctgccacgtcccgtcccggggttacataacccggagagagaagcctgagcgatagcctgcgggctggggctgcggtggaggagccaagggttgatgcactgcctgacctgccctccggctcctcgcccccagcccgtattctcctcggggagccggcagccctgggtctgcccagatccggagatgcccttcccgccctccctccaagaccccctttggatcctgcattcctggtcatctctccagaaggaaggaaacgcgtccagcggtgtgcctttggccggcgcttggcctttgcaaagggctctccagggagatgctcccatccccacgaggagcgatgcccagaagtggcccgcaatcctctggcgtaagcggggccctgcgcaaatgttttttgcaggggcactatctgtataaatgatttgaatcacccaaaagcagcttgtgggcaccattctggcagcccacgctcacacgaaccccagaaagaaatagcgcgccgcagtctgggactggggcccaccgccggcagggactaccccataggcactggtcctggagctcctcgaggcatctggtctgccccacgcgcgcagggtgaagagctagaggacccccgaaagggagtgaccccacagggcccacgtgcaactgggtcccgcctcgcagccccctgcctcgacggcgctgccgggtcccaggcactggatgggaggacagagagacatttcaagggaagcgctgcacagccgggactccctggacgccaggcaggggcagatgggcagcgccgatgcttcccgaaggtgggaggccgcagtctgaacaggtcccgagggctgctaagcgtcccgccaaagcccaatctggccacctccaggtctctggtccccacacccatccaggtttctcgggtgttgggaagaaaggagggggcacaagaaacaggacatctcagcctcctgaagcccacaccccctccaagccgttccccacacagtaggcaaattctgtcaagttcctccaggcttaaggccccagtgggttcacctgcaaggtcttcatgaccaagttcttcctgcccacgcctttcccattccatctgcctccctatcccctggctcccatccccccagtcactccggcattctagctgctcctcccacgcaacagcccaactagcctcctggccttttaatttgtgcatggaatttgccttctcagtcagatttcctttcaatatcacctgctcccaaaggctttccctgactaccctgactaaagcaaactttttcacttcacacactctatcctcccacccgtttaaattattgtcttcaaggcactcaacaccgagatgatcttgctttacttatgtgttggctgttcaggttcccccacccccagcaggaggtaagtaccctgccagaagaactttgtacccaaatgtccacagctgcacctcagagcctagaacagcacctggtccctcgtcagctctcataaagtgtgtgtataatatattcaaggttagagtggacaaaccagggctgaaaggacctcctcaacagtgccaggatttgcaggagaggacatggcaggccgtgaactgaaagaccagttcccaaagtgactagggtggagcagctggcactctcccaccaatcttttaggggccagggctgcaggatgctccacctcttttttcttttattctttttttttttgagacgagtctcactctgtcacccaggctggaatgcagtggcgggatctcagctgactgcaagctccacctcctgggttcacgccattctcctgcctcagcctcccaagaagctgggactacaggtgcacaccacctcgcctggctaattttttgtgtttttagtagagacggggtttcaccgtgttagccaggatggtctcgatctcctgacctcgtgatccacccacctcggcctcccaaagtgctgggataacaggtgtgagccaccgtgtgtggccgggatgctccatctcttatgtctcctgcacccagctcccatcccccttcccaccactctgcactccctgcccctgtcctctattgcaacccttaggaccccttggttccctgctgtgtctcctgagccccgcagcactttctcacactcttctccactcccagccctgctgccacccctggcccttgccactggctacctggggctgcaaaggtacaagtagcaggatctggaggtgatagctccaggggcagaggggcaggtttgcacccaagtacctgtatagccagatctcatctaccaggagccaggtagaagatctttcgtggtctcactaggtgcaattgagaaggactggatagtggcacccgcctaaaagggattttaatgtaaggggtgggctaggaatctcctgccaactccctggtgtggttaggtggttggagggggagaggataggtgactctggtgacatacaggcttcgtttcacatcccacttctgacgtgtattttgtttggctatccttgggcagtagtttcacctccctgagacttagtttcctcatctgtaaaacaggaaccatatccttctcccaggtttgctgtgatgataaagtgagataatatagggtcttagggggctcctaggttgatcagatgcattaaaggtggggaaaacagtgtaacacagccctcttactcctacatacttagatggaataaaacagtatcaaggaaaagaaaggaagctctgtgtccagctgcacaaataatgaagtagaatctactgcctgcctgtgcctctaatctcctgtgcctggatgctaaagcagaactcatttcctgctaggtgctctccctgtgatgtaggtgagcattgttggagcctcacatgggaccaggatgcacaggggagcatctccccacgcacccgttctcccctcatcactctctaccccagctttctctcctacatacatcaaggtctttgagagccttgctccacaaagtgtggttgaagaccagcagcagtagcatcccctgggaacttgttagaaatgcagaacaggccgggtgcagtggctcacgcctgtaatcccagaactttgggaggccgaggcgggcggatcacctgaggtcaggagttcaagaccaaatacaaatacaaaacttacctggccaacacggtgaaaccccatctctactacaaatacaaaacttagctgggtgtggtggtgcacgcctgtaatcccagctattcaggaggctgaggcaggagaatcgcttgaacccaagaagcggaggttgcagtgagctgggatggtgtcatgcactccagcctaggtgaaagagctagactctgtcaaaaaaaaaaaaccaaaaaaaaaaccaaaaaacaaaaaacaaacaaacaaaaaaaacacctctgccccagacctattgaatcagaatatgcatttttttttttttttttttttgacagagtctcactctgtctcccaggctggagtgcagtggcccgatctcagctcactaaactgccacctcccgggttcaagcaattctcctgcctcagtctcctgagtagctgggactacaggcgtccaccaccacacccagctaatttttgtgtttttagtagagacagggtttcaccatattggccaggctggtctcgaactcttgaccagaatctgcatttttaacaagacctccagaggattcaaccccaggagatacatatgcgtgttgaagactgagttttatccctggtatttgatgctgtcacgggtaattttatcttaagccacaagcgtatatccacatgacgttagggaattggtctttcatttaccctgggaaggaatattcctgatctccacagcatgactatctgttgatttgttctttgtttgtaactaagtcatttttatcagaatagtacaaaatatagttttggttttgtttttttagagacactgtcctgctctgttgcctatgttggggaaaacagccccataacgcctagcggttaccccgagtccggcggagacaaaggagttagaaagagacagaataagcgtttaaaaggcgggtccaggggaccggagcgtcggaggcttgctcacggcccagagttctcaggctccgcccaatttattggtttacaagctctttgttcttagggcagatgggaggaggaggaagggatgagggaaaggattaatcagtgaaggagaactggagagtcattctgtaagatgtatagcagtggcggtttctgtgaatttccttgagcaaagaggagtgtcaaactacttaagatctttaactggccgggcgcggtggctcacgcctgtaatcccagcactttgggaggctgaggtgggtggatcgcttgaggtcaggagttcgagaccactctggccaacgtggtgaaaccccgtctctactaaaaatacaaaaaattagccgggcgtggtggcgggcgcctgtcgtcccagctactcgggaggctgaggcgggagaatggcgtgaacccgggaggcggagcttgcagtgagccgagatcgagccaccgcactccagcctgggcgacagagcgagactccgtctcaaacaaaaacaaaacaaaacaaatctttaacttatcgggactgaaacgggtgggagtgggtttcaggaggagccaagatgtttgattatactccactgcttcaagggagtgttatatgcctgagcaacctgtggaatgccgctgaggggttctgctctcgggcgtaaagacatgaaggcaataaggagacttttctcctcagaggccgcgcatggcttcccatgggtgtctcacacagggaagactaactcagctggcaccccagaaactctctttcccacagcctaggctggagtgcaatagtgtaatcacagctcactgcagtctggaactcctgggttcaagcgatcctcccacctcagcctcccaagtatctgggacgtgtcaccacgctcagctaatttctacctttttttttttttttttttttttttttttgagactaaatctcactctgtcaccaggctggagtgctgtggtgcgatctcggctcactgcaacctccgcctctgggttcaagcgattctcctgcctcagcctcccaagtagctgggattacaggcgtgtgccaccacacccggctaattttttgtatttttagtagagatggagtttcaccttgttagccaggacggtctcaatctcctgaccttgtgatctgcccgccttgggcctcccaaagtgctgggattacaggtgtgagccactgcacccggccacatttttttttttttaagagacaagttttcgctatgtcatccaggctacaacatagtttctatttttatttcaattgctttaggggtaccagcggtttttggttacaggggagaactgtatagtggtgaagtttgaaatcttagagcgcccatcacccgagtagtgtacattgtatgcaacatgcagttttttttatctgtcaccccccgcttaccctcctccttctgagtctccaatgtccattataccattctgtatgcctttgcatacccacagcttagtttccatttatttatttttatttaatttattttttttgagacagagtctcgctctgttgcccaggctggaatgcagtggcgtgaactcggctcactgcaagctccgactcctgggttcatgccattctcctgcctcagcctcccgagtagctgggactacaggtgccgccaccacgcccagctaattttttgtgtttttagtagagacgggtttcaccgtgttagtcaggatggtctcgatctcctgacctcgtgatccacccgcctcagcctcccaaagtgttgggattacaggagtgagccaccgtgtcccgccagcttccatttataagtgagaacatatggtatttggctttccattccttagttacttcacttagaataatgacctccagttccatccaaaagacattatttcactcttttttatggctgagtagtattccatggtgtgtgtgtgtgtgtgtgtgtgtgtgtgtgtgtgtgtgtgcatgcacacacatagcacattccctctattcactcatcagttgatgggcacttagattggttccatatctttgcaattgtgaactgtgctgcaataaactatgtatgcaggtgtctttttgatataataacttattttcctttgggtagatatccagtagtgaggttgctgaattgaatgtagatctctgtttagttatctgataaatcttcatacagttttccatagaggtccagtctacaatatagttttaaaggtaaatcacatttaggcttgtaatggaagagtcggctctatgcctttcccaagccaagcacttttagttctttttgttatttctcctgtctttatctctatgcttagatttcttgctatttccttttttttcttttttcttttcttttctccttcttcttcttttttttaaaagacaatttcttgctctgctgtccaggctggagtgcagtgagctgaggctcactgcaacctctgcctcccaggctcaagtgatcctcgtgcctcagccactcaagtagctgggattacaggtgcctgccaccatgctcagttaatttttgtatttttagtagagatggggttttaccatgttggccaggctggtcttgaactcctggcctcaagtgatctgcccacctcagcctcccaaagttctgggattacaggtgtgagtcactgtgcatttcttgatttttctttatgtagttgttatctgtggatttctgctatgaaattaaggcgttagtttttctaccaccctcccctcaatacacacatccagatacacaaacatacactccctccttccattttcagtaaagctcaattgctatttggaatcaatattcagtgcttttgttatgactatgtaaatattatgtttaaatttgtgctacctggagttagtaattactttgtttttatcatttgcttagttttctaggcatcactcattaattcaatcgcaaagcttccagtgtaactgaacatttactcaatatagccaaacatagctaataatcagttgatttcattttcctctggagacatcgctcctagagcacatcttctgatttcaggctgggttggttactttctttacccgggggtatagttgacatcccaggcctttctcatcgtcccttttctgtgcttaatctcatttattgaatgccatattgctctctttcttagtttaattctttgttttgctgaagcacatcctccagtagctttctaagaaagggtatatgcaaggtcaaatttctgagaccttgtatgattgaaatgtcattattctaccctcccaattaataatcattcagacctatacatttctatattagacatcattttgagggcatttattgtcttctagctaccagtattggtgtttagaagtgtgataccattcttgcttcagatccgatgtatgtgatgtttttatttggtggaagctcttaggattgtctttttatccctgctaatgtgaatttcattatatgccttgatgttagctgccctgtttcatgtattgggctgtgaattggtggaaagttatggtctagagaatcatgtccttcaattctgaagagtctcttgatttttaaaaatctttcccttctggtcgggcagggtggctcacacctgtaatcccagcactttgggaggctgaggcggtcacatcacctgaggtcaggagtttgagaccagcctggccgacatggtgaaaccctgtctctactaaaaatacaaaaattagctgggtgtggtggtgggtgcctgtaatctcagttacttgggaggctgaagcaggagaatcacttaaacccgggaggcggaggttgcagtgagccaagatggcgccattgcactccagcctgggcaacaagagcgaaactctgtctcaaaaaaaaaaaaaaaaaaaaatagaaagaaaggttttcctcctcagagcactccctcaataaaccatgtgtacaagtatccccatctcaggctctacttttagaaattatgacccattgatatagtctgaatatttgtccaaatctcaagttgaaatctcaaatcccaatgttggaggtagggcctgatgggaggtgtttgggtcatgggggtggatatttcatggcttggtgctgtccttgaaatagtgagtgagttctctcaagatctggttgtttaagtgtgtggcaactcccctaaccaccactctctcccttgctcttcaccctttgccttctgccatgattggaagtttcctgaggtctccccaaaagcagatgctggtaccctacttcctgtacagcctgcaaaactgcaagccaattaagcctcttttcttataaattacccagtctcaggtatttcttcatagcaacgcaagaatggcctaatacacccaccatctggtgcagtgcctggcacataggaagcacttaaataaatgattgttgaatacaaaataaactctgagaaaatcacagacagaactctcctatacatgcatacagagcacctggtgcatagtaaatctttaaggagctttagactctccgatccccccatgccctgcaatatggagtagcctcatcttggtggactcatcaggacatgctccccaggtctgtatgtccaggaatgcaattgtgtggatgcatccaggattgatcaggctcagggaattgccaatcttaaaccttaatgttcctttacaagcacaattggaacttaatgccaaaaaaaaaaaaattctgggatcttctgttataccctatcccattacggacaaatctactcgtaaaacccagctgctggataagcaagaacagccagaccaagggcgatcagtgcatggtcattagggctggtgaccctcgtctctgggcaaggcctgctggaggtggatatgcagcctgattcttgttctgtctcctcctctcctaggggctgtatggccactgtctcccattttgccacccctaccagttttccttcaaagtatgatatgtgggcaaagattaagttctcttaattatgacacatttccgctcttgcctctcaagtcactaaactgagatgtgctggacccctatggccaccacccatttacagatgatcagtgtaatctgatatactgataatccaagtgactaagcccttcattatatgttcattttccttaactccattctcagactgtaaccttaacctctaataagggggttactaggtcatagtcctcttaagttcatgtcctctacctcattactggaaccccagtatgcataacaccccctataaactgtagtgcttagaatacctgaacagccccctcctctctcacccccatttagcaggttatgcggaagcccagccccagaagcctcaggcagtcccctggcagagcccatctctgcaatctggaacttcaggcctgaaaaatcccctagaaggacccacagggaagacagctggggacagagatattgaatgacttcgccctggacctgcagctctgcaaactcacaggaagaagaaagcagacctcgctcccttggacagatgcccaagtagtaatggggttagaatgccttcctgacaactcagatccccaagggagggccctagggcagagaatcagcaaaggcaagaggatgagtcttagttctcagaaatccctgacttcccagctaagccccacctaggccaccagctgcttatgaggtcagagcagcagcagcagcagccccctccctaccccacggccccacgtggtaacaggtcacaatgccccgggtgcccactcccagaatgctgaccaaagtgggaggaggtgaggagggtttgctgggtgggtatgggggagggggagactctgcaggagcctaattccccactctgagctcacccttctgtctgcccgggccctaccccttcccctactctcacccttataatccttttcagcactaggtcttcccgtcacctccacctctctccatgacccggctctgcttacccagacccgaagcacgtgaggatccgatcccagttcctccaaggggcctgggtgctggggaggggtcaggtagtccagtgcgtccacctgtatccacctggggccctagctgggcccagctcctggacagtgtcctatggctgggggcactaggactgacaatccaggcagtcttttccaccactggcccagccctgctgctgcttctggtcagcttcctcacctttgacctgctccataggtaagtgggcagcagcctggcaggtgggcattgtaggcgggcgggccagtggacaacttccctaagcccagtcaccaccctctctctccacaggcccgcaggtcacactctgccacagcgcaaacttctcaccaggggccagagtcagggggccggtgaaggtcctggacagcaggaggctctactcctgcaaatgggtacagtctcaggacaacttagcctccaggacgcactgctgctgctgctcatggggctgggcccgctcctgagagcctgtggcatgcccttgaccctgcttggcctggctttctgcctccatccttgggcctgagagcccctccccacaactcagtgtccttcaaatatacaatgaccacccttcttcatcaggcccccttttctccttcctggctgggcaggtgggatgatacccctttcttcccagcctgaacctcacagtcctataatataggtatcagatacctggatctgagtctttgggcagcaagagaaggtaggatactagccagggagcccaaggaagaatgtggcagccacctcagagcctgtggattgggggcagccactctggcctcctctgtggctctagagaatgaaggtccagacagaaagacttgcgagagagcagtttggaaaggggtggatatcagccagcagggaaagcaggaaagggacagggatccagggagggcttcccatgagaaagcatgagaaactacatctgcggggctccgaggctcccctgccagcctggagggtccgtgcagagggacttgggtgggcctcacaccctacagtgactcctctcttggctggaccccaccccagcccgggtcacaaaggggctcctctggggagggtgggggtagatgagagtggggacttggatctgcctgccaggccgtcctgggcgctgcaggaagcaacatgacttaggtaactgcccagaggtaagtcccagtccctaattctgtagccccaccccacgcacactggtgccctcctgacccctgcaccccctctctgccccccccccccaaggtcccaggcatcttcaagaccctggccctctccccaggtgcaccagacatgatgcagcagccgcgagtggagacagataccatcggggctggcgaggggccacagcaggcagtgccctggtcagcctgggtcacgaggcatggctgggtgcgctggtgggtgagccacatgcccccgagctggatccagtggtggagcacctcgaactggcggcaaccgctgcagcgcctgctgtggggtctggaggggatactctacctgctgctggcactgatgttgtgccatgcactcttcaccactggctcccacctgctgagctccttgtggcctgtcgtggccgcggtgtggcgccacctgctaccggctctcctgctgctggtgctcagtgctctgcctgccctcctcttcacggcctccttcctgctgctcttctccacactgctgagccttgtgggcctcctcacctccatgactcacccaggcgacactcaggatttggatcaatagaagggcaaccccatcccactgcctgtgtctgttgagccctggcctagggcctgagaccccacggggagagggagggcaatgggatcagggctccctgccttggcagggcccagacccctagtccctaacaggtagactggcctgaccccggactccttcctcaagtcaatgctgcaggttcctggtgtgaggggctgggggctttgagaagagggggcaagacagatggcttagccattggtgaaaattgcttagccaggggcagagcttgaccaagccactgatagcgcccatatggatgtgatgatacccgtggggcccccttggcaactgacagcatctttttctcatagccactcagctgtctcagcttcagactcactgagaacttctacctgggtaccactggccttgccattcctcccaccaatcccctctttccacttccaggagaaccacagactctagagagggtcccagtgacaaaaatctatcagggagaaggctggccagaagccccaggagacctcaactcactcgctctccaaaccttgcagcccacgcatcctcctccctagacttcctacttcctgcctcagtctgcatccccaagtctgagaaatgggccaactggggtcagacagcacctactcactctctaagaatcccaaggtctgttatggaaaaatgatcaagaaatcccatttcacccacttacacaatgtgtggccttggccaattaattcatttgagcctcaatgttacgtgggccacttctgtcatggggttgttgtgagtcaaagacaatatctatttgtgaagcattttgtagaagccaaaaacctgtaagatgttgttttgagctctaagaactttctgtaggcgcataagatcttttgaccccaaagactgttgaaggaacaggaagcttctctgggctttcagatcaactctctgtcctggatagaattttggccctaaaatggtaaacaagaggtcggttaagtgtgtacaagatgtaaaaggtcatgtgccatgaaatctcaaaatgtgcagatgttgaactattttgattatgaaatgcttgggcctggggctgggtgccagatgcttgcacagctgtgtgagtggggacagcacagccccagggtttccaaaactgacccagcaagccgctcaggcaccagaagggctttggaaagggcaatcctttgatgccctgaatgctggccgttcgttcacttgctggcccctccaacaaaacattgagtgatcggtaattaccaagtaaggtacatgatagacaactttatccacacctgacccccacccaagccctggccatccccaactcctgcccagttctgatccctgctttatgtataaccctaaaatccttgctcttgaagccccagacccaaggtccccctcttttgtcccataaatactcagggccttggggctagcccctagaaccctggttcatttttgccttagacttttgcaaccctccatgccacggattagatgccttcagcatcagtgccaaaacccaaggtccagtccttcctttctgtttctttgtatttctcccgcattatggcatggtagtgagagcgaggtaggacatggggctgatgtggtctcatggttggatgggttttggtgcatgagctgaggctgggcgtgagtcccagcactctcacttactaactccatgcccttagtggaaatcgctaaaccttcctcaacttcactttcctcatgggtaaaactaaggcaagaacccctgtcttagggctctggcatgtgagtgaaggacctgggaccactcctagcaccacaaattatagctatgctgtgaccatcccattttagagatgagaagtcaggcccaggatagccagttgccagtggcaaggccaggccatctgagtcctaccaggctactcaagggaaggtgaagggggcaaaggaaacacaaacaacctaactaactgaagaccccaaggcttctcaagagctcctatcagagctaaagcccaggcctagggaagtcatgagtcaagccaatctagatggcaagctgaggattcaggatcccatgtggtgagggcagagaccaggctgcctggcctagatccatcattgacttggccatgcattgctagccagggacgttgctctggagccttgggtccattccaatgaagggagagaggagtttggggccctgaccagatgctctagtggatgggatgtgggcagcagcaaggagaagaccttcttcctttccccacagactatataccttttaccctcctgcccagctggtatggggtaaggaggtgcacccagactagagagctgatgggcaatactcatcaaattagatc

SEQ ID NO: 2321 - protein, 644 aa, Homo sapiens
MARARGQAPGSGGRRRPRRGGAGTGPRGESAGLLLLLLQVLPPGATAGPGRRGTRGAGAGGGGVCWPGAAPAFPRDARLLLLLPPLPPLSPPPPSSAPAASASRMDALPRSGLNLKEEPLLPAGLGSVRSWMQGAGILDASTAAQSGVGLARAHFEKQPPSNLRKSNFFHFVLAMYDRQGQPVEVERTAFIDFVEKDREPGAEKTNNGIHYRLRLVYNNGLRTEQDLYVRLIDSMSKQAIIYEGQDKNPEMCRVLLTHEIMCSRCCDRKSCGNRNETPSDPVIIDRFFLKFFLKCNQNCLKNAGNPRDMRRFQVVVSTTVSVDGHVLAVSDNMFVHNNSKHGRRARRLDPSEAATPCIKAISPGEGWTTGGATVIVIGDNFFDGLQVVFGNVLVWSELITPHAIRVQTPPRHIPGVVEVTLSYKSKQFCKGCPGRFVYTALNEPTIDYGFQRLQKVIPRHPGDPERLPKEVLLKRAADLAEALYGVPGSNQELLLKRAADVAEALYSTPRAPGPLAPLAPSHPHPAVVGINAFSSPLAIAVGDATPGPEPGYARSCSSASPRGFAPSPGSQQSGYGGGLGAGLGGYGAPGVAGLGVPGSPSFLNGSTATSPFAKERLRPRAAPPKLPTPGLPQSPRRGASRPVF

SEQ ID NO: 2322 - DNA, 698 bp, Homo sapiens
  misc_feature (400)..(400): n is a, c, g, or t
tcaggctagagcgggccgggggtgaatgcggccgaggccctttcaaggctttgaatgataccactaaggccccaacagctgatacccagacccagaatgtaaatcaggccaaaatggccacttcccaggctgacatagagaccgacccaggtatctctgaacctgacggtgcaactgcacagacatcagcagatggttcccaggctcagaatctggagtcccggacaataattcggggcaagaggacccgcaagattaataacttgaatgttgaagagaacagcagtggggatcagaggcgggccccactggctgcagggacctggaggtctgcaccagttccagtgaccacgtcagaacccacctggcgcaccccccaaggtgctctggcagacgccantggcttggcagaacccctcaggctggcaaaaccagacagccaggcagaccccaccagcacgtcagagccctccagctaggcagaccccaccagcctggcagaacccagtcgcttggcagaacccagtgattgggccaaacccagtaatctggcagaacccagtgatctggccaaaccccattgtctggcccggccctgttgtctggccgaatccactggcctggcagaatccacctggatggcagactccacctggatggcagacccaccgggctggcaggtcctcagactggcaggt

SEQ ID NO: 2323 - DNA, 4491 bp, Homo sapiens
aaatgtagagaagcagccgataaaatagcattgcctgaagaagtttggaggctgagagcagcagtagactggccaactgcagagcaagttgtttctccagccgtgcggtgcagcctcatgcccccaacccagcttagccactgtaagaagacgttcactgtacagacgaccaaacttgccgtggaagagacagttgtgagattcccttgcaaatttacatacgagaatggcttgtgaaatcatgcctctgcaaagttcacaggaagatgaaagacctctgtcacctttctatttgagtgctcatgtaccccaagtcagcaatgtgtctgcaaccggagaactcttagaaagaaccatccgatcagctgtagaacaacatctttttgatgttaataactctggaggtcaaagttcagaggactcagaatctggaacactatcagcatcttctgccacatctgccagacagcgccgccgccagtccaaggagcaggatgaagttcgacatgggagagacaagggacttatcaacaaagaaaatactccttctgggttcaaccaccttgatgattgtattttgaatactcaggaagtcgaaaaggtacacaaaaatacttttggttgtgctggagaaaggagcaagcctaaacgtcagaaatccagtactaaactttctgagcttcatgacaatcaggacggtcttgtgaatatggaaagtctcaattccacacgatctcatgagagaactggacctgatgattttgaatggatgtctgatgaaaggaaaggaaatgaaaaagatggtggacacactcagcattttgagagccccacaatgaagatccaggagcatcccagcctatctgacaccaaacagcagagaaatcaagatgccggtgaccaggaggagagctttgtctccgaagtgccccagtcggacctgactgcattgtgtgatgaaaagaactgggaagagcctatccctgctttctcctcctggcagcgggagaacagtgactctgatgaagcccacctctcgccgcaggctgggcgcctgatccgtcagctgctggacgaagacagcgaccccatgctctctcctcggttctacgcttatgggcagagcaggcaatacctggatgacacagaagtgcctccttccccaccaaactcccattctttcatgaggcggcgaagctcctctctggggtcctatgatgatgagcaagaggacctgacacctgcccagctcacacgaaggattcagagccttaaaaagaagatccggaagtttgaagatagattcgaagaagagaagaagtacagaccttcccacagtgacaaagcagccaatccggaggttctgaaatggacaaatgaccttgccaaattccggagacaacttaaagaatcaaaactaaagatatctgaagaggacctaactcccaggatgcggcagcgaagcaacacactccccaagagttttggttcccaacttgagaaagaagatgagaagaagcaagagctggtggataaagcaataaagcccagtgttgaagccacattggaatctattcagaggaagctccaggagaagcgagcggaaagcagccgccctgaggacattaaggatatgaccaaagaccagattgctaatgagaaagtggctctgcagaaagctctgttatattatgaaagcattcatggacggccggtaacaaagaacgaacggcaggtgatgaagccactatacgacaggtaccggctggtcaaacagatcctctcccgagctaacaccatacccatcattggttccccctccagcaagcggagaagccctttgctgcagccaattatcgagggcgaaactgcttccttcttcaaggagataaaggaagaagaggaggggtcagaagacgatagcaatgtgaagccagacttcatggtcactctgaaaaccgatttcagtgcacgatgctttctggaccaattcgaagatgacgctgatggatttatttccccaatggatgataaaataccatcaaaatgcagccaggacacagggctttcaaatctccatgctgcctcaatacctgaactcctggaacacctccaggaaatgagagaagaaaagaaaaggattcgaaagaaacttcgggattttgaagacaactttttcagacagaatggaagaaatgtccagaaggaagaccgcactcctatggctgaagaatacagtgaatataagcacataaaggcgaaactgaggctcctggaggtgctcatcagcaagagagacactgattccaagtccatgtgaggggcatggccaagcacagggggctggcagctgcggtgagagtttactgtccccagagaaagtgcagctctggaaggcagccttggggctggccctgcaaagcatgcagcccttctgcctctagaccatttggcatcggctcctgtttccattgcctgccttagaaactggctggaagaagacaatgtgacctgacttaggcattttgtaattggaaagtcaagactgcagtatgtgcacatgcgcacgcgcatgcacgcacacacacacacagtagtggagctttcctaacactagcagagattaatcactacattagacaacactcatctacagagaatatacactgttcttccctggataactgagaaacaagagaccattctctgtctaactgtgataaaaacaagctcaggactttattctatagagcaaacttgctgtggagggccatgctctccttggacccagttaactgcaaacgtgcattggagccctatttgctgccgctgccattctagtgacctttccacagagctgcgccttcctcacgtgtgtgaaaggttttccccttcagccctcaggtagatggaagctgcatctgcccacgatggcagtgcagtcatcatcttcaggatgtttcttcaggacttcctcagctgacaaggaattttggtccctgcctaggaccgggtcatctgcagaggacagagagatggtaagcagctgtatgaatgctgattttaaaaccaggtcatgggagaagagcctggagattctttcctgaacactgactgcacttaccagtctgattttatcgtcaaacaccaagccaggctagcatgctcatggcaatctgtttggggctgttttgttgtggcactagccaaacataaaggggcttaagtcagcctgcatacagaggatcggggagagaaggggcctgtgttctcagcctcctgagtacttaccagagtttaatttttttaaaaaaaatctgcactaaaatccccaaactgacaggtaaatgtagccctcagagctcagcccaaggcagaatctaaatcacactattttcgagatcatgtataaaaagaaaaaaaagaagtcatgctgtgtggccaattataatttttttcaaagactttgtcacaaaactgtctatattagacattttggagggaccaggaaatgtaagacaccaaatcctccatctcttcagtgtgcctgatgtcacctcatgatttgctgttacttttttaactcctgcgccaaggacagtgggttctgtgtccacctttgtgctttgcgaggccgagcccaggcatctgctcgcctgccacggctgaccagagaaggtgcttcaggagctctgccttagacgacgtgttacagtatgaacacacagcagaggcaccctcgtatgttttgaaagttgccttctgaaagggcacagttttaaggaaaagaaaaagaatgtaaaactatactgacccgttttcagttttaaagggtcgtgagaaactggctggtccaatgggatttacagcaacattttccattgctgaagtgaggtagcagctctcttctgtcagctgaatgttaaggatggggaaaaagaatgcctttaagtttgctcttaatcgtatggaagcttgagctatgtgttggaagtgccctggttaatccatacacaaagacggtacataatcctacaggtttaaatgtacataaaaatatagtttggaattctttgctctactgtttacattgcagattgctataatttcaaggagtgagattataaataaaatgatgcactttaggatgtttcctatttttgaaatctgaacatgaatcattcacatgaccaaaaattgtgtttttttaaaaatacatgtctagtctgtcctttaatagctctcttaaataagctatgatattaatcagatcattaccagttagcttttaaagcacatttgtttaagactatgtttttggaaaaatacgctacagaatttttttttaagctacaaataaatgagatgctactaattgttttggaatctgttgtttctgccaaaggtaaattaactaaagatttattcaggaatccccatttgaatttgtatgattcaataaaagaaaacaccaagtaagttatataaaat

SEQ ID NO: 2324 - protein, 697 aa, Homo sapiens
MACEIMPLQSSQEDERPLSPFYLSAHVPQVSNVSATGELLERTIRSAVEQHLFDVNNSGGQSSEDSESGTLSASSATSARQRRRQSKEQDEVRHGRDKGLINKENTPSGFNHLDDCILNTQEVEKVHKNTFGCAGERSKPKRQKSSTKLSELHDNQDGLVNMESLNSTRSHERTGPDDFEWMSDERKGNEKDGGHTQHFESPTMKIQEHPSLSDTKQQRNQDAGDQEESFVSEVPQSDLTALCDEKNWEEPIPAFSSWQRENSDSDEAHLSPQAGRLIRQLLDEDSDPMLSPRFYAYGQSRQYLDDTEVPPSPPNSHSFMRRRSSSLGSYDDEQEDLTPAQLTRRIQSLKKKIRKFEDRFEEEKKYRPSHSDKAANPEVLKWTNDLAKFRRQLKESKLKISEEDLTPRMRQRSNTLPKSFGSQLEKEDEKKQELVDKAIKPSVEATLESIQRKLQEKRAESSRPEDIKDMTKDQIANEKVALQKALLYYESIHGRPVTKNERQVMKPLYDRYRLVKQILSRANTIPIIGSPSSKRRSPLLQPIIEGETASFFKEIKEEEEGSEDDSNVKPDFMVTLKTDFSARCFLDQFEDDADGFISPMDDKIPSKCSQDTGLSNLHAASIPELLEHLQEMREEKKRIRKKLRDFEDNFFRQNGRNVQKEDRTPMAEEYSEYKHIKAKLRLLEVLISKRDTDSKSM

SEQ ID NO: 2325 - DNA, 523 bp, Homo sapiens
ttttttttttccaagaaatcttaatttctttattgtttgactttttgactcaacaatttttttaaaactttttgtttttttctgaaacgttcttgttgttatgagccttttgttttgttctcgttaaatgcactcgacccaaaattggtttggcatatcgaaaaggagaccaaggagggaggggctggggcgtgggaggtggggaggaggcccgaatggacagaaagttgaggataagagaagaggaacatagagacagccagaaagacatggggaaagagtgttggagacagagaaaggggaaggcaagggaaagccaaaagaaaccaaaatccagagaaaaagaattaacaagatttaggagcaaacgagttcaggagcctaaggaagggagtaggagaggaaaccaagacccttctctgtaccgtcccagctggggtgggggcgtcaaggcaccaggtctggttaggttggggggacacctgggctctgggggcggctttgcactggactgcagtgatgt

SEQ ID NO: 2326 - DNA, 370 bp, Homo sapiens
aaacttacggctaggtacgaggcctgggtttggaacggcggtggccggtgcggcgtgttcggtggcggctctggccgctcaggcgcctgcggcttgggtgagcgcacgcgaggcggcgaggcggcagcgtgtttctaggtcgtggcgtcgggcttccggagctttggcggcagctaggggaggatggcggagtcttcggataagctctatcgagtcgagtacgccaagagcgggcgcgcctcttgcaagaaatgcagcgagagcatccccaaggactcgctccggatggccatcatggtgcagtcgcccatgtttgatggaaaagtcccacactggtaccacttctcctgcttctggaaggtgggccact

SEQ ID NO: 2327 - DNA, 429 bp, Homo sapiens
gtggtttcagaggggctcatgcttcctagggcagctgaacccatccccaggaagacaggccatgggagcatgacaggtagcctggtagcactctcctccttgtccctttttgattgaaacatggctgtagctgggggtaggggcagtgcaggcccatcaataattcagcaagatggggaaaagctgcagctcctccagcaccccctgctgctggggccaggctagtgttcgcaagcatgcctcagtctggcatgtgacttctcgccctgcaggtgccctggcaggagggactggcttacgcaccctgtgcaggatcgtcttctcagcttacagagcctagtgtgattcaacaaccctccatctctgcccccaacatgcccaactgatctggtggagggaactgaagatgaaggcctctcaggcaccatg

SEQ ID NO: 2328 - DNA, 3292 bp, Homo sapiens
ttttttttttaaataaatatttttaaaaataaatattaaataccatctagttccaaaactcccaaagaaatccaacacagagtagcaagcatgtatatatcagaacagcatgaagtttaaggccatgtcttgggatagggcagacctgcatttgggtagctgtgatctcacatgctgcaaaaattacttcatttaaaaaaatgtggctaggcgcagtggctcacgcctgtaatccaagcactttgggaggccgaggcaggcggatcatgaggtcaggagatcgagaccatcctggctaacacggtgaaatcccgtccctactaaaaatacaaaagattagccgagtgtggtggcaggcacctgtagtcccagctactcgggagcctgagacgggagaatggcgtgaatccgggaggcggagcttgcagtgagccgagatggcgccactgcactccagcctgggcgacagagcaagactccaactcaaaaaaaaaaaaaaaatgctaaggtgttacaagtaacaacttctctaagcctaaatatcctgatatgtaaaaataggggtaataagatacaacttcatggggttgtcaggattatgtaacttaatttatgtaaaatgcttagcatgttgtccggcacatagaaaattgtaactgttgtctcatcattatcatacttcattccacaaatacttattgctatttgccaggtccagccctagtcataatacgctcaaaatgcatcttaatatgttacacttcacatcttcacagtctgtctgcgaggcactaaagttcacaagaaatgctaccttgcttcagaaggtttgaagcatttccatgaggccaatgaagactgcatttccaaaggaggaatcctggttatccccaggaactccgacgaaatcaacgccctccaagactatggtaaaaggagcctgccaggtgtcaatgacttttggctgggcatcaatgacatggtcacggaaggcaagtttgttgacgtcaacggaatcgctatctccttcctcaactgggaccgtgcacagcctaacggtggcaagcgagaaaactgtgtcctgttctcccaatcagctcagggcaagtggagtgatgaggcctgtcgcagcagcaagagatacatatgcgagttcaccatccctcaataggtctttctccaatgtgtcctccaagcaagattcatcataacttataggttcatgatctctaagatcaagtaaaaatcataatttttacttattaaaaaattgcaacacaagatcaatgtccatagcaatatgatagcatcagccaattttgctaacacatttctttgggattttgcccttcctggggtataggggatcagaaatattgatccatgtgcacgcagataaaatggcttctgctaaacagactaaaatctttctctctagtctttctcacttgtacaaacccagtttgttttcaaaaaatcacagtagcaatgcaactcatcactctagaaaagcaagcttaggctacctgaaagattttcccttggaagtttagcgtatgtttgactaacaagaattcsctacatcagagactctaggtgctatataatccaaaaacttttcagcctgttgctcattctgtcccatgctggcaataataccttgtcagcccattacccttattttgaattgctccatctcctggtgggacttgtatcttgtctgccatatcagaacacaaacccctgaagaggttctgatttgattttttttttttcttcatgcctaccctttttttggaagtttccagccgcaatttgaaakgaaatgacaaggtgtatatttgatcaattttcattcccaccattgcattacaacctctaacttaaatgggtaaccctaaggcatatcaaagaagcagaytgcatgataaacggaaatagaaaaaaagaacctacatttattttgctttagcatccttactctcaccttttatgagattgagagtggacttacatttccttttttacattttcgtatacttattttttttagccatcattatatgtttaagtctattatgggcaaccaatctttggaagctgaawactgartttaaagaatgctatcttggaaaattgcatacgtctgtgcaattttttattctgcctagtgctattctgcttgtttaactagattgtacaaaataacttcattgcttaatatcaaattacaaagtttagacttggagggaaatgggctttttagaagcaaacaattttaaatatattttgttcttcaaataaatagtgtttaaacattgaatgtgttttgtgaacaatatcccactttgcaaactttaactacacatgcttggaattaagttttagctgttttcattgctcagtaataaagcctgaattctgatcaatagaaaatgtgttcgagtgttcattacagttattcaaaatatgttggtttatattaaacttggcagagtttgaggggaattaccctgaatttaatcaaactggtgattcggatatactcagagaacaattttacctggcaatgaagaggtatggtctggctagaggagggaaacttttaaaaaattttagctgcagaggctgggcgcagtggctcacacctataatcccagaaaccctgtctctacacaaagtaccaaaattagccaggtgtggtaaggcacgcctgtgatcccagctactcaggagactgagctgggaggatttcttgaactcaggaagctgaggctacaatgagctcagattgtgccacgacactgcagcctggatgacagagcaagaccttgtctcaaaacagcaaaaaatgtagctgcaattgtatctggttgatcttgaccaactccctacttccaacgtaaccacagtcttcgtaaaggtaataaccataatgaaacgggtggacactggtgagtaagtgcattctcttcacatttcaggtactatgctagatcttatataattctcatttatcttgaggaacaaccctgagaatttaacccggagaattaggctctagaatcatttcatattacagaagaagaaaaaaaagagaggtaagttgccctaagtcacaggccaggaaatagtggaactgtcactggaacttaacaagctgactcagatcctgtatacttactacccatggggagcaataaaaggtaaagcccattcagaaaggcaatgggagtggattctaatccagtatctcaatttccttaggtgaagtaacaatctggactaacag

SEQ ID NO: 2329 - protein, 197 aa, Homo sapiens
MAKNGLVICILVITLLLDQTTSHTSRLKARKHSKRRVRDKDGDLKTQIEKLWTEVNALKEIQALQTVCLRGTKVHKKCYLASEGLKHFHEANEDCISKGGILVIPRNSDEINALQDYGKRSLPGVNDFWLGINDMVTEGKFVDVNGIAISFLNWDRAQPNGGKRENCVLFSQSAQGKWSDEACRSSKRYICEFTIPQ

SEQ ID NO: 2330 - DNA, 1053 bp, Homo sapiens
ggggatcctggagctggaggagctcctgcgggcagggaagtcttcttgcagccgtgtggacgaagtttggcccaaccttttcataggagatgcaaacagcatcaagtgtgcggagacaggcggctgaaagccggcagcacgaactgcccgtcagagaagtgcacagcctgggccagatactcccacaggatggactcactgcagaagcaggacctccggaggcccaagatccatggggcagtccaggcatctccctaccagccgcccacattggcttcgctgcagcgcttgctgtgggtccgtcaggctgccacactgaaccatatcgatgaggtctggcccagcctcttcctgggagatgcgtacgcagcccgggacaagagcaagctgatccagctgggaatcacccacgttgtgaatgccgctgcaggcaagttccaggtggacacaggtgccaaattctaccgtggaatgtccctggagtactatggcatcgaggcggatgacaaccccttcttcgacctcagtgtctactttctgcctgttgctcgatacatccgagctgccctcagtgttccccaaggccgcgtgctggtacactgtgccatgggggtaagccgctctgccacacttgtcctggccttcctcatgatctatgagaacatgacgctggtagaggccatccagacggtgcaggcccaccgcaatatctgccctaactcaggcttcctccggcagctccaggttctggacaaccgactggggcgggagacggggcggttctgatctggcaggcagccaggatccctgacccttggcccaaccccaccagcctggccctgggaacagcaggctctgctgtttctagtgaccctgagatgtaaacagcaagtgggggctgaggcagaggcagggatagctgggtggtgacctcttagcgggtggatttccctgacccaattcagagattctttatgcaaaagtgagttcagtccatctctataataaaatattcatcgtcgcaaaaaaaaaaaaaaaaaaaaaaaaaaaaaa

SEQ ID NO: 2331 - protein, 198 aa, Homo sapiens
MDSLQKQDLRRPKIHGAVQASPYQPPTLASLQRLLWVRQAATLNHIDEVWPSLFLGDAYAARDKSKLIQLGITHVVNAAAGKFQVDTGAKFYRGMSLEYYGIEADDNPFFDLSVYFLPVARYIRAALSVPQGRVLVHCAMGVSRSATLVLAFLMIYENMTLVEAIQTVQAHRNICPNSGFLRQLQVLDNRLGRETGRF

SEQ ID NO: 2332 - DNA, 440 bp, Homo sapiens
tttttttttttttttttttttttggcggaaggcagtcatagcaccatttattgtccaaagtacacacacctgagggcccctccccacacatggaaacaggagaaacaaatttttttaagcgggttctttggaaccgagaggggaaggggaacggggaggggagtttcttccttccctcagctttcgcctggaagcctagaactggcttccagccctagcccctcagtgggcagactggggtcagcggcttcacagagaagtagaggtgggcaggagaggcccaaagcccagctccggaggcccccgaggccctttttttcccccaggctgaggggcagggagaactgtgcccaccatgcccggactcccggcggcattttagacaggccaccgcccactctgggcaccaaccttcttaagggagggagaccagcctggat

SEQ ID NO: 2333 - DNA, 936 bp, Homo sapiens
  misc_feature (498)..(498): n is a, c, g, or t
  misc_feature (542)..(542): n is a, c, g, or t
  misc_feature (582)..(582): n is a, c, g, or t
  misc_feature (600)..(600): n is a, c, g, or t
  misc_feature (697)..(697): n is a, c, g, or t
  misc_feature (726)..(726): n is a, c, g, or t
  misc_feature (739)..(739): n is a, c, g, or t
  misc_feature (839)..(839): n is a, c, g, or t
  misc_feature (863)..(863): n is a, c, g, or t
  misc_feature (881)..(881): n is a, c, g, or t
  misc_feature (895)..(895): n is a, c, g, or t
  misc_feature (931)..(931): n is a, c, g, or t
tttttttttttttttttttcttttctgctgtgtttttattctcaaaacatattttcacatgcctcattcaaaattaaagttcttaagttttttagacatagaattcagtatatcataaatatgaaagagacagaattacagcttaattttacaatgatattaagattgaaattattcattaaaaaagtatatcagcttacagtgacttctgctgtagctgtagcttttgttcaatgatgtccgagaaacgaggaactttttttgaaatagccacacggatatcatcactcagattaaagcagcttctggactttgttttgaaatgtaaaagtgatgaaaatcccaactcacaaaggtatgtagttgcaaatggcataaggatttctagagctgtctttgccaggtttggaaatgctgtgaattgggcacaccagaaatcctcaagcttcattgtctcaaattccattaggatttggccactagctcgtaattcagcangatcatttatcattagatagctatcatcatcaaaatcgatattnataagtaatgggatcaatatccaattacttgactcattangatctccaatggtaaatntccatgggtagatgtgctcaattgttgcagatgcagtggtaattcagctgcattgaataggcatcattatctgtaacaatatttctcaagtaaagtnaattggggtaaattctttcacaatgcgtnttggcaaatgganctgcctaacaaggcgatactctctcagctgaactgtgtcatcaagtctctgcaagtgcctgagtcatagagtgttgaaaaccgcaggtatgcagtggatntaacccttatttctagcaacaacnatacagcctgtgtggtgnactggttatcacancatactaatgtgagagtatggcccggaagcgccacncatct

SEQ ID NO: 2334 - DNA, 382 bp, Homo sapiens
ggcccgaccacctacctccccgccgctccagagggggctcgcagagctgaggacgcgcgcagcgctgctcaaggtctctctctctcagcaccctcgccggccggcgtctgacgcgggtgccagggtctccgggcacctttcagtgtccattccctcagccagccaggactccgcaacccagcagttgccgctgcggccacagcccgaggggacctgcggacaggacgccggcaggaggaggggtgcgcagcgcccgcgcagagcgtctccctcgctacgcagcgagacccgggcctcccggccccaggagcccccagctgcctcgccaggtgtgtgggactgaagttcttggagaagggagtccaactcttcaaggtgaact

SEQ ID NO: 2335 - DNA, 471 bp, Homo sapiens
ttttttttttttaatatgagtcctgccatttcttttatttacactcttgactcagcaagaattatgacagaagtccacatggttatctgcagcttgttaagtcttctacaatggctttgactttataacccactcagcatttgggttaagctgatataaatccttcatgtaagtgtcatcatcaaggcagcgttccccaatatttcctccaatttcatacaaaaaaacttctcctttcttgagagtctgggcaaccccactttcttggctgagaaacctggcaagtacatcactggcttttagttcttcagttagctgtattgccatggaaactttcgaaagatggggagcttgcactcgaatcactccctgaggaacgtcagcagcaaagtagatggtccatgttccatgcaaaaggaacggctcctactcaaatccagggaattgctaccctgatggaaagcaggcctc

SEQ ID NO: 2336 - DNA, 2559 bp, Homo sapiens
gcgggccgaggagccgggcgcaatggagcggaagaggtgggagtgcccggcgctcccgcagggctgggagagggaagaagtgcccagaaggtcggggctgtcggccggccacagggatgtcttttactatagcccgagcgggaagaagttccgcagcaagccgcagctggcgcgctacctgggcggctccatggacctgagcaccttcgacttccgcacgggcaagatgctgatgagcaagatgaacaagagccgccagcgcgtgcgctacgactcctccaaccaggtcaagggcaagcccgacctgaacacggcgctgcccgtgcgccagacggcgtccatcttcaagcagccggtgaccaagattaccaaccaccccagcaacaaggtcaagagcgacccgcagaaggcggtggaccagccgcgccagctcttctgggagaagaagctgagcggcctgaacgccttcgacattgctgaggagctggtcaagaccatggacctccccaagggcctgcagggggtgggacctggctgcacggatgagacgctgctgtcggccatcgccagcgccctgcacactagcaccatgcccatcacgggacagctctcggccgccgtggagaagaaccccggcgtatggctcaacaccacgcagcccctgtgcaaagccttcatggtgaccgacgaggacatcaggaagcaggaagagctggtgcagcaggtgcggaagcggctggaggaggcgctgatggccgacatgctggcgcacgtggaggagctggcccgtgacggggaggcgccgctggacaaggcctgcgctgaggacgacgacgaggaagacgaggaggaggaggaggaggagcccgacccggacccggagatggagcacgtctagggcaggtgctgcggggccacgggggctccctggagtcgggtcctggcagtggggactgcctggtgaacacagatgtgcttgggatgacgggtgcctcccaagagcttcccatctccctagaagagcccaagcgtccccgtcccgtggagtcgctaaagccagccctccctgtcctttccagaggccctgccgagagcccgtgctgcctgctggagccgcctgcagacgcggtcctcggccccacgtgaaccaggctcggcggcgaagcccagccttggagacacccaggaggaaggccgtgctcctggctccctcctcggcccgtccccacttcccggggcctcggggcacacagctggggctgcccccacccgaaagaccctccacgctcgtcctctacagagtccggcttcgggaagtgccgggtgctcctgggccctgcctggctccctacgacctttgggctcgaggccagctcctccccatgcccgctgtcccagctccttgagactggagagcagccagcaggtgcccggcagctcggcgccacggcttgctgacagctgggagggtttctcggtctggaggcgtagttttgaaactcacatcacccactgtgcagcgtgaggacgggactctggtctgctgtggggggcatgcaggacggcgccactctctgccctgccatgcggctggtggtgccacagagcctcaccgtgcctgagtggcatgcccaggaggccgctctccttcagtaaatgtaacacagtcgaggcacgtcatcgggcagccttccctgtgtgccaacgccagccttcgcttctgaaaaccaaactccagccgctgccagtcgggacttggtcgcccggcgctgccagaatgctccactgccagccggcccccctgcctcggtttcccttctgtttagtggcgacacaggcacccagctttggggtggtgctgacgctcccaggggtgccaggagccactgggacagggtgaggctcccagacgctcctcgaggtgcccagctctccagggagcttctggcccaaggccgtctgagggatctgctccttaaccccccagtgccttggcgagggcaggttccaagccacagacgcctgccccgagtggactctgcggccagtccctggtgccctcctggccctgctgcccagtgagggctcctacgggtgggttcattggcctgggcccagcgagcccccacctgcattgaccttaggcccatagagagggcctgtcccggtgctgccccagccaggatctggtcgctgccccagggggactgatgggcagagtcgcccctgtggctggactgtgaccatccctgatggggcctgaccgcgggagctgaggaagcgccgctccaccgtctgccctccaaggacccgcatggaggcagtgggctggcagcttcctgctgctccctgtcagagtcaaagcacaaatcctcaggacgggctcaagggccagggcagccgagggaagctccaggtggggaccacgtcttcctgaggttggtgcccactggctgggaccctttgcagtggggtggcctcccctctgtctgcctggtggagggagccgtgggcgtggggacgtgactgaataaagccaccatgggtggatgtgcttgg

SEQ ID NO: 2337 - protein, 291 aa, Homo sapiens
MERKRWECPALPQGWEREEVPRRSGLSAGHRDVFYYSPSGKKFRSKPQLARYLGGSMDLSTFDFRTGKMLMSKMNKSRQRVRYDSSNQVKGKPDLNTALPVRQTASIFKQPVTKITNHPSNKVKSDPQKAVDQPRQLFWEKKLSGLNAFDIAEELVKTMDLPKGLQGVGPGCTDETLLSAIASALHTSTMPITGQLSAAVEKNPGVWLNTTQPLCKAFMVTDEDIRKQEELVQQVRKRLEEALMADMLAHVEELARDGEAPLDKACAEDDDEEDEEEEEEEPDPDPEMEHV

SEQ ID NO: 2338 - DNA, 2328 bp, Homo sapiens
agggggagcccaggagaccagaacatgaactccttcaattataccacccctgattatgggcactatgatgacaaggataccctggacctcaacacccctgtggataaaacttctaacacgctgcgtgttccagacatcctggccttggtcatctttgcagtcgtcttcctggtgggagtgctgggcaatgccctggtggtctgggtgacggcattcgaggccaagcggaccatcaatgccatctggttcctcaacttggcggtagccgacttcctctcctgcctggcgctgcccatcttgttcacgtccattgtacagcatcaccactggccctttggcggggccgcctgcagcatcctgccctccctcatcctgctcaacatgtacgccagcatcctgctcctggccaccatcagcgccgaccgctttctgctggtgtttaaacccatctggtgccagaacttccgaggggccggcttggcctggatcgcctgtgccgtggcttggggtttagccctgctgctgaccataccctccttcctgtaccgggtggtccgggaggagtactttccaccaaaggtgttgtgtggcgtggactacagccacgacaaacggcgggagcgagccgtggccatcgtccggctggtcctgggcttcctgtggcctctactcacgctcacgatttgttacactttcatcctgctccggacgtggagccgcagggccacgcggtccaccaagacactcaaggtggtggtggcagtggtggccagtttctttatcttctggttgccctaccaggtgacggggataatgatgtccttcctggagccatcgtcacccaccttcctgctgctgaataagctggactccctgtgtgtctcctttgcctacatcaactgctgcatcaaccccatcatctacgtggtggccggccagggcttccagggccgactgcggaaatccctccccagcctcctccggaacgtgttgactgaagagtccgtggttagggagagcaagtcattcacgcgctccacagtggacactatggcccagaagacccaggcagtgtaggcgacagcctcatgggccactgtggcccgatgtccccttccttcccggccattctccctcttgttttcacttcacttttcgtgggatggtgttaccttagctaactaactctcctccatgttgcctgtctttcccagacttgtccctccttttccagcgggactcttctcatccttcctcatttgcaaggtgaacacttccttctagggagcaccctcccaccccccacccccccccacacaccatctttccatcccaggcttttgaaaaacaaacagaaacccgtgtatctgggatatttccatatggcaataggtgtgaacagggaactcagaatacagacaagtagaaagattctcgcttaaaaaaatgtatttattttatggcaagttggaaaatatgtaactggaatctcaaaagttctttgggacaaaacagaagtccatggagttatctaagctcttgtaagtgagttaatttaaaaaagaaaattaggctgagagcagtggctcacgcctgtaatcccagaactttgggaggctaaggtgggtggatcacctgaggtcaagagttccagaccaggctggccagcatggtgaaaccccgtctgtactaaaaatacaaaaaattaactgggcatggtagtgggtgcctgtaatcccagctacttgggaggctgaggtgggagaattgctcgaaccttggaggtggaggttgtggtgagccatgatcgcaccactgcactctagcctgggtgaccgagggaggctctgtctcaaaagcaaagcaaaaacaaaaacaaaaacacctaaaaaacctgcagttttgtttgtactttgtttttaaattatgctttctattttgagatcattgcaaactcaacacaattgtaagtaatgatacagagggatcttgtgtacccttcacccagcctcccccaatggcaacatcttgcaaaactacaatgtagtctcataaccaggatattgacattgatacagtgaagatacaggacattctcatcaccacagggatccccaggatgcccacttccctccacccccacaccccagccgtgtccctaacccctggcaaccaggaatccactctccatttctataatgttgtcatttcaagaatgttattcaatggaatcatatagtatgtaacctgttttgagcttaaaaaaaaaagtatacatgactttaatgaggaaaataaaaatgaatattgaaaaaaaaaactttagag

SEQ ID NO: 2339 - protein, 350 aa, Homo sapiens
MNSFNYTTPDYGHYDDKDTLDLNTPVDKTSNTLRVPDILALVIFAVVFLVGVLGNALVVWVTAFEAKRTINAIWFLNLAVADFLSCLALPILFTSIVQHHHWPFGGAACSILPSLILLNMYASILLLATISADRFLLVFKPIWCQNFRGAGLAWIACAVAWGLALLLTIPSFLYRVVREEYFPPKVLCGVDYSHDKRRERAVAIVRLVLGFLWPLLTLTICYTFILLRTWSRRATRSTKTLKVVVAVVASFFIFWLPYQVTGIMMSFLEPSSPTFLLLNKLDSLCVSFAYINCCINPIIYVVAGQGFQGRLRKSLPSLLRNVLTEESVVRESKSFTRSTVDTMAQKTQAV

SEQ ID NO: 2340 - DNA, 474 bp, Homo sapiens
ttttttttttttttttttgaatggatctttttatttctaggtttataagatgcaacatctcaccccgttgacacggttagtttgcatgcacacacagagcggccagccgccccgagcctgtgggcaggccagcagggtcagtagcaggtgccagctgtgtcggacatgaccagggacacgttgtacagggtgggtttaccggtggacttgtccacggtcctctcggtgaccctgttgggcagggcctcatgggccaccacgcaggtgtaggtctcccccgtgttccattcctcttcggacacggtcaggatgctgtgggcgaagtaccggcctggggcctggggctcaggcattggggcgctggtcacatacttctccggggacaagggctgccccctctgcatccactgcaacgaaacttccgccgggaagaaagccgtaccaggcacgtgatgggggccgaatccccaggtt

SEQ ID NO: 2341 - DNA, 156 bp, Homo sapiens
  misc_feature (129)..(129): n is a, c, g, or t
gttcggaagttttcgcgccggggtggagtcatcctgggaactccacgcgactttggtggaggtagttctttggcagcgggcatggcgggtaccgtggtgctggacgatgtggagctgcgggaggctcanaaagattacctggacttcctggacgac

SEQ ID NO: 2342 - DNA, 313 bp, Homo sapiens
gaggaagcgcagcaactcgtgtctgagcgcccggcggaaaaccgaagttggaagtgtctcttagcagcgcgcggagaagaacggtgagccagcatcatggcagaacaggatgtggaaaacgatcttttggattacgatgaagaggaagagccccaggctcctcaagagagcacaccagctccccctaagaaagacatcaagggatcctacgtttccatccacagctctggcttccgggactttctgctgaagccggagctcctgcgggccatcgtggactgtggctttgagcatccttctgaggtccagcatg

SEQ ID NO: 2343 - DNA, 1743 bp, Homo sapiens
cagtatccctcctgacaaaactaacaaaaatcctgttagccaaataatcagccacattcatatttaccgtcaaagtttttatcctcattttacagcagtggagagcgattgccccgggtcccacgttaggaagagagagaactgggatttgcacccaggcaatctggggacagagctgtgatcacaactccatgagtcagggccgagccagccccttcaccaccagccggccgcgccccgggaaggaagtttgtggcggaggaggttcgtacgggaggagggggaggcgcccacgcatctggggctgactcgctctttcgcaaaacgtctgggaggagtccctggggccacaaaactgcctccttcctgaggccagaaggagagaagacgtgcagggaccccgcgcacaggagctgccctcgcgacatgggtcacccgccgctgctgccgctgctgctgctgctccacacctgcgtcccagcctcttggggcctgcggtgcatgcagtgtaagaccaacggggattgccgtgtggaagagtgcgccctgggacaggacctctgcaggaccacgatcgtgcgcttgtgggaagaaggagaagagctggagctggtggagaaaagctgtacccactcagagaagaccaacaggaccctgagctatcggactggcttgaagatcaccagccttaccgaggttgtgtgtgggttagacttgtgcaaccagggcaactctggccgggctgtcacctattcccgaagccgttacctcgaatgcatttcctgtggctcatcagacatgagctgtgagaggggccggcaccagagcctgcagtgccgcagccctgaagaacagtgcctggatgtggtgacccactggatccaggaaggtgaagaagggcgtccaaaggatgaccgccacctccgtggctgtggctaccttcccggctgcccgggctccaatggtttccacaacaacgacaccttccacttcctgaaatgctgcaacaccaccaaatgcaacgagggcccaatcctggagcttgaaaatctgccgcagaatggccgccagtgttacagctgcaaggggaacagcacccatggatgctcctctgaagagactttcctcattgactgccgaggccccatgaatcaatgtctggtagccaccggcactcacgaaccgaaaaaccaaagctatatggtaagaggctgtgcaaccgcctcaatgtgccaacatgcccacctgggtgacgccttcagcatgaaccacattgatgtctcctgctgtactaaaagtggctgtaaccacccagacctggatgtccagtaccgcagtggggctgctcctcagcctggccctgcccatctcagcctcaccatcaccctgctaatgactgccagactgtggggaggcactctcctctggacctaaacctgaaatccccctctctgccctggctggatccgggggacccctttgcccttccctcggctcccagccctacagacttgctgtgtgacctcaggccagtgtgccgacctctctgggcctcagttttcccagctatgaaaacagctatctcacaaagttgtgtgaagcagaagagaaaagctggaggaaggccgtgggcaatgggagagctcttgttattattaatattgttgccgctgttgtgttgttgttattaattaatattcatattatttattttatacttacataaagattttgtaccagtgg

SEQ ID NO: 2344 - protein, 335 aa, Homo sapiens
MGHPPLLPLLLLLHTCVPASWGLRCMQCKTNGDCRVEECALGQDLCRTTIVRLWEEGEELELVEKSCTHSEKTNRTLSYRTGLKITSLTEVVCGLDLCNQGNSGRAVTYSRSRYLECISCGSSDMSCERGRHQSLQCRSPEEQCLDVVTHWIQEGEEGRPKDDRHLRGCGYLPGCPGSNGFHNNDTFHFLKCCNTTKCNEGPILELENLPQNGRQCYSCKGNSTHGCSSEETFLIDCRGPMNQCLVATGTHEPKNQSYMVRGCATASMCQHAHLGDAFSMNHIDVSCCTKSGCNHPDLDVQYRSGAAPQPGPAHLSLTITLLMTARLWGGTLLWT

SEQ ID NO: 2345 - DNA, 17286 bp, Homo sapiens
tctagatgaagagctgtgaatcttcctcccaatctttggacaagaacccgcagacacagacaataacagcataacagttccttggtagaggtctgtgacttcctcatcaaggaaacattccttttctctttccttttttttttttttttttagttgttggcactgtgcactaagaaacgaattttctctgcagagtaaggaacagccaggcttgaaactctcaccaaatctgccagtctgggtctactttaaatgtgctacaacttctttcaaacacacaataaatgaaaagaccaatctgaatgatcagtgcaatttagttagtatcatgtcactttaaaatctggccaagaatcctcatactatcctgctcttgtccccatcttagagttgaaaaaactgaggtccagagaaggcaagtaacttgcttaacatcacacagctaagtagcagtgaaaatagggacatgaatctagtcccagttgactccacagggtcatgggagcaccctcacttccaagaacatgttgacatggggccacagaaccaacgggagagtacaggagctacagcagagcctggaggccagacttctcacttaaagaagaggctcctaggattccagagaggcaatggggctgccccagggttacagagctagttaaaatcacacactagctctgctacaaattaactggacgatatcatgaaacaatcgcttgggaacatttatttggggagaggttcttgatgaaaccaaatgagcttgcttttcaaaactacccagggtttgttttacttccttacttgggtgcagagcttcataactatggagtctcttcactccttgctcatgactttctgagctgaagaaaaccctgctatcccagagtgcacagcaaggaggcctagaggactgagggcccccaaactacttctcacctgtctggagagaacactgttcactccaatcagcaagttcaagacctcagcacccctggcaattgcagtgtacggaactcccagaaccatgataattttgtaggaagctgtcagaaatcacagatccaaggacttgtctccacaatctgccatctcaactcttattctgagctgcggcctgagctattaaaaacaaaacattctcgtgggcaagctccacaattagcctcatttccacactagaaaaactgttctgcatgagctgaaattgcacagagattgtttcttgtcatagtgatgcttttcaagggccgtgctgagagccagcgaggatgtgacccagtggtaatctgaattgcttcaccaaacacatttttatcccatcatctcggctacatgaaagggggccacagtgctcgtgttcaaggctttacagtcccgctgttcagcaataaaatgaggcaagaaatattagccatccctggctgatgccttaattctttcccaacaatgtcagagaatctgtaccctacaggttttagtgctggctaaagcctgaccctcaggctggcttgaatggagcgggaatgagttaaggagagccagaaggctttaatggacacggattccaaatagcccagcttgtgcgggcctcctgcggactcaccctccttttcaacaggcctcgattgtgtatggccccaacagacacaaaactacccatgagcagaggttacccccagccggtgcaggtcagaggcattctgggggggaaggggagagggggacagaggggaagtgaggggcacatggagaaggagggaaatgggggtgggagtgggggaagggaccactgaaagatggtctggatcatttataaggagagattcactaagtcccaggctgagacccgatcatctcacttccaggcaaaccatttttgaaaactggttcagaacaaatgggagctatcctaatgggaagttgaacacactgtgatctaattttcaaaacaaataaaatgcttttctctggttttccaaaagctacaagtctgaggttcagaagctcttaataggatggcctctaatttgacactgcaagatttaaaaaaattacaaatgggtcatgttttacacaccaacagaagccttttccagcaatttttcaattattgcattgtgagccctccaagaaaagtaactattttggctcacagagcccaaagttaccaagtaaagggaacagcctgttcacaagtttgcaaatagtcctttgaaatgtagcatagactgtatctgggagctttctggaagaacatgggcttgacgtggtcctttccttccctctcaagggtccttaaactttttaggtgggtcttgggcccccttctaagtctagggaagccagtggaccccttcttaaaagaatgtttttaaatgcataaaataaaatatgcagagttacaaaggaagacaattacgttagaatagagttatcacaaatatttaaaaacaattttgtaacatagtaactatgttcctttttgctaactaactagcagtaggcctaactgaagtggtaatgagcaaacatgatactttgatgaatccgcaaccactctcatgtgatatgaaaatatctgtggatggtgcctattggtgacaaagtcactaataccactgtggttggttgcttgcatttataacattagttaatgctaagtttcagttagagttaatgaaaataaagatgtatttttttccccatcaagttcataagagcccttgaattctatcaatggagaagaaatcctgctagaggcaagacaaagatcaggaccttctgccccagggttaagctgaggggcagtgggccagggactcactacaccctcacttcactgggaatccttcttaggaaagccactgctttctctcttcctgctctgatgctttggaaatgtttttaaaggcaaattgaaagcatgtcttattcctgcaatcctgaaggctacatgtccaaagattaataaggacctttgatgtgtttcttcaacaactgaaattactctcgtcaaataaagggctggttaatgagctaattctgagttttaatcacgatcttgttccagttcccttgggtggcatgagctttggggtgagggcttttctttacggagtcagcccagagaggatctctgttccccacactctcacattttggacatacgctgactccgaggcaactgggcgcacacatatcccctctctggtcctcacaggggagctgtcatcttgcaatcacatagccatcgcatgccattgcaggggcaacccagcaggcaggcccccctccaactgccgcccagcccccctcgcagccagggcaggctgcggcgccgacacacaggagccggctgcggggctgggtctcgggctctcggctggggagcggggagcgcgctcgcccacgccccccacactcgcgggcgcacaccccggcgcgcgcacgctgccacacacgggcgcacgcacacggcagccgggccagggacgaccctgtcagctgcagccccagaggtccggggcgcgcagccgggtcccctcgagggcgcagccggccgccccgccccgcccctcgaagcagccgggccgggcgcgcagtgggctacaaactttcgcagcgcgagtccgccaaggcagcgcgccgactcgggctcggctcggctctgcgctgctccggacggctgtgaccgctggccgggggctcgggccaccggtacccacggaccgcgcgcccgggtgcctgctccgctaagcccctcgccccgcgcggacctcggtatccagcgccctgctgcccgggctctccccgcgcgccctactgccgcgaggtcagtccgcagcctccggtgcgccagcgctcgccttcctcctcctggacttcgaccctttgccgccctcaccacgccatggctcatgtccccgctcggaccagcccgggacccgggccccagctgctgctgctgctgctgccgttgtttctgctgttgctccgggatgtggccggcagccacagggcccccgcctggtccgcactgcccgcggccgccgacggcctgcagggggacagggatctccagcggcaccctggggacgcggccgccacgttgggccccagcgcccaggacatggtcgctgtccacatgcacaggctctatgagaagtacagccggcagggcgcgcggccgggagggggcaacacggtccgcagcttcagggccaggctgggtaagtagagggtgccccaggaccccttctcctcattctccaccttcctcacttttctgtctccccacccgtgcacctctacttttcctcttctagccaacgggtgagtggttcattcattctttcactaatgattcactgatctctccatgccaggccctgaacctccagtggggcaccaagagtggcagcaggtggcacagaggtcctgcccctggggtgctcccacattgctggacatacaaagactaccccatacacaaggctgtaagcacagagagtggaagaggggacataggccaggggagtatccctgtcatagggtcaattatgtgggcattttacaaatgagaagggcacagccagtgaacataggcagccctgcagaagctccaggcactgggccctgtcaggaagcaggagcccctagctggcgtcagctatggttcctgtgtccagggaagcagagtggactgagaagggccttggctgcccgggattgaggacttccacggactggcatgaagcgttcagaccacaggggtttaaggaaaggcccaggggcttaggcagtgggaacactctgcctatctccggcctctgtcccacctttccacttcctcagccccttggatggagctgggcagagggcacttgcaaaggcccatgctgccctgttctgagagcacttccaggctcctgcctcagcagcctgcccacctttgcaggccctgggtagagaggaggtgcagccagggccacaggggtggtgagaagaccctggttgtcatggtgattactcctggttgcagaataatgttccagaaaatgtgggtgggggtctcctgcagctctgcagaagatgaggccattcaacaggagaaaaatctgcagtctacaggctcccctcctgagggtgagggaaacaagcctagctgtggagctagacagcctggggtcagatctgtcactggctgtgtgactcaaggtaacatctgtggcctctcataaccatggattggggagcacctgccacaaagaggccccatgccctcctcctccacttagcagactcaccaggtcagtggccctgggctccaggccaattggatctaactccatcctcactcataactttcttgcaccatgtggggtccatttcttgaggaacgttattaaattaaaccatttaagaatcatctggcatgaacatgaccttgggtaaatcactaaagctaggtggacttgagtgtattcatcgataaaatgggcaaggcttgccaatatctcccctgtgcagttgaagggaagatgaaatgaggtcatatgtgcaagctcagagcccagcactggccagattaagtgttgatgtacgggattcccctgggagcacaaataatcgtgctaagtattgtgtattcctgtgggtttaaacttgaccttgcttctctattaactcaatcctcaaagccttgtagttgaggaagcaaggccagcagggtcactgctgcgacacgggtgagcctgcccactgagcccatctacttgctgcagccaggcatggagatgccttcttgtgtcattctgttttcacagaaagggggtagtacaagtagcagtggagttcaggatattaatctcaaaaaggacctgaagacagtatctcaaatccagcactcccactttaaagataaggaaactgagactcagtggttgttcacagtggcaggggttggcaactcccatctgccaggtcattgctgttctcactgtcactccccacaccctgtcatctccctcagagctatgaccagggtctgggaggggtagggtgaaacagacaagcctgggaaatcaggattctggtagtctggagtgtctgacaaatccctcttctttggaagcctgaggcacatttgggtgtgaatcccagctgtaccagctaccaggtgtgtgcagtggcacaggttagtttacctctctgagcatcagtttccttgtagtacagtgaagaagtgaggattaaatgggctaagcaggttttgtgctttgcatacagtgggggcccaggcaggttgcttgatcctctcctcccttgattcatctgagtgtttcatgccaagcctcttgcctgccctcagatgtgcctgcttcctgatccagtgacctgtctgaggaggtatgagtttgggcagggacccttctctcatggatgatgccacccatgtgggaggcttcagctctggtccgagaacatgccagtctcagcctgctccccagtggtgggtttctgctgcctcagtggggcagcacctcttcctgaacaacaaatgcctccatccccacagcctgcgatacgtaactatacctcccccgccaccgggcagtgcagctcagctgccaagtgctggctgtgagctggcctcgtggggtccaaatcccaattctgcgatctgggcaagggactgaacttgtccatgactcagtttttttcacttctaaaatggagctaatagtgctcccctccttataggattttttttaatggaaactgagatatgtcaagtgcttacaccattcctgacacaggtaagtgtcaatggtgtattagctcttgctgttgatataccagccaccccttccttccttccctcattgctccctgaagtgaatttcgttccttattaaatctgcatcggtggggaaagcctatgaacctgaccctaagggttaaggttagaccacccctaattcccactgaatgacgtgtgtttaaatgtaagctttgtcacctaccaatgtgatactgagttggttttcttcatctctaaattgaaaataatactacatactcacctgtcaaaaatgccaaaattcaagttgatttcagttccccaagtattccctaagcacttcgtttggtagcagatgctgtaagctcagggagcacaaagatgcccagaaaagctcataaactagcagggcagatcaaagtaagcagcagaatagggcagcaggcctggggggtggcatataagaaggagggcaggggtgctgcgggagcccaaaggcgcactgacctggcaggggcagagcctctgggtggggccaggaaagccttcccagagcaggccaggccccagccactttgaagggcaggtgggccttagccaggtgcggaagtgaagctgtccactgtgttcagagactgccaggagtttggttttaatgataacgcaaggagagaaaggcaggagatggagacggacaaataggttgcaagcaggccatggagagccatgagtattatgaatttgttcccccataggcaatggggcaatatacaacgtgcatgcgtaagggacagaaggaaggaaggagggagagagagaagactagaggggagagagagaaaggagagagggagagagagggaggaagaggagagactgcagggaaaaagagggataaaggagagagagtgattataaataaatgcatgcttattggggaaaacctggaaattatagaagatcacagtaaagaacataagtcatccctaatcacatagccagatataaccggaattgttagtatgatattttggtagaatcattccagccatatctatctatctatctatgtctccactatctatatctccattgttttacccttatatgtaagatatatatggatatatggatatatttgagagatatatatgtgagatatatgtggatacatcttttatggattatattttcagcatgcaggtaaaacttgcaggtatttccatttgaaattactttttttcattactggtcatcttgaacttttccccatgcctgctggctatttgcaattcttcctgtggaaactgcctccttgtatgggagtccctcctttgtcctactgatatgcaaaggttctttacacagtaaggatcttaacctttcacttctaatagacaatttgcttttgagacatgagtgcgatgtaagagggaacaaagttctgggaccactgttgtggttgagtctggagccctgagcgcagggtggaaagatgctgtgttcaggatggttgtgtagaaacaggaagcagagcaaacagggcctggagattggttaaaagcaggaatgggagaggcaaaagagttctcagtctcctgctggaagggctggaggagaagtgaggcctcccactgggcaggaggtcagggagcaagggtgtagtgccctgagggtggcaatagttcctgaggccataactgttctgagcccttgctgggtgccaggcacagtgctgctagtgcgctctgcagagctgatctcacaataacttttggaggtgcaaatactctatccagtttatgaatgaggaaactgaggcacaaagtggctccatgacttgcctgagtccccacagctagtaagggatgccagcaggcgttgaacctcaaccctagagcctgcatggaaacgggcactaagtactaaatctgtgttagttccctgctcttctctgcagcaccgtctggcccaccgccccttcctccagcttctgttggtgcatgcatctaagcccagcgttctcactgattgccctagtggctgtttgaggggcagtgggtgaagggacagatctccaaaccgtcttggaatctttttatatagggcagagcatctaaggggctgctcttggcctgagagttgaccagcagtggggctggacaggcctttggatgaggaagtcccttcccccagtaccatccccactgccctcaggaaggaggctgagtgcccagcaaagtggacctggtcacagttctgagaattcccaagagccactgagatcagcttgtctaaataaagtcagtctttctcttcttagggagtcagaactcaaaaatatcaaaataatgacctctgtttgcaaaacgtgctgcagttcacagcacatgatctttgtccattagctcttaggcagatcatgaacatatccagaacacatggaggagcaaaaggcatgggcttggggtcagacagagctgggtacaagccccgactccaccccttgccaactgtgtgactttaggcaaattgcacaccctctctgaagcttcagctctttgtccacagaatgaatgaccgctccctactctcttcatggtgaaaatgatgaatcaagcatgcagaacactcagcataggaccaagcacatacacttggagctcagaatgtcataattaataaacaattttcttccaatttaaagatgagaacactgaggctcaaggggaagtctggctaaacacctgggtgcccactgtctccatttggatttgcatcatcagctgcatctttgtaaagaatgaggattccttgacttcttaaggctgtggttactgcactctagggaagcatgccaggaacccccagtgttaactgaagtaacagaccacacttctcttgtgcccacttgggcaggattttcacagacaatctcattcaacatgcatctctgagctccaactgtcacctaagccttatggtgaggtctagcggtgcagtagtgaataaaactggcagtgtccctgtcccgttagagtttatgttttaggaagataagagcagtaaatcagtatacagcaggatgtcaggaagtgctctgaaggccaatgaagcaggggcagacagagtgatgaggctgttctccagccacgggagcccaggggacccattgtgggaggttccatttgagcagatacctgaagaggttgagtggtactggatggggaaccatgaaggtggaaggaagcgtgaggcacagtcctgagaataaagccacatgttggaaggagaagaacgccagtgtgacgggggcagaggggtggggttgggctgtggataggagataaagttgcagaggtaggcaggccagatcaagtaaggccttggtaaggggttgagttttatttggggcaatggagggctccgagcttggggggtgacctgtgatggaatgcacccagcacaccgggggcctcgcttggacagtgctctttaaaactgtgacatgaggagacactgaagacgggtgtcattgccattaccagtctgtctcccctctaggctgaactcctcctgggcaactttgttatctgtctcccctctaggctgaactcctcctgggcaactttgttatgaccctggtcagcccaacttagcctggagtaggagttttgcaaatctttatcaggaaaacaaagagaagaagaggaagaaagaaaggaaaagagggtggatagaaaaggggaaagaggggaagaaaagagaggagggaggaaggcagagaagaaagaagagagaaaagacatgaatcacagagcaccagcacgcatcagaggaaataatgacgttctcttcaatgcttctctgttatggcttgggctcggctaaactgaaagatttcaggttgaggtcccttctctgagccacagcctggagccccctgcactgcgtacatgcagaaacatccagagagaggaccagcctgtggtccctcatgcactggggctgggggtgacccatcttgtccccagcagtccccagcagggagggtcttcccagagcaggctgcccagtgagggctgagctccctctggcaggaggcattcaagccacatggaggtagaacttatacccttttgcacaacctcaaaggttcctccccactctgaatctgttagcagaacaatggaggagttgagacttgaactggatcaaagaaaaacaatgtgctgtgttggctgggttgcagctcagatatttggatcagtgaatgcaaggtaccccagttgatggacgggagcttgctctgccagccttggtcctttagattcaagaggcagaaagcacatttgggggcacctcctttgtacctggcacttcactagggtgtttctgtgatcttccagacaatcctctgtgtgagatggaggctgttgtccctgtgaggcagatggggaaagcaaggttcagggcgtggcgccactgagtcctgggagcttggttcctagggcattttctagcttggggatgggggggtgcaacattattggtgaactttcaccccatccatcggtcaaccccagatgctgcagatacaccaccgctaccaccggagtgagctatcagctgccactgacttcccaaacttccctgatggccagagtcccctggagtgctgattaaaatgtggaagtcattgttatgccgtcaaggccacatgcttggggaagccaggttcaagtgtgcattgagaccctgggctgctgcttatgtgtggagcatgttgaggggctgtgacactgtcctggcaggtttgttgtgaggattaaataaggtaatggcttcagtgccacctgagcctttactggcatttatttatcaggccttccatagatgtgcttctctgtttcttcccgctcatagtcccttaagagtatgtgaacaatcccagttgaattatgccttcttcccaacagaaacaaagaagagaaagtggaatatttctgttaaaaaaaaaaatccctgcagatgctgtaggtacaggggtcagagaggtgtggccctgacccatgcccctagagagcccagtgtcccccacacacacttcccgggcttgggagccctgctcctctccagacgttccccagcagaaggacacttcgttgtcaggaaatgaagcagtggaaaggagaaagccagcctggcctctctggtgtcctgttagtgtgcggcatcctagggaggcaccaggaaagactccccactcctcagaagcctagagcggacttggccatttgagaacgctcactgatatataataatgtttaggcgattcaaacctgacacaatactcatgctgctgccaaggttggggcagcttcctgggactgctgacatggctgtgctgccctggtgccctggggaacgcctgcttccaccaggcaaataggaaggagtggccggcagccccagggaagccggagctggagcattcttgaaccaagttgcagatgtaatggttgagacgtcccggtctttacctggaccttggagatttagtcaggttgccttgtgtaatcctgatgctgctcttttcttgttaaaacaatcttaaaagtcctcaggcagaacaaagagcagatgcctaaatggctgtacttttgatcctggtttcccttaggaggtgctcaaaaagcatgagcgtttatttatttcgtctcttttggaagaatgtttgggtttaatgtgaagtgtatttaatgattgcatttaaaaactgattgcataaatagagggctgtgcaaatacaggaggggctgccttgatgcagggcttggacccaacccaagccatcctgagcacttaatgaaggtgtcagtgacatttgttcatttgtgcatgcagaggcagtagagggcagggggagcaaacaggagctttggagtccagcaggcctgaatgcctccctgtctgcccctatttctttgctgttgctttttgttgttgttgttgtttgctacgggatattgacaatctcaaccttaattcctcacctgtgcactgaggattgcaaagggcgccctcatcagtttcatgtgaggattacacgaaaggagggaagcaaagcgggggaggaggatggtcctgaaagtgtggatcggtgggtgtttgctcctccagccctgggtgggagaccctcaggagcacgagcgagaacttcacagcctgtggtctctccttccctcacagaagtggtcgaccagaaggccgtgtatttcttcaacctgacttccatgcaagactcggaaatgatccttacggccactttccacttctactcagagccgcctcggtggcctcgagcgctcgaggtgctatgcaagccgcgggccaagaacgcttcaggccgcccgctgcccctgggcccgcccacacgccagcacctgctcttccgcagcctctcgcagaacacggccacacaggggctactccgcggggccatggccctggcgcccccaccgcgcggcctgtggcaggccaaggacatctcccccatcgtcaaggcggcccgccgggatggcgagctgctcctctccgcccagctggattctgaggagagggacccgggggtgccccggcccagcccctatgcgccctacatcctagtctatgccaacgatctggccatctcggagcccaacagcgtggcagtgacgctgcagagatacgaccccttccctgccggagaccccgagccccgcgcagcccccaacaactcagcggacccccgcgtgcgccgagccgcgcaggccactgggcccctccaggacaacgagctgccggggctggatgagaggccgccgcgcgcccacgcacagcacttccacaagcaccagctgtggcccagccccttccgggcgctgaaaccccggccagggcgcaaagaccgcaggaagaagggccaggaggtgttcatggccgcctcgcaggtgctggactttgacgagaagacgatgcagaaagcccggaggaagcagtgggatgagccgagggtgtgctcccggaggtacctgaaggtggacttcgcagacatcggctggaatgaatggataatctcaccgaaatcttttgatgcctactactgcgcgggagcatgtgagttccccatgcctaaggtagggtttcttccgccttttgccaaattctaaggctcagctctgccgctaccgtcaagttcctcagcctgcaggacttctgtttccccatctgcaaaatgggaataacagtacttcctatctattccaggcaggaaataggtagacataggtcaccaagtggcagcccgtagggtagttgccgcccacatatgtgtgagtttggctgtgttttttgaagtattggcttggttgaattgggactttaaaatgagaacattcttttgaaaagcaggagaatccatgtctttagaaacgcatccccacatagcaactatctgcagaggttgagtagatgctgcttcctgtacacacggcaggtcccagaagctccttcctgaccaaggctctcatttctgttcccagcctggaccccagagtgtggcaatctgtgactagcacagtgctagcctcagcagctctcccactgtagattccctcctccttgcagctcagggcaggaatccacagggaataggccttcactgtgcacagggtctgcaggacacacagcactgggctgttctgtctgttgcaccagcctaaggatttccagttctcaccttcgctccagactgggctgtggctgagtccatccctctccctgcagcctgctctgcagcagcctggctgcttgtgatgtcagccctcggcactcagcacacagtttcttcctgcttagttactctgcccagggcaggtcatgcctttccctccaagaaaagaaagtcagtgcataaatccaatttgaacttaaataatcagccagctggggaagtccagacccagacatggggcagcagtaacgtgtttgggaattaaatggcttctcctcaaaacttctcctcaaaaccgtgcatgtgcaagagagagggaggtgcctgacatagagacggagcctgctaaaagggcctagcaaagacccaggcagatgcaagcccggaaccctgaaggcttgcagctggttggccatgcggttagcttatcaccctggcttgctgcctccccaccttccgggacaccagccagaacgctgcaaaggcaggtgtccctgccctgctcccttcccaccacacccacacaagagggcttcctcctcaacagcactacatatacaaatctctgtttggctggtgatgcactgaagtggatgacccggttggttcatcttgtcagaggtgggcacagttttccaagccaggtcactttctaactaggggtcttggtcaagttactcagtcattttaaacctcggtgtcttcccagtaaagtccaggtaatacccaccccataaaattgctaagctgacaaaaaaaagggggtgatgcagggagagcagcccctaggaaatgtcaatgtccagcctgtcacactgccacgcacatgccaggccttcccttcagtgacaagagcacaacctcgtgagaagcatgcctgtcctcctcagactgcgagaccagggctgtgctggcatctcgctgggttttccctctgggcagcttctgcctgcttcctggtgctccgcggggatgtgtgacactcaggcgcccccatgtggccctgccgtgttggggacacagcgtgcctcagggaagccaaagggcaggaaggcctgggggctcttggagacctcagcccggaactcagcgtatgtctgattttagaggaaccgtgtgccccgccttgggatctcgtccattcctctaggtggatgcctattctgtggcctcagccggggaacaacagcagagcagtatggcctgggactgtgaggatggcatgggtgcgtgggtgggtgagggcagagctgaggtaaccctactccttttctgccttgcagatcgttcgtccatccaaccatgccaccatccagagcattgtcagggctgtgggcatcatccctggcatcccagagccctgctgtgttcccgataagatgaactcccttggggtcctcttcctggatgagaatcggaatgtggttctgaaggtgtaccccaacatgtccgtggacacctgtgcctgccggtgagaccactccagggtggaaagaagccacgcccagcagagctgccttctcggagccttctgcaaccaggacttgtggtgcagctgcagacacagagcacagctcatgggcaacatcactggggcccagagagagctgtccgccagtgcatcattagggggtctttcattgctagtgactagccccttaaatgccagcctgagtacctgaaggaatctgggaattagccctggcctgaaagtggcccatcattcatacccactgttctgaaggcttgaaaacaaaacatatccacaacattggcttgatgtgatcatcatctcataactgagcaagaagactatgcaaatcttagggcgctcgctccctgcacacggaaagaactctgtttaaatgctcagttcagaacactttgggccacatagtgattttggaaaacaggataatcgtggtgtaaatgagtgtttcctttcaaagtccactgcagagcttttatccatatggtatgcacatgtagccaatattggtttctttttcttaatatatatattttattttaaaacaacaaaaagggagggcgttgacaccattccccacagagatagtcatgctgagtgtgggttgtttaaacatgcatattgaaataacacatatagtaacgtgggaatactaaaaaataaccaagattttatatttttgtaaattatactttctatactgtagattgtgtatgttatgtgtttttatggaaagctaataaattaaaggtacagtggtatcttgaaaaactgaatgtcacccatttcaaaatctcactggctccccatctgtaagtacaccatctggtggttgctggggactcagcctcttttagggtcgctggagtcccctaagccatctccatactccctggtgtctgtcccaggctccagaaacccaggctttcccatgctttccaggggcctgtcccactactggttcctgcaaacccaagctaggctgatgttgagaatggacatggctccagacagggacagtggcctctcggggtttctcctcatcccctagcctcagggacatggattgattgggaggtgcctggggtgttttaaaaaacatctatggttgcctggtcagagatcttttacttctggtaattcatggagcaagagattcaacataagtaggggtctctcctgaggtccaaggactcatgaggaagttggacgggc

SEQ ID NO: 2346 - protein, 478 aa, Homo sapiens
MAHVPARTSPGPGPQLLLLLLPLFLLLLRDVAGSHRAPAWSALPAAADGLQGDRDLQRHPGDAAATLGPSAQDMVAVHMHRLYEKYSRQGARPGGGNTVRSFRARLEVVDQKAVYFFNLTSMQDSEMILTATFHFYSEPPRWPRALEVLCKPRAKNASGRPLPLGPPTRQHLLFRSLSQNTATQGLLRGAMALAPPPRGLWQAKDISPIVKAARRDGELLLSAQLDSEERDPGVPRPSPYAPYILVYANDLAISEPNSVAVTLQRYDPFPAGDPEPRAAPNNSADPRVRRAAQATGPLQDNELPGLDERPPRAHAQHFHKHQLWPSPFRALKPRPGRKDRRKKGQEVFMAASQVLDFDEKTMQKARRKQWDEPRVCSRRYLKVDFADIGWNEWIISPKSFDAYYCAGACEFPMPKIVRPSNHATIQSIVRAVGIIPGIPEPCCVPDKMNSLGVLFLDENRNVVLKVYPNMSVDTCACR

SEQ ID NO: 2347 - DNA, 714 bp, Homo sapiens
  misc_feature (258)..(258): n is a, c, g, or t
  misc_feature (261)..(261): n is a, c, g, or t
  misc_feature (267)..(269): n is a, c, g, or t
  misc_feature (274)..(275): n is a, c, g, or t
  misc_feature (698)..(698): n is a, c, g, or t
atataaattaacttttatttctgtaacatataaaaggtataaataggacttatgtaaaaaccaatcacctgcacacacaaattatgtgaaattagtttatatatctctttaaaccagagggaggaagaagcaggatgaggtccacctggcccaccataagtccttccccacatgctgtcgtgtattaatagcttctgtggccaaccagggttatctgccaggcagtgcctcaggatggggtggggggtggtggtggtnacnaggtgnnnggctnntgggctggtacttgtcggtgggggacaagccaagggtcccgcagctgccagttggccctccttcacatgcttatctgatgtggggcaggaacaacaggcggaagtgagaggtcagtccacagaagggaggtctgaaggagcagccgccaccggtgtaccacctaacgcttggaaacatgtctgtgacaaaggatgcagtgaatggtgctgacggtgagctacagagctcctgctttttaaaggttggtacattctggaagggtgaactggggtagagtcacataatactggagggggtataatcaaaaacctaccaaaccccttctggcttgcccggggtgggagccggaaagaagtccaagtttggcaccgggcagaaggttatgttgctggtatctcccaaagcttactgcacttttgtantattaacaaacaaaag

SEQ ID NO: 2348 - DNA, 709 bp, Homo sapiens
cccggtgttatttcatccaggggctgggcttcgttgttacgattagatggcctgttgggcgctacgactgtacaccggagcgagcggagcagcccgggtctgaccccggcccggctcccgctccgggctctgccggcgggcgggcgagcgcgggcggtccgggccggggggatgtctcggcggacgcgctgcgaggatactggatgagctgcactaccaggacacagattcagatgtgccggagcagagggatagcaagtgcaaggtcaaatggacccatgaggaggacgagcagctgagggccctggtgaggcagtttggacagcaggactggaagttcctggccagccacttccctaaccgcactgaccagcaatgccagtacaggtggctgagagttttgaatccagaccttgtcaaggggccatggaccaaagaggaagaccaaaaagtcatcgagctggttaagaagtatggcacaaagcagtggacactgattgccaagcacctgaagggccggctggggaagcagtgccgtgaacgctggcaacaaccacctcaaccctgaggtgaagaagtcttgctggaccgaggaggaggaccgcatcatctgcgaggcccacaaggtgctgggcaaccgctgggccgagatcgccaagatgttgccagggagggcagacaatgctgtgaagaatcactggaactctac

SEQ ID NO: 2349 - DNA, 300 bp, Homo sapiens
  misc_feature (295)..(295): n is a, c, g, or t
tacttttttaacctatcctatatatttttaatatgtgccataaataaatgagagatcattttttagttatgtgaatatatgtcttagttatttttggaagctatactcaggtaatcaagtgaaaataaaatgatttacctaaaggaaaagaaacagaaattaggattggatgtctgtattaaataatctaggatctttgacatagcctgaaatatctaatagtttcaaaatacactgaaattcggattagggcaaatttttacaatatggttttattgggactatcatccacagnctgat

SEQ ID NO: 2350 - DNA, 512 bp, Homo sapiens
ggatgtttacaaccccagcaccggggtcttcacggctccttatgatgggcgctacctgatcacggccaccctcacccccgagagagacgcctacgtggaagcagtgctgtcggtctccaacgccagcgtggcccagctgcataccgctgggtacaggagagagttcctggaataccaccgccctacaggagctttgcatacctgcgggggcccgggggcattccacctcatcgtgcacctgaaggcgggagatgcagtcaacgtcgtggtgactgggggcaagctggctcacacagactttgatgaaatgtactccacatttagtggggttttcttatatcctttcctttcccacctctaaggtggctggggagatgtcaggggaaagatagatagttgtaaaaactctaaagctttaatatattcggtttgtatgtaatggaagcacggggctagagtttccacataggccccaacataaaggccttccctcgctgttgaggccaccatgc

SEQ ID NO: 2351 - DNA, 487 bp, Homo sapiens
  misc_feature (406)..(406): n is a, c, g, or t
  misc_feature (441)..(441): n is a, c, g, or t
aggggctacctactgcttgcggcctgccagcgggaggaggggggcggaaagaagaaagggggcggggttgaggggggcgggcctggacctggggagtgaaagcgaaagcccgggcgactagccgggagaccagagatctagcgactgaagcagcatggccaagccgtgtggggtgcgcctgagcggggaagcccgcaaacaggtggaggtcttcaggcagaatcttttccaggaggctgaggaattcctctacagattcttgccacagaaaatcatatacctgaatcagctcttgcaagaggactcccctcatgtggctgacttgacttccctccgggccccactggacatcctcatcccagaccctccacccatggatgatgagatggaaacagataagcagganaagaaagaattcccttagtgtgggattctccctgngaatgagaagttcctttcctgctttgccctggttaagccaaaagtc

SEQ ID NO: 2352 - DNA, 168 bp, Homo sapiens
ttttttttttttttttttttgggaaccagagaaagcgtttattgaggagtttgagggtgtgagctcctcctcctccccctcccagctgggtcagcagaggaaacaggatgctggggttttgcactcttggaattcagctctcaaaaacctgaatgttcctcctccccc

SEQ ID NO: 2353 - DNA, 544 bp, Homo sapiens
tttttttttttttatttacccacgattcttctttatttggctgccaaatataggggcacgttagtattgcggtcagcttaatattaagtagaaggcattaaaggctagaacagtggtgcaaaaagctgtaggtaaatctcttctatgctggctgttagcagagcactgtgatgctatataattgcagcaaactttttttttggttctgctgcactgcagctcataaagggagcactcattctggaaaaaaaaaaaaaagttaaatctagcaagtggttagcaccagtattccaaaaaacttcagcagcctgtgttttcagcctctgctccaacttcattgctctttggaatcaagagcttcatgttcaggaatagccaccattggatgactcagctgttcagaaaagaggtcgctgttatcttccaagtatttactgaaagggttgggttcatagacttcctcctcttttttcagtaatattctggattttacaggtactgggcgaattactccaggcttagtcagctgactctcagatactgt

SEQ ID NO: 2354 - DNA, 354 bp, Homo sapiens
aaatggggttcagactggccactgttataacaaaccctggggtggaattcggcctttcgcataggggctttaactggactctagttcctgggagcagaggggcgaatgaggcgggggatttctcagccagtttctgactgcccctagtgtatgtggcattttggttcagtatgaattactgagactcatctgcttgccactcaggaggaaagttgggcaggcaccgtcgagtgtctgccactcaaaaggaataagctgctttctgtggtgctgtgcaaaggaacttgaaaaatactgcaatatccttccctactaaatttcaagtgacactgctgtgagaaaggtgacctctaa

SEQ ID NO: 2355 - DNA, 402 bp, Homo sapiens
  misc_feature (12)..(13): n is a, c, g, or t
  misc_feature (25)..(25): n is a, c, g, or t
  misc_feature (148)..(148): n is a, c, g, or t
  misc_feature (186)..(186): n is a, c, g, or t
  misc_feature (209)..(209): n is a, c, g, or t
  misc_feature (264)..(264): n is a, c, g, or t
  misc_feature (277)..(277): n is a, c, g, or t
acagcccgccgnnaaacggcttctngcccacggacatcaatgactcaccctttgggactctgcctggctctgctgagcccccgctcactgcagtgcggcccgagggctccgagccaccagggttccccacctcgggccctcgccggancagggctgttcacgcaagaaccgcacccgcagccactnccgtctgggccaggcaggcagcnggggtggcgggactggtgactcagaaggctcaggtgccctacccagcctcacctncagcctcaccccnctgggcctggcgctggtgctgtggacagtgcttgggccctgcttgacccccagcggacacaagagcgtgcttcagcagccaggtgtgtgtaacatacggggtctgttttcacgccgttcaagcca

SEQ ID NO: 2356 - DNA, 508 bp, Homo sapiens
  misc_feature (440)..(440): n is a, c, g, or t
cgctgcccggatccctgcggctgcctgcactctggaccacgagctctgagagcagcaggttgagggccggtgggcagcagctcggaggctccgcgaggtgcaggagacgcaggcatggccggtgagctgactcctgaggaggaggcccagtacaaaaaggctttctccgcggttgacacggatggaaacggcaccatcaatgcccaggagctgggcgcggcgctgaaggccacgggcaagaacctctcggaggcccagctaaggaaactcatctccgaggttgacggcgacggcgacggcgaaatcagcttccaggagttcctgacggcggcaaggaaggccagggccggcctggaggacctgcaggtcgccttccgcgccttcgaccaggatggcgacggccacatcaccgtggacgagctcaggcgggccatggcggngctggggcagccgctgccgcaggaggagctggacgccatgatccgcgaggccgacgtggaccaggacg

SEQ ID NO: 2357 - DNA, 310 bp, Homo sapiens
  misc_feature (15)..(16): n is a, c, g, or t
  misc_feature (30)..(30): n is a, c, g, or t
  misc_feature (37)..(37): n is a, c, g, or t
  misc_feature (164)..(164): n is a, c, g, or t
  misc_feature (208)..(208): n is a, c, g, or t
tagggcgggagccgnncgagggcgccggtnctttgtnctgtctgaggccaggaagtttgaccgcgctgccatgccgaaccgtaaggccagccggaatgcttactatttcttcgtgcaggagaagatccccgaactacggcgacgaggcctgcctgtggctcgcnttgctgatgccatcccttactgctcctcagactgggcgcttctnagggaggaagaaaaggagaaatacgcagaaatggctcgagaatggagggccgctcagggaaaggaccctgggccctcagagaagcagaaacctgttttcaca

SEQ ID NO: 2358 - DNA, 541 bp, Homo sapiens
tttttttttttttttatcgtggagattagattggttaaagttttggaaaactcctgaattaaacttcttgcaaagtttactcttcttgtaaagagtagcttctttgctgttcgttgggcttggctcctgaaaaggacttggtttcaccttgatgtttccttgaagacaatgctctaaatctctgccagaaggatcgtcagtgaacaacgcaaatccagactgcgctggtttcctcattcctgtgtcctggttcaaagtattcaaaaattcttccactgtggtagatgcgtcaaaaccaactacctggtatatcccattcatgaagtgcacaggtatactaaagggcaaagaatggtgataagggtttcggagaagagttgaaagaatttccatccttgagggtcttgcttctctgtcaccattttgttgcgttctttctacacaacgctggcagtaaatggcatattttccaaattctgtcctggaatctgcattcctctttaggtgaagcctgaggagccacaggaaaggatgatggggg

SEQ ID NO: 2359 - DNA, 2223 bp, Homo sapiens
acttcttttcttggctaagccgcgtttgtactgtgtcttaccatgcctgaaccggcaaaatccgctccggcccctaaaaagggctccaagaaagccgtcaccaaagcccagaagaaagacggcaagaagcgcaagcgcagccgcaaagagagctactccatctacgtgtacaaggtgctgaagcaggtccaccccgacaccggcatctcgtccaaggccatgggcatcatgaactccttcgtcaacgacatcttcgagcgcatcgcgggagaggcttcccgcctggcgcactacaacaagcgctccaccatcacatcccgcgagatccagacggccgtgcgcctgctgctgcccggcgagctggccaagcacgccgtgtccgagggcaccaaggcggtcaccaagtacaccagctccaagtgagtccctgccgggacctggcgctcgctcgctcgagtcgccggctgcttgactccaaaggctcttttcagagccacccacctaatcactagaaaagagcttgttcacttattcccttagtttcttttcataaagtaagttattttagtgtgaaggtcatgggaaatggcatacgtagctttttaactatttggaactcgaggtccccagtgcgtcattggatttgcttttgaatctagagcgtgtctttactcattgtgctgcttagccttcccaggagtcggttctcaattaggctgttgggaatccgcctctttacccgcccccactcccgccccacacgcgccctggtggctccttgggtctgtttcattctaaaacgaagtggctgagttcggctgtcatttaagagaactccaggacacaattcagcccgggttccgcaaacactgcgtgacagctctgtatgactgacgcttggcagcagcttttgtgtccggtcaccagttctgccgtgcgatggggcctcctgtggataccagccgttctgtgtattttggacgaaggccgcgcagccgggtcccagccttgtcctgattgggcgacaagaatattcaaaattctgcgcctttttctaatttgtagatttcagtttccgtcgttcactttgagactttgaaattcctatttctcattttgttgataatttctgcatttaatggtctgtgctttaaatggtaacgctacggccccaggtcactgcgaggcacttaccatgtagatacgggctcaaaagtcacctctcagagacctacgtcatccactcaggaattcgcgcctctcatacttgcctgtctcattttatcttccttctagcagctgtctgaaattggttcgtctgttttcttgtttatggtattctcaagcccttgacagaccggctagtgtggttttcccgtgcatcttcagcctggcacattatggacacttaaatactacgtattgatctaatattgttgggttaatttttccatcccacccttttcttaatcgcttccgtggatggatgaagggtgctgttcatttccattagatgtatgtgaaggcacagtgaaaatggaaatgttcttggagctacttcctcaaaatgtatccttagtcacctcagtgcaacagctgggagggggccgtgttaagattttttttgctacaaagaggaggtggcaatggtagatccacccttatgcttctcagtttagcataacctcttatggattttcatcaaattcagcgtgttggtcactggaaagagccttttccttctccttttcttactctcccctcatggtgttcccctcttaaaggagaggagcttttaatttacacttaccacctcatttgcttttctggaggccatgcaatataggcgggactacagagttaatctcctttttacaaatgaggccaagagaagcctcattggttcacagtcatgcagctcatactgtccacccttgtattctcagatgcaggacaattgcattttagttttattttgtggaggtgcagaatatttactctttctgtccaacccttgattctgccgaggaagacactgatggtttgatgagtgattcagctgtttttggctaagggcttttggagctgatggcaggggtttgatgaatccaaatgagctctagacattatcacagactgaatagatcttaactgtctcctacatgtgtgttttcaaatgtgtatagatgctattgttattaataaagttaccaattaatttaa

SEQ ID NO: 2360 - protein, 126 aa, Homo sapiens
MPEPAKSAPAPKKGSKKAVTKAQKKDGKKRKRSRKESYSIYVYKVLKQVHPDTGISSKAMGIMNSFVNDIFERIAGEASRLAHYNKRSTITSREIQTAVRLLLPGELAKHAVSEGTKAVTKYTSSK

SEQ ID NO: 2361 - DNA, 297 bp, Homo sapiens
cggcacgaggcttcaccccggattatttaagactcgatttgctatctcttggactcagcctcgcacaccccctgcgcgagcagctcctcaatggatacaaacagcgagcgtctcaatggatacattctccgggccagccaatgagcgtgctgcggaaggggctgttgccgtggggacgggccggctggaacaggttgtgttgatgaattgttaatgagtttgtcattcacaaaaacggaaaggaatttccgctccggataagccccagtgcaaacaagctgcaacagcgggctcggc

SEQ ID NO: 2362 - DNA, 294 bp, Homo sapiens
gttaaagaattctggtgcccctctttaagtcttcaggaagtgtttagaggcttattcacattagttaaaacaggccccccccaccttccccaaggcaacagaaaacataaccattagctctcttcctgttttccttcctcatttcatgcttgcttcggctgctaaactgaatttttgttacttagaatattataaagtgtggatgctttctataatgctattggtctaagtgtgattaaatttcattaaggtgtataagcctctaattattacataactggcacgtctgacttt

SEQ ID NO: 2363 - DNA, 4212 bp, Homo sapiens
  misc_feature (3879)..(3880): n is a, c, g, or t
ctccctcgctccctccctgcgcgccgcctctcactcacagcctcccttccttctttctccctccgcctcccgagcaccagcgcgctctgagctgcccccagggtcccctcccccgccgccagcagcccatttggagggaggaagtaagggaagaggagaggaaggggagccggaccgactacccagacagagccggtgaatgggtttgtggtgacccccgccccccaccccaccctcccttcccacccgacccccaacccccatccccagttcgagccgccgcccgaaaggccgggccgtcgtcttaggaggagtcgccgccgccgccacctccgccatggagctgatcaccattctcgagaagaccgtgtctcccgatcggctggagctggaagcggcgcagaagttcctggagcgtgcggccgtggagaacctgcccactttccttgtggaactgtccagagtgctggcaaatccaggaaacagtcaggttgccagagttgcagctggtctacaaatcaagaactctttgacatctaaagatccagatatcaaggcacaatatcagcagaggtggcttgctattgatgctaatgctcgacgagaagtcaagaactatgttttgcagacattgggtacagaaacttaccggcctagttctgcctcacagtgtgtggctggtattgcttgtgcagagatcccagtaaaccagtggccagaactcattcctcagctggtggccaatgtcacaaaccccaacagcacagagcacatgaaggagtcgacattggaagccatcggttatatttgccaagatatagacccagagcagctacaagataaatccaatgagattctgactgccataatccaggggatgaggaaagaagagcctagtaataatgtgaagctagctgctacaaatgcactcctgaactcattggagttcaccaaagcaaactttgataaagagtctgaaaggcactttattatgcaggtggtctgtgaagccacacagtgtccagatacgagggtacgagtggctgctttacagaatctggtgaagataatgtccttatattatcagtacatggagacatatatgggtcctgctctttttgcaatcacaatcgaagcaatgaaaagtgacattgatgaggtggctttacaagggatagaattctggtccaatgtctgtgatgaggaaatggatttggccattgaagcttcagaggcagcagaacaaggacggccccctgagcacaccagcaagttttatgcgaagggagcactacagtatctggttccaatcctcacacagacactaactaaacaggacgaaaatgatgatgacgatgactggaacccctgcaaagcagcaggggtgtgcctcatgcttctggccacctgctgtgaagatgacattgtcccacatgtcctccccttcattaaagaacacatcaagaacccagattggcggtaccgggatgcagcagtgatggcttttggttgtatcttggaaggaccagagcccagtcagctcaaaccactagttatacaggctatgcccaccctaatagaattaatgaaagaccccagtgtagttgttcgagatacagctgcatggactgtaggcagaatttgtgagctgcttcctgaagctgccatcaatgatgtctacttggctcccctgctacagtgtctgattgagggtctcagtgctgaacccagagtggcttcaaatgtgtgctgggctttctccagtctggctgaagctgcttatgaagctgcagacgttgctgatgatcaggaagaaccagctacttactgcttatcttcttcatttgaactcatagttcagaagctcctagagactacagacagacctgatggacaccagaacaacctgaggagttctgcatatgaatctctgatggaaattgtgaaaaacagtgccaaggattgttaccctgctgtccagaaaacgactttggtcatcatggaacgactgcaacaggttcttcagatggagtcacatatccagagcacatccgatagaatccagttcaatgaccttcagtctttactctgtgcaactcttcagaatgttcttcggaaagtgcaacatcaagatgctttgcagatctctgatgtggttatggcctccctgttaaggatgttccaaagcacagctgggtctgggggagtacaagaggatgccctgatggcagttagcacactggtggaagtgttgggtggtgaattcctcaagtacatggaggcctttaaacccttcctgggcattggattaaaaaattatgctgaataccaggtttgtttggcagctgtgggcttagtgggagacttgtgccgtgccctgcaatccaacatcatacctttctgtgacgaggtgatgcagctgcttctggaaaatttggggaatgagaacgtccacaggtctgtgaagccgcagattctgtcagtgtttggtgatattgcccttgctattggaggagagtttaaaaaatacttagaggttgtattgaatactcttcagcaggcctcccaagcccaggtggacaagtcagactatgacatggtggattatctgaatgagctaagggaaagctgcttggaagcctatactggaatcgtccagggattaaagggggatcaggagaacgtacacccggatgtgatgctggtacaacccagagtagaatttattctgtctttcattgaccacattgctggagatgaggatcacacagatggagtagtagcttgtgctgctggactaataggggacttatgtacagcatttgggaaggatgtactgaaattagtagaagctaggccaatgatccatgaattgttaactgaagggcggagatcgaagactaacaaagcaaaaacccttgctacatgggcaacaaaagaactgaggaaactgaagaaccaagcttgatctgttaccattgggatgataacctgaggacccccactggaaatctcccatcttttgaaaaacctggaagtgaggagtgtgcacggatgctgaatgtttgggaatgagaggatgagtgagtgaggcttgaaaacacaccacattgaaaatcctgccacagcagcagccgcagccgccaacagcagcgctgttagtgagctaagtaagcactgacttcgtagaaaaccataacatcggccatcttggaaaagagaaaaacaatggagttacttatttaaaaaaaaagaaagaaagttatctcttcccaggagaggctagaagtagcttttctgtcttttggccagtgccgagtggaatgcctggtttcggggaggaggagggactgggttcagctgtggtgctttgttgtaaaaggcagcctggcctttgctactgaggagaaagatggagcctgggtctcaagcccaccttcgctgtacctttgccacatggtactgtatgcttgccagctagaaggagggtcagggttttttacagtctgagaatgagtgtgtgtgagtgaggcggtatccacattctcaacttcaagtcattgctgtttctttttcccagaaaacaaggggttagatgttgcatttcataaaactaaccgaagttctgtctactgatgcagcacaagagatgtaaaaaaaaaaaaaaaaaaaaaaaaaaaaaaacacacaaaaaaacacacacacagaggaaagacgctctttaggttttgttttgtttttttttttttggttttgttttttgtttttttttttactctagggaaaacactgacgaatggtcagagctcctatcctgatcttttcatcaaggcgcctttcctaataatatggttcaactgtgaatgtagaagtgggggnnaggggggagaaaaagaaaactctggcgttagaggatataaaaaaatataagtacaattgttacaaataacgcagacttcaaaaacaaaaaaatcacaacccaaacaaaccaaaatttaaatgatcagaattggcagcacaaagaaaacgccctctcctgacttgtattgtggcagtctgaacgcccccagaaaattgtgccaaagagtttagaaaaataaatatacaataaaagtaaacacatacacacaaaacagcaaacttcaggtaactattttggattgcaaacaggataattaaatgttcaaacaatctgataaaataaccatttgg

SEQ ID NO: 2364 - protein, 876 aa, Homo sapiens
MELITILEKTVSPDRLELEAAQKFLERAAVENLPTFLVELSRVLANPGNSQVARVAAGLQIKNSLTSKDPDIKAQYQQRWLAIDANARREVKNYVLQTLGTETYRPSSASQCVAGIACAEIPVNQWPELIPQLVANVTNPNSTEHMKESTLEAIGYICQDIDPEQLQDKSNEILTAIIQGMRKEEPSNNVKLAATNALLNSLEFTKANFDKESERHFIMQVVCEATQCPDTRVRVAALQNLVKIMSLYYQYMETYMGPALFAITIEAMKSDIDEVALQGIEFWSNVCDEEMDLAIEASEAAEQGRPPEHTSKFYAKGALQYLVPILTQTLTKQDENDDDDDWNPCKAAGVCLMLLATCCEDDIVPHVLPFIKEHIKNPDWRYRDAAVMAFGCILEGPEPSQLKPLVIQAMPTLIELMKDPSVVVRDTAAWTVGRICELLPEAAINDVYLAPLLQCLIEGLSAEPRVASNVCWAFSSLAEAAYEAADVADDQEEPATYCLSSSFELIVQKLLETTDRPDGHQNNLRSSAYESLMEIVKNSAKDCYPAVQKTTLVIMERLQQVLQMESHIQSTSDRIQFNDLQSLLCATLQNVLRKVQHQDALQISDVVMASLLRMFQSTAGSGGVQEDALMAVSTLVEVLGGEFLKYMEAFKPFLGIGLKNYAEYQVCLAAVGLVGDLCRALQSNIIPFCDEVMQLLLENLGNENVHRSVKPQILSVFGDIALAIGGEFKKYLEVVLNTLQQASQAQVDKSDYDMVDYLNELRESCLEAYTGIVQGLKGDQENVHPDVMLVQPRVEFILSFIDHIAGDEDHTDGVVACAAGLIGDLCTAFGKDVLKLVEARPMIHELLTEGRRSKTNKAKTLATWATKELRKLKNQA

SEQ ID NO: 2365 - DNA, 654 bp, Homo sapiens
ctcggcacgaggcagattcagttgtttgcgggcggccgggagagtagcagtgccttggaccccagctctcctccccctttctctctaaggatggcccagaaggagaactcctacccctggccctacggccgacagacggctccatctggcctgagcaccctgccccagcgagtcctccggaaagagcctgtcaccccatctgcacttgtcctcatgagccgctccaatgtccagcccacagctgcccctggccagaaggtgatggagaatagcagtgggacacccgacatcttaaccaggcggcacttcacaattgatgactttgagattgggcgtcctctgggcaaaggcaagtttggaaacgtgtacttggctcgggagaagaaaagccatttcatcgtggcgctcaaggtcctcttcaagtcccagatagagaaggagggcgtggagcatcagctgcgcagagagatcgaaatccaggcccacctgcaccatcccaacatcctgcgtctctacaactatttttatgaccggaggaggatctacttgattctagagtatgccccccgcggggagctctacaaggagctgcagaagaactgcacatttgacgagcagcgaacagccacgatcatggagggagttggcagatgc

SEQ ID NO: 2366 - DNA, 4833 bp, Homo sapiens
gccatttcctcctcttgttttcactccggattctccatgttggacccaaactgaggagcccggagctgccgctgggggatcggggccgggggcacccgggggagccgctgcccgggccgcccgccctttgtacaggccgcctcccttcccggtccggggaggaaacgagaggggggatgtgaacagctgtggaagtcggagtctcgggagccggagcgggcccccgcccaggccccccagcccagcccagcccgcgcgcccgcccgtcctcccgtccagccagcccgggcccgcgggattgttagatggaacacggctccatcatcacccaggcgcggagggaagacgccctggtgctcaccaagcaaggcctggtctccaagtcctctcctaagaagcctcgtggacgtaacatcttcaaggcccttttctgctgttttcgcgcccagcatgttggccagtcaagttcctccactgagctcgctgcgtataaggaggaagcaaacaccattgctaagtcggatctgctccagtgtctccagtaccagttctaccagatcccagggacctgcctgctcccagaggtgacagaggaagatcaaggaaggatctgtgtggtcattgacctcgatgaaacccttgtgcatagctcctttaagccaatcaacaatgctgacttcatagtgcctatagagattgaggggaccactcaccaggtgtatgtgctcaagaggccttatgtggatgagttcctgagacgcatgggggaactctttgaatgtgttctcttcactgccagcctggccaagtatgccgaccctgtgacagacctgctggaccggtgtggggtgttccgggcccgcctattccgtgagtcttgcgtgttccaccagggctgctacgtcaaggacctcagccgcctggggagggacctgagaaagaccctcatcctggacaactcgcctgcttcttacatattccaccccgagaatgcagtgcctgtgcagtcctggtttgatgacatggcagacactgagttgctgaacctgatcccaatctttgaggagctgagcggagcagaggacgtctacaccagccttggggcagctgcgggccccttagcctgccctgcttccaagcgacggccatcccagtaggggactttcccacactgtgcctttacgatcagcgtgacagagtagaagctggagtgcctcaccacacggcccggaaacagcgggaagtaactggaaagagctttaggacagcttagatgccgagtgggcgaatgccagaccaatgatacccagagctacctgccgccaacttgttgagatgtgtgtttgactgtgagagagtgtgtgtttgtgtgtgtgttttgccatgaactgtggccccagtgtatagtgtttcagtgggggagaagctgaaagaccaagactcttcccaagttagcttgtctcctctcctgtcaccctaagagccactgagttgtgtagggatgaaractattgaagactccattgccaaaccatggcctttcctcagtgttgtaaggcctatgccaaggataaaggaagggtatgcctttgggtactccaggcatacacctttctgaaatccttctccagccagctgctgcagacaaaagatcacatttctgggaagatgagaacttgtttccagaccagcatccagtggccatcaggtcttgtggcccaaaggctatgcttgcctccggctgagtgcctgggataggccttttctatgtctccccaaggctggggtgctgagcctgccttcctcaccacctagccatagtctcaaacctgtggggaaggaggttttctccctgcccgggaagaggacagataactgatttccgttcttttgactgtgttttaaaattctctttctaaacacagagtgttgggcctggtttgtttctgacaaagttacagtcctgggcctgtaatgaatgtcggcggcgctggggttgcagggaaaagacaaatcctcaaagcgtggacgtgtgtccccatggcttgtggatcagctaagctcgggatcatttccataagtctgcttttcagggattctctgctggtgctggtgcaaggacttctgttccaaaggctgggaaaaactaagctgtcccagcccctcccatttcttgggcagggctcttttcctgttgtgtcttcccccagggcctgtcctgtaccgagctctgtctgttccagcctacatccttcctgggtgttgcttttcctcttaagggcctcagaactcttgctcttcctggggtgagggggaatgagtgttcttgacatgtgacagcctaatgcgcatgctttctgcctctggtaacaggagtgagtgagcccctcagacctgcactctgggtgtctcctgcttacaaaggttcttaatagtgaatgctttaaaattaaagtcatcacgaaatggaagttttcccagggtggaaaataagaggaagtgctgctgtaattgggagcacaaggggcctcccaaaaaggagccccacctcagcatcactgccttaatcgtggcctccctggggtgggtggggttctctcctccctccctccctcctcctggggtgggagggcgctcctgttcccatctctgtgttccctggaggcaggtatcacaaagcatttgtgaattgctttaggtgcagggacaccacccactcaggactcttccccatcatcccttccattgccacaccctagatccagcctcaggaactaacaagttktgagaaaagcaggtggtagagcagcagcttcgtgctctcagcggtggctggctggcatttttctctagcgttgtggtgccaccttcccttcttgtcccaaggttataaggccttgtctttctctttggaatcataaagtggaacagagtccccagaactcatgtgghcatttccgacagcatcactccccggtgcctatggggtcccggtgtacctaaagggagaaggaccccatgtgctagccagaaatatactgtctcttgaaggaaagcaggagctcagactcttagagccagctgtggcttcggacccaaggcctgacctaggctgctatcctaatattggaggaggggcctctcttccaagccccaccctaagggttagcccttggacaaatcttgtgccgtctaggcccagccaggcttttctgactaaataagcaataagaggctctaagctgactgagttgcaaggaccctttccgccctcccttggatctccatgtttctccagatggcggaagagcatgtgccaccccctttcctaacagacttgtccaagtgcttggcgtgggacccatgaccaaagcccaggatggcttggtgggagtgtccctgctgcatctgcatgaagcccctgctttttaggcctcactcccatcagaaccctgcctgcccacctgcaactcccccccaacaatgccattcccacttgccccagagaagctactcggccaaacctagccagggtctgttcttgtggaccagagccagcctagtcattatttgctgtcgggtttccagtttcaccgtgtgttagggtgagggatgattgtaaaatttgctcctcaaaggaatcaggccagactcaattttgggagggcaagacagggaggaggccgcttcatcccagactctcttctagggcttcccaccatcagcccctcccacttgagactggtctttgggaggcaataggccaccatgcctggtcagcaccaattcaagccatgccaggaatctgcctacctgccaggttcagttcttttaaggtgcctcttcagggacacagtgtgtctctctgattgggcttctaaatcaaaagcctgatgttcgtgtccctctcatagggggagctttggacacaggaccagtttggaaaagggtcaggtaagggtttccactctgcacattgtagagggaacactctgtaggcccatgggtcccttactagagaggttgagtgaatttgccttcagttaacatgggaccttctgtttagcttcctcttgcttcccaaagattttaagcattttgtaaatgtataaactcacctctggtaacagtggcccagacgctgctttgtgctaaaagcatgggaaatgtaaaggcagtctttctctgggaaatggatgctattctattctgctgcccctacctgttcctgaggcctcatttagaaagaaaatcccctcagaaggctgtctggcacccagtgtcctagccaggccaagtatatgagaaaggtaagtccattttccccttcaggtcctcagtggattacttaaccactgctgtccctcggtccctttttcctaaacgggtttagttctgtcttttttctccttttttctaaatgctggtaaatatttacattcagccagggaagaggaggccagaggtcgggccagctgccccattcttttaacgttgtagggcctgcccatggagcggaccctcctctttgggcctcgtgagcttttttgcttatcatgttccatttcgtgccgctttcccccttcaagatgccatttggagggtaggggatctgcttcccactgtgactgggctatgggattctgactaccttgcttacagattcatggtttgataaatttgttgtattccaaaacttgaaatgcaggacgccattaagtgtctgtttatatttttggaatatttgtattacttacaattaattaataaaagtgggtttaaaaaacctttccaggaaaaaaaaaaaaaaaaaaaaaaaaaaaaaaaaaaaaa

SEQ ID NO: 2367 - protein, 283 aa, Homo sapiens
MEHGSIITQARREDALVLTKQGLVSKSSPKKPRGRNIFKALFCCFRAQHVGQSSSSTELAAYKEEANTIAKSDLLQCLQYQFYQIPGTCLLPEVTEEDQGRICVVIDLDETLVHSSFKPINNADFIVPIEIEGTTHQVYVLKRPYVDEFLRRMGELFECVLFTASLAKYADPVTDLLDRCGVFRARLFRESCVFHQGCYVKDLSRLGRDLRKTLILDNSPASYIFHPENAVPVQSWFDDMADTELLNLIPIFEELSGAEDVYTSLGAAAGPLACPASKRRPSQ

SEQ ID NO: 2368 - DNA, 346 bp, Homo sapiens
caaaagccagaattgacaaatgggatctaattaaactaaggaacttgtgcagttttatttgggagtgtgcatgaggtacctctgagttttaaaaatgaagaaagtaagtggtcatgctttcctgactctttggtagacacagccttttaagacggtgattctgagctgttatggttttgggttttctataatactaaagcttactgccgacatgtaaccaaaagcttgaattaatgaaaaaaaaattacccaaatgcacgttaaaaacctcttacaacatatgtgcacattcatagataacatgtagaactttattttgtgttaaaaagcttgtagaaaagttcag

SEQ ID NO: 2369 - DNA, 2139 bp, Homo sapiens
ggcacgagggtgagacgctgatgggaggatggacgtactggtgtctgagtgctccgcgcggctgctgcagcaggaagaagagattaaatctctgactgctgaaattgaccggttgaaaaactgtggctgtttaggagcttctccaaatttggagcagttacaagaagaaaatttaaaattaaagtatcgactgaatattcttcgaaagagtcttcaggcagaaaggaacaaaccaactaaaaatatgattaacattattagccgcctacaagaggtctttggtcatgcaattaaggctgcatatccagatttggaaaatcctcctctgctagtgacaccaagtcagcaggccaagtttggggactatcagtgtaatagtgctatgggtatttctcagatgctcaaaaccaaggaacagaaagttaatccaagagaaattgctgaaaacattaccaaacacctcccagacaatgaatgtattgaaaaagttgaaattgctggtcctggttttattaatgtccacttaagaaaggattttgtatcagaacaattgaccagtcttctagtgaatggagttcaactacctgctctgggagagaataaaaaggttatagttgacttttcctcccctaatatagctaaagagatgcatgtaggccacctgaggtcaactatcataggagagagtataagccgcctctttgaatttgcagggtatgacgtgctcaggttaaatcatgtaggagactgggggacccagtttggcatgctcatcgctcacctgcaagacaaatttccagattatctaacagtttcacctcctattggggatcttcaggtcttttataaggaatctaagaagaggtttgatactgaggaggaatttaagaagcgagcatatcagtgtgtagttctgctccagggtaaaaacccagatattacaaaagcttggaagcttatctgtgatgtctcccgccaagagttaaataaaatctatgatgcattggacgtctctttaatagagagaggggaatccttctatcaagataggatgaatgatattgtaaaggaatttgaagatagaggatttgtgcaggtggatgatggcagaaagattgtatttgtcccagggtgttccataccattaaccatagtaaaatcagatggaggttatacctatgatacatctgacctggctgctattaaacaaagactatttgaggaaaaagcagatatgattatctatgttgtggacaatggacaatctgtgcacttccagacaatatttgctgctgctcaaatgattggttggtatgaccctaaagtaactcgagtcttccatgctggatttggtgtggtgctaggggaagacaagaaaaagtttaaaacacgttcgggtgaaacagtgcgcctcatggatcttctgggagaaggactaaaacgatccatggacaagttgaaggaaaaagaaagagacaaggtcttaactgcagaggaattgaatgctgctcagacatccgttgcatatggctgcatcaaatatgctgacctttcccataaccggttgaatgactacatcttctcctttgacaaaatgctagatgacagaggaaatacagctgcttacttgttgtatgccttcactagaatcaggtctattgcacgtctggccaatattgatgaagaaatgctccaaaaagctgctcgagaaaccaagattcttttggatcatgagaaggaatggaaactaggccggtgcattttacggttccctgagattctgcaaaagattttagatgacttatttctccacactctctgtgattatatatatgagctggcaactgctttcacagagttctatgatagctgctactgtgtggagaaagatagacagactggaaaaatattgaaggtgaacatgtggcgtatgctgctatgtgaagcagtagctgctgtcatggccaaggggtttgatatcctgggaataaaacctgtccaaaggatgtaatccttcataggtttgaacactgtgtgtttttaccaaagtggccattggcactgtttgcttttttacaatcatgtggacacaagcataagtaaagaaaatttgtcaaccaaaaaaaaaaaaaaaaaaaa

SEQ ID NO: 2370 - protein, 660 aa, Homo sapiens
MDVLVSECSARLLQQEEEIKSLTAEIDRLKNCGCLGASPNLEQLQEENLKLKYRLNILRKSLQAERNKPTKNMINIISRLQEVFGHAIKAAYPDLENPPLLVTPSQQAKFGDYQCNSAMGISQMLKTKEQKVNPREIAENITKHLPDNECIEKVEIAGPGFINVHLRKDFVSEQLTSLLVNGVQLPALGENKKVIVDFSSPNIAKEMHVGHLRSTIIGESISRLFEFAGYDVLRLNHVGDWGTQFGMLIAHLQDKFPDYLTVSPPIGDLQVFYKESKKRFDTEEEFKKRAYQCVVLLQGKNPDITKAWKLICDVSRQELNKIYDALDVSLIERGESFYQDRMNDIVKEFEDRGFVQVDDGRKIVFVPGCSIPLTIVKSDGGYTYDTSDLAAIKQRLFEEKADMIIYVVDNGQSVHFQTIFAAAQMIGWYDPKVTRVFHAGFGVVLGEDKKKFKTRSGETVRLMDLLGEGLKRSMDKLKEKERDKVLTAEELNAAQTSVAYGCIKYADLSHNRLNDYIFSFDKMLDDRGNTAAYLLYAFTRIRSIARLANIDEEMLQKAARETKILLDHEKEWKLGRCILRFPEILQKILDDLFLHTLCDYIYELATAFTEFYDSCYCVEKDRQTGKILKVNMWRMLLCEAVAAVMAKGFDILGIKPVQRM

SEQ ID NO: 2371 - DNA, 1204 bp, Homo sapiens
ggggtgcaaagaagagacagcagcgcccagcttggaggtgctaactccagaggccagcatcagcaactgggcacagaaaggagccgcctgggcagggaccatggcacggccacatccctggtggctgtgcgttctggggaccctggtggggctctcagctactccagcccccaagagctgcccagagaggcactactgggctcagggaaagctgtgctgccagatgtgtgagccaggaacattcctcgtgaaggactgtgaccagcatagaaaggctgctcagtgtgatccttgcataccgggggtctccttctctcctgaccaccacacccggccccactgtgagagctgtcggcactgtaactctggtcttctcgttcgcaactgcaccatcactgccaatgctgagtgtgcctgtcgcaatggctggcagtgcagggacaaggagtgcaccgagtgtgatcctcttccaaacccttcgctgaccgctcggtcgtctcaggccctgagcccacaccctcagcccacccacttaccttatgtcagtgagatgctggaggccaggacagctgggcacatgcagactctggctgacttcaggcagctgcctgcccggactctctctacccactggccaccccaaagatccctgtgcagctccgattttattcgcatccttgtgatcttctctggaatgttccttgttttcaccctggccggggccctgttcctccatcaacgaaggaaatatagatcaaacaaaggagaaagtcctgtggagcctgcagagccttgtcgttacagctgccccagggaggaggagggcagcaccatccccatccaggaggattaccgaaaaccggagcctgcctgctccccctgagccagcacctgcggtagctgcactacagccctggcctccacccccaccccgccgaccatccaagggagagtgagacctggcagccacaactgcagtcccatcctcttgtcagggccctttcctgtgtacacgtgacagagtgccttttcgagactggcagggacgaggacaaatatggatgaggtggagagtgggaagcaggagcccagccagctgcgcctgcgctgcaggagggcgggggctctggttgtaaaacacacttcctgctgcgaaagacccacatgctacaagacgggcaaaataaagtgacagatgaccacc

SEQ ID NO: 2372 - protein, 260 aa, Homo sapiens
MARPHPWWLCVLGTLVGLSATPAPKSCPERHYWAQGKLCCQMCEPGTFLVKDCDQHRKAAQCDPCIPGVSFSPDHHTRPHCESCRHCNSGLLVRNCTITANAECACRNGWQCRDKECTECDPLPNPSLTARSSQALSPHPQPTHLPYVSEMLEARTAGHMQTLADFRQLPARTLSTHWPPQRSLCSSDFIRILVIFSGMFLVFTLAGALFLHQRRKYRSNKGESPVEPAEPCRYSCPREEEGSTIPIQEDYRKPEPACSP

SEQ ID NO: 2373 - DNA, 756 bp, Homo sapiens
aagcacaagctgggacgcaatgtgtgtccctctatccctacattgactttgcgggggtggggatggggtgcggggtgagtgagggaggactgcaagtgacaaacaggattcgtcaaaagagaggtgtattaaagtgccgatcaaatgtaatttaacagctaaactttccctccttggaaaacaggtgattgttgagtatttaacgtgaatcgatgtaaacctgtgtttggtgcttagacagggggcccccgggtagagtggaaccccttaagctaagcgaacaggagcctaacaaagcaaatttttccgtctgccctttccccctcttctcgttggcagggttgatcctcattactgtttgctcaaacgtttagaagtgaatttaggtccctccccccaacttatgattttatagccaataggtgatgaggtttatttgcatatttccagtcacataagcagccttggcgtgaaaacagtgtcagactcgattccccctcttcctcctcctcaagggaaagctgcccacttctagctgccctgccatcccctttaaagggcgacttgctcagcgccaaaccgcggctccagccctctccagcctccggctcagccggctcatcagtcggtccgcgccttgcagctcctccagagggacgcgccccgagatggagagcaaagccctgctcgtgctgactctggccgtgtggctccagagtctgaccgcctcccgcggaggggtggccgccgccgacc

SEQ ID NO: 2374 - DNA, 585 bp, Homo sapiens
ggggacgaagggaagctccagcgtgtggccccggcgagtgcggataaaagccgccccgccgggctcgggcttcattctgagccgagcccggtgccaagcgcagctagctcagcaggcggcagcggcggcctgagcttcagggcagccagctccctcccggtctcgccttccctcgcggtcagcatgaaagccttcagtcccgtgaggtccgttaggaaaaacagcctgtcggaccacagcctgggcatctcccggagcaaaacccctgtggacgacccgatgagcctgctatacaacatgaacgactgctactccaagctcaaggagctggtgcccagcatcccccagaacaagaaggtgagcatgatggaaatcctgcagcacgtcatcgactacatcttggacctgcagatcgccctggactcgcatcccactattgtcagcctgcatcaccagagacccgggcagaaccaggcgtacaggacgccgctgaccaccctcaacacggatatcagcatcctgtccttgcatgcttctgaattcccttctgagctaatgtcaaatgacagcaaagcactgtgtggc

SEQ ID NO: 2375 - DNA, 677 bp, Homo sapiens
  misc_feature (37)..(37): n is a, c, g, or t
  misc_feature (590)..(590): n is a, c, g, or t
  misc_feature (619)..(619): n is a, c, g, or t
  misc_feature (638)..(638): n is a, c, g, or t
  misc_feature (664)..(664): n is a, c, g, or t
  misc_feature (669)..(669): n is a, c, g, or t
cttttttttttttttttttttttttttttttaaaatnagctgattatttttattcagtaaaagtgccttggcacagaactaaaattgataacttatggttttagaatgtagataagtacatgagagtaaatcacatttttatatgaataaaaatatcaactttattcatatatagattataaaactatactaaacaaaaagtaattatttactattacaaaaattattaagaaccattacaaaaattctctgcctactaattttcaatcaccatagaaatacaatatttaataatgctgctgcagtacttacataaaacatattaagaattgatgttatatttctgtgtttgaatattgagcttaaacataaaacatgtttgaaatgtgtttgtgtgtgtctgtcacacacacataacatgtacatacctgaaactcatactacaattgcaacacatcttaagcttttccttttaaacataccaagataacattctaaaatgaaggatatctatgtctctcttcatactgtctctctgtgatatacaattgctataaatgttctcatattgtatatatggtctattatgntgtaattaatttggaggaatgaataaatntgtggtaacccgtactaanacgtacgtttggccagcgaaagcaancctcnaaatttaa

SEQ ID NO: 2376 - DNA, 466 bp, Homo sapiens
  misc_feature (153)..(153): n is a, c, g, or t
  misc_feature (179)..(179): n is a, c, g, or t
  misc_feature (215)..(215): n is a, c, g, or t
  misc_feature (263)..(263): n is a, c, g, or t
  misc_feature (283)..(283): n is a, c, g, or t
  misc_feature (298)..(298): n is a, c, g, or t
  misc_feature (393)..(393): n is a, c, g, or t
  misc_feature (432)..(432): n is a, c, g, or t
  misc_feature (451)..(451): n is a, c, g, or t
  misc_feature (457)..(457): n is a, c, g, or t
tttttttttttttttttctagacaaatgaaaacatgttttatttacaagaaaaaagtctgtacattgtgtatacataaaaatatacaaaaccaaaatagaaaatatccaagtgttaaaatgtgtacaaacacttttaaaatgcgactcctggnaaacttcaagctttaattagtttgangagtacacatttcattttaaaaattatcatacaaangatttcccaaagctgttaaaaaagttcactggtttccactggaagganttgtctaagtatttcatctnggattaaaacagggntttgttataaatgttaggattttaacaccaccaatggcaatttctttgtttccaatctacctggcaggaggactattttccatggaaccggtaangtttctcctaatctttggaaggcctggggctacagctanggttcccttcaaggttcgngttaantcggggttt

SEQ ID NO: 2377 - DNA, 4249 bp, Homo sapiens
cctcaagctaatttcaggtcacaatttgaggtcaaaggcttttaaagcctttgcctacaagtcactccaagatgagcagataaagtgtgatgaacacagatagagtgagcttctgaccacaggacatttgcacagcccctgttgcaaaaagagccagtttatttactgaagggaaaaaagttgcagagcaattactttaagaaaaaatgtgaggaagaaacccctgtatagtgctgtacgtgtcagcgtcttgtgtggtagtctcatcttctctgggctggggccggttctagagtggaggatgccattgttgacctcgggactgggggcccacttgtgcagaactacatcagggggtatggtggggccttgagctctgggctccaccggtagagttttgcaggggtgttcaatgaactcagttatttacaaaccacacccaggcccatctgccccttcccaagacactagctgggtctcgagccatgtgactgagctcgactgattccctccccagcctaggagctgagcttgtcctgtgctcagtcttcccataaggacatgccaggtttgtgtgtacctggcaacatgcatgcccatagcctgcatctgtagtaggtcaagacgtgataggccggaagcaagaggagaggatttggtctttgacctgtcaggctcagaatacaagggccccccagggtgtagcaccctgatggggggagcaattttaccacccctttgactcagccagaccctcttaccagagtccactctcttcccccaacaggttgtttgactggctggtatcagtgatcaacagcagcatctgtgcagacaccgactcgtggaccactttcataggtagcaaggcctcactgtgctgggagcactccagaaaaagagcaataaagccctggatggagaggcaggagccctgggtccactgtgtgactctgggcagttcctttcccttttttgtctcctcttgcatctgcctgccagcatagagcgagatctctgcatagggtgagatctctgctctcctgcacccacatctgagcagtccataactctccagacaggctcaacagtgccttgtctgaaagagccctttacctccccagagacccagctctaattgtgggagagtagtgggggttggggaaaatagctgtattagaagggactttggaggctggcaccgtggctcacacctgtaatcccaacattttgggaggccaaagtgggaggatcactggaggccaggagttggagaccagcctgggcaatatagcaagaccccatttcaaagaaattagccaggcatggtgctacatgcctgtagtcccagctactcaggagaccgaggtgggaggatcactttagcccaagagtttgaagcttctgtgagctgtgatcacaccactgcactccagcctggtcaacagagcaagaccctatctcaggggggagaacaaaaaaagacttgggggacatgactgagggaggtcaacacggttgtaactaggtgggacagtcagttataggaggaaataaagcttaaaggtacaagtgcagtttgctcatggaatggtggaattctaggcaccaaattggctagtgagactaatgccctccgaactagatttaacacagaaaatgttccctgggacctggtttcctcataggaggtgcctatcagaaccagagaattcagactcaaaaatgggcctgatgctctgggctgtcttcacacttcatttgggtttcctgcttgctctgagctctacaggggaatggggtagagatgggagccaccttgggtggagggtggggaaggtatgttctgcccaccacaggtgtcatgctcactcagcctgatgcccaggctgccaagtataaggcattggcaggggcccagccaccctgggttccttggtcccctattccccatctgctccctgcagtggccccatgggttctctgccatcttcccaggcctgctggatgtgtatggatttgaatcatttcctgacaacagtctggaacagttgtgcatcaactacgccaatgagaagctgcagcagcattttgtggctcactacctaagggcccagcaggaggaatacgcagttgagggcctggagtggtcattcatcaactaccaggacaaccagccctgtttggatctcattgagggaagccccatcagcatctgctccctcataaatgaggaatgccgcctcaatcgacccagcagcgcagcccagctccagacacgcattgagactgccctggcaggcagcccctgcctgggccacaataagctcagccgggagcccagcttcattgtggtgcattatgcggggcctgtgcggtaccacacagcaggcctggtggagaagaacaaggaccctatcccacctgagctgaccaggctcctgcagcaatcccaggaccccctgctcatggggctgtttcctactaaccccaaagagaagacccaggaggaaccccctggccagagcagggcccctgtgttgaccgtggtgtccaagttcaaggcctcactggagcagcttctgcaggtcctacacagcaccacgccccactacattcgctgcatcaagcccaacagccagggccaggcgcagacctttctccaagaggaggtcctgagccagctggaggcctgtggcctcgtggagaccatccatatcagtgctgctggcttccccatccgggtctctcaccgaaactttgtagaacgatacaagttactaagaaggcttcatccttgcacatcctctggccccgacagcccatatcctgccaaagggctccctgcctctgtcttcagagaggcactgggcatctaaggtggtcagagccctcagaatggtgtccacacagcgaggaagccacgcttgaacctctcatccaggacattctccacactctgccggtcctaactcaggcagcagccataactggtgactcggctgaggccatgccagcccccatgcactgtggcaggaccaaggtgttcatgactgactctatgctggagcttctggaatgtgggcgtgcccgggtgctggagcagtgtgcccgctgcatccagggtggctggaggcgacaccggcaccgagagcaggagcggcagtggcgggccgtcatgctcatccaggcagccattcgttcctggttaactcggaaacacatccagaggctgcatgcagctgccacagtcatcaagcgtgcatggcagaagtggagaatcagaatggcctgccttgctgctaaagagctggatggtgtggaagaaaaacacttctctcaagctccctgttccctgagcacctcgccgctgcagaccaggctcctggaggcaataatccgcctctggcccctgggactggtcctggccaatacggctatgggtgtaggcagctttcagaggaaattagtggtctgggcttgcctccagctccccaggggcagccccagtagctacactgtccagacagcacaagaccaggctggtgtcacgtccatccgagcgctgcctcagggatcgataaagtttcactgcagaaagtctccactgcggtatgctgacatctgccctgaaccttcaccctacagcattacaggctttaatcagattctgctggaaagacacaggctgatccacgtgacctcttctgccttcactgggctggggtgatccttggtgcctttgtttccacaaggccttttcctgccccctgccttgccaaagacatttaatcagcacacagctgccagactattcccacagtgctccaaatgcacatgaacaacagtgacggctccagccttcgacccagagccccgtgcccagtgcgtcagtgggcctggggttccaggctacatcaagcactgatggtgtcagggctggtagttaccaaatcagggttaagaaacatcagggccacatttcactaccttcacagatcaaactcagcagcagtcatgactgtctgtcactacactggggatcccaattccacataagcacttttggaagaaaacagccaaagttggcctaaaattggcgctggaatttgggctgggaaaaatcttgtggttatttcctttaaaaaggaacaaaactttagtatttaattagttgatttatttaatgtaatttcaaacaattaaattatgaataatgcaatgtaaaaaaaaaaaaaaaaaaaaaaaa

SEQ ID NO: 2378 - DNA, 3970 bp, Homo sapiens
ctcctgcctcaacctcccaaattgctagttggcccggggccttcagtggcctttgtgtctgggtgagaggaaccctggatggccactctgccctgagtgtgtgggtccccagaagtgctgggttagggggcacggagggccagaaagtcccctttggagcgctggactctctcgctgactcctaccccaccccggcctggggtttcagagaaggggtccaggcaggagtgtcatcttttctcaatggggatgtggcttcagtctctgtccaggaggcacgcggacctccagtggccggctccggaggcttggtgactccagtggcccagccttgaaaagatcttttgaggtcgaggaggtcgagacacccaactccaccccaccccggagggtccagactcccctactccgagccactgtggccagctccacccagaaattccaggacctgggcgtgaagaactcagaaccctcggcccgccatgtggactccctaagccaacgctcccccaaggcgtccctgcggagggtggagctctcgggccccaaggcggccgagccggtgtcccggcgcactgagctgtccattgacatctcgtccaagcaggtggagaacgccggggccatcggcccgtcccggttcgggctcaagagggccgaggtgttgggccacaagacgccagaaccggcccctcggaggacggagatcaccatcgtcaaaccccaggagtcagcccaccggaggatggagccccctgcctccaaggtccccgaggtgcccactgcccctgccaccgacgcagcccccaagagggtggagatccagatgcccaagcctgctgaggcgcccaccgcccccagcccagcccagaccttggagaattcagagcctgcccctgtgtctcagctgcagagcaggctggagcccaagccccagccccctgtggctgaggctacaccccggagccaggaggccactgaggcggctcccagctgcgttggcgacatggccgacacccccagagatgccgggctcaagcaggcgcctgcatcacggaacgagaaggccccggtggacttcggctacgtggggattgactccatcctggagcagatgcgccggaaggccatgaagcagggcttcgagttcaacatcatggtggtcgggcagagcggcttgggtaaatccaccttaatcaacaccctcttcaaatccaaaatcagccggaagtcggtgcagcccacctcagaggagcgcatccccaagaccatcgagatcaagtccatcacgcacgatattgaggagaaaggcgtccggatgaagctgacagtgattgacacaccagggttcggggaccacatcaacaacgagaactgctggcagcccatcatgaagttcatcaatgaccagtacgagaaatacctgcaggaggaggtcaacatcaaccgcaagaagcgcatcccggacacccgcgtccactgctgcctctacttcatccccgccaccggccactccctcaggcccctggacatcgagtttatgaaacgcctgagcaaggtggtcaacatcgtccctgtcatcgccaaggcggacacactcaccctggaggagagggtccacttcaaacagcggatcaccgcagacctgctgtccaacggcatcgacgtgtacccccagaaggaatttgatgaggactcggaggaccggctggtgaacgagaagttccgggagatgatcccatttgctgtggtgggcagtgaccacgagtaccaggtcaacggcaagaggatccttgggaggaagaccaagtggggtaccatcgaagttgaaaacaccacacactgtgagtttgcctacctgcgggaccttctcatcaggacgcacatgcagaacatcaaggacatcaccagcagcatccacttcgaggcgtaccgtgtgaagcgcctcaacgagggcagcagcgccatggccaacggcgtggaggagaaggagccagaagccccggagatgtagacgccaccctgcccacccccgggatcctgcccccaagtcatttccgtcccccccccaggccctcccaccaccccattttattttatatgattttctccatttgtcatcgttccccaccccttcgacatgctgccaggaaacaagggaaggggcctccctccgagtgagtcagtgatgaggccgcggcctccccgaggttgtggggaggctgcactggagccacaggcaggggtgagagcacccactgaattgacatgaccctctgtccccaggcctggctccccgagggctcagaagagcagcttcggtgtgcagatcatccgtccgtgtggggttctcagtgccggaggccttggggtgggggccaggcctcgcacttgcagaggagcccagtgggctgcacgctcccctccatccccatcggccctgtcccctggagtgtgtcagagcccaggggagaatgcagcccaccaggagcacctggaccccctgcccgccacatggtgtggccatcactcagcccctacccctgccctgctcctaagggtagaaaactccagggtcccctgccaccgactgcccagccactccaagccccctggcagctgcccctcctggagcagaaagtgcctttatctcagccatccgcagactgctcggccagatgcggggacaggctggaatgagggaggcgtcttcatctccctgccatccccctctcacgccacccccgcccccaccgggctgcaggtgctgctgatgcgctgggatctgattgaggataaaaaggaaggagagatgacccctaccccctcatcccccagttttgaaaaggtctaagcaagtgagtctggttggagggagctgagggagggagccatggaaggtgccagaaggaaggttggcgggggcacgtgtgggccgtggcttgggctggtcagagtggcgtgagctgcccggcgcctgccctgcccaagtgaccagggaagtgtgtgtgtgtccatgtgtatgcgtgtccgtctgtctgtctagtgtctgggtttggcccaagactgggctgtagttacattaatgcccagccagccacccctgccactcacccctcctggcccaggccttgctgactctctgagctggggaggtgggaggccaggcgagcctgactctgttgatctacccgtgcctgggcccctcccctcagagcccatggtaacgaacccctagaaaggagagaacgggcgtcaggggtgcacagtccacagctgaagagcaaggtttcgtggcagcacggcccggcccctcaccctctgtccccacgaggggacccatgggggctgtctttgcagggcacagatgaccaaagtcccttcctgcttcctgttacctgtcttgctcctggggagaaagaggggcctgatgagactccactcaggtgcacacatcaccaggtgcatctgcaggcaccgggctggctgcttgcagccaggagaaggtcagcgagaaggagtgtatgagtgtgagtgtgtgtgcatggaagttggggcactgggcgtctgactccctccccacccaagagaggaaggacccctcaccacccccactggcgagacagtttactttgccgacttgccatgtttttgccaaaaccaagattttgaaggaaatgagtggccagcgccagggcccaggccatgtggcctgcccagcctcaatgtcacttggcggcggggtggggtgggggtgggcagcagcatcccagccttgagatgcttcactttccttctctgtaaccagactttgaaaaattgttcgtttcatcaggctctgttcctcaatggccttttgctacgtgcctcccgagaaatttgtctttttgtataaatgacaaagtgttgaaaatgtatttcctgaaataaatgtttcaaatgcagaaacccaaaaaaaaaaaaaaaaaaa

SEQ ID NO: 2379 - protein, 422 aa, Homo sapiens
MEPPASKVPEVPTAPATDAAPKRVEIQMPKPAEAPTAPSPAQTLENSEPAPVSQLQSRLEPKPQPPVAEATPRSQEATEAAPSCVGDMADTPRDAGLKQAPASRNEKAPVDFGYVGIDSILEQMRRKAMKQGFEFNIMVVGQSGLGKSTLINTLFKSKISRKSVQPTSEERIPKTIEIKSITHDIEEKGVRMKLTVIDTPGFGDHINNENCWQPIMKFINDQYEKYLQEEVNINRKKRIPDTRVHCCLYFIPATGHSLRPLDIEFMKRLSKVVNIVPVIAKADTLTLEERVHFKQRITADLLSNGIDVYPQKEFDEDSEDRLVNEKFREMIPFAVVGSDHEYQVNGKRILGRKTKWGTIEVENTTHCEFAYLRDLLIRTHMQNIKDITSSIHFEAYRVKRLNEGSSAMANGVEEKEPEAPEM

SEQ ID NO: 2380 - DNA, 421 bp, Homo sapiens
ttcaatggatactcgtatacttcctatatggtcttagtttacttttcctcctttttgtcttcttgagggtattgagatttctcttccttttcttccttctttgtttcttcttcggacacttttgccacatctactgacaccacggtttgatcctcttccacccagtcatgagccctcttcatggccttattgagtttgtcaggtgtggccgccacatgcaattcaaagagaagctctgtaagcatgcgagcaaattcttctcccttttcttctaagccttgtacttcttgattttcttcattctctaattctttggctgcaaagatgtctttaatggaaatcaggtcatttcttaagagttccagcttctctccatcaagtgatgctaaaaatgactgaaccttgctttcgatttcattgg

SEQ ID NO: 2381 - DNA, 447 bp, Homo sapiens
ttttttttaagaaaattcagtaattctccattgaacatctactacatatccaactctgtgctaaggtatgctgtggaaaagtcaaggaagaatgtatgagacacatccctgcactcccaggagtttataatttcggaggagatgcaaacgtggacccattttaatgtaacaaaagatacactgtgttaacagccaaaatggaggcctgtacagagtactggggcaacctggaaatctggttttaggatacactgcattcaaagcaatttgcttttttcttcaacatttcttgagcacctgttatgtgcaaagcaaggagtcaggtgcctttctggaaaacgaaataaacacggcactgtctctgtttacaactgcccatttaacaaacatttcttgaacatctactacatgtgatgcattgagctcaaccttaggaattgcagatgg

SEQ ID NO: 2382 - DNA, 2673 bp, Homo sapiens
cggggtcacgggcagttgcagccgcggccgagcagccagccgctaagaaagagctcgccgctgccgctcccggagccgccgaggccagcttcgcggcgctgccccgcggcgggagaggaggctgcagaagagcggaggcggccagcgggagcggcggggctcagcgcgcacactcagcggccggggagcctcccgagctctgcgcccgcacgcgccagccgcggctcgcgcctttcttggcctccgggcgcccgacctctcctcccccgcgccggctcgccggggccgcggcggcccaaggagcagcatgaatctgcggctctgcgtgcaggcgctcctgctgctctggctctccttgaccgcggtgtgtggagggtccctgatgccgcttcccgatgggaatgggctggaagacggcaatgtccgccacctggtgcagcccagagggtcaaggaatgggccagggccctggcagggaggtcggaggaaattccgccgccagcggccccgcctctcccataagggacccatgcctttctgaagcaggactgaaggggcccccaagtgcccacccccggcggttatgtctcctccatagattggtctgcttctctggaggcctcacgtccattcagctctcacctcgcacctgctgtagccaccagtgggcccagctcttctcacctgcctgcttcccccagtggcgtgctcctggctgtagtttggatgattcccgttctctcacaagaatccgtccagtccatcttcctggcccctccctggactgactttggagacctagccccagaaagcctcccttcttctccaggtcccctccgccctagtccctgcctgtctcatctaacgccccaaaccttcatttgggccttccttcctcatgtctgccctgagcgcggggtggaagtgctcccttctgtgggctccagcagatcccttgttttcctgtcagttggacccctcacctggcctccagggaagaatgcagagaaaagcaaggagagactctagttaagaggtgctggctgccgggatccagacagggcacattgggggcatggaagtgccagggtggttttcaggagctctggtgaagtgggtggagcatcagcgtttgctcagttaagggagaggtagagaggggcccgtgaagtcctttgtcacttctcttgccttagtgtgcctcccaatactcccttcttcctgcccccacaccccatccccagctagcccaagctccaggtcaggaggggagggtgctgggcctgacatggctatataccctcccaggagtaaaagccaagcaagaggttgtttttgccaagaatcacagaatgttagagctgacaggacccttgaaggtcacttagccttcttaggcaaacgcctgcaaaacagaagcctggagaggggagtgacctgctcagagtcattgcagagccgggatggggaccaggtctcccatctcctactttatgacgccctcttccctcttgatgatgtcttttcaaagcaaatgaagtgccttttcccgaggctggggctgggggtggctgggaggggaagggaagggagaggcaagctggctgtgaactgtcctgttgtggggctggagctgctcccacctccctgacctacccctgctgcaccattcccccagctgggctggaaggttccataactggccagctgcccccataactggcagcattcccagacccagggtactctaataggggcggctcaggcactgagactaccgctcaaccccagggtggttttcaggagtccgaggtagccttcaatcactggactccatggccttcccttcgtgttgaccggaccttccttccagggcttttcctttgggggaggcggagaggggagaagaaggaagggaagggcagaaggaaggagggaagaaaagaaagcaaaggaacagaaggaaggaaagaaagatgggaggaagtgcagcaggaatagcaccctctccccgggaggccctagcttccgtgaggggccatcaccagccattccttggagggggctttctccccttttgcttgagcagggttcccaggagggagaaagagaagacaagagcctgatgcccaactttgtgtgtgtggggacgggggagtcagggccccccaagtcccacaatagccccaatgtttgcctatccacctcccccaagcccctttacctatgctgctgctaacgctgctgctgctgctgctgctgcttaaaggctcatgcttggagtggggactggtcggtgcccagaaagtctcttctgccactgacgcccccatcagggattgggccttctttcccccttcctttctgtgtctcctgcctcatcggcctgccatgacctgcagccaagcccagccccgtggggaaggggagaaagtgggggatggctaagaaagctgggagatagggaacagaagagggtagtgggtgggctaggggggctgccttatttaaagtggttgtttatgattcttatactaatttatacaaagatattaaggccctgttcattaagaaattgttcccttcccctgtgttcaatgtttgtaaagattgttctgtgtaaatatgtctttataataaacagttaaaagctgaaaaaaaaaaaaaaaaaaa

SEQ ID NO: 2383 - protein, 122 aa, Homo sapiens
MSATWCSPEGQGMGQGPGREVGGNSAASGPASPIRDPCLSEAGLKGPPSAHPRRLCLLHRLVCFSGGLTSIQLSPRTCCSHQWAQLFSPACFPQWRAPGCSLDDSRSLTRIRPVHLPGPSLD

SEQ ID NO: 2384 - DNA, 559 bp, Homo sapiens
  misc_feature (83)..(83): n is a, c, g, or t
tttttttttttccacctcttaagtatttattagatacccattgtgtaccctctccccgctttgtatccctgccctgagggctncacagccagatctcctgagagcagagtgaagaggaagctcagtatttctcaggcaggccagcaggtcggaagtgattggggtctttgccactcctgccccattcattggcagcctgatcggccagcgagtcctccgcaccatggccaaagaatctctggatattctctctggcatcgctgatcgcttctgcagcccagacacccccaggtccccttttggcagcatcatagttcccccgagcatggaagtatttgtctgagccgatgtaattggcttctctcatgtcagagtaggctctccacatgtcccgagccccatcaaaagcctcgccaaggaacgaaaagaagcttcggctgctgacacccaggaccaaggagcagaaaaccaggcccgtgagaagcttcatggtgctctctagatcagaggagataagacaccttcagaatggtatggctgtatgcccaggataactatt

SEQ ID NO: 2385 - DNA, 277 bp, Homo sapiens
gaggattcgtgggtgccgggactggggagggggacctgggggtgactaggtgacataatggggacagggctgccttctgggtgatgagaatgttctggaatcagatgggatggctgcacggcgtggtgaaggtactgaacgccacctcactgtaagacggtagattttgtattttaccacaataaacaaaacaaaacaaaaccaaaccaaaaaaaaaagaaaaaaaaaaaaagaaaaaaaaaaaaaaaaaaaaaaaaaaaaaggtcgtatcgatgtc

SEQ ID NO: 2386 - DNA, 476 bp, Homo sapiens
ttgaatttaggtgacactatagaagagctatgacgtcgcatgcacgcgtacgtaagcttggatcctctagagcggccgcctactactactaaattcgcggccgcgtcgactttttttttttccagacaccacaatgacttagagaatcatttcatctccaagagctgatttcaaattatgtaacagtaaatgaaagcactctgtaactggtaaagcattacaaatgtcgtaatattcacgatttaaatcatatatggatgatgtcataaataattctaaaaagttggtattttcaacataatcacattttttaacaactagatttttgttaagcttttcagcactattccagaaatgtcgacgcggccgcgaatttagtagtagtagtcgacccggcaattccggaccgtacctggaggcgtaccagatttccttatggggggtgtattatagcttggggtaatcatgggccatag

SEQ ID NO: 2387 - DNA, 5769 bp, Homo sapiens
  misc_feature (5512)..(5517): n is a, c, g, or t
gagctctccatgcacacctgttactgtttctgtttttacctgtaaatatctgtctctgacttccatgtctcatgcacctctatagggcaaagactgtgtcttaaacatcacggtagcctcagcatgttgtgcaatcaaggtttttttgtttttgttctttgttttttttttggtattagctttatttgtatcattttgaaatttttatcaaaaaagcagcgtgcctgctgtggttcccatcctctgggatttaggaatctttacccgattctccatccaagtctgtctttcgtattctaggctcttcctaaagttgtcattcacatataccctccagaattttatagggtgtataatctgtaacaactcggaggaagccaattgccctttagaaatatggctgcaattgcctcacttcctgtgtcatgtgactctcctagtcatcacatgacccatccacattgggaagccagaattacttgcaggagtaacctagtgcctatagctatggcaggtacctgcatccttgtttttgtttagtggatcctctatccttcagagactctggaacccctgtgctcttctcctcatctagtgaccctgaggtgatggagttttcaagtccttccagagaggtaagagagagagctcccaatcagcattgtcacagtgcttctggaatcctggcactggaatttaatgaatgacagactctctttgaatccagggccatcatggctctttgagcaaggcacagatggaggggagggtcgaagttgaaatgggtgggaagagtggtggggagcatcctgatttggggtgggcagagagttgtcatcagaagggttgcagggagagctgcacccaggtgtctgtgggccttgtcctaatgaatgtgggagaccaggccatgggcacccaaaggcagctaagccctgcccgggagagtagttgaggggtggagagggacttgcttttcagtcattcctcattctgtcctcaggaatgtcccaagccttcgggtagggtaagcatcatggctggcagcctcacaggattgcttctacttcaggcagtgtcgtgggcatcagatgagtgagtcaaggcagtggggaggtagcacagagcctcccttctgcctcatagtcctttggtagccttccagtaagctggtggtagacttttagtaggtgctcaataaatccttttgagtgactgagaccaactttggggtgaggatttttgaaaccgtcttcagtctctccaaacagctgtgtccgttctccacatccttgtcagacctcacctctgcttgtgctccctccctcccaggtggtgcccctgcatccctaaaagcttcagtacagctcggtggtctgtgtctgcaatgccacatactgtgactcttgaccccccgacctttcctgccctaggtgccttcagccgctacaagagcagaagcagtgggcattggatggagctgagtacaggaccatacaggctaattgcaccggcacaggtaaccattacacccttcaccccccgggccaggctgggtcctcctagaggtaaacggtgtcagtgatcaccatggagtttctccctgggcactgataaccctgtggatgtcctcaggcctgctactgatcctgcagccagaagttccagaaagtgaagggatttggaggggccgtgacagatgcaggtgccctcaacatccttgccctgtcaccccctgcccagaatttgctacttaaatggtacttctctgaagaagatgaggaggaaggggacaggatgacatagagccactgacacttttctttgccaattctttggaccctgacttctgcccatccctgacatttggttcctgtcttaatgccagtgaaataagatttcgccgcctatcatctgctaactgctacggactcaggctcagaaaggcctgcgcttcacccaggtgccagcctccacaggttccaacccaggagcccaagttccttttggccctgactcagacactattaggactggcaagtgataagcagagtcccatactctcctattgactcggactaccatatcttgatcatccttttctgtaggaatcggatataacatcatctgggtacccatggccagctgtgacttctccatccgcacctacacctatgcagacacccctgatgatttccagttgcacaacttcagcctcccagaggaagataccaagctcaaggtaggcattctagctttttcaggccctgagggccctgatgtctgggggttgagaaactgtagggtaggtctgcttgtacagacattttgtcccctgctgttttgtcctgggggtgggagggtgggggctaatggctgaaccggatgcactggttgggctagtatgtgttccaactctgggtgcttctctcttcactacctttgtctctagatacccctgattcaccgagccctgcagttggcccagcgtcccgtttcactccttgccagcccctggacatcacccacttggctcaagaccaggggagcggggaatgggaaggggccactcaagggacagcccagagacatctaccaccagacctgggccagatacattgtgaagtaagggatcaacaaggatgtgggatcaggactggcctcccctttggccatgctgatctgtgtcccaaccctcaacctggttccacttccagatctgcctgtcctcagctcacctttctaccttctgggcctttcaaccttgggcctgtcagtcttgcccactccatcaggcttcctgttctctcggtctggcccactttcttggctggatcattcatgacctttctcttgccaggttcctggatgcctatgctgagcacaagttacagttctgggcagtgacaggtgaaaatgagccttctgctgggctgttgagtggataccccttccagtgcctgggcttcacccctgaacatcagcgagacttcattgcccgtgacctaggtcctacccttgccaacggtactcaccacaatgtccgcctactcatgctggatgaccaacgcttgctgctgccccactgggcaaaggtggtaaggcctggacctccatggtgctccagtgaccttcaaatccagcatccaaatgattggctcccaaacttagagggatttttctacccaactatggatccctagagcaccattccccgggacctccagggtgccatggatcccacagttgggacttgaaacctctctagggctgggggtggtagctcatggctataattccagcactttgggaaccaaggtgggtggatcacttgaacctaaggagttcaagatgagcctgggaaacatggtgaaaccctaactctacaaaaaaaaaaatagaaaagttagccgggtgtggtggtggcacgctatagtcccagtattctggaggctaaggcgggaggtttagttgagcctaggaatttcaggctgcagtgagctatgattgtgccactgtactccagcctgtgtgacagagggagaccctgtctcaaaaacaaaaacaaaaaatccctcccaaaacctctgtagttgcattcttcccaccacctaattcaggattcctacaagaggaactagaagttccagaagcctgtgggcagggtccagggtgacttgttcttcctttgcaggtactgacagacccagaagcagctaagtatgttcatggtattgctgtacattggtacctggactttctggctccagccaaagccaccctaagggagacacaccacctgttccccaacaccatgctctttgcctcagaggcctgtgtgggttccaagttctgggagcagagtgtgcggctaggctcctgggatcgagggatgcagtacagccacagcatcatcacagtaagccaccccagtctcccttcctgcaaaggagacctcagacccattagtagtctcaccaaagactgatagaagcccttcctgtccagctttccccaggtagcctgcccttttgcgcaactctggggaaccatgattccctgtcttgcctttccttcacaggtctgcacacctcattgccccttttgcaactactgaggcacttgcagctgcctcagacttctcagctccccttgagatgcctggatcttcacacccccaactccttagctactaaggaatgtgccctcacagggctgacctacccacagctgcctctcccacatgtgacccttacctacactctctggggacccccagtgttgagcctttgtctctttgcctttgtccttaccctagaacctcctgtaccatgtggtcggctggaccgactggaacccatcattgtagacatcaccaagcacacgttttacaaacagcccatgttctaccaccttggccacttcaggtgagtggagggcgggcacccccattccataccaggcctatcatctcctacatcggatggcttacatcactctacaccacgagggagcaggaaggtgttcagggtggaacctcggaagaggcacacccatccccttttgcaccatggaggcaggaagtgactaggtagcaacagaaaaccccaatgcctgaggctggactgcgatgcagaaaagcagggtcagtgcccagcagcatggctccaggcctagagagccagggcagagcctttgcaggagttatggggtgggtccgtgggtgggcgacttcttagatgagggtttcatgggaggtaccccgagggactctgaccatctgttcccacattcagcaagttcattcctgagggctcccagagagtggggctggttgccagtcagaagaacgacccggacgcagtggcactgatgcatcccgatggctctcctgttgtggtcgtcctaaaccggtgagggcaatggtgaggtctgggaagtgggctgaagacagcgttgggggccttggcaggatcacactctcagcttctcctccctgctccctagctcctctaaggatgtgcctcttaccatcaaggatcctgctgtgggcttcctggagacaatctcacctggctactccattcacacctacctgtggcgtcgccagtgatggagcagatactcaaggaggcactgggctcagcctgggcattaaagggacagagtcagctcacacgctgtctgtgactaaagagggcacaacagggccagtgtgagcttacagcgacgtaagcccaggggcaatggtttgggtgactcactttcccctctaggtggtgcccagggctggaggcccctagaaaaagatcagtaagccccagtgtccccccagcccccatgcttatgtgaacatgcgctgtgtgctgcttgctttggaaactggcctgggtccaggcctagggtgagctcactgtccgtacaaacacaagatcagggctgagggtaaggaaaagaagagactaggaaagctgggcccaaaactggagactgtttgtctttcctggagatnnnnnnctgggcccgtggagcagcagtgtcagcatcagggcggaagccttaaagcagcagcgggtgtgcccaggcacccagatgattcctatggcaccagccaggaaaaatggcagctcttaaaggagaaaatgtttgagcccagtcagtgtgagtggctttattctgggtggcagcacccgtgtccggctgtaccaacaacgaggagcacgggggcctctggaagtcatgagagtagaaaaaccagtcttggggagt

SEQ ID NO: 2388 - DNA, 531 bp, Homo sapiens
tttttttttttttttttaagaataaaagtgaacatttaatgccaccatagtttgatttttttttaaacaccagattcttttttgacaacattttacacctcatatgccacaaaaagtcagagatcgtagccagcaaacaatgtctttacactggaaaatgccacacagcttaatggattcatgtcaccagtttgtgagaactataactctttttttctggactgttctccagggagcctgctcatatttatcataatcaagccaacacctaacgtttatatagcttgcaaaggcccatgcacaaaactagcctgccaaggggctgctgggacctgcccaagtacagaagagttgaatttctgactttaacaaatgagttttattgaagcattttaacagcaaacacttgtgaactaataatgttttgaatggccccagtcttccatctggttaaacagtggatttcagacagtaacattaagcactaccattgaattgtaaaacaagattttatgaacttatttaggaatt

SEQ ID NO: 2389 - DNA, 386 bp, Homo sapiens
  misc_feature (9)..(9): n is a, c, g, or t
  misc_feature (368)..(368): n is a, c, g, or t
  misc_feature (375)..(375): n is a, c, g, or t
  misc_feature (383)..(383): n is a, c, g, or t
atttgccanaaaaaaaaagcttttcttgctacaaaacataagcaattttcttgagccttattgacttcattacattttctgtttagcagcatttttcactgcaatgttaaaataaatatgacattgaattcgaactgtgtgtatgtcagtggaatcaaatcaaaagccactaacatggctgtctgtttcactggactgtcccatttggctggttaaaaggattggggcccaaatcctctggcctagcatttctcagtgtttgctattcagactgtctaaatacagcatgtgacaagctgaagaagccaaatctagcagtcatttctgatttcattatattctccccctcttcctgctaaaaagacaanaaacaanaaaacaanaaa

SEQ ID NO: 2390 - DNA, 1592 bp, Homo sapiens
tacggctgcgagaagacgacagaaggggattaagagggagggcggggacaactgggtcttttgcggctgcagcgggcttgtaggtgtccggctttgctggcccagcaagcctgataagcatgaagctcttatctttggtggctgtggtcgggtgtttgctggtgcccccagctgaagccaacaagagttctgaagatatccggtgcaaatgcatctgtccaccttatagaaacatcagtgggcacatttacaaccagaatgtatcccagaaggactgcaactgcctgcacgtggtggagcccatgccagtgcctggccatgacgtggaggcctactgcctgctgtgcgagtgcaggtacgaggagcgcagcaccaccaccatcaaggtcatcattgtcatctacctgtccgtggtgggtgccctgttgctctacatggccttcctgatgctggtggaccctctgatccgaaagccggatgcatatactgagcaactgcacaatgaggaggagaatgaggatgctcgctctatggcagcagctgctgcatccctcgggggaccccgagcaaacacagtcctggagcgtgtggaaggtgcccagcagcggtggaagctgcaggtgcaggagcagcggaagacagtcttcgatcggcacaagatgctcagctagatgggctggtgtggttgggtcaaggccccaacaccatggctgccagcttccaggctggacaaagcagggggctacttctcccttccctcggttccagtcttccctttaaaagcctgtggcatttttcctccttctccctaactttagaaatgttgtacttggctattttgattagggaagagggatgtggtctctgatctccgttgtcttcttgggtctttggggttgaagggagggggaaggcaggccagaagggaatggagacattcgaggcggcctcaggagtggatgcgatctgtctctcctggctccactcttgccgccttccagctctgagtcttgggaatgttgttacccttggaagataaagctgggtcttcaggaactcagtgtctgggaggaaagcatggcccagcattcagcatgtgttcctttctgcagtggttctttatcaccacctccctcccagccccagcgcctcagccccagccccagctccagccctgaggacagctctgatgggagagctgggccccctgagcccactgggtcttcagggtgcactggaagctggtgttcgctgtcccctgtgcacttctcgcactggggcatggagtgcccatgcatactctgctgccggtcccctcacctgcacttgaggggtctgggcagtccctcctctccccagtgtccacagtcactgagccagacggtcggttggaacatgagactcgaggctgagcgtggatctgaacaccacagcccctgtacttgggttgcctcttgtccctgaacttcgttgtaccagtgcatggagagaaaattttgtcctcttgtcttagagttgtgtgtaaatcaaggaagccatcattaaattgttttatttctctcaaaaaaaaaaaaaaaaaaaaaaaaaaaaaa

SEQ ID NO: 2391 - protein, 183 aa, Homo sapiens
MKLLSLVAVVGCLLVPPAEANKSSEDIRCKCICPPYRNISGHIYNQNVSQKDCNCLHVVEPMPVPGHDVEAYCLLCECRYEERSTTTIKVIIVIYLSVVGALLLYMAFLMLVDPLIRKPDAYTEQLHNEEENEDARSMAAAAASLGGPRANTVLERVEGAQQRWKLQVQEQRKTVFDRHKMLS

SEQ ID NO: 2392 - DNA, 181343 bp, Homo sapiens
gatccacccactttggcctcctgaagtgctgggattacgagcgtgagccaccatgcctggccctgtaacatcatattgacaataataatgtaggcactttggtaattgttttgtcttcctgagtggtatttctcaatgtgaactacaaagatacctatggccatatctaggatcgaagtcttttttttttttttttttgagacggagtctcgctctgtcacccaagctggagtgcagtggtgtggtctcggctcactgcaagctccgcctcccgggttcacgccattctcctgcctcagcctcccgagtagctgggactacaggcgcctgccaccacgcctggctaattttttgtatttttagtagagacggggtttcaccatgttggccaggatggtctcgatctcctgacctcatgatccgtcagccttggcctcccaacgtgctgggattacaggcgtgagccactgcgcccggcagatcaaagtcttactatgaacttccagggtgtaatgtacacagccctatctgttttttgtttgtttgtttgttttgagatggagctttgctcttgttgcccaggctggagtgcaatggtgtgatctcggctcacagcaacctccgcctcccgggttcaagtgattctcctgcctcagcctcccgagtagctgggattataggcttgcaccaccacgcccggctaatttttgtatttttagtagagacggggtttctccacgttggtcaggctggtttcgaactctcgacctcaggtgatatgcccacctcggcctcccaaagtgctgggattacaggcatgaaccaccgagcccaaactgccctatctgttttaagttgaggaaaactcatcctatcggcactttctcaggcatcagtcccaatcaagttatgttattataacagcctattaagtctccctggataacagacaaccctttgtttatctatccatactgggactggagagaacttacattgtacaattaatgaagtgacactatacctgtcttcgcagcctctgtctatatatgccagctttctatttgtctattgattagatgctgttcttttcatctgttctatagtcatactcccaatatctaattgtttccttaaatatgaatagacctgctaatgatgatattgtagaactgttttgtagctaatcgctgctgggctatgagtgagggcctcctacagcttgatgagattatgtcttcccagcattaaattattccaaacagatcaatttcaaagttaacaaataacatgtttgttagtaaaaatgtgagtcttacagtaattcaaataactactactgtggatagagcagccaatatcagttacaggaaaagtcctttgtggcaaccacaatgcaatcctcccaagagtccagctgcgtttttctttctctccgatggccctgtaggtgatcagtagcatttgaaaacattcctctcagcacagtggcagcccaggcctttcccctggaaaagctttgatgcagaggaaacctcccagtcaactgggatggtggacttctttggagggttacctccagatccttctgactttttaagtctcatggtttctaaagaagagaaaagccctattaagtattgagtatgattacgggaggattcagttaaatcaggcacaggaaggacaggcacagtggctcatgcctgtaatcccagcactttgggaggctgaggcaggtggatcacctgaggccaggagttcaagaccagcctagccaacatggcaaaatcccatctctacaaaaaatacaaaaaaataaaactagccaggtgtggtggcacatgcctgtaatcgcagctacttgggaggctgaggcagaagaatcacttgaatctgggaggcagaagttgcagtgagttaagatcatgccaccgcactccagcctgggcaacagagcaagattctttctcaaaaaataaaaataaataaaaacattaaaaaaaatcagccacaggacttggtcttggacccaagttagagctaggccatgcttgcttaaaggagtggctgtaattttaaacaaggctagtgggaaagttccaggccatcttaacattgtaggttgcagaatcttagccaatgagtctttcagagctggattcattaatctgttaattaattcattaatttttttatgctactggatgacagtaggaataaaatgactttttctgtctgattcaaatgctctggtattccaaaagggagattcatatttattaagagagtctttcccgttgtttatacttcctgcctaaggatcagcttctttttctctttcttcacagctgacaacagatgccctaattgtttcacctcaggttagcactattgcaatttgtctagcaagaccttatgtccccgccagatgagaaattgcagtaaagccaaagcatcagttttgcattgctcttcagtttctgaggctactagtagcaagtcgtctacatagcaaataatcatagatccctctggtgggagaaattcctctaagtgtttctgtaaatgactagagaaaataatgggagcattcaaaacccttgaggaattctttgccataaatatcagactttctcataagcaaaagcaaacaagaatttagattcatctgctagaggaatggaaagacagaaaatgcagaaaattgatcaattacagagaaaaactttgcagacaatggtaccaaagtcagaagagttgctggagtaaacagaacagcacacatatttacttctttaagtttttttttttttttttttttgagacggagtctctctctgccgcccaggctgaggtcagtggtgtgatctcggctcactgcaacctctgccccccgggttcaagtgattctcctgcctcagcatctcaagtagctgggattacaggcacgtgccaccacacccagctaattttttgtatgtttcttagagacagggtttcaccatgttggccaggctggtctcgaacttctgacctcaggtgatctgcctgccttggcctcccaaagtgctgggattgcaggtgtgagacaccatgcccggccttctttaagatcttatacaaataaatttagcagttgaccatcttcatcacttttacctctcttctctttcagaagtgtgagactatttcaaagtggtggctttttcaaattatcccttgtttctctattttttttttttttttttgagacaagatcttgctctgtcgcccaggctggagtgcagtggcaccatctcaactcacagcagcctcaacctcccgggctcaagagatcctcccacctctgcctcctgagtagctagggctagaggcatgcaccacctcgcctcgctaatttttctttctttctttctttctttctttctttctttctttctttctttctttttttttttttttttttttgctttttgtagagacagggtcttgctatgttgcccaggctggtctcaaactcctgggctcaagagatcctcctgcctcgacctcccaaagtgctgggattacaggtgagcccccacatctggcctctaattcttttataacctatttcattccttctaattgagctcccaacaaaggagattgttttacacacagctatggcttatccctttggtaaattgattttatgggttctatagctcaaattaaatcagcatctcgattctctagggctcaaaagatgccttgatttgtgtcagctcaggaagggggcttttccggcactgaatatggtaggcttggaggtgcatggcaggtctctcgccaataggtttacagaagagtcaggaggaaaggggagcacttgctccttaggcaaaggcagagggcccatctgatgggaattggagggaagggaatatgtagaaggctgagtcaagatacaaacaacctgtactgatggaaagcaagagcaagagctttccaaggcaaatgcagaataagtagcaccagtctgtatgagaaaaggcaaggacaggtcagcctggcaaacagtgaccgacatacacacacttaaccctaatctcttcccgccactgccatctcctcaatctatccattttgagccatttgcaaagtatctcctagctgagagttttatcctcctaggcccccacccctgattctcttgttcctgccatcctgcatgccccagtctctttggacaatccctcttccaatgtccttgcttcttgcaatgatgacacgtgtcttgcttcctttcctttctgggttgcccagaacaggagttactccctttcagtaaacagacctgagcagctaacacagagtttttcagtttcttcttttcttctttgactttctctagagtcccaaatactgaatagctgctcctaagcttacattatagtcagtcctgccatcctaccaccttttcccttatttgagttgttgttgttgttgttgtttgttttgtttcttgttttgagacagagttttgctcttgttgcccagggtggagtgcaatggcaccatctctgctcactgcaactgccacctcccagcttcaagcagttctcctgcctcagcctcccgagtagctgggattacaggcctgtgccactatgcccggctaattttgtatttttagtagagatagggtttcaccatgttggtcaagctggtctcaaactcctgaccttaggtgatccacccacctcagcctcccaaagtgctgggattacagcctcccaaagtgctgggattacaggcgtgagccactgcgcccagccatattggcactttttaagccttgtgttttttaatgtcccgttgaccaaagcaaatcacatggccaagcccagatctgagagtgtggaaaaatggactctatctcttgcagggaggagctgaaagttccatcacaaaagggtatgcatccagggatggcaagaatttgaggccatttttgtgatccaaggacagagattgtcctcggacataaaattcaaggctggcagtttttttgttgttgttggcacatcagatataccattgtcttgttttctggcttctgtagtttgtgttgagaagttggctgtcagtcaaactgcataactataaaagtaatcaacccacccaccagctgctttgaatgttttctctttgtctttgctttccctcagttttactatgatgtgcctaggtgtggttttttgtttgttttatcccgctcttggttcacgtgacttctagaaactgacttgatatatttcaccagtttggaaatatttcatccattaactcttcaaatattatctgtgccccattctttctcaccttgtttttctgaactccaattaagcatatattaggtcaagcatggtcgctcatgcctgtaatcccagcactttgggaggctgaggcaggaggatcccttgatcctaggagctcaagaccaacctgggcaacatagtaagacctcatctctacaaaaaaaaaatgaacaaaattagctgggcatgattgcatgtgcctgtagtgctagctactcaggaggctgaggcaggaggattgcttgagctcaggaggtcgaggctgcagtgagtggagattgtgccactgccctccagcctgggtaacacagcaagaccttgtcttaaaaaaaaaaaaaatacacgcacacacacatatatgagaccttctttctgtatcccctatgtttcttacctccttttgcattgtcttttaccacctttttacctctccaagctttagtctggctattttcttctgatttatctttctgtttactatttctctcttcagctcttgtatatcccacccattgagctcctaactttaatttgtatattttatatttctaaatttttcactagattctttttgtagtttcaaattatctgctaaatttctcaattctgtcttttgtttccttgaattattaaatataattattttaaagtctgtatctgataatgccattatttggagtccttgtggctctatttttattatattacttttctaatttcatttttattaaattttcttttctccttatgacatgttttgtttgtttttaagacagggtctcacactgtcacctaggctggagtgcaatcatagctcactgtaacattgaactactgggctcaagcaatccccctgcctcagcctcccaagtgctgggattacaggcatgagccaccatgctgggccttgtcctcgttattttttattgagtgctggacattgtgaatggaaactataaatcatttgaggccaaggacaatgttatcttcctccagagaaaatttacatttgtttctggcaggcagctggggcactagaaatcctgatcaccttaatccaattttcagggattgaaagagctcaaatcttgactacagtcccttaggggacagggatgcagtcctttagagggctattctatttccagtttacacttattcctagacctttgggtttccaacccaaagcacgaggagcttactagggccttcttccttggtgagccctgcactctgacttttgacccctcacctcttaagtctgctaactgttctgctcagcttcttgggccctcagctgtctctgctggaattagcggatggccataggggataagcagccttaaatgctgagctcatctctcagctcatttcctttctcccatatcttggtcccatatgcttcactgcctattatcacttggatattttcaagcaaatattttccctgttttactgagtctgtttagttgttctcagtggaggttgtggttcaaattacttattttgtcattgccagacacagaagtcattcagcactaggttttaggctctatttatattgttgagtctacatataatcttgcttccaagtactgcataacactccctaatgttttatctgcttccttagtcactacaaataatgctaccatgacctttgtcatgcaggccattgctctgtcacccaggttggagtgcagtatcatgaacatggctcactgcagcctcaacctcctggactcaatggatgctcctgcctaagcctctcacgcagctgggaccacaggcataagctaccacacacggcgaatttttgtattttttgcagagatgaagtctcaccatgttgctgaggctggtctcaaactcctgggttcaagtaattctcccacctcagcctcccaaagtgccacgattacaggcgtgagccaccacgcccagccaagaatttttgtgatgtatccccaagagcagaattacagagaattaccaaaattacccaacctagtgtatacttaattgatgagatactgacatattgttctccagaatggttgtgttggtctgtatctccaccagcagtacatgagcgctctctagccacacatccctgccagcatttgctattgcctgcatttctaggtgtgtgtgtatttgtcaatctaatgggtatgaagtgatactgttgttttgatttgcgttcctctgataatcaatgggcttgcacatcttgggtgtggcatgtctgctgctggtgctgccaacacttggtggggcatgtagaactgggcctctgacctccgaggaaggggtgtcatctggcgggttccgagaaggccgaaatgagctggagcctgaaaccactgctgctgctaagggccaactgagactggcgctacagcaacaggaatggaaaacaaacaggaaggagcaagacccttctctccttcccagccttccagtctccctctagtgtcccagttggtggaaactgacaaccagccagaagacaaagaaggaatgtaggttcagagtcccagcgccagcctcacaaagcagagtatggcaccttccccgcccctgcccctttggcttcgcaacatcagttcgaagccttcttgcataatttgaacttccctcagcagtaatgacaactttatgtttctgcctaacaagatccttcatacaaatatgctcctaccctcttctcaagaggggagacataaagtcccaacagtctttgtaatcatctccaaattacagtcacggtattggtgatattaatttctcctttaaataagtcatagtaccacttaactattctgtgacctagaggctaagttgtaaagtttaccatcaaaacaactgctattggccaggtgcaatggctcacgcctgtaatctgagcactttgggaggctgaggcaggaggatagcttgagcccaggagtttgagaccaacctgagcaacacagcaagaccctatctctacaaaatattacagataaaaaaattatccagtgtggtggcgcatgcttgtagtcccagctactcaggaggctgaggcaggagaaccgcttgagcccaggaagcggaggttgcagtgagccaagatcacgccactgcactccagtctgggcaacagagggagattgtctcaaattaagagagagagagagaaagaatcaaagtctgtaagtaccgtttcgtgtcagagaggaggagagatggcagagcctttagggaagactgtgaagatgtactgttggccctgccaggttaaaagaaatgtggtctttgaagtgcaaatacataagcttttcaaacctgagcaataaaagaaagtgctctggtggtcttttctctggtgttactatttgacagggcagtagcaagctagacgcaggggctatgacgctttgcttcagtaaagtgactgcgtctgaaacagcagctgcaatcaattcacctgcggtcattcttgaagagccatccaccttctgccaagcaccaaatagacaaatagcatacaagagacatcacgactgcaaccttcaagttcaaggcactaatctctgctatttccctcagaatcgtgacattgggttcctttctctccattaggcaagggttgttctggcatctcactatcattgaatttacgccacagttgagttccagtttaaatcaaccaaccacataggctgttagagtcactttcagctgcatggaccaacattaaatataggccctctggtaaatgcccccagctcaagaaattgtgcccaatccaatgttatatccatcccttttggtagaacatccttagaattcacttccacacatattcgcccaggtttttgccaatatttcttaacgaaaatcatgttattgttctggtgtataggttttcctcttgtgttttagtgtgtacctgtccacctgtggtggattgcaccctcattatgggacagggggtggttgtggtgggttctgagaggagaatgggtatcctcttgcaaggcaccagagggctaccaggtcagccctaaaaattctcttactccttgtacctgcagggctaacagtgctaaatcaaacacaaactttaattgcttgggttacagaatcgcaacgtcagttgattcccagcctcgccacgtgtctcacatgaaatgtcaggcagtggtcgggaggagtgagaccctgaaacttaccattgctttcaagctcaaggacgcaaacaaaccaatctccaaaccccatctttcaggatatgattcttgacaccactccagctgccaattttgctatcagccaggatctgatcaggaagtagaaaggatgacagctcctcccttggtgcatgcagttgagatttcaagtgatcttcctgccttggcctcctgagtagctgggactacaggcatgtgccaccacaccaggctacgttttgtattttttgtagacgaatgtctcgaactcctgggctcaagtgatcctcccagctcagcctcccaaagtgcaggcactgcaggtgtgagtcacagcacccagcctcctctgtttgaagagtcctaactcccttcgttccccagcctgaggggctgtgttaatttcctggagctgccatagcaaagtgccacaaaccaagtggcttcgacagcagaaatggattctctcacagttctgcagggaagaagcccgagatcaaggctgtgagagagcaggaggatcacttgagcctgggagtttgaggttgcagtgaaccatgactgtcccactgcactccagtctgggcaacagaggagattctgtcgaaagaaagagagagagagagagagagaaaaaggaaggtaggaaagaaggaaggaaggaagggagggagggagggagggagggaggggaaagaaataagaaaagaagagagagagaaagagaaaggaaggaaggagagagagaaagaaaggaaggaagaaaagataagaaagaaaaaggaaaggaaagaaagaaggaaggaagaaaagaaagaaagagagaaagagaaaaggaaggagagagagaaaggaagaagaaaagagaaagaaagaagaaaaaagaaagaagaaagaaaacagaaagaaagaaaaagaaagaaagagaaagaaagaagaaaaggaaggaagggaagaaaggaaggaaggaaggaacaaaggaaggggaagaaagggagggaaggaaggaaggaaggaagttggttagagagaggcccacagagctgaagctgggtctctgaggtctgaggtgggggcgtggcctagctagttgtggaggagtgagctcagtagagggacttgtggggctgggatccagacctctaaggagcaggggtctggctgatgctggggtctctgagctcaggggatggcctagtactcagattttggagcatagggcactgggtgtccggtggtggtgtctcagaggtgggatgcaatgaagctggtcttgcaagtgttgagagatctgaaaattggcttcaggcagtgccacggaaatgaagcacttgctgcaagggtgaagaagccttgttagatggtgcgcccaggaaggagcaggtcccttcttcctcctccagtcttgtgggctcccttaaacgcccccagctagcagagcctaggagggaggcgctggtaaagcaggagcatcaccaagcagaggacagcaaagggggtggcacgcccactccacaagccagcactgctccttctagggcacggatctcagagaaaggactgcatatgcccactttatccatgatggctaccattggaaacaacccacacgtccatcaacgggggaatgggtaagtgagtcgcggtgcatgcgtgcatacaatggctactagtcagcatcacagagggaagaagggacacagacgtcaacctggatgagtctcatggaagtgattccagaaagaagccggcacaaagggctccagagcgtgtgcttccatttccatacccgtcaggagcaggcgagaccatctacagccatagacggcaggacagggcttagatctgcagccagggattggctgcctggaggcacaaaagcattctctgtggtgatgcaaatgttctttagttggtccaagttgtggctgcatgtgtggataggcaggtgaaaaaaccaggcgtgcacttgattttctgcacagtaatcctcaataaggacttgtttcacggatttttagggcagtggagttactctgtatgatactgtaagggtggatccatgtcattatacctttgtccaaacccataaatggacaacaccagagtgaaccccgatgtcagctatgggctttagttcatgcgagcttctcactgtggctcaccaattgtaacaaacgtactacactgactcgaaatgttcatcatggggaggcgtaaggggagtgacggggtctgtgggaactccttactttccgctcaatttttctgcaaacctaaaattgctctaaaaagcaaaatgccttaattttttaaaaacccaggaaagcagcccagggccgatgtggcagctccaggtgctcaggccctcgggctgcctttgttgctgttccgccatcctcaacgtgcgacttccctttggtgcgacaaggtagctctccccatgatcacagatcacatttgcctttcagctgtaaggagacagaaagtggctggcacaaggccatgcgtggtggctcacgcctgtaatcccagcagtctcggatgccaaggcgggcagatcacctgagatcagtagttcgagaccagcctggccaacgtggcaaaaccctgtctctactaaaaatacaaaaataagctgggtgtggtggcgggcgcctgtggtcccagctactctggaggctgaggcaggagaatcacttgaacctgggaggcagagggtgccgtgagccaagatcatgccactgcactctagcctgggtgatcgagcgagactccatctcaaaaaagaaaaaaagaaagaaagaaagaaaggaaggaaggaaggaaggaaggaaggaaggaaggaagggaaggaaggaaggaagggaaggaaggaaggaagaaaggcgccagcacaggtttgccctgcaggtatgggtgcactcatgccccaccaccctactgggtgcatagaggctgggaaatgggtcttcagctgagctgccatgtccccaagccacaaatctagtgttatggaagaacagaaaaacagatattggagggcaataagtggacgctgttacaggtggggatcaagggggacaatgagtgtagaggagtcttgaggggttttgctgtaaacaggagcagtgaaacggggcaagagccagggggcatgcggaggcaggagcgggagcttccggtgatagaagctccaagggcatgttggtatgctgctgggcctgaccccacagggagagagaaaaattacaggtgcagaaaacaggaggagagagggggtctcaggggtggcagagaccactgcacatggtgggaagtgttcacctgagggggctagggctggggaggggacagatttgatgatgggaactcaaggaaagaaattctcgtcagatgctctcaacttgctcagtgaaacatgaaacaaagttctcaccttgaaagtgcagggcctgggggctgaggggaaggtgtgaggccttggagaaccagggaggaaactctagaattcccaaggaaggctggctctgcctgggtccacttgaggcttgtggtcataaatctaaggtgcttagtcctgggctgggtgtggtggctcacgcctgtaatgccagcactatcgggaggccgaggtgggagaattgcttgagcccaggagttcgaaaccagcctgagcaacatagggagactccatctctacaacaataatttaaagattagccaggcgtggtggcgtgctccagtggtcctagctacttgagaggctgaagccagaggatttcttgagcccgggaagtggagggctcacctgtgctgggttttctttctttctttctttctttctttctttctttctttctttctttctttctttctttcttttttctttctttctttctctttctttccttttctttctctccctccctcccttcctttctttctttcttgcttgctttcttgctttgtctttctctttctttcttctttctttctttctctttccctccctccctccctctctctctctgtctctctctctctttctttctttctctctttccctccctccctccctccctctctctctctctctctctctctctctctctctttctttctttctttctttttctttctttgtctcgctctgtcgcccaggctggagtgcactggtacaatctcaggtcgctgcaacctgatttttttacctgcctatccacacatgcaaccacgactcggaccaaactaaagaacatttgcatcaccacagagaatgcctttgtgcttccaggcaaccaatccccagctacagaggtaagccctgtcctgccatctatggctgtagatggtctcacctgctcctgatcacgccactgcacttcagcctgggagacagagtgagaccctgtctcaaaaaataaataaataaggtgctttgtactggtttagagggctgggtaccccagagagaacgatgccaccggggcacatcatgagtcttccactgagccatggagctgtgtcccttgagacaggggaagaggctcctgccgctggccacactctactctcatgtttgagcagtgaagggcccggccatggtgacagctaagcttggtctcaggaggccagcagaggcgaggatcctgagccccagcaacaatgtgacagcaacacccaaggcagccaacagccaggcctggcagggtgggtggaaggcccgggctctgggaaggggcagggaagcatcaggactgtgtggctgggccacacccgggcccgcctggcaggtcgctcctagcacctcccacagtgtgacgtggacaggggaagtaagtgttccgcgaaataacaaaaggtgctcttgattttcaggttttatttgcctgttataattctgatattatgtacatatatatatatacttttgtttttttgtagagggcttatcagtagaccaagcacaggcatacagggaggctgtggctgctgagcagtgctgggagaaccaatctttcctttttttttgtctgtttttatttttcctgggatgggttcatcaaagctaattgctatcaatcctagaaaccacctagggactcagacatctgcctacacactagtggcgtaaagggaaggacaggggtacaaactttcaaagtcacggtgtatttacattcccaaggtgggggcgggaggaggctgaggaagacaactgttcagacgatagggagggcagggctgctaaggggtcctggggggtgggggcggctggaagaggccggccagtgggcagtgggaggaggtgtgcccgccccgcagccaggtagtgacggaggccacttggatgttgtgtggtgggtaccgaaggcagcgtgtgtatggagctcctgaaagccggccatggggtgggctgggcggcgggaagaggcggtgctgccagagtgcgatgctgggagtggggggactctgggctctccagatggcctcccctgcccccgcggccagtttgcccggctcccatcccggttggagcagagatggcaaagaaaagacagcagatggtggggacaccgagttctgttcccagtcccagccaggctggctggggagtggctgggggagggggaaggtgccaaccctggtcctgaggagaccccaccatgtctgcccccagtcagggagcaagaaagacagcatttcggagaccctttcgggccacccctacttcttctcccccaaaccacagcctctctgcccaaatgggctggcaaaacagcacccaaaggcccctggcatgtgggagatctgcccaagctggggcagagcagcgtgtgcccaggaaggggtgcagctgggttttggcaataaagtggggaccgggtggtaggaaggggatccgaggcagcaagttctcctctgccccaactccagcctcccatgggcctgctggagagggaggggcctggatcccaaggccaggggcacagcatctcctgtcctggactccactattctagggccacggcagggttgatgggggaagtggcccctgagctgtcattgccccctgccgcctccttctccttcttgccactgtactggccaatgaacgaaccatcctcgttgaactgaacatccacgctgcccccataatcggccaggctgtcgtcactgcccaggggcttgatgtccccgttgagcgatggctggctgctgccaaaggccttctcctcgttgtcactgcagaggcacagggcaggtgcgagtgagagcactgccgagcccctgcaggagcctggctgggggtgaggcagacgcccgcctgccttccatttgtttagaatgcgctcagaaagagcagctctggccaccctggcaggcaggtctggagctgtcatctttgggcattccccagatcctggggactgtgagggagaaaatgtgcgctcggccaggggattatggggcctggttcctgtctgggaagctgtctggggcctcccttggggagaggggagcagtgaaggtatctgtgtggagaggaggggctggggcgtgttggcctctccctgaaatgaggagctgccgggcctgggggctgggaagtgagagtcctgtcagagccccggcagccaggggacaatggcacaccaggcgcacattgtctatagggagaccttgctgttggcccctccccaccgcccctgccttacctctccagggacctgaagtcacccggcagcacagagaagagagagagggggtgagatgtgaaggccagggtggagctgagtgccagcacccactcctgccccggctcacctgtactcgccgaaggtctcatctttcatcggtcgggcctcagagtccacctgggtgtcctccttatccttcactggagacacagagagggacagcttcttctcccgccccagcctgacccggggctccaggcccctctacgccccgcacccccagcactctgtctcaacagcgcccagaggcaagaggccttgaaagaaaccgctcaccccctgcggtccagccaccacttgcctgttgccccaaccccggcctgggaggatgatccccctgcctgcccccaccatgcgcctgtcatcttgtggggagctcggggaatccaggaggccttgcagaagggtggaaggggcgaggtgctcctctctgccctcggctccacccccgtcacgtggggctcagaggctacctgagtatttgccgcccttgctgcgcttgatgaagcagaggatgagcaggacgaggagcaggaggatgatggcactcacaaagccgatgaaccagccctcagtggcgaagccagcaggagggagcctcacgcggcctgagggtgagacaccagccccccgtgctgccgcccaagccagaacccgacctgaggccctgaagtatgctcttaaagttggggccctctggggggctaaggagtgacagggacagggaaaagggcatctgcggaaagggtatgaaagggggctgattcggggacacccagattctgggaggagaagcagacaggagccgtggagggagcctgggcagtagtggccattcaggggacagaaggacatgaattgtgcagcccccatgcttccctggcaggtgatggcgggcccccggcgcctcacctgtgccattggtcttcacagccatttggtgccggaacatcctctccttaaacaagtggatctcgtagtcagtgtcaggctgcaggtcccactgcgtgtaggagctctggttgtagctgacatactgtggcgaaagggaagccccacccttctcttctgccagggagagagggtggcagcaggggtgagtcggagtgccaggcaacccctctggcccagagcccccttccccaccacgccccaaggccccctttcacgcttacctcccaaggctttgaacaagatatggaacctgaagttgcactggccctccttggggacccaggagacgacactgtagttttcacccgctgtggctgagatgttgccaaaatctgagatccctggggggatgcaggggaacgaggagagtgtggcagctgccaggaagtctaaggccctccctcctggacccggctggccggggcctccctgttggcaggtcattcctccagcttaccagacaaggccatagtgcctccttcccgtacgatggcttcaccagggccctctttggtggtggcctgaagctggaagcggtaccgcaggtgggggctgagatcggtcaggttgtgtgtccgaagttcggggtcccgaaggttgaaggacagttgccccttgcccccctcatccactgtggggacagacaggggttggctgtggctgcagctctgccccctccccgtggcccctccacctcccttccctgctggggcggcgcacgcacgggggtggtaggagagcacgtagccggtgagcacgccgttgtggctgagtgggggctgccagcgcagcagcaggctggtgttcgactggcactccaggtgcaacgcctcggggtggccaggcactgcagggcacagaaccgagtggcaggtaggtcctcgcccaggtctggggaggagggcaggggatgaggcgtggggtgcaggactcacctccctctggggtgctgaaggtgaactcgctggcgggccccgatcctcgcccgttaaaggcctgcacctccaggtggtaggagctatagggccgcaagccactgaggatgacactggtggtgttggcgggcaccaccacatggtctttgtggatatgtctcttgctgtgcttcctctgactgccctccctccagtacgtcacctgcacaagcgaacaggagacctcgcaggggcagaaggcacccagcagggcccccagcgcacacccccaccacccttaatggggaccctcctctcaacccaagtcttccaggagagcggctggcaggtggcaaagccccctcaccatcctgtcgctttacctcagtgatcaccctcctgggcccccatgccttcaacccttacattgtatccgcggaggtggcccttgacctgggccaggtccaccggccgccacttgaccagcacggcacttgagttgaggatttcaatgccttccagctcagggattgcctgggggtctggaaaccaccagtgacttggatagagccataggctctcaccccagccctgaggccaggcccaagcccctacacacagagaagacgaattcggatattttatgaggtacagtttgaggaggagaggtgtgtttgcatggtctcaagatctcttcctggactgcttattagttgcaaaggtgaaaatagtagcttatacaaaggagaaaccatggctgggcgtgatggttcacacccgtattcccaacactttgggagacagaggcgagtggaacatttgaggtctggagttcgagaccaacctgatcaacatggtgcaaccgcatctctactaaatacgaaaattagttgggtgtggtggcgcgtgcctgtaatcccagctaatcaggaggctgaggcaggagaatcgcttgaacccgggaggcagaggttgcagtgagccaagaccgctccactgcactccagcctggatgacagagcaagactccatctcaaaaaaaaaaaaaaagaaagaaaagaaaagaaaagaaaaaagaaaagaaaaaaaggagaaaccagaaaaaaaacttgaccgggtacttcaagttaccatctggtcatgttccagattcaaggaaatgaaagaagcagcattggctgatataactggaataccgctgccaattatagaaatgtgaagtgtggggaatttcataacgtcgctctggttatgtaagagaatatcctcatccttaggaaaggcgcacaccaatgctgagaggtgtggacatgggctggggtggaagcaggcgagctcaaccgtgggcgaggggccctgccggatactcacagtcctctccagagtagccgatagtgacctggggctctggtcccttgccctggctgttgacggcctggactttgatctcatagggcacgaaggtggacgtgttggacaccaccaggaaggggtcgctgacaatctgctcctgccagggccctcgtgtcccctgagggcgccactgcacgcggtactgaacctggggggcgttccagtccatccaccggagcggctggaggaggccagcagaagaggagttggttggccaagaacaccagcattctttggcccgccccccagcacaaaccagcatccccagacatcagccccttcctttgcatagccaagggggagcaacagacacccaggtcatggcctcatgtcccccaggcagctcagcccagggactctcaccttccacgtgatgaccatattggtggtctcatttccttcccccttcacatccacagggttcttctctggggctggaaaggaaagtattaacacatcaatgctgcagcctcttttggagagccacgaggaccgagggccaaggaacaaatggctcattctggcaccaagggagtccagccccctcgcgctccccctggaaatttggaagcagaggaacttgggcatggcacctctctaagccctcccttcacagcccggagccccttccaggtggcatgggagtgggtgccaccctgactcacctgcctcaggtgtgaccacagtctcagagaccgggctgggctccccggggccatatttgtttatggcagtaaccctaaaggtgtagtggacatagggcgacagcttgagggtggtagaggtctggttccctggaaccttgcccagactgtaccatttttcaggcgccatttccttgtcctcaaattcaatgtcatattctgccaagaaatgaaccgacaatggagtgatcagcatgtggctttgggggaagggctgtggaggggttgggtacagtctgggtccctgattacccaggccaactggcatctccagattcccatgaggaaccgtgagtccccccaaaccgtgtccccccaggaaggctccaggaggagggaggaccccaggaggggccagggctggcagaagtgacggtggggtggcactgagctcaagcctcttactctcaatgggggcattgtggtcttctgcaggactccaggacacgcgcacctggctctgcgtcagcaggtgcaggtcggacagcaccagccgtggcaccggcccagggctccctgagggtggggagggtcggtgcttgaaagggcccagggatgtgagccccggccttctggagtggaggcttccaccctaggacttacccaccaccaagagctgtgccctactctccaccacatccagttcggtactggccacgcagctgtagttgccctggtcgctgtagtccaggctgtggatgaccaggcgcccatcctctatgaagtacctgcggaggagccgtgtctgtctttcctgccatctgggctcttctcccctcccatccctccctcctgtctccttcccccgctcctgtcagagccttccccatcaaagcaaggacgaggccaagaggtctggacttccagcttttcccactctgccccctttcaccgtcactgtcctcacttgtcactgtccccaagctcctggaggtctcgaccgtccccacgccaggtgatgctgggctgcaaggaggggtcaaaggaggcctggcacgtgaaggtcaccctggaacctttcttctcgattgtgctgcggggcccctgagtgatctgagttgcatctgagggtaatgcgtgcgtggggaagtcactctgttgtcctccagaggcccagaccctccctcccagaggcactgccagccatgtggcaagggttgcctgacctttaaccttcaggttagccatgatggtaacattgttttggtcattggcagccaggcagaagtagcgtccggtgtcattggcctggaggtctcgaatgcccagggtcccattggcataggggaagaagcgttcgtcctgaagcactgttgtcccatcctcgtccagcctggagggagcagggcgggcctggctctgactggctggcctgggctccctgccctccctggctccctggccactgggacacgacactcaccactaccaggacgagacactcaccactgaacactgggcacaggcgctccgaaggccttgcacagaaggtaggcagtgctgccctggacagccatgtacgtctgattgtccgcagtcaggatcttggctggcagctctaggggaggaacagcctcaggagacagggcaggacttgggaccacagctgggccaggagccagggaccctctgcacggcttcctcgggcccccaagagccctgcaaatcttggttccctgctcccagctgaggcccccgccaggctgtgtctctctctgccttcagacactgccctctgcctcagatgcgcctctggtcacagccacccaacttttacgttattccaggcctaactgacagtcacctctccccagaagccttcctggcctagtccccagccttccctgaagttccaggagaggtgccacctgggctggccttggtcacatcctgtggcacagcggtccgctcagtcacagtgacaagacctttcccctcttacatctccctcggctatcgtgaggctgagtgagatggggcgaagggtgtcagcaaggagaaaggtcggcgccagcctggtaggccgaggacacatcagctgccagctgagccactctggtggcctggcccagtgggctgcagggacagactgggagttaggaggtaaggaagggagggcactcacggacaacgtagatgtaggcattggccagcaagagcccgtgccggttgcgggcctcacattgggtcaccattgtgtcactgggctgcacgttgctcaggatcagggcgccacgctgaatccggtacttctggtctttggccagctctgtgcatgcagcaggtgggcccatgggccacagcccggcattgagctgcgttgaggcccttcctcaccctcctcttcctctcccccacagcccccagggctcgccacactccccactcctgcctgaggccctgctcaccctccacagggatcccgttgattctccaggtgacctctggttggggcctgccctggacttggcagtccaggcgggcagtctctcctggcccatatagatggctctggggcttgtgcagccagtacggggcagctgggaggaaggggagagccgccctgagcccgcagccagcagctggctcttgacccggcgcagaccctcccctcccccatgacagtgggcatcacaggccactgtcccaggaggtccataccctccacggtgacatagtacgcatgccgggcactgcccagtgagttctcggccaggcagcggtactcgccatcatcctcctcgcccactttcagcagctgcagggtcttgttgtggttctggtaggtgacacggtcggctggcatggggccactggggcgcagccatttgatggtgggcgtgggactgcccgggaggcaaagggaagagagcagaagggagaaaggacaaggccaatcaccccagccccctataccccgcggtggtctgagctccctgctagggctccgccaccctgccctgccctgccctgccctgggttcccagactcacaagccctcggcgatgcactccaggaccaatggctgcccctgcaaggccaccaggtggctgctggagttggtggggaagagcaggcgcggcttcctgtcaatcatgctgttggctgccaggagaaagtgggtgggtgggctgcccactcttccctccaccccagaattgcaaggctgagggactcgacactccagccagcccccggggcctctgtgtcttcctccattaaggagagtgtcctgtctctgctctcgacgcctgggaaggggtctgggcagggtagaggtgggagccaagctgttcttgaggaagcctggagttgtcagatggacctatggtgggaagggccatgcctgagggtgaaaggagtcagggagagagtgcagagcctctgagactcactggccttgacccggaggtcaatgggttccttctgaatgatggtcctggtgcctgggaagtgggcgtggcagatgtagtctgagtggttgtcggaggtgagcacattggcaaagtagaggttgccgttctggcccatcgtcacccgctcgtcctgcttgatgtgcaagatctctgcagggggcaaggaggccgaagtcatgaccccgtccaggaagacacccccgctaacaccccgaccccacgaggcagccgctcgccggcacccactgctgttcatccagtagatccggagaggctctgcacttgggggagggttgcaaggcagaaccactgactccccttcctccacctccacgggcttcactgtctcctttggccacttgggggcacctagaagggacagacgggctgacactctcctcctggtccagatggtgctaggcaggagaagggaggtgggggcaggggggtggcgggctacaccagggatggacgagggggcgagagggtcaggccagtagaaacttcacagaaaaggaggcagacactctggataccttctggactcatagcagagactagcacttagggaggccagggtgagcaggagaccaggaggccaggaagggttaaccttccacggttctcagctctccctgcccaccctaggaaaggacgggtggggggaggctgaggctgaggtgcagtgatgggggaggggagctgtggagggatgcaggagtcacagacccttccatcatcctgacacagaaaccatggcaacggttcccaaggtaactggaggggtggggaggggagaggagagcgctcaggaagcagaaagctcagggaggatggaatgcaaagggaaaaccccagggaaaaggcgacacagatcaagacagagccgtggagcaagagagaccaagtcggaggtggaggggaggagatggagagccaagtggaaaagccagagaagaggggccctgctaaggagtgcaggtgtagacagagatgactgcagtgactcaggcaggtctgcccagaatcagtcactccccccaccagcccgcccccccctccccccgccaccttcctgctcagccatgaggcaggcaccaggaaagcctgagggagtgaaagggcatgagatgaccggaagtgcaatggagacagagacagggcaaaggaggagactgcacaagaaacaagatgggccaggggagaagctggggtggggtggagggctggcaggacacccaggcccctcgccacgagacaactggctgacagcagcttccagcccacaatcccacacgaactccgggacctgccctccctggtccctgcagcgcctcgcaccctcggccatgagccggatctcatgggacatggcggtgcccagcttattgctggcaaagcagcggtagatgccctggaacctctgagcaaagttgctgttgttgcccgtgatggtgaaggagccagagtggggcgactggtacacggtcacacccagctcttccttgggtttgaagtggacaccatccctcgtccagcggaacctgtgggcggaaaaaggcccagaggcctgaggccctggaacccaacgggggctggaacaggctggagggacaggtgcaagcagccagggcccccaggggatggactgggagatggcgaggacttggggtgattagcaaggtttggggcttctgggcttagaagttaggcagtccagggaggcacaaggccggggtcagtggcaggcaacaggggctgagacggcagagatcactcactgcacttcgggcttgccactggcctcacacttgaggctgatgtcatctgtggggaagacaaccaggcgccgtggagactgttccgtgatgacaggtggctccatcactgaagacagggtggagagagcggtggtgagggtgctgcctggctggtgtcatagcctcagcacctgtcccatcgtgagggaagcagggtccagagcccctggaggccccatggccacagggggacgaacggaggggaagaacaaaagaggcttgtgggacatgaaaagagggagagaggggacagccacgtaagttacaaagagatgcctgagaaagacaaaaagggtatgacagaaagaagcgggggcaacaaaagccaagacacagaaaccaagaaggacaaaccccagacaggggagaagggaccagagagaatggcagagaggaacagtgagggtgacagagtacccaggctggggcagagacagaacaaagccagccccacacaggtgagagaagcacatggtgctcagggagagccgagcagggccccggcactcaggagggcgggggtgcaggctcagctgagggcctccttacccttctccttggccttctgggaaacactctcacccctccccaacttaccatggtgtccttcatctgagaaatccaggcaggcagcaagggagggaatggagagaaatactgacaggcagccccagagtggggcagatggcaggggacatagtaagctcctgcagcccccccgtggagagggaatggcaggagaggaggccctggcagtggcaacaagggggcacacgctgggctggagcagtggcaggtcaagcccagggagatgggacagagagatgcccagggagaggagctccactggatagacacacagggcatgtagcccagaggcagccaggccatgcctccagctctagcagacagggagagagaaattcttgcctttaacaaggagtgtccttgcagccccctggcagggcctggcagggcctgcagaactgaccccacccattcaggatgccttggaaggcaccgtcccctgctccagcctgcttccctcctaatccaattagcacagctgagtgttttcaattaccagggcccagccttcagagccctgctgccccctccccctgaaaactatcccaaaggccctgctgcctctgagtttccatagcctgcggggttggcgccagccctcctcttctccctccttcctcccagacagccaccaagctctctggggcagaggccagagctgctgtcccagccccaggactctgcagagcactggccagggcggcctcgaggaagggagaagagggagggagggagcagcaggctgcctctgaaagctttgtctctgcagaagacctcagtgtgaaggtccagggagggaggagggggctccctggggacactgcagagggccctgagctggggagggagatggtgacagggatgacaggatgcagaaagccaactaggtggaggaagcaggaaaagagacaaagggggctggagtggctggggagggagagatggaagacaggttccaacagggagggccggctgcctgccactgcccactgtgtcgtatcagggtcaagaacaagtgctggtcagtgaccagggcagccttggagctgccatggccttttggcctagttctctctccccactcccatctttctgtagagaatgcacggcttgcattccactgtacagtgttatattgtgtatccacctctgtgtcctctgggtctaaaagcctcactggtgtgtgtttccacctgtgtggcctctcagcggctctgctccttcatccctgcacctgccttgtcttcatgcacctgtgtgcatgtgtccatgtgcatctgtaccaagggagtctgcctggccctggccctccatgtatgtgtctaaggggccagcccctttacctcctccaagccctcactgcctcccaacgccaggtgcctccccagcctctctctcgcagcccctgtcccactgctggcacagacagtcttcccaacccctatccgccaactcgtctctcagtgacactggcctcctccttgtccaggcccagagacaaaggtgtcaaggtgaggctgggaagggactggagcctggtagctcaagagacacaaatgccctcacacatgataccctgtgacatgcccctcacacggcctgacagctacttacaggagaaaacaccatcacggtaacaccccccacacgcaagtgtgtacttacattcagccccactcacacatacacatgacccaatgcaatcaaatgtcgtggtcaaatacctcccgacctccacaagcctggccagtaagtaacagagtgactcacacagtcacccatgtaaggaagtcaaaatcacattcacgaatatctacgctcagtcaatcacaagaacacacagacatacacagtgtatccatgcttaatcacaaccctacggccacactccccaacatccactcacctgcttgtgcccccaacaaatgttacaaccatagacacatgctccagcagccctgcccccacccccaccaaataactacacacaaaaaagggtccagaaggctgctgggctgggaccagggtttttcaagccaccttttcctgtctcagttcagagacagggtgaccaagggcccaggaggggaaagagaaatggggacaagacttgaacacaggcctttgcacaagccagctgagggctggggacgaccccattctcctgctgccacacccctgtggtgggggatggaagcggaggagtcggagtggggcgggcagagatggggcgggctaaggagagcatggaggaggcccaagacctcggggccctgctccaggttcgctgtccctggtgctgaaatcgccccggcggccgcgcctgtccctgtccatggtcctgacacgccccgcaccttctaccctgcccttctctccgggggtacccaacgtcctggctatctcctgcccaccctgtgcccaggaaaggccagggagaggagtcagggtccggaacagggagaaggtgaggaggtagaagataaagaggggcccaacatagcggcgaaggtaggcgcccaggctcccttcagctactcacattcctcggggatctggataagcaggcaggggctgcagaggaggagaggccacacgtaccgcagcgccacgaccatctttcccggcggcaccgcgcagcacagccagccgggctcggttcaggctccggccggaggggaagggggctggtgggcggcttggggcgggagttgggagtgggggcactgggagaggggagaagggaagggaagggtgggggaagagagacgagagaacggaaggacgttagtgactaacatctgggtaagcccgggctcttggccccgccctcagccccgcccccagctggccggcttctccagccctcccctccccatccgcacccctccccaccttggagggagaaatctggaagagatagccctggctgggcctctaggttgccttttattccctctctactctctgtctgcacctttcctgccagctgccttcccagcaccaacttgttgccccatcagctcccctgtgcatggcatgcacatccccgtatgtgtctgcatgtgcaggtgtccgtgggcatgtgtgtggttgtggatctgcaagcagggagtgagctgtatgtgagctggtatttctgtggtgtgtcttctctgggaggggttgcactcatgagtgggtgtgttagtgtgtgtgcctgagggaatcaacacacaagtctgctagctacgtgtgtcttcttgtatgtctttatgtatctgtggggatgaatccctgtatctattatctctgtgtgcacacacatgtagagaagaattcttcttgcagtcacattgctatagctttcagagccaactgatgcctgggtgctgtacagacctaaaaagctaatggggggattgggaagtgggatagagaagggaggaaaggggcccaagatggcagcatttcacaaaatagtttcaggaaaatgaagaaagaatggggaaagggccaggcgtggtggctcacgcctgtaatcccagtagtttgggaggctgaggtgggtggatctcttgaggttgggagtttgagaccagcctggccaacatggcggaaccccgtctctactaaaaatacaaaaagaaaaaaaattagccttggtggtgggcgcctgtaatgccagctacttgggaggctgaggcatgagaatcacttgagcctgagaggcggaggttgcagtgagccaagatcgtgccactgccccccagcctgggtgatggagtgagactctgtctaaaaaaataaataaaaataaaaataaaaggccaggcacagtggctcatgcctgtaatcccagcactttgggaggccgaggtgggtggatcacctgaagtcaggagttcaaaaccagccaggccaacatggtgaaaccctgtctctagtaaaaatacaaaattagggctgggcgtggtggctcacgcctgtaatcccagcactttgggaggctgaggcaggcggatcatgaggtcagcagtttgagaccagcctggccaacatggtgaaatcctgtctctactaaaaatacaaaaaaaaaaaaaaaaaaaaaaaaaaaagccaggcgtggtggctcatgcctgtaatcccagctactcaggaggctgaggcaggagaatcacttgaacccaggaggcagaggttgcggtgagcggagattgcgccattgtactccagcctgggtgacagagcaagactctgtctcaaaaaaaaaaaaaaagttagcctggcgtggtggtgcattcctgtaatcccagctacttgggaggctgaggcaggagaatctcttgaacccaggaggcggaagttgcagtgagccaagatcgcaccattgcactccagcctgggcaacaagagcgaaactccatctcaaaaaaaagagagaaagaatggggaaggaagccttcccttgagaactggtgtgggagaagagaggaaggaggaaaacaaccccctgctgctcctcagccccctgggggtcaagagaggccactgaggcctcctcccttccagatgctccaggttagggtcaggacaggggtcaggacaagctctgggacattttccgtgacagtgtttctaacacttcttgtgtgtctcaaagtcccaatttctaggtctttgtctgagtcttcagagctcaactgctgcatgtgtccaccccaaacccaagccacaccggccatgtccatattcacctacaagtaaggggagccaaagactaagggtctgaaagagggggctcctctgacaatgacaagaggaaacagactcccaagtggccagaccacttcaattccaaacaggaagtggttaaagtgcaggcaaggcaagaaagggtgttgttaggtgacagagcttggaggctgaagtcccagactagacgccttcattaaatccatactgtgcatcctccctctgcccagccaggaccttatcaaagcgggcaccgagcctcagcaggaacaccgaaaggatggtagagaagtcagccatgctgtgctaaggctctgggccttgtcagttttgtgtaacagagtgacccaagaagagctgtgaatgcggcagatcccgtggggactctgggcaagagcttgctgcagagggtggtggagaagcagcagggtgggtcagcgtgcatggcctggaggccaagagatgacttggagggtaagaagagtgattcccagcctgcaagagctggacctgggcccagaagggaagagcaacagtggatctgttccaccccggcctctccctacaaagccagtggatcaggggaggccccaggcagcactggcctcaacttcaaggcctgtaggagcagtaggagactcggatcagagagcagatgatcaaacagcagccttgggagctctgagcactggtcttaggagggggaggggaggaaaccggagcaaggaaaagctcaaagaaggaccctcctgcatgtcagaggcttttgggtgctctggaggtcgataatttctgccacgcaagttcctctatttgtcctccaaatctagaatcctggaatggtgtttggcatgtacgctcaggggaaatacaatatccccaaacccctggtccccgctccctgccccatcccagccccatcccatctccccacaggctcatatccaacttcttttttggtctcccagtatttgccacctagcttgccaccgccctgggcagtcggagacaggcaggaagcagccagaaggttgcgagatataacagctgggagggggcgctccctcctctcctcccactgctgctgggtctctgatctctcaccattcctcaggcaattacagagcaagcagctagggttgtcagctcagcaggccctctaccccccaccagcaccactaagggcaaaggagcggggaggggggagtgttccacagatggagccaaggccgggtctgccaagggtgacagacagagtgagaagaggcaggggggagcaggagacaaagacagacgtaggaagacagcgctaaccacgatggagatggttagggggtggggaaattccgaaacggagacccaggcagcagagaaagggagagaagaggaaaccggagcacaaagggtgagaggcagctgcagagtgcgccgctgagaaatggcagaaagagcgagaagagtgaggggtgggggtgggcgtgtgcacgtgcgcgtgcgcgcaggccgcctgcacagcgtccttgtccctgggggctgtgccaggcaaggggcggggaggagggaagatgggcctgggtcagtggaggggcttcccggcgtggacgtcacgctggcctgggagcagggtagagagacagacagagggtggagcagctgtgagctggggccggaggggcctacaaagccccacgcaacagagcatcaaggccctgcccacttgtggcactgggcaagggacggccgtgagacaggatgaatggcacactgctggctgacccatgccatgccagggaacaggtgggggtcgggggattcctgctgcgggtaggaacggggggagggggaagcacccagaaaatcccagggaagccttccaatattgctgctggctgggagtaagtggtcacctggctggaggagacgcacatgtgttaggccaagagtgagcctgcgtgaccatgcactgagtggacagtggccgctgtgctggggcagttgaagatggggccattcctgagtaagtccggtcccaaacccatcctccccggtgggaaagggccagggaggcaagggtcacgcccagcagcctacagggaggggttcagccccagaagagccttgccccatcccaccccacctggcctcccactacacccgcaggtccctcagggagtcctctgtcctctgctccaaagtgcctgctttggtctgatgggaagcagcttgccagggagggacctgggaggttgtggagcctggctagacctggagtgactgcctcctccctgaaaacacacacacacaccccatcaccaccaccaccacacaccttgagaagggaacctccagcggtgccctgcacatgtgccctgcacacctgcctgtcagttctcaggttctgcctggagttcctctcaaaggagaagcaacaagagagcccttcaacagcacagcagagactatccggcttctcctgcccttgtctcctggggacatggtgcctggtgactcagtgggccagagtgggggtggggctgggggctcagcacagggcacatgaaagggtcagagtgtggtgctgggcccatgtgcttgcaggcctgggagcctggggggcttctgtgcctgttggtgtgtatacgatggtgtgggtgtcacctacaccctgtgcactgtgtccctttaaggctcccgctggccctccccgccccgctccccaggccgtggctggcgggtttctatggtgatgcagcccaagtcccagaggtgggggaagccagaggaaagccttgttatgtgttatgtagacagcacataaagggggctgctccagggagcccccacaggtacctgggggcccagaagtcctttatgactgctgcttagtccctgcactcccaacctcacccctccctaagagggtacccttaggagagagtgagccctcagccccctcatctcgcctgaggcttcagtctccaaggcaactacaactcacctgtaatggaccattctccttaaaagatggggaaaagagacggaggttaaccctttgtggggttcagggaggacggtcttgactactggggaagggagggaggagccccactccatccccacaatcacatgcctctgtggtctgttctattaaatcaacttacagcgtggacttaccacgtaccagaaagcctcatgagcacttccactcacatccactcatctcctccccagatttgcctcagggagggaggtgctatcatcatccccattttacagatgaggacacggaggctcagaaaactggaaactgtgtccaagatcacagagctggcactgggtctcagcaggggtggggttttagagggcgtggtggctccctaagctgcctctcagaggctctggcatcccaacatgtgtgcctgctgggcttcccagggaaccaggggcctgggcgaggatggcctccaagccatcctgccccgtggggagggcttacttgccaggcagatggcaggcaaatgtcgggggcagggagtgacatcttgggatggaggccatgcggaagtaggatgtgatcaacatcacgtctcagcacagagctgaagcccgacaccaaacaaacccccaagtcccccatccaggtactcagtccaagagaaggccaactcctttcccttttgggcttggggacaggctggtttcttggtcccctcttctgctctctggaatctggacttgttctgatacctttcttgcaaccagaggctccagaacccctcccaaagaggcccctctccaatcagcatttagggacagcagtggccccattcttgtgtcgaaggagatactgatgcccagcaggcggcaaggcttcagcctccgagacccctagaaggcgagagaaatgaggtggcagcaaaactagggctcctctcaggccccaggcctcctcagggagctaggatgaccctagcactagagggggcttcagcggccaggccagaaggaacagactgcatccagttcctggggctgtggcctgaaaaggagagcagggaaggagcccagcctggggcagggagaggccctggcccacagcagtcctgggatacctagcctgtgttggtttgcggggggcggggtgggggtgcctggaaacagctcagacactgccaggccccacgggccccctccaggggccccactcccgaggggttaaagggcagagggggacacaggaagcccgggggcggacaatggggcctctgtgatccccagggcttgggcattcctaagtcatgaacacagacgcagatggctgggagacagggccacagggaacccccctccactgaagcacagcctgggttggccagaggctctgtccccatccagccactgcagcagccaccctcagccccaccccttcccagcacaggccctgttggggcatctgaggagacccacgtggcctcatgacaatatgtgtgtgcatgctggttcacgaacacacacacacatgcaaccaaatatatgaccccacccagacaaacaggaatactggaggttacacacacacaaatacacacacacaagcagagacacaaaccccatacatgcagataggaagtctgcctggctggagggcagggggcagaggggctcccgggactcagtccctttccctcaagttccactctcagacccgcactgggatggacgggttcagaagtcctctttggccaagtgcatggagcccaggacgctgccaccctcctgccccacccaacccctggccctcgcagctgcccctgctgggtgtaagggccagagatgagcaggagctgctgactgacagtggctgggcactccctctgcagctttccaacctgggaagaacacggggacctgggctgggggccactggacaaagaaaagcttctagaaagaacagcggccagaccctccccagctcctccctctttttccagccacagccttcaggaagccacaaagaccctgttgatatctggggaagaggcaagctgggcgggctacctcccccagtgctcgtctggctgctgctcaccaggcaccccccatacagccttccactcagacaaggcccccatggggggtctgggcccaaccccaaggcgtagagtccagcagaagggtgctgagtggctgctggacagggcacaacctcagggccctcaagggtgaggcaggggcagctgggggggacaaggagaggagcagagcggtggaagacagacaaaagggtaagcagagagatggagcagagccctgacgggaagggggaagagggaagggagggccaggcaggcagaggcagagggaggagacggggagtggtgcaccccatccccggcagcagcaggcttctgcctagaaggaggaggaaggtgatggccctgggggtggggcacagggagacgtgggaggctgcagaggagagagcaggggggcgggggaagcaggagaaggaggtgtccgagatgggccagatcagagcaagtaagacagcgactgcaggggcagggatgctgcaggcccattccagatggccccacccagggacccagccccagcccattgcaggggcagaggacagggcaatgagcaccctgctggggaccctagaagggcatccagaccccccgcctcccccactgtctgaaccacgagggagggaggcagggcccccactcatgcccccactcatgcctggcagaccagggtcttggctgggatccccatcctggcagacctcctcacaggaccccaccactaccccaggttctcccatgaacgtgccctcctggagcctgggccactctgcgaggccgcatcaccctcacacccagaaaagcactcagtgcagccatttcgagctttgaaagggaacttggtgatcaaggtagggcacacaggcctgtctcctcgaccctcacctgccagtcctggccaggtgcatgccaaggaaggcgccagctgtagttccagtggtggaaagggctcggacctgggagaggccgattgggggcacaatctgggcaccctgctcactgtaggagccctcaggccaggcccttcctcactctttgcctcccttttcccttcagataatcatcaagaaaaaagaaaacaagtgacaccccacgaagacagggacaatgctggtccagtttgtcactggctcttccatgggcagcccagagcccggcccaaaggagcactggccatgagcagctgcccagtacacgactgcccatcgtgggatcctgagcgcctgggtagggaagctcttcactggctgcagggcaggggaccccgccaccttgaagcgctgattgtcctcctgatgctcagcagggagctggcagctgggaacttggggaggagccttttaggagcgcggtgtagcaaaccagggaggctggggcgtgctgaacgtgtttccctcttggtgatcagatcactagcgattcttaatttcttttgttcttttctgtatatttcaagtgtcctacaataagatgtattactttcgggatcatacacacacaaacatcaataaatatggagagagactcagatgcagcagagagaaatgaccaggagccaaggaggtgggaaggtcccaggcccaaccctgccccaaacttcccatgtggccaagacagccgagtcctcaaaggctctggagccctcaggtgtgcacatgtgggcactgcatgggagctgtgccaggggagaggccaggctgggccaagtcccaccacctgcagcaaggagctgacgggaggggagaggccctggggaggcccccgccccagaaagatgatgctgggcagcagcccccaggggaagaagggcggactgcactgatttacgtcagggccacatgagtcagcagagatggcactgggctgccccgatgcccctgccctcagggtggggttaacaggggcagggtatctacctggggggtgccaggcccccactccttctggagaagggggcagatggctctaggcctgccttcctgagagggacagtgataggtggggggtccagataccctgtcgggggcaatggattgtagtgcgtgttctttgcaatccctgccaaccaagaggccccaaaagtctgacctggaatggagggaataggaatcgctgacccctcccataaccgcacagagataggaagatgtggcagtgggcaaaagacctgcagtgcgcagggaccgcctgagccagtgaggcccaccttccctcacccctacctgatggaccctacctgatggacacccatgcacgggaggcacagcagtgggtgcccgaaccgacctcacccactccagccctgactggccacagagcctgtggaaacgggctccagaggcgccctacgcctccggggaggagcccctggctctgcggcaggttttcgggtgagcccggaggagcccaggctgggatttggaaagaagaaggaggagaacaaagcccccccaaccttggggcggaggggcaggcagcgcccagtcccgttcactcccctccccccattgcaggggcggcttatcccgatctacccctcaccacgctgtcagccgggattttcaaccaaactgagctctcggctggggatgaggggcagccacgcccagggccacaccccacggcggcctgtgggggagcgctcgacccgatctggcttcctttctcagacacgcacacacgcacggggacccgccaacttcagcccccgcctgcccacacagaccctgcctgacgccccccgccctgttctcccgcccaggccagcatctggggccccgcaggttacccctcacctgtcgggctcgggcacccggcatccctcccccgccccgcttacagcccgcggtgcccggagcccgacgcccggcatgggtggggctccggcagcaacgccggttaccgcgggccggaccgggccgggactccctggtccgtgcaccccgggcagagcggtgtggtgtcgccgggggatcgcggccgcggcccgggtcgcacggggaggccagcccgccttacctgcgctgcggccaccgctcgggctgcccgcccagcctccgcgcacgccggcctcggacccgccgcccgagcgcgtctgcgatgccgatgctgcggcagcagcggctgtggcggggcggggcgggcgtgcgcgcaggggcgggggaggggagcgccggggaggagagggagggaggagtgagatcacctccccggccgcccgccccgccccgccccgccccgccgcaccctagcccctggtgccagccgagcgcggcttgggctgggggcccccgggcagcccactccgggagctcagcgggaccccagccgacgggtcccgccagacccccttccccgcagaccgggagtctccggccggagagtgtcctcagccccagcgcaagggagcccgctgtgaaagctcggagcgggaatcgcggggcgagagtgctcccagaggcctggggccgggcggtggagagaggagtccggcaaggaaggggatgctcccttagcctcggcctggccctcgacggcgccggccagcgatgggcacctgcacgcaacgcccccccaacacacacacacagggcaggactcccgggacctctcccgaatgccccccgatcctgagggcccagtcagggtcctgttgggaggggtgcgggggcttcgtcctcagcgtgttggggaggcgccgcggagcaccggctcctgcgcaccccagagcccaggtgggcggcagggtaggaggcgagcccaggggagacagggtctgggagagggtatccctcgaactgccacccccaactcccagattttcctccagctctctggtgtcttatttctttgtcctcgggattggccccattcgacctttcccgccgactccactctctcccactctcccccgcagccctgcacaggatcgagaaggaaggagctcctccccagtgccccctcctaggctcaaggccatgacctcacaggcgaggaagcaaaatggagggggtaagaattccggagccggcgagctggctgcagcctcagggctaggaaggcctagggccccgatggcagattgcagatctggcggccacggtatttttatgggcatgcctgttgcccagtgaagcattccaggggccctcgactcagtctcacaagactccccaagtggtgtggggccctggagggcccacatgggagcagccctggcatcctggcttggatgccccacccccatagtgccagcttcagttcccctggaatgggaagcttggggtggacccatctgtgctcagagagggtctggatgccatgtttgcccagcctttaggaggagaatggacaagactaggcacctgagtgaagacggacggctagggagactgcttccagagtgggggcacttgcagggcatcttcaggtgacagcagaggaaactgagcccgcctgggtcacgaggccagcaggctcatgagctgggccaagagggcgtactttccatgaggcactgagctgtggtcagcttcctgcctttgctgatctgaactctgataggcctctctcctttccagttgctgcctccactcactccctacgttcccagcctttcctccaagccccaacttctgcaaatcctttacctaatctagggtttgatgcccatcaggatggtgaagtaagcagggaatagagcccgtttatacgcacctgctaatgtgtagtgatgggtccatttatggtaacaaaaaattcattactaggattacacgacatcacatttcctgagcacagccatggacctgccatcgttacatttcctgcacatttaaattgcacaccaacctggggaggtctgttgaagcattcgccccacgttacagatgagaaaaccaaagcccacagagctcaaggctgggtccagcaagcacagttaggaaggtctctttctctccactggctcattgcatccacacacacaccccagatgatggtgctgttattatcctcactctcccagtgaggtacccaaggtccagagaggggcagtcatgcaaccaggaagaaattggcactatcagtgcccccatttcacagatgaggaaaccaaggttcagaggggtcaaatgacccacccaagatagcccagaaggtaaatggcagaactcggacttgaattcccttctgcttgaccacgatgcccattctcacttccatgtaatgaagtggaggagccaatgggagcaagagcaagagtgacagaagaccaagggcagagcaagtcccaggagaagcaggagggactggccctgaacaagaggcaagccacccccccactgccatgtgcttgctgttggaggttagggggacaccaagtagacagatgactgtctctttcccttcaacgtcaagtgcttctcacagccctgctccctgtgacccagccctcatagacacagtggactggacaagggaagccccagactctgaccctgtgatgagcatgcagaagacgcagaagccacagacgacagtggggcagtaaggaagtgccagcaggcaggcggggtgggctcagccagacgtgtctttctctgttctcctttcaatctttctgtgtcttcatatctcaggtgtagcgcttggaaacagcacatagttgggttttggtttggtttgattctgtctaacaattcttgtctttttaaaaatcagctttgagacctgcctgggcaacacagcgagaccacgtctctacaaaaaaaattttaaaattaggcatggtggtgcatgtctgtagtcccaactactcaggaggctgaggtgggaggatcgctggagcccaagaggttgaggctacagtgagccatgatcacaccactacactccagcctgggtgacagagtgagaccctgtctcaaaaaaaaaaaaaaaaaaatcaactttattggagtataatttacatacagtaaaattcatccttttgaggtttacagttcaaggagttttggtgaatgttgtgtgcagccaaccactcccaccaccccctgcccttggccaccactgatctgatttctgtcttttctaaattttattataaatggaatcataccgtatatattcttttgtctggcttctttcacactcacgcagcatactttttgagcttcatccatgttggtgtgtgtgtttgtgtgtgtgtgtgagagagagagagagagagcatgcgggcgagagagagcagtatatttccttttgattgccgagtagtattccattgtttggttggatcagggtttgttcagccattcactcactgaaggacacttgggtagtttccagctttgtgtgattatgatggagcagctctaaacatttatatgcaagcttgtgtaaatgtgtgtcttcatttctctaaggtaaccgcttaggagtggattgttcagtcaagtggtagattgatgttgaacctgcctttgtctttgaactgtgcaggtcagctggtcacacggtgatgactgctgctatctctggatgtagtcacgccaggtgagtatttgctttctatttgtcctgctttccccatctctctcccccacctccactttattattttttattagtgttgttattactttgagacagggtctcactctgttccctaggctggagtgcagtggtgtgatcatggctcactgcaacctcgacctcctgggctcaagtgatcctcccaccacagcctcccaagtactgggacaacagatgtgccaccaccacacttgattaatttttttttcttttttggtagaggtgaggtctcactatgttgtccagactggtcttgaactcctgggctcaagtggtgatccactgccttggcctcacaaagtgctaggattacaggagtgagtcactgcacctggcctcacccccacattgtatcagtgaaggtgtgtctggagttggttccttccagtgggttcttggtctcgctgacttcaagaatgaagccgcggaccttcgcggtgagtgttacagctcttaaaggtggcacagacccaaagtgtgagcagcagcaagatgtattgtgaagagtgaaagaacaaagcttccacagcatggaagaggacccaagcaggttgccgttgcttgtggggggcgggggggggccagcttttattcccttatttgtcccctcccatgtcctgctgattagtccattttacagagtgctgattggtccattttacagagtgctgattggtccatttacaatcctctagctagacacagaaaactggtgcgtttttacagactgctgattggtgcatttacaatcctttagctagacacagagcgctgattggtgtgtttacaatcctctagctagacagaaaagttctccaagtccccacatcacccaggaagtctagctggcttcacctctcaaaggttcagggtaggaagcagaaattcctcccgtgatcatgaacagaaagggattctgtagaagggattagatgcttacctgaccattggatgggccaaaggagtggactctgggctaggtgttgataacaccagtgcagacctggctcctcaagggagctgctacctctgccaccatccacaagatgggggattgggaggcggccagtgtaacctttgagttcaaaaagacaccaccaaagtcatgacctgaggatcagcaagctgggaccaggaagccattgctgccacaagtgcccctcaacaaccaagaagtgaaggttagaccccagaaattctttgatgtccagcagaaacgcagccccacacagcagaagtgtggcttcccttccttcagtcatccaaacttcatgtgagcacacccaatttggcaattggcaaatttgccaatttgccaattggcaaaactaaatttgcttcccaaagtccagctgctctggagtctggaacatttccagcctctgccatgcagagcccacaaggtgggagtgagtgccgagagctgtcaatatgcccaggcagatgctctgctcttggtcatcttttagatggactggatttgttctctcattctattttctcctctgtttgtttagaagtgctctatgaattttttagtagttcctctacctattttaacatgcattcttaataaagtctaaagttaactaatacctctgctctggtggttttaatgtaggtccataaattatttgatactcctgccttcaaaaggtagtgcttaattctcctcctcttgagtataggctggacttggtggctcacttttttttttttttttttgagatggagtttcgctcctgttgcccaggctggagtgcaatggtgtgatcccagcttgctgcaacctccacctcctgggttcaagcaattctcctgcctcagcctcccaagtagctgggattgcaggcgtgggccaccacgcccaactaatttttgtatttttagtagagatggggtttcaccatgttggtcagtctggtctcgaactcctgacctcaagtgatccacctacctcggcctcccaaagtgctgggattacaggtgtgtgagccaccacttttttttttttttttttgagatggagtttcactctgttgcccaggctggcatgcagtggcgtgatctcggctcactgcaacctccacctcctgggttcaagcgattctcctgcctcagccccccaagtagctgagattacaagcccccaccagcacgcccagctaatttttgtatttttagtagatacgaggtttcatcacgttggccaggctggtctcgaactcctgacctcaggtgatccgcccgcctcagcctcacaaagtgctggaatttcaggcttgagccactgtgcccggcctcatttcttttttaaattttattttagaagttgaggtcctgctctgtcactcaggctggagtgctgtggcatgttcatagctcattgcggcctcgaacttctgggctcaagtgatcctcccgcctcagcctcctcaggagctgggaccacaggcacacaccaccacacctggctcacttctgatgaaaagaataaagcggaagcaatggctgcagctgtggggactaggtcacacaggcactgctgcttcctccttgttttctctctctctctctctctctctctctctcggattgctctgttgggtgaagccaggtgccacatcgtgaggacactcaacagccctatggaggagctcacatggagagaaacaaaggtcttccgccaacaaccatgagtgtgccattttgaaaaggatcctccagccccagccaagcctttgcatgactgcagtcatggccagaatcccactgcagcctcacaagagcctttgagctagaacaatccagctaagccactcctgaatcctgacccacagagattatgagataataaatggttactgtcattttgaactactgcatttgggggtgatttggtttgcagccacagatcactaatacatcttccctcctcctacacaatgcacggcctgggataacatactagccacatgaggtgggccctattatcatgtaggaatgaggaaggcagtgagctcagatatgtggacaggaacccaggcagagtcagccgtctgagctttgggaagcctggttttcagtagctctagggacttacccacacccccacactcccacccctgaactgctattatggtgctgtagcccccacggtgcctgtcactacccaccagctgctgtcccctctcctctgtgtccatcttttcttcatgtctttgcttctcctggcattctcctgctttgtgacaaatacccgtggctttttctgcacatgtcttttggcttctaatctcactgcagtttcaattccaagagagagaaacttatgggcccaaatactcattatcctcattttggtggagccttcatgccaggtaacttcgtaggcaactaaccagcctatggactagctagtcttggccaggtgcgggctcctggtccaggcagctgaggccaaggttggttcaagctgtgtgataggcagtatggccatctgttatggacttaatgtgtgtgtacccccaaaattcgcacgttgaagtcctaacccccagatggagcagataaagaagaacagagaggctggacatgatggctcatgcctataatcccagcactttgggagaccaaggtgggcagatcacctgagtccaggagtttgagactagcctgggccacatggtgaaaccccatctctacaaaaaatacaaaaaattagccaggcatagtgacacacgcctgtagtccgttactcgggaggctgaggtgggagaatcacttgagccttggtggggaggctgtagtgagccgagattgcaccactgcactccaacctgggtgacagagtaagaccctgcctcaaaagaaaagaaagaaagagagagaaggaaagaagaaagaaagaaagaaagaaagaaagaaagaaagaaagaaagagaaagaaggaaagaaagaaagagaaagaaagaaagaaagaaagagaaagaaaagaaagagagaaagaaaaagaacacaagaaaagcactgttccctcccctccaccactgcccctaccatgtgaggacacagtgagaaggtggctgtctctaaaccaggaagacagccctcaccagaagtggaccctgccagaccttgatctgggacttccaacctccagaattgtgagaagataaatttccattgtttaagccacccagtctgtggtattttgtgatggcagctggagctgactaagacaccaccaatgggtaagtcactggctagtggtgctgctgcagcagggagtatgtcttggtgggcatcttgctcgacctctcctatctaaccacactgaagtcatgcattcccttgtttttctttatactaggcccacgaaaccccatgctttgaaaagaattgcttgtttgccttcaccactcctcctcacagcctggaggtgatcatgttactgtgtagactggtatccctagggacttatgggctccaaacaagctgcccatgaatatcacaatcctgtcacatgcccttagccagccctgcttcccttccacgcagtgcaccggctgggtgcagtggctgatgcctgtaatcccagcaccttgggagaccaaggcgggcgggtcacttgaggtcaggagttcgagaccagcctgtccaacaaggtgaaaccctgtctctactaaaagtttaaaaaaaaaaaaattagccgggcatgatggggcacctgtaatcccagctactcgggagactgaggcaggaaaaccagttgaacccaggaggcggaggttgcagtgagccgagatcatgccactacactgcatcctgggcaacagagcaagactccatcagaaagaaagaaagaaaagaaagaaaaggaaggaaggaagaaaggagaaagtgacagattaagcacatacattcactttctcttcctcatgaaatcccaccaaaatgacagtaaatgactttttaaaaagaaaaactcccaaggacagaaataatgggaaaatagaaaacagcagcaaaatcatgggagctgaatttcactgcggaacccacacgcatccagaaaatgggggtgagtatggaagtgccattaaaagtctgttgaagaggcagtcagatctccacatgcttttccccatcccaacggaacagaatgtttattctttggagatgatgaaacaaagagtgtttcaagtggggagtaccaggaacagcttagatggcaccatactaaaaatgagggggttaaataaatatttacctactgaatttggaccactttggaccctcctggcccactctgtttctcaagtgctgacaaccagcctcaggcagcaggctaaagatctatctctgggtatttggccatcccaaggtgaacgaaaaggtagtaaaattggggttctccaataaaaccagccccgctacatcatcctatgatgaagctcatagttgacatgtccttccttttcaatcagctcattagtgccccattctttttttttttttttttttgagacagagtttcgctcttgttgcccaggctggagtgcagtggcacaatctcggctcactgcaatctccacctcccggattcaagcgattctcctgcctcaggctcccaagtagctgggactacaggtgcgtaccaccatgcccagctaatttttgtatttttagtacaaacagggtttcaccatgttggccaggatggacttgatctcttgacctcaggtgatccgcccacttcggcctcccaaagtgttgggattacaggcatgagctgccatgcccagcctgccccattcttaaatatgagaagacaaccaaggatcaccagacacctgaggaaaacctttagcatgaaagcaggaaagatcaaaatcaaaacaaacaggaaaacaattgttgggaaacacgactatgagaggtaataatttttaaaactaggctgggcacggtggctcacgcctgtaatcccagcattttgggaggccgaggggggcagatcacaaggccaggagtttgagaccagcctgaccaacatggtgaaaccccgtctctaccaaaaaatacaaaaattagctgggcgtggtggcgcatgcctgtaatccaagctactcagaaagccgaggcaggagaattgcttgaacccaggaggcggggcttgcggtgagctgagattgtgccatggcactccagcctgggcgacagagcgagaatctgtctcataaaaaaatttttttaaaaagaatttttaaagctattaactcactcagggagataatagaatgtaaaaatatccatgaatcaagaataggatgctataaaaaaggaacattcagcgaacaaacaagagttttttgtggaagcatacatgaaaaattcaatagatggatatttttcttctaacaaaatacagaaagttgcaagacaacatcactcccatcctagctacaagaagctggataacctacaaatcataggattttttttcttttaaggctatcgggaagctgaggttggggggaaaaaaaatcaaaatcttgaaaagccctttctaggagaaaagagccccatagctgctttgatttttggcacagcagcagcaggaagaggaggctgccacagacttgtgtacaaaagaaacagagaaactctgaacacattttaaaaggctgagtgtgcgacggcatgaggctatagactctctaatgcctcccattcaagagagcttacattcacccactaactcttttgcatgggccttcaccaagaaagtttgaaggcaaagcaggtgggccgaaagatactctccgaggtagacatgtgctcaggctgctgaagtctggatgcaggacaagggaaccgacaggaacccccctggggctcctgaccttccactgagtacagagcagctgtaactggtgaatgaagcagggcaggaggactgaagagttcatccccaggctctaggaagtcttaaggcaggacagaagaactgaaacaaaccttccggttgattctaatccttacactgagtacaaaccagaagcgaactgtggttggagtggaggcaaaagacctacaataggcacccgggaatgtgcgctcagggatctgctgaagtctacgggtgaggcaggagaatcaaagaaactcccagccactcagatcacaagtcccaccaaagagaatgttctgatcctgctctgaaatcattcgaagtatacagaaaactgagtctacgcaaagcaacaagaaaccccagactccacttaactacacaccagcctctaatacacacacacgcatgcacacactaatggcctgacaagaagggtcatgccctttttggggcataattttatgtgtatcttccccactgttctattacatatatttaccccaggagggataaatatatatgattatttacttcttaaaatagaaataggccaggtgtggtggctcacacctgtaatcccagtactttgggaggctgaagtgggaggattgcttgagcccaggagtttgagaacagcctgggcaacatggaaagaccctgtctctataaaaatacaacaattagctgggtatggtggtacatgtctatagtcccagctactcaggaggctgagatgggaggatcccttgagcccgggaggtcgaggctgcagtgagccgtgatcatgccactgcactccagcctggctgacagagtgagaccctgccttaaaaaaaaaaaaaaaaaggaatttgggaagggctcacctgggcagtcctggcccaggtctttcatgtggtggctgtcagatggtggccctcttcatattgcctcagagccttttttttttttttttttttgagaaggtgtctcactttgttgcccaggctggagtgcagtggcggggtctcagctcactgcaacctccgcctcccgggttcaagccattctcctgcctcagcctcccgagtagctgggattacaggcgcacgccagcacacccagctaatttttgtgtttttcagtagagacagggtttcaccatgttggtcaggctggtctctatctcctgacctcttgatccacccacctcagcctcccaaagtgttgggattacacgtgtgagttactgtgcctggcctcagagccattttctgtggtccttccatgatggctgaattgggcttccttatagcatcagggaagttggaatgcttacatggtggctaaaggcttgaagagtgagtgtccctgttaacaaggcagaagctgcattaccttttctgcactagcctcagaaatcaatcagcaccacttttaccatattatcttgagtacaagaaagtcacaagcctgcccagattataggggggagggttaaattccacctcttgatggggaagtggcaaggttccaggagagcatgtgggatgggagatattgttggggctacctttgaaaaacacaatctgccacacacaccagttaaaaggcagagactgttgggctagataaaatagctatatgttatttacaagaagcacatttgaagcataaagacacagacatgttgagagtagaagtatggaaaaagatataccaagcaaccactgagcataagaaagctgccatggcatcatactaatatcaggtagagcagaattcaagacaaagagtttactagagatcaagagagacatgtcataatgaaaaaagaacacataatcaagaaaacacaaccatttcaaatatataagcacctaatctaccaaatatatgaaacaaaatttataggactaaagggttctagatacagataaatctccaaacatactggccaactttaacattcctttctcagtaaatgataaaacaaataggaaaaaaatcagaagaatatagatttgaacaacactatcaacctaattgactcaattgatatgtacggaacactacatccaacaacagcagaacacatattcttctcaagtgcagatggaaccccaaccaacacagacaacttctgggcaatcgagcaagcctcaataaattacaaagggtcaaaatcatacaaagtacgatttctgaccaaaatgatgttgaattagaaatcaacaacaaaaagacatctaggaattttctaaatattttgaaatgaaaaaatatctacttccaaataacccaagaaccaaagaagaaaccacaagtaaaattattggtagaacatatctttcactgaatagaaatgcaaataaaatatgaaaatttgggaattcaacaaaacaactgattagaggaaaaggaactacttatattagaaaagcagaaaggtcccaaaataattatttaaatttctactttaagaaactagagccggtcacggtggctcacacctgtaatcccagcactttgggaggccgaggcaggcagatcatgaggtcaagagatcgagatgatcctgaccaacatggtgaaaccccatctctactaaaaaatacaaaaattagctgggcgtggtggtgtgcacctgtaatcccagctactcaggaggctgaggcagaagaattgcttgaatctgggaggcagaagttgcagtgagccaagatcacaccactgcactccagcctgggcaacaagagcaaaacttcgtttcaaaacaaaacaaaacaaaaagatcaatgaaattgataagcctctagccagactgatcagaaaaaaaaaatggagagaagatacaaattaccaatatggagaataagagagagggggcattattacagatcctacaaacataaaaaagtgataagaggatgttgtgaaaaacttattccaatacatccaacaacttagatgaaatggacaaattccttgaaagatacaaatggtcaacgctcatttaggaaaaaatagataacctgattagccctgtatctgtcagaagagttgaatttataactgaaaaaattctcacaaagaaaactccaggtttgtgtaaataataccaattctatactaactcttccagaaaacagaaaaagagagaacacttcccaactcgttttataaagtcagcattatactcatccccaaaccaaagatattacagaaagggaaaacgtagaccagcatctctcattaatacagatgtaaaaatggtaaacaacagccaggcacagtggctcacacctgtcatcccagcactttgggaggccaaggtgggtggatcagaggtcaagagatcgagaccatcctggttaacatgatgaaaccctgtctctactaaaaacacaaaaattggccgggtgtggtggctcatgcctgtaatcccagcactttgggaggccgaggcaggtggatcacctgaggtcgggaattcgagaccagcctgaccaacatgaagaaaccccgtctctactaaaagtacaaaattagctgggcatggtggcgcttgcctgtaatcccagctacttgggaggctgaggcaagagaatctcttgaacctgggaggcgaaggttgcagtgagccaagatctcgccattgcactgcagcctgggcaacaagagtgaaactccgactcaaaaaaaaaaagaaaaaaaagaaaaaaattcaatactcacttgtgataaaagctttcagtataccgggtgacagagtgagagactatgcctcctccccaccaaaaaaaatataaaaaaaaaaaagaagttacacaaaatactatgtactcttttatttatttatttatttttattattatttttttttgagacggagtcttgctgtgtcacccaggctggagtgcaatggcaagatctcggctcactgaaacctccgcctcccgggttcaagcgattctccagcctcagcctctgagtagctgggattacaggcttgcgccaccacgcccggctaatttttgaaaatactacatactctatgattctatttatataaaattctagaaaaggaaaatctatagtgatagatcagtggttgctaggctttcaggtaggggaagaagcttgactgcaaaaggccacgagggaactttctggaatgtcgaaaatatttattctatgtcatgattgtggttgtggttacacgactgtatacatttgtcaaatcttactgaacagtacaattacaattaatgaattttactgtatgctaatcatacctcaataaagccgaaaaaaaaaaaagtcattctggaggagagaaatcattgcctgcggagggccattccagggtggtgagtgcatgagcactgaagacacccggagcagctgctgcaataatctgggggaggaacgtgcaggcagagagagcaagaggaagtcagactgggaaaccccgaggcagttacccaaacagcccactaacagcaactgcagtcggccgcctctggggaggaaagcgggaggggccactgcctttaaaaaagaaaaaaaaaaaaaatctctgcagttttgccagggagccgcctcctgcctgactctcacatgatgacctggaggccatctatgggtacggccctcaagccctcaacgctcaccctccttctaccccccgcccctcaccccagcacctgctggagaccctggccctcccttccactccgcgaggctcttaatctatccagttccatgggctgcctttccgcagctataaacaggctctgtccagctttcccagttattattcacttaggtgaatggacacaattagatgatcatccgcaggctgtcttcctgtcatcattggcacacgcacacaccctcacacacgcacacaccctcacacacgcacacaccctcacacacgcgcacaccctcacacacaacccccccaacgccacacacacacacaccacacaccctcacacacaaccacccacgccacacacacaccacacaccctcacatgcacaccctcacacaccacacaccacacacaccccacacacacgcccaccctcacatacgcacactctcacacacaccctcacacactctcacaccctcacacacgcacaccctcacacacaccctcacattcacacaagtacacttgagtttttattaaatttgtttttgtccccttcaatcccatcctccaacccgttgttcctccctatctcctgggctctaggtattctccttcgggtcacagtccctgtgagggccgttcctgttgacaggcacttggctccgtccttcccactgcccacaggctccaccatctgcacatgcacccctcccacacaatcgggggcctctttctcctcgtccttggctgcctcctctttgtcttccaccccttacaaatccttcagggccctttaaatgccttttccacctgcctgctccctctagccccgctgcccagtgttaagtgggtcgcaccatttctctcctgggtgacaggcacagcttccaccagcctccctgcctccactcttctctgcagaagcccatgtgctcctggggcagagcccaggtccttccatctctgcagccacagtgctaggccagcggcacttgcagtttggtgaatggaaggttctgatcatggggaaccggtagatagagagggacaaacagtgtccccccaatctgcctcctgtcctcttctgcccagacactaggctggaagatcaggagccacaccttggcactcacagagccctttctgcaagtcttagagggaccagtgggaggtgtgcacacaggggctgcgctggcaggagtgggggcctggcacacccccaggtagatgccctgcccgttaacgcccaagggcaggggcttgagtgactcatgtgggcctagcgtgaatcagcacagtctgcccttcttcccatgggagctgctgcccagccccatctttcttggcccccgaggggtggctgcccagggcctctctcctggcacagttccatgtagtgcctgcccatgtggctcccagttcctccccggggtcctggctgagcagaatggcactggatcctgatctggcttcttgcatcccagaggagaccgccatgcgggcccttcctccagattcttccctagtttaacaacaggaagcgaggagtccaggggggcagagattgccacgggcctggccacattgctaggggaggtcccaacctgctgctgagatccggcactgcacagcctcgttcaggcagagaaactgataaggagatggttgtctgctcaccccaaaaggttagcatggattcctcgccctagccggctttagacggagggaacaaaggctttcccaaggccctgccagtccccacccctgcccatcttaccaccgtagtctccctcaatcatcaagtcccattgcacagaaggggaagctgaggtgccaagagctggcgtggcctgttcaaggtcacactactgggcaggggccaagcaggggctggagccttgctttcctattccccagccagggtccccaaattctctgccagttgagggaagccatctcctattccactgatctgggtggcattaggaaggccttttctatgctcctagattagtgacagcatgcggttattggggacagcatgaggatgtgcatgcgctgaggagatgcagctgaagcgtcaggcctggggtgccagcactctgcagcctgcccccaaggggctctgcaaaaacatggcaaagatgcggggtgtgatgtgcacctgtgtgtgctgcgggtgtgtgcgtgtgtggtgttggctgtgcgtatgtggtgtgtatggctgtgtggtgggtacatgtgtgggtgtgtggcgtatgggagtgtgtgatgtgtgcatgtgtgtggtgtgtaatatatgtgtgcatggtgtggtgtgtgtgtggtgtggcgtatgggtgtgtggtgggtgcatgtgtgtgtggcgtgtggctgtgtgcatgtatgtatgtggtgtggtgtgtgcgctgtctctggaaaatgcccaccctgtgttcccaccaccctaacagggccgggaggggccagggtgctgccaggctctctgggcaggaagaggaggccttggccgcgggccggacttgggcctggtccgtgaggctgttttggtctctggcttcacaggcaacagagaagacagacaaacaggaagaaagcagctgccttgggctgggctgggctgggctggcctcggctgagccaagccaggcctgggtgcggggggagtggaaagagaactactgggatgggggctggagggggtgtggggacaggggaaggagagaggtgttgggggagggaggaggagggctcaggtacagggaaggtgcgtccatactcatggtatgttcaagaacatgagcgagcgtctctgtgttgtgtgtttgtggctgtgtggctgtatcatgtgaggttgtgtgtggtgggagggagcccgtgagcacacggaggtccccagcccctcttcctaggacaggtagttgcaggtggggcaggaggaagagggtgggggtgtccctggatctcacaggggttcgtgaagcctggcttggcccctgccccactcctccctttcctgtccctcgtctccggccaactgggccctaactggggaggaggaggggcctgcgtgggcctgggaggggcccagcgaaagtgttttcaccccttccttgcctgggcccagcgaggagcaggaggaccccaacttgggaagggggcgtgaagctcccatgaaaaagcagcgcagtcctgggccagacccaccgctctctggcctcagtttccccacttataaaatgggaatgctgaactaagtgacctcccagagcactgccaacccagacaatccaaccaggggggcgtggtagggtgagggtgggcgtggaggctatggcagtgggaggagggagtcctgggccgggaccagggaggccctggggaaaggaagggaaacaggaggccaggggaggcctgggggaaagggggagggggaggaagtcccctcctggccaggtcactcccagaggctgggctgggccagggcagggcagccgatggagagcagatctgagcacccagccaccttcacgccaccgcccagctgcccaggagcccagccaggtaaggggctgcgcctgcctgcccccctgcccagtccccagccctcggatggtggcctctctcggcctcggttggggcaggggagttctgcgtgtctgtctggggtgcccactcccaaacccgggactcatgggctgcctgggggatcctgggttctgtgcatccgtctgtctgaccatccctctcaatcttccctgcccaggactggccatactgccaccgacacgtgcacacacgccaacaggcatctgccatgctggcatctctataagggctccagtccagagaccctgggccattgaacttgctcctcaggcagaggctgagtccgcacatcacctccaggccctcagaacacctgccccagccccaccatgctcatggcgtccaccacttccggtaaggcttgcccctccatgagtccggtgggcagagtgggtttgacgattcagggaagcccctctttctaaagacctccttcaccctcacctctgggtgtgtctctccaggctgccaatgagtggggaggggagcacagccccacttccccgccagggctggggctggggctggggctggggctgcccttccttctggactgcatgagcctggggtgtgtatccctcataacatggctttcctggagtcccctctgctaggagccaggaagtgggtgtccggatgggggcacgggaggcaggcctgagtccccctgcacagcaccctctctaaccaggccctcttcccgactccttcccagctgtgcctgggcatccctctctgcccagcctgcccagcaacagcagccaggagaggccactggacacccgggacccgctgctagcccgggcggagctggcgctgctctccatagtctttgtggctgtggccctgagcaatggcctggtgctggcggccctagctcggcggggccggcggggccactgggcacccatacacgtcttcattggccacttgtgcctggccgacctggccgtggctctgttccaagtgctgccccagctggcctggaaggccaccgaccgcttccgtgggccagatgccctgtgtcgggccgtgaagtatctgcagatggtgggcatgtatgcctcctcctacatgatcctggccatgacgctggaccgccaccgtgccatctgccgtcccatgctggcgtaccgccatggaagtggggctcactggaaccggccggtgctagtggcttgggccttctcgctccttctcagcctgccccagctcttcatcttcgcccagcgcaacgtggaaggtggcagcggggtcactgactgctgggcctgctttgcggagccctggggccgtcgcacctatgtcacctggattgccctgatggtgttcgtggcacctaccctgggtatcgccgcctgccaggtgctcatcttccgggagattcatgccagtctggtgccagggccatcagagaggcctggggggcgccgcaggggacgccggacaggcagccccggtgagggagcccacgtgtcagcagctgtggccaagactgtgaggatgacgctagtgattgtggtcgtctatgtgctgtgctgggcacccttcttcctggtgcagctgtgggccgcgtgggacccggaggcacctctggaaggtgggtgtagccgtggctagggctgacggggccacttgggcttggccgcatgcccctgtgccccaccagccatcctgaacccaacctagatcctccacctccacaggggcgccctttgtgctactcatgttgctggccagcctcaacagctgcaccaacccctggatctatgcatctttcagcagcagcgtgtcctcagagctgcgaagcttgctctgctgtgcccggggacgcaccccacccagcctgggtccccaagatgagtcctgcaccaccgccagctcctccctggccaaggacacttcatcgtgaggagctgttgggtgtcttgcctctagaggctttgagaagctcagctgccttcctggggctggtcctgggagccactgggagggggacccgtggagaattggccagagcctgtggccccgaggctgggacactgtgtggccctggacaagccacagcccctgcctgggtctccacatccccagctgtatgaggagagcttcaggccccaggactgtgggggcccctcaggtcagctcactgagctgggtgtaggaggggctgcagcagaggcctgaggagtggcaggaaagagggagcaggtgcccccaggtgagacagcggtcccaggggcctgaaaaggaaggaccaggctggggccaggggaccttcctgtctccgcctttctaatccctccctcctcattctctccctaataaaaattggagctcattttccacatggcaaggggtctccttggatccgggtaacggtgggtgtggaggcagcacagagacatacacagactccccacacacacccacagtcacgtgcacagctctggaatccatggcgcaggcagccaagtcttcaaagctgcaggacccctggggaagctgttctcacctccagcacccacctgcccacccgagacagagagctggctcccatcggggaatcaacacgaggtctttatgaatcgccacccagccctgccaggcatctgagcaagggtacccgccacccagcagccactgatcagccttccacaaagctgcagaagagggctttccccagcatccttcctcagctgcctccaaaaggggcctgggccagggctgaggggcaggcaggatgtggagcgggcatccctgtgtgcacggccccatcccacctctctgcacagggtgaagtgcaggcaccctgcacttgctggacagggctggagagaagcaagggggctggggagagtggccggtccagcgggtagccgccgggggcacgcatctccagcagcggcacctcagtgtggcttgggggtcgtgtctaggccctgggggtgggaagctgagggtgaggctggggccccagggccccgggagaagcctttgttcctgcccaggcggctgctgggcggggcctttgggcttcggggcccaggactgggagaggtggtagatgctggcccaaggccctggcggacagaggtctttcccaagagctccttaaacacagagtccatgttctgtgccacagcctagcggaggggaaagaaagggagagtgaccagtgagttcccccgactgaccctgcccaagacccacctgagttcctcccactcccaaagcaagccctcagccaacatccccagtccctcagcctccaggtcactctcccccactttgcacctggcatccctcctgtccctgttggtgtctctgtcacagtctcctctgaggacagcaattccttggtttagcccggaagtggggacccccctcttctcgcccccactctttccctggcagagatcacagccccctgcccatggcctcagggaccgccagcgtgcggggactccccagtcaatgtcctcccatggcgtctcctggctgccctgtccctggctcccgctcctgctcctccgtgtctaccggaccctccctgggctccctgggcctgggggcttggccacacctgggacacccgcatgttcttgggctctctcctccttgggcttagcaactgtcccgcgggcttccacgttcagcccgacagtgttcacagggcccatggtacagagcacggagcagggtcccccaggttgtgcgcttgccagggccacatcttgagccttcgctctgctccttcgagagccgctgctgccccaccccaatccccaaccagccaccccctcctgcctccctgccatctgtccctttcatcctccctggcgtgccaagcgcctgccatggcaccgcctgttacctagcccagctacaaatgccagccttgaatctgccctggagtcccttgcctctaccaggtaaacagccttaactcagccctgccactccctgctctgaagctgaacatgaatcccaacgtgcaagccaggtgtcttctgtccctctcatccctgcctccgtagccgtccctctccatccccacccgccctcacatctttgccttcctgccctccacaggctctgccttgggcctgtgtgtctggcggcaggttcccttgagctaaggccagggagggcaacgactggaacctcgaggagggaggagtttggcttccaaggggaggcagagatcccccaggacagatgtccctcacctgccacacacccactctcaccttatccacctccacgtgttgctctggggaggctgggaccaagcagcgtcgtctgtgtccagagggtcccatggcctcaggtgaggtgcatggctctggcctgcaggacagacagggagcctggtgggggccctgggaagtccctgagctagctgggcagtggctcctcccatcctggggtgtggccaaggaaaggaggctggcccagtggtccccaagctcctctagagcctctccctgtcacaagctgggtcattctgtcacgtcctcatctgccaactcctcccactcccactggccaaagcctgaccccagtcccctctggcctagaacagcacacgtgtggccccctgagccccgtcttcttgctcaccggtggaccagctccgatgccaggaggccctcgggactgctcccagactcccctgcagtctgcagccctgcgcccaccacctgcttctccgtcctgcggtgggaaggaccggcctgtttcgagtgctccttccctgcacggggtccagggccagcagctccgcgccagccaggagtggtcagagaggctctgttctctggcccagcccagaccttcagaatctaacttggggtcgggggaggggtggatgaaggggagactccgggagccctggggcctgagggcgcggctcactcacccggcgggcagcgtgatatacttgtgggggatgaggccccgcatgccgttgtgctccccccgccaccagtcgctcgaggccctctcgtgcagccgcagtacgtccccccgccggaagctcagctcctgggctgtgcggcccgtgtaggcaaagcaggccacagcctccacgaccccctccaggtctggggaggagagggggtccaagctgtgggagggggtgtggacactagggtggggacagggtggggctctctgcccatcgccctcaccatcctcctgtgcgggcatctcggcttccagctccggctcattgtccgcccccaggctctccagctgggcgtccctgaggttcagggcagagcgaggcagatgaggggggctcttctccagtggaccccccagtcccctcggcagcaccaagggtgtaccccaggcagctggcggaaggcggtgccatgcacttctcgtagacggggccaggcagcgaggtcaggggcgggaagacccgatcgggctgcactatgagcgtctgcaccagctggttcacccggccctgcagcgccaccgggtcctgcccagcgggcaccggtagcagcgtgggcccgaagcacacggccaggttgtaggggtccatcatgttctcatcgctgtactgggccaggctggggggacacgcacatcacaagcagagagcccgcaccccgagtccccctgtcccctcgacccctggcccccaccccagcactcgccccgcagcactcactggttgaggaaggtgaagaggtagcgcagaaccaccagcaccggcgcgggcagccgccacagcaggcggctcacgtgctccaccctctccgctgtggcctccagctctgtggccaaagccgcccagagagagccgcgtgagcggggctgccccagcaagtgccctaccccgccagcctcaggccccagcctcacccgaagaagccagcagctcgccgaacaggtctggggggaagagtgggggctccaggctccggaagtagagcttcagcaccccggccaccgagtccaggtcatgggcagtgcagccctccaccagtgggtcctcccctgcagatgggcgagtggtgcggtagggggaggaagctggtgacatctgcccgagcccccacccccgcccgccctgcccgtccccacctctctcgaaggcatcacggatctctgagacccggagctgggcacccgatacccggaagatgccttcatgctgcaggcctgtgggaggacaaggagctggtgggcactgagcatcttccccagcccctccaggatggcctcccatgccaggtgctgggaactgggtgctgggtgccaggacatcgggaggggctgggtcctgcttaccattgaggttgatgaagcgaatgcagctctccaccaccaggggcacaggctggcctgagctctggggacagagggtgtttacttcaccatggacacagcatgccctgtgttgtcattcaattgctttttttttttttttttttttttgagacaaggtctcactctgtcacccaggctgaagtgcactggcgtgatctcggctcactgtagcctcagcttcctgggctcaagtgatactcctgcctcaagctccccaatggtgggattacaggcatgagccaccgcaccaggctgagtgcttttattttctctgaagaacacatcatcgttgtcggcacagaggcttagcacaccgtttgttagatccactcgtaggtgtctgatatttttgatgaggttttaggcagtgccttacgttgtatttgcaaattgttgctggaatatacaaatgcaattgaattctgtacaccaatcttgaatcaagtaacatttcaaaactcaagctgggtgtggtggctcatgcctgtaatcccagcactttgggaggccaagggaggaggatcacctgaggtcagaagttcgagaccaacctgaccaacacggtgaaacctcacctctactaaaaatataaaaattagccaggtgtgatggtgcacacagctacttgggaggctgaggcatgagaatcgcttgaaccccagcaggtgggaggtgaaggttgcagggagctgagatcgtgccactgcactccagcctgggcaacagtgcaagaaccagtctcaacaaataaaaaaaaaaaaaaaaagaaagaaactcaaagtgctcgtttaaagaatctgttgattcttttgaatatgctacacgcataaccacatcactgaaaatgacgatatcagttctgatcttctggtattctccatgcctggccctctctgatgcttgcttgcttcttttcttttctttctctctcttttccttccttccttctttccttccctctctctctctctctttctttctttcactgggattacaggcacgtgccaccatgcctggctaatttttgtatttttagtagagacggggtttcaccatgttgcccaggctggtctcgaacacctgggctgaagggatctgcccacctcagcctcccaaagagctgggattacaggtgtgagccaccgtgcctggccccctctgatgctttctgatctcagtattagttttctgatctttcttgcttccccttatttcactgtccaggacccccagtaccatgctggccagaagtcgcaggggagaagctctcaatatctcgcccctaaaaatgccgctgccccaggttttctatacgttcccattactagttaaggatgctcccttcaatcagcggaggctataggggagcccaacagtggcctggaagaggcccacccagaaaaggacagttgatgactgattgagagtggaggaccctgggatcaggcagctgctccggccactgaggtgacccagagctgaagaaagatcagcatgtacaggtgggctggcatgtggggcaaagctagtacctggataaacttctccatgtctcccccaaagagtctctggttatactgggagctggggcggggctggcggctcttctggaattttctctgtgtgtactgggtcctgcagtgaatgggagctggctctgagggggccaggtgtggagaatagggtgccccaccccccaggccagccaagccggcctctaattctctgaagttattccacaatccagtgcgaaaactggggaagtgaggcccaggggattgggcagctgagctgggccccaggaagagaagagatggcggaccgtcgcagggccccagccctcagggaggactcaccaagacacctcctgctcctccttgtcacctgtggggtgggagaacattggtctgcctctcgggccaggggtcttcaaggcatcccagagagaaaggtgtggataagagccaaggacaggcgggaggggaggaccgtgggctagacagggtcctgggcaggggagaggcggggaagggggcagcactgggcccacctcgctgaagggcctcctgcagcttctcgtgcttggcctgcagcttggcgaggatgctccgtccactcagatactcctggagcttctgggcagccccaagaagagccccaagtgttagccctggcttgagcccctccctctgccccagcaatgcccccacgggtcccgcccaccagcccagccctccccaccgtgaggtagaaggtttcggtctcctgctgctggccgcgcctccggcccgcctgccggctgcctgggtctgagctggtggacttgagggactcggtggaggggctggtctggaaggaatcaagcacatccccgtcatccgaggccaccacctccagcagggcctgcagtgtcgccttcagagtcttgttcacctgcagaggagaccacaccagggtggtaagaggtgggggacagggagggagacaggaagtccaagtcagaaggaaggggccaaagggaggggggcaggcagggcagccacttccaacagcaggctgtacaggctccaggccctcgtctccctctaacccccggtgggctgcccagacctcctctgtctcaatggtctgtcggtccaggcggctctggatgttctgggctctgggcagaatctcgtcccgcagctccatttcaacgcagatctcagccacctgcagagggcggcggccagggggctaagggctgggcttgggcagtaggtgccaagatccccggggcataagggaagcaagcacccttttgtggcctggcggccgggcacaggaccaccagcccagacgctcagctgaagaatggcaggagtgaacacacgtgtccaaaccaagacttgtccacagaggttcgtggcggcaccactcatccaactgacggatggctaaactcagcgcggtctacccacagaatggaagaggattcagccacgagaaggaatgaatccacttatgtgaagtgtccagccaggcaaatccatagagacaggaagcagagtgggtgccagctggagcagtggggtgccagtggggctggagaggagaacggggagtagtggctcctttaggggtgacaaaaatgttctggaattacatggtgatggctgcacaaccaccaaattgtacactttacagtgctgaattttatggtatatgaatcgtaccttaataaaactctatttaaaacagaatggtggcccggcgcagtggctcacgcctctaatccaagcactttgggaggctgaggcggatggattatctgaactcaggagttggagaccagcctggccaacacggtgaaaccctgtctccgctaaaaatacaaaaaattaactgggcacggtggcatgcgcctgtagtcccagctacttgggaggctgaggcaggggaatcgcttgaacccgggaggcggaggttgcagtgagccaagatggagccattgcactccagcctgggcgacagagcgagacgccatctcaaaataaaataaaatgaaatagaatggtaaggaagactggggtctgagacagaacagggagagcccagccccacctcttccagggaaaggagtggacggaaaaactgctcactgtaactgggcagacataaatttccctgtggcaagatgagagcagcttgcctcatgggcagagtgggagccaacgctttagaaaggaaggaattactcttttaagcatgtagacatctagaaaattgacattacagttaaaattgagagtgaggattcagctgtggctaaacacttgccctgctctccatctccaccaagccccgccgtacaggactgcatgaaggcgcaagtcacagagtagaaagtaaggccattttgagatgggctccaacatggctgacccttgaggacatgggactcagtgaaaggagccagtcacagaaaggcccgcactgtaggattccactcctgtgaggggcctcaaaggagagccgtgaactctgtagagacggacagtggaagggtgggtgccagggctggggggtggggagttggggttgaacggggccagagcttcagtttgggaagatgaacaagttctgcggctggatggtggtgatggctgcacagcaccgtgaatgtgcttctgcccctgggccgcacacttacaaatggtgaacgtggtatgttttatgctatgtgtattctgccacacctttttttaaaagtccatctaggctggactggctcacacctgcaatcccagcactttgggaggccgaggcgggtggatcacttgagcccaggagtttgagaccagccttggcaatatggtaaaaccctgactctaccaaaaatacaaaaattaccctgtctcataacctggtctcaaaataaataaataaataagtaggttaaaaataattgtttttaaagtacaaatcttagccacgcatggtggcatgcacctatagtcccagctactcaggaggaggctcaggcaggaggatggcttgagcccaggagttggaggctgcagtgagctatgatcacaccactgtactccagcctggacaacagagccagaccctctctctagagaaaaaataagtgtatgcatactctggggaacattgaaattttatccctcctctaaactcacacgatcagcagaaaactaacaatttgctctctggaaaggatatagcagggattttggactcagggacactggtcccagatgaggaagatgagagaacacagcagccccaccatcggaagctggcctggtcctatcagcccggcctcagtgctgtcctgctgaacaccggaaatgacccagagcatcaacatcaggcaaggccactgtgtgaccttgatgggcgaagacagaaacaagaccactctgcgatcacgcatgagtgaggacaaaatcaagaacttcttccgagccacaaaatcatccctccatcctggctaatgtaagtgactgtcacttccttgcatcacttcagcctccatcactgtctctttctagataagattaatcaagacatccaatcatacaattaccctgcttccagaaggcatccaatccaggaccaagccccacttacctgggccctcccccagatcccctaaggcaagcccaagtcctctaaggcctttccactaccctctcactgagaggccccaggctccccacggagcagggctccctccagcaatggagattatagggctgttcctgctaggctttggctggagggtgtggaactaaaaccaggtagttccaaggaaatccacacagcagagtgagcccccagccctctcaccccctctcctccctagacagggtcagaagagtttctactggggaaactggccgggccaggaggaaacaccacagacacccacatttgtggggtatgtgttcaggcctcttcttaaatatgaactgatggccaagaatcaccaaacagacacgatcagcagaaaactaactatttgctctctggaaaggatatagcagggattttggactcacgaacaaaagcaagaaaatagagcaaatgcaggaacaggagaaaacaaaaaacatttcaggccgggcatggtggctcacgcctgtaatcccagcactttgggaggctgaggcaagcagatcacctgaagtcaggagttcgagacaagcctggccaacatggtgaaaccctgtctctactaaaaaataaaaataaaagggtcgggcacggtggcccacacctgtaatcccagcactttgggaggccgaggcaggcggatcacctgaggtcaggagttcaagaccagcctggacaatatggtgaaaccctgtctctacttaaaatacaaaaatcagccaggcgtggtggcgggcacctgtagtcccagctactcaggaggctgaggcaggagaattgcttgaacctgggaggcagaggttgcagtgagccgacattgcgccactgcactctagcctgggcgacagagaaagagtctgtctcaaaaaataaataaataaaataaattaaatttaaaaaattaaaaaattagccaggtgtggtggcaagtgcctgtaattccagctactcgggaggctgaggcaggagaatcacttgaacccaggaggcgaagtttgcagtgggtcaagatcgtgccactgcactccagcctgggcgacaagggggaaactccatctcaaaaaaaataaaagcttcagaaagattcaagaagtactgtattcatgaaataagaataaagggttggccgggcacagtggcacacctgtaatcccagcactttgggaggccgaggcaggccaattgcttgagcccaggagtttgagaccagcctgggcaacatggtgaaactcccttgctacaaaatatagaaaaattagcctggcgttgtagtgcaggcctgtagtcccagctacttgggaagctgagatgggaggaccagaaggttgcatctgcagtgagctgagatcacatcacacccctgcactccagccgaggggacagagtgagaccctgtttcaaaaacaaaacacaacaaaacaaaacaaagaatacagacattttcagatgtgcaaagtcaggaaacccttggtgaaggtgtcaccaaaataagggtatcaaactaagaaagctgctgccgtggaatccggaaacagagcactgggcagaagtgaagcactccagactggaaggctctgggggagggcgcagaggagaaggttgacctcacaggtgcctggtgtggaggacagtgctgggacgaggtagcgatcaactcctagcaatgggcatgttctagcaagcagcattcctgaggcaagagagttataaattccagaagaaaaggaaaaattgtccaaggaaggacatgtgatcctaatacagtacatggctcagctgccaacagtacctgttgtcatggtgatttaaacattgaatgttaatttagccaaaaattctgggataagcccactgggagaacaagatgcagggaagcgtgtggtggctgtgagagatgctggtggcactgggtcatcattggccaatggaaaatggctgcttgacaccgggaggtgggtggctgtttctgggggtgggagctgggaacgggaggggtgggttagggagcagctgtgacgccatcggaagccctggtgatgccggactcttcgtaaagttccaagtcggcccgaaaggggcccaatgtaatcccagatcattgacaatgcccatcaggataaactgctgcaggaaaaactagctcgacggagaaggataaagaagccccattccatcttactgccaagtttgtgtcacgaaatttaaaaacacagagaaaccagcctagaacaatgtatgggcagctacacggctgcctgctgcacggtttgaacagttagtgtcttgccctccttggccattgcgggggtgcacccttggagtgaggctgcaaatggaagtgggacacttctctagctgccgcactgcctgagaccatggagaacttggattcctgagcaaagtgtgggtcatgccactccactgcccaccattacagtgaaggccagagaatgccaagcccagcagggggtgaccctcacctcatccccatcatgggggtggtagtcaaagcgcagcgggggacagaagacggtagcatgcacctcgagaaccttggctttgtcccctggaggatccagggcctccacagcttcttccaggctgcccaggccctgcacttgggaggcttgggtgcggctctcagcggccgtgtagctccggagcacctgccccagggccaggtggaaccctgtgtcacagcactgaggaggaaacaaggagatgcttgggtaggtcctggagccacagcttcccagccccgaggcaccaggcaccttttcccacctgcccaccaaggactcacgtccatgaggtccaagacgtcatgcaggtagtagttactgacagcagcgttgacactagccaggctaagcaggtactcgttgcgcgcctttgtgcacttgagtttgtgctccatgaacttggcctgccgctactcaagacaatgcaagcgtgccagggtcacgcacgtggccagcccctatctctagcctttcatgtaatgcccatcgcctcccctcccactgtggacaactacacctgaactggtcaagcccagaagtcctgctgccttccccacgccacagtccacagtgtgctcagcccagtgccaggaggtgacttgattccccggctgttcacccgccacttgccttggttcgagccacaacattccccacagaagtgggggatgacacagaactattcacagatacctgatgagtggaaggtgcgcacatggcaccccaccatggagggtgcacgagaaacccagcttggagccagcacacaggtgcacagctggaagcggccacaggcctctgcgggggccagagctgagggggaacgagtaccccaaagggtagggatagatcatcaagagccatgaaacagaacctgctggcacctgggttctaaaactggcactctattttttttttattttttttttttgagacagagtctcgctctgtcgcccaggctggagtacagtggtgcaatcttagatcactgcaacctccgcctgctgtgttcaagtgattctcccgcctcagcctcccaagtagctgggatgacaggcacccgccatcatgcccggctaatttttgtatttttagtagagatggggtttcaccatgttggccacactgatcttgaactcctgacttcgtgatccacccacctcagcctcccaaaatgctaggattacaggcgtgagtcaccgcacctggctaaagctggcacgctaaccacagcagccagggagaccttcccccaacacagccaaactctgtcatttcccctaagaacacctgagatgctcgactccctcctctgctcccagagtcccagagaccatgactgtcagccacgcacagcctggcggctccatccaggcatttcccagcctccccactctctgtactgggctcacctcgaaggccctttctccgtgcgtgtcaccccatcacccaccctaagtgtcttcttgcccccctctgaaaccttacggaatggctggcagaacagcagagctgcaggggccccgctgggagcatggagaggctgcatggggctgtccagggccaggcaactgttttccccactctctcaggccctgggagccttccgtatggaatccctggaacctgatggcactgtcctgccactcctgccctcccctgcacccagccctgacttccccctcagcacagcaggtcctagttagggcccatggcccataggcctgcgtctgaggtgccctccaggcccaccttctccaccagcctccctcccttcttgagggagctcttgcggaggggccctgcctcagtggcaccagcggtggtggtggggacactccggcctgcccgcttctcctcctgccgctcggcctcccggagcttggcctcggcattcacgctctccatgtgatatgcctggtacgtcttcttggcctgcagggagacccaaagcaaggtggtgctggtgaaggccacggctgggccagcccccagccctctacccctgcccctctggaacttggacctcagagctgggcgatcccatgtgagcacttagcctaacgccctgtgcctagggagagaggcctttgcccctaggtgcgtgcttctccctgagcctggcttggggtgatgtgatggtctggcggtgttcctccccactgtgagtggcatttctccctggaccattggggcaggcccctccccagccctttcctcaccgtctggagctctgagaccacctccaggagctcatcctgcagctgctgctccagatccctgctctagaggcagaggcaagggtgagcacggcactgcccagagcggccccgccaggcactggaagctctgcccagatcaagccccatcgggggggcacacaggttcgctctgcctgctccccacctggcctccagtgccctcccagccacagtgcctcctgatcccaaagcctcgaacacttcccgtggcccaggatgagagcctcaccttcttgaccaggcgccccacgtcctctgcaatgtgactcaggcgctgggccaggggcccggccagcacctcactcagggccgcgctctcccggctctgctgccgcgtgtgctgcagcagcaccgcccagcagtgcaagggcgacaggagggacggctccttcctgggggtagaggggcactgagacctgggagcggagcttgggccctgccgtggcccccctgccagcacatcacctaccggaagctttggtgctcccggctgctccccaggcggcctccacggctggagaagcgctcggccagcttttccaggccccgggagtattccagctccacctcagcgcggcgccgcatgaactctgccagctcctgcagcaactcccgccgcagctcgccctgcagctccaggcagcgcagctgctcgctcagctgccagcgcatctctgtggggggaaccatggctcaggcctggtcagcacgccctgcctgggtcagccaggccagcgtgggatgggagaggcagaggcacacagaccccagtcccgtcggctctgagggctccttcggacccagcctaggctgagggcaagagctaagaggggaggaaagaagctaggcccctgcaggcagatctggcctcagctgtccagccgacctctgcgctgaggccaacagatggccagagccacccggttgagggggaaggggaagggtgtcccagagagaggggagagccgccccagcgccagccaggcacctttcagtttggcttcctgtctctccctcgttcctggaaagcctctgaatggtttcccctgcgacttcctttcccgccggtacccaggctccgggaggtggcagcctcccttgcaaacacacggatacacaacacacagatcacagtgctgctcagggcaagcctgcagcgatctcgcagtctcagtggctggggaagcctgccctcaggccccaggggaaaggacagtccacagtgagggctgggagccagggagagctgatccggccttgtaagtgaaagaatggggcagggagctagcccccgtcttctgaccccacttcccactcccaatcaccccccgccccacctgtgcattcccccaccctgcagagagagtcacacccagggccccatactgccggccttttgacaccctatcactggcttgatttggcaacgctgcttcccccacacaggcctgaagcaaagaagtgcctgtccagcaagtttaagcaacctgcggaagacacttttgccatctcctgagtgcccgtcccgagtaaataagatgctagctcagcttctggccagcaggctgcccacctactcatctccatccacatccccagggagggacatgaattgatgtcttcattcagcagaatgttgattatgcacccattctgtggcaggcacgttttaaatacaaaggcaaagaggtttgaccaagtgtctgccctcttggagctgggattggaatggggcacgaacacatatcagaatgcccaggagtgatgggtgcggagaagatgaacccacaaagcaagatcagagccaggggtgggtggggacagggaggacctctttttaaaggagggtggtcaagaacaagccgcatcgttggagcagaaggctggagctggctgtacgtgggcagtagggggagtccgagagaccggtagggacagatggcacagagcccggggtctgggcagagctcccagctggactccgagtgagagaggagccacagtagtggggtgatgtggtccagcttcgttttcagggccccctcacactgccaggtggagcccaggtggcagctactgtgctagtccaggcaaaagacggcaggattcagaccagcagcagcgagggaggactccgctgagaagagctcaatcccattggatttctgtcccgccagtgacttcccaggggctgttgcatggggaccctgtgggttccgcctgcccagcatccctacctcctcccctgatctcctattggagaatgtccccttcctagtctcagcccccttgactccaggtgccccagccctggctgcatgcgtcacccatccctctgtccctccactccctgcccccaccagactagccaggtgagggacccaggagcctgacccttccaattgaattactgaacaggagagctcttcccaccggcagatcaagctgggtaagtggaagcctggggcacgggacctcccgacagagcagggcagagcccacgatgccaagtgagacagatggagagtgtcttcatcctatccgaggctggcctcctgtggttaactcgtcagctccaaggccaggtggggtgggcgctaatgccatttgaaatcaggagagtcctcactgaatcagtttaacgttttgttttgattttttgttttgagacggaggatgttgcccaggctggagtacagtggtgcgatctcggctcactgcaacctccgcctcccgggttcaagcgattctcccgcctcagcctcccgagtagctgggactacaggggcgcaccaccacacccagctaatttttgtatttttagtagagacagggtttcatcatgttggccagactgggtcttgaactcctgacctcaggtgatccgcccgcctcggcctcccaaagtgctgggattacagacgtgagccaccacgcctggcccagtttaacattttttgataaaagtaaatttcatttcattccaagaaaggtgttagacaactgctcgcctcactggccctctggagcctgccctgccctgcttcccccagaggaatacaatccctggggacttatgacaactgaacagtgcagaaggaaccagcagagggaaccgctgcctttcttcatcactgccggcagcaaaagctgactggaagccatgtcctagtccagatccgggcatgcacaccggctggtgttgagcaggcaacttgtgaattgcaagtcgattgcattggtggctttcctggcagagctttcggatctcagttcagacaaactcgtcagcacaccctgtcctgacctccccctaaactagggctggccctcttccgaccccttcttggcaccgtgcactttccttccctttgtagtgcttattatcataatgcaaagtctatgtctcccccactagacccgtgagccatgtgagggcggggtggccactgacgccatttgaaatcaggggagtcctcattgaatcattgcttttactctgggtaaaaagccagggctggaggggctggagtcggggttctctctggtacagcagtatactcccagggcctgggacagcacagatgtataggaaacatctggcaaaaggagagctggaatccatgtctgcctgaattacagagctgggccccgggccccaccagcacttcctgtgagcaaggcatttggtctcacttctgctgacaagcaaaacagaagaaaagatggtctccaaaaccaccgctatgctgacctttgagaatttagggtgtcaagacagtgaccccactttgtagaatggtaggaagcttttccagggtgtgggatgcagacccagagcaagtgaggaacccttagacagtcgtgctcgaaaccccaacttttcagtgtgaaatcactgacccatatttgctgactgaagttttccaagtctttcagcttcatggcattttggggaagcaggatggagatcattacctccatctgagcaagatgatggcgaggcttggaaagctggctcaccctgtgtagtcacctcaagctggctctggacacaggctgccttttccaaaggaggactggagcatactttggtataaattgcttgcactgaataatgatgttagaacctacatctctgggttcaaaggcacttcaagggtcattgcattctacgtcctagaagttgcagtgctgtatgaccacgggcaagtcactgcacctctctgagcttgtttccgtaattggtaaaatggagtgattgagagtgatatggacgagctgctggcactgagctgctgcctctttcctttgcaagagttaccatgccctgaataagatgggcacaagctattggctaagaatttgcaaagctgatttgcatgtgatttgcacatgggtgtttatcagaacccagaggttcaatttcagaaggctgagaagccagccctgttaaatctctcaaccaagactcactgcgccagcttgacccagagacagtggccctcgcctctgctccccctcagtgctaaagggaggcaaaaggtgctgaagctccagggactgcagtggggttacggccaggtgatctccaccaatccactcacccggactcccttactcaccccccagcccaatcaagctggttgacttcactgtagctaaaatactgccttctgaggggcacgttgggtgcatctggctctcttttaccagcggccaccagtgtctccactgaaccttgggtgagaagcggtagacccaaggaggacagagaccaaaggaaggaagacaggaaagaaggaagggaaaatggcaggcggttgaggccaaatgggcgtcgggaggcaggcaaggggctcaggctccctcctccacccccgctccagaggtcgctggggagagcatcgggccctgggccagcgcggggacgcttggagctccctcacgaccttgggttctccgcaggaaacgggccgggagcgcccggcgccctctcacctttgacttgcgtctcatactcagcctgcagcccccgctcccgccgcagcttcccgtgagcggccatggcggcctcgcggccgcgccgtcgaaccccactgctcccacgcggccgtgagcgggcccggcgccgggacttgggggcgctgcggccagcaccctgcgcgggctccgcccagccccgcccccagcgcggctcccggtggggcggggcggcccagggctggcactgcccgcgaggggctcctgggggggcagggcgccccttccagccccactgtgccccggccttgccgtcccctcccattgggcctgcacctaggctgccttgtgcccaaagccccgctgccaagcagccggagcaggtgtgagagccccaacgtaagctggcatcccaggctgccatcccaccacctccagaaggctgtccctggtcaccactgccagactgtaccattcacagcggggccgctggcccactgtaccagtggccatgaacaccattgctgccccaggctctggactccccctgggttgcctccttcccccagacatccgatggggtcctcccttcccaagtcagcccccagagaggcccagggagccccagggagccttgagagctggggtgggaagttcagaggggagggggaaggaaggtcagcaccagagagcagaacctcagcagctggctgccgttccctccaggcccccttggtaggggaggagagttcagctccggttccccttctgctcagccccacaatttccccataggcggttaccacttcctgctgccggaagagactgctctgcctcccttcccctgcagctgcacctgcccgtcataggcctgaggggggcagccccctcggagtgaggtcttagctaccctgggggcaagtcttggggcccccctcatccaggggtggtggggctttcctccaccctctaccacagggcagcagcttttctccgggaaatcgggaaggcgggaggcgggaggcggttgacaagccaagcagacaactggcttcaatttggtgggagggaaatccctggggtatagatgtggggagagaggcaaggcacttgggcaccaggcgtgtgttccgaaggcgggcgtgggggcactagtgcaggggtactaggcgtgtgtgtgcacggatgtcagagtcaggctctgtgcaaatgcgggcacacatgaccttgacctgcagatctggggaggggaggctgtgcgggtacttcctgcctttcaactgtgagcaattaattctcttgcccagaaggaaaaaaacactccctcagctccccgcccccttctcccagtaccaaggcccttctcgaacacgtcgtcgtgtgtgtctgcaggacctggggcttcaaggcctgggagctagccagacccaggacctggacttccagcagctggtctcggaagtaccgatgttcgagtcctccagcgagactagagagcctgcgcccctgcccacagcgcgtacagccgcacccacactccaacctgctcctggtcgggagactcacacgtcccaccgctgcctcaggccaaggggaaccagggagccccgcctctcactagctggccccaacacatcttgcccctccatccgagccctgactggtccccaaaggtccctccacccagcagagccagccacagggctcaggcaggcaggaaaggcctcagccggtgccttcaaacgctctcttcactccttttttcactccagagctattcctaggatgccccattcagcccgtactttagggcctgagtgttgggccctggcttttagggcacttgtttggcatttaaggccctgaacgcaactgccccctgctgctccgtctatccttcgctccattgttccccttcaaagcatccaaaagccaggcagcccgcagaaggcgcggacctgcccgcatggggacggaggctcagcggccgacaggcatcgggcccgccggggacggacggcagagggcgggccgggtcccatgggcctggccggggcggaaggagggcgccgcgggcgccgtgggagcctgggacacctcccttccaccggtgccggggcgcggccgacgcagtgcgcaagcccgcccttcccccgcaccctgcgcgcgagcccagtgccgccggaccaatcagagcctgggaacgaacctcgccgcgggcttgcgaaccggaagacactgccgccaggcgcggggcgggacaggactccgcctccggcccatacaaagggaagcccacgtcttaagccaatcaacacagcctcgcccgagccgggaagcggagagctgtgggcgtgcgcagacgcgcctttccggccccggccccgccctgccgcgctctgggctccgcttccacagctgccggctgcctgctggtcacgtgcgaggcgccagccaaagagaaccgagctccaggcctgtgtggcgagttttcaacccggcggaggagcagtgtgccacctgcagtagcaggacacagagagggctcaggaatacagggcccgcccaggactagggacagtaaatgatggctttgcagccggaggggagggaagggaaaggaggaaagacacagaaacgagcgttacggttagggtgactccatgaaaaacaggattttgatatatatgtgtatatgtatatatatatgtatatatatattttttttttttgagacgggtctctgtccctggagtgtggtggcatgatcagggcccacagcaacctccacctcccgggctcaagcgatcctcctgcttcagcctcccgagtagctgggattacaggcatgcaccaccacacccgggtaagttttctatttttagtaaagatggggtttcgccatgctgcccaggctggtctccaactcctgagctcaagtgatcccgcccaccttggcctcccaaagtgctgtgattacaggcatgagccaccgcacccaacagccgcccagttttgtattttgcatgaaattgttaatgagggaatacatggctttatgcatttgtgtaaccccatagaaactgtacaacacagacaggaaacctactgtaaaccatgggctgtagtttacaataacttatcagtattggcgcatcaacaataacaaatacaccaactaatacaaaatgtcaatggggaaacgcggggaattgtactaaaaataaattattttcaaatgcaaactcaggttagggagtagactcaagaggtatcatggactcactgaccattagggtggcaggggagggaggactcaaggactgttgatggggcatctggctgggtcattactcagacaggacatttgtagataagcccaatgagcagttggatgtccacatctggagcccacgggtatgctggggagctgctgtagcccgaagcaggtgtgattagggagagaaagtctgaaggtgaaggtgggaagagaactgaaggccaccaagagtgggagccctgctgttgagctttgagcctgagcagccccggcttgtgccacaaaacacattcagcgtggccaagcagacctccaaggcagggtctctcccataagtccagggcctccttccccggggccacagctgctgaaggtcatgagactagggagtcccacctccaaagctctttccttgtactcgggcctggcaggatgctctgggtcaaaaggccaaggctcacatccccaccagaggacctggagaaacacaccctctaaatgtgcgcgcgctcacacacaaagttccccagtgccacggagcgaatttattgtgaaagctcgtggggtgaggaggggatggggcaggctctaggaggctgagtcggaggcctctgagctgtccttgacatctgtgctctctgtggtctcgctgacctcgctgaggtccttgctgtccccaccactatcctcggcagccaggcccttctcctcgcgacaggcctctcctgagctcggaggtgaattgcctttgctctccaccttgttctcgatggcacccagcaccacgtgcctgcccttctctttcagctccaggtgccgcctcagctgccaccaggaacccagggagaagcgggggcaaagagacagggcctaagtttccagacaaagggagcctggccctgtcgctggctgaggagaggggcatagtgaggcagcagggctaggcaggacacgcgggactgagtggggacacctggctggagccccagtccaccgctacctgggcttaccgactaccatggaggcccccacgacagagcgctgccccttgaccagccctgccacccgatgagccttgggcagaaccctgactcagaactacctttgagcaggcaggccacccactggtccctagacctccccacttcccttctaaaagcctcctccctctgcctctcccatcaccctccaggctgctaggcagatggcctcctctaaagcccagcctaggaaactgaggtcgtgactcctggcaacgtagccacaagagctggcatccaaagtcggtctcgcctgcagccactgtcttggggctcctgagtgccgcccccgctcgccttgcttggcttcatgcaggcgcttacctcgtcggccatctgagtgaggtcccgcttcatggcataggcgtcctccccatctgcatagtatttgggctccacttcactgatcctgggggcagagggttagagagcaaggaggaagacctgtatcccggggacaccctcctccactcctggtatcgtggctactggagcaaggtgccatgttttctccctgaaggctccatcctgagacaacaagtccagtgtgacctgccctctgttctctccagcaaaggctccaggacacagcggcccgccccacccgtcctgcccccgttctgtgtccttagcctggatactaaggatccatttctgcggtttcttgtgagctgaagccctgaattcagccttccccttccctccctgccctgcgccctgtcccttactgagctgcctcacaacagccatcagaacccaggaaagacggtgagccctgcctgagcagctctggggccgtgactacactgggcaggtgtgtgtgcagactcgcgtggccatgtccctggaaggggagctggactcaatggcctaggctggccctgccaggcctaagacatgaggattgctgacttagctataaagcaattcccaccagacatcgtcatctgggtcacagatccctcttgccagcatccagcccagaggccaccgcccttcccaacagtccctcttcttcatcccctaccaaacgggctgagtgcagttagtgtccctccacaggcagcccaccccagcttcacttgcaagcacttttttccactgtctactgggcatgccaactgccaggttctctctagtgtgctaggcacacggggcctcctggtcctcaggcagacctcccccatccactaggctgcctggccactggcccttccttcctgaatgtgcattctcctcgattctgctctctcttggattcttctaggtgcttggtcatgcttgagtcctgctcctcagcatctgctcacgccagggacccacacctctctattcccaaacattactaaacagcccgtgtgcccttcgccagcctcagccatcatgggccagagctcctccatcacaacacatggagcacgtttcagcaggcaggtgctgtctccatgccggcttttcaaccatcagccgccgagtgaatgtggaggtatcctggcagtgctggggtccacagcctcttccccacagccggcccacccccgacctggaaggcaactcagccggtctcaggtgccctgatgggccagacctgggatcaaccccagcccattagaaaaatcgagatctacttactgaaagttgagggtgttggaatagaggtgcagggcggcccggttactgcaggggaacaaggcactgctgagctgcacggatttggccagggaggggtagcacgtccaggtcttgcccctcctcctggtccctccttccccccaatcccacttcctggatcttcaccaaaagctgaggtaccccaggacccccgtcaaggcagtatctctccccctcaatcccccttccctcagcccggcttccacctcttcctgacatgcagggagacatatttggcattgaagttctctatcatggctcgagaggcctggtccatcagtttctgagccagaccgaggcgccggtgggaacgcttcacagcctggtgggagaagagcagagatggggtgagggactgggaccttgagggctgccccaactaacccccacttccacccccaccagagagcctgggtggaccttacataccaatgaggtgatatgtccatggggcacatcatctgggtcctcttccctggagagggagaaaggagaggctgcaaaggagctcagtgtaggcacagccacctccagcccccctgccatttgtagagtggacatgcactacagccccctaagaccccagctgggggagagccgggagcctcttggatcagagcagccgatcctgccaccctctgctgcctgaaaaccccaagcctgccgggtgtggggcacacgcctatagttccagctacttggcaggccggggcaagaggactgcttgagcccaggagttcgagaccagcctggacaacacttttttttgtctctacaaaaaaaaaatcaaaaaattagctggatgtggtggcgcatgcctgtggtcccagctacttgggaggcagacatgagaggatcacttgagcctgggaggttgaggctgcagtgagccatgatcatgccactgcactccagcctgggcaacagagcgagaccctgtctcaaaaaataaaaaaagaaatgagctgtcaacccacgcaaagacaaggcagaagcttaaatgtgtattactaagtgaaaaaaagccagcctgaaaaagctgtatatagtatgattccaactctgtgacatcctggaaaaggcaaaaccatgcaaacagtaaaaaatcagtggttgccacgggttaaggagagggagggatgaatgcgtggaacacagtgaaactatcctgcgataatatgaaggtggacacatgtcatttggtcaaaaccatggggcttacaacacaaagagaagtgcagtaatgtaaactatgggtttagttaataataatatatcggccaggcgcagtggctcacgcctgtaatcctagcactttgggagacagaggtgggtggaaacacctgaggtcaggaattcgagaccagcctggccaacgtagtgaaaccccattgctactgaaatatacaaaaattagccaggtgtggtggcatgtgcctgtaatcccagctactaaggaggctgaggcaggagaatcgcttgaacccagggggtggaggttgcagtgagccaagatcacgcgactgcactccagcctgggcgacagggcaagactccgtctcaaataataatagtaataataataatagtaacatatcacattcatttatcacttgtcacaagtggaccacacaaatccaacatgctactaacagaggaagctggcagggaggggatgctgaggggtgctataagaactccatgtcctttctgttcaatttttctataaactttcaactgtactgaaaagaagaagcctattcattttttttaaagcccacagaggcatccaccagacacgtgtagcttctgtcttcctccttggtgactcacattttggccaggacataccccacaatcttcccattctcgtcctcagcaatgtaagagagctggtgacaggaaaacagagtgagaaaacttcttgtcggagctagaagagccctttagagggacacaaactggacgagtggcgagttgtgtgatggctcatgacctccgggctgagtggcttggtctccccctcgccacactgtgccctgcccatacccagaaagaagacgcaaagtggggatcctgcccctattctctgctcccttcgggcgccttcttttcctttgcccctgtctgccagctgaaaacacccaggacgccaccgaccatacagccccctgggctctgacagacttgtccactccctccaagatggccagatgggattttcctcggcctgctttcccccatgcccaaattcagaagctgcccacctggggccaggaaaggccatggtagaagtagtatttcatctggtagttctcgggcaggcagaggaggttgcagtgctgcatgttcattaggtcctctggctgcagggaaggagggcagtggaacgcgctcagtctaaggcggcggtgaccacgggtgagaagcctgctccccgtcggtctgctcggccccgctccctcggggctgggcaggcactgtgacgatctgactttgcacaacgcccggagcacaggaacaggagtgggcgccccggaggtccccggagcccacccaacggaggcccgacatcacgcaaacaggagggaatcgcagccccggccccgcgccccggcctcttcggcgggctgggccagccccataggtccagcggccgcaggcacactcagggccaccgggccgggctcggccggggccctcgggagcatgcgcggcagccacccggcccggcgcccacgcggcgcggacagcctcccgccccgggcgctcaccctcgcattgcggatgttcataacggcggcggggctcgcgggtcccagcggatcgtgaaggcgcagtcagctgccgccgcgctccgaagcgacgccgggacggccggggctgggaccggagctgggctcgctgggcgacggcggaaggggcggtgcgcgccgggccggccaccggccggaagtgcacggccgccgggcccgtcctcccggccgcttggccaatgcgcgggacaggccagcgcacggggcgggccaatgcgcggagccggtcagcgcggggcgggcctgggggcggggcgggcgctgccccggagctggagccggcccctccctcggcgcgacagcccccctcccgcgagcccacagacgcgcgcacagccgcaggtggagcggactcagcctttattccgcgcctcggcaggcgggggtgggggcgggggagggggcgggggcggggcggctcagcagggcgcccagcatctcctcgcacatggctaggcaccgcggcacgtggaagcagcctgcgggtagaggcgggcaggtagtgagggccgggggcagccgagaggcgcaacccctgcggccccgccctctcccccactcacctttgaaaggacctcccttgatggagagggccaccttgccctctcggctcaggtagccaaaccattccccgtactcgggatcgcgaaactggaataacagagacagtgacagctagcgcctgcaggacccgcccagatgccactgcatcgctaccaggggtcagagcctgggttgaccccaggtgacgtggctccagaaccagcgatcttaaccgcgacactgcgtcctccacaaagatgaaagcaggggtgggcgcagcaggcaggctacaactatataaccgactgggcaaggggatgagacactgctagatggaatgaaagaactctgccctggggtgtagaaacgttgtctatcgggccgggagctgtggcttgcgcctgtaatcccagcactttcggaggccgaggcgggcggatcacctgaggtcaggagttcaagatcagcctggacaacatggtgaaacctcatctctactaaaaatacaaaattagccggacgtggtggcacgcacttgtaatcccagcagtatactcgggaggctgaggcgggagaatagcttgaacacaggaggcggaggttgcagtgagctgagatcacgccattgcgctccagcctgggtgacagagcgagactccatctcaaacaaacaaacaaacgaacaaacaaacaaacaaaaaagttctctattgtgattgtagtcgtggttacgttgattcaaagaaacaaagaacccggccgggtgcaaaggctcacacctgtaatcccagcactttgggaggccgaggcgggcggatcacaaggtcaggagatcgagaccatcctggctaacacagtgaaatcccgtctctactaaaatacaaaaaattagccgggagtggtggcgggcacctgtagtcccagctactcgggaggctgaggcaggagaatggcgtgaacccgggaggcggagcttgcagtgagccaagatcgcgccactgcactccagcctgggcaacagagccagactccgtctcaaaaaaaaaaaaaaaaaaaggaaaagaaaagaaacaaagaaccctgatggaggcgacgacctgtcatgaaactcttaagaagtgactcccttggagctcccattcccggcttcacaggcctgtcttccagtagatgcacaatctcatctgactcctgtcctggctcaccattggtcccaaactcatctcctcctccctctgcccctgcccagtgcccattccactctctttccttctctctccactagcattccatggggcacctgtctcagggaggcttgtcagttcagccccttctcaaaaggatcatggactcaattacattgaagtccactatgaaaatgtctctttaaatggtggcccataagagttggtgtattcttctttgtaggaagtaaaactagtcctgggctgggcacagtggctcacgcctataatcccagcactttgagaggccgaggcgggaggatcacttgaggccaggagtttaagaccaggctgggaaacatagtgagaccccatctatacaaaaaaaaaattaaagaattagctgggcgtgatggcacacagctgtagtcccagctacctgggtggctgaggtggaaggatcgcttgagcccaggaggttgaggctgcactgagccatgattgtgccactgcactcagcctgggcgatagagaccctgtctcaaaaataaataaataaataaataaataaataaataaataaataaataaaaactagttctgtgtgtattcattctgtcttttgagttacattgttcaagtccttacttattttttgactgcttgacatgacacaggaaggtaaagaagaatttccttcaatgtctggatttttgccttctgtattctgttatgttggttgatgcataatgacttacctgtttttttgtttgttggttagttttttggtttttgtttttttaagacggagtttcgctcttgtcacccagactggatggagtgcagtggcgtgatcccagctcactgcaaccttcacctcccaggttccagtgattctcctgcttcagcctcctgagtagctgggattacaggcacccgccaccaagcccggctaatttatttatttattttttttattttttattttttttaatggagttttgctcctgttgcccaggctggagtgcttcccgggttcaagtgattctcctgcctcagtctccccagtagttgggattacaggcacccgccaccacacccggctaattttttgtatttttaatagagatgggggtttcaccatgtcagccaggctgttctcgaactcctgacctcaagtgatccacctgcctcggcctttcaaagtgctggaatggcaggcgtgagccaccgcgaccagcccaatttttgtatttttagtagagacggggtttcgccatgttgaccaggctggtccagaactcctgacctcaggtgatccacccgcctcagtctcccaaagtgctgagattacaggcatgagccaccatgcccagccgatttacctgttgattataacttttgtaattgtttaatgtcatctatatcttattaaaatgtattccttcaatttcatttttgagttagaactggtggcccctaacacacactctatgaatgcattaaatattaagatatagctgcaggtctaacaaccctgctgctttggaagtagtgacgaatatatgtgatacttgcagatgtctctctaactgcaatgcaatgtaaacacatctggatttctatcggtgacaaagccaggcacttctattaccaatgtggttcattgcctccactcataatggcagcaaatgctagtttcagttagaggttagtacaaataaagatgtgattctccgcccccggtttcgaagctcacagaccccagaataagatcccctgctatagtcctcgcagtaccagggttcaccagtggagtcggagtcgtggctttagaaacgcatgatgaatcttcattcattcaccacccaggccttgccaccactgggtgccatgccctttccactgggtgccatgccctttccactgggtgccatgccctttcctgtgttcagcagctcgagttgcctcctgggcagcagtcaagacagcttatcactctgctcctagcacttgggcttcagggagcccctggcttggttttcttcctgcgtcaccactgattcttgtctcctttgctgggcccccatttccctttttgcctcatagatctcagcagcatctgtactgtttttttttttttgttttttttttttttgagaccaagtcttgctcttgtcccccaggctggagtgcaatggtgcgatctcggctcactgcaacctctgcctcctgggttcaagcgattctcctgcctctgcctcccaagtagctgggattacaggcacccaccaccacgcttggctaatttttgtatttttagtagagatggggtttcaccatgttggccaggctggtcttgaactcctgacctcaggtgatccacctgcctcagtctcccaaagtgctgggattacaggcgtgagccaccgtgcccggccttttttttttgagacatagtctcgctctgttgcccagcccaggctggagtgcagtggtgtgatcataactcattgcagcctcaaactgggcttaagcagtcctcctgcctcagcctcctgagtagctaggactacaggtgtgcatgacacccagctaattttttaaaattttttgtagagaccaggtctcgttatgttgcccagactggttttgaagtcctcggttcaagcgatcctcccgtctcagcctgccaaagtgctaggattatagacatgagccactgtgccaggcagcatctacattcttgtgatactgaaaacattcatggtgagtccagatctctccgtctgaactggagactcaggaatcccactgctgctccaccagactgtgaaccctctgtccccaccagctcccacctgggccagccctcactggctgggatgacagctacagcttcctctgctgtcccagcttctgccctgttccctacagacttcccccataacaccctcccctccaagccccaggacccaggtaacaatggaatcagaccaggcagctggagtccgtcccttgcccactctgcctttatcctcccgggctgccaggcccccctgctgtgccacatgccccaccctgcccagactcccagtccctcagacacacccctgattgactcggcccctgctcagtgcttccctgctgccaccccataggaaagagcccccccacaaccctctccagtggtattattcccacagctgtcactctcaccaccacctaggtctgcttgcttacactctgctcctcccgcccccaccaccaaaattcgagctctaggagggcagaggcttcttcgttgactgaacgaacagcactggggctccggaaactctcagaccagctgagcgactgtgctcagcgagggggcaagagcgcagccgggccagactccccccattcccccattcagcctctagaggggacaaggaggcagctctcacctggcggaaggtgtactcagccacttggtagaagaggcgcagcagcacagggtccccactgtcactgtaacccatgaggaaggcaatcatggcttcactgtgtggccaccagagcttcatggcccactccagctgaggggagagcaggggcaggcatctcagcaggaaactcccctccgcaactttccagacctggctgcgtctccattggcccaagctactggaggtgaattgcgggacatctttggaagttctgaaggacccctcccagtgatatcagcttcctgacctgtagattcttgaatagacaccagggccccagacgaatggcatatatgtctgagcatcagcgtttcgccagctccctggtggcctccatatgacatggtgtcagaggtgtgtaaaccagagcaactccatcttaaacaggagctgggtcaaatgaggctgagacctactgggctgcattcccagacggctgaggcattctaagtcgcaggatgagatatgaggtcggcacaaaatacaggtcataaagaccttgctgataaaacaggttgcagtaaaggagccggccaaaacccaccaaaaccaaggtggcgacaacagtgacctctgctcgtcctcacttccaacagtttacaaatgccatggcaacgtcaggaagttaccctatatggtctaaaaaggggaggcatgaataatccaccccttgtttagcatatcatcaagaaataagcataaaaatgggcaaccagccgggtgcggtggctcacgcctataatcccagcactttgggaggctgaggcgggcggatcacctgaggtcgggagttcgagaccagcctgaccaacatggagaaaccccgtctctactaaaaatacaaaattagccaggcatggtggcccatgcctgtaatcctagctactcgggaggctagggcaggagaatcgcttgaacccgggaagcagaggttgtggtgagccgagatggcgccattgcactccagcctgggcagcaagagcaaaactccacctcaaaaaaaaaaaaaaaaaaaaaaaaaaaggcaaccagcagccctcagggctgctctgcctatggagtaaccattcttttattcctttactttcttaataaacttgctttcactttgcattgcggactcgccctgaattctttcttgggcaagatccaagaaccctccctcttctggggtctggatcacgacccctttcctgtaacactggcacagaagctgagagcaggcctctaggttccaatccagccccaggttaccctctagagaagcaaccacctccctgggcagaaagccttagaacagcgtgggtcacacatggccctgggcgctctcccacctgggtggggcagaagttatcagcatcctggaagtaaaagaggcctccgtggtcagggtcccatccggagtggaagggcaacaataggaacttgtcaatcacgtgggctcgaagttcggggtcgcctttccgaatgcaatgacggagcagaaaccagccggcttccagcgtgtggcctggtgaggggtggagtacggaagggcggggggcggggggtggggttgagggagggaacagagggagcaaaagcccctggcacctctctgctccctccctaacaatgagcgaggctctgagctccctggccctggaagcctgctcctctgcagaaacccccagccttgggaagcccatcctcgctcctctgcctcctcaaggcgcccccgccaggcactcccatatctgaagcccagaacacaaggctcagcgctcccctcctcctgggtggcccccagcccaccccgcccctcacctgggttctgctgtctccccaggcagccaggaagttccttgccaccctctgacacattctccagcacagcttgtccatccctctaccgggaaggagcagaagggaatgttgcctccagccctttcacccacccagccacccaactagaaagacccagctccggaaagcccttcctccctccctcttacccaagcccctggacctgctggcttgggtgggccaggctcagaggggcatttaaggaggggctgattcactcccttgggcctagcaagttgttgttttttttttttttttttttttttagacagagtcttgctctgtcacccaggctaaagtgcagtggccgcaatctcgactcactacaatctccacctcctgggttcatgcgattctcctgcctcagcctccctagaggctgggattacaggcatgcaccaccatgcccagctaatttttgtatttttagtagagacggggtttcactatattggccaggctggtctccaactcctgacctcaggtgatccgcccgcctcagcctcccaaactgctgggattacaggcacgagccaccgcgtccagcccgggcctaggaagatgtaatcctcacttctggcctgatcctctccagcaggggagggtgaaacattgaatggggacagacagggcgggtttcacggcccagaggcctggaagggacttgggtggggcaggaggggtctccttctgtcagggcttgcctggggctccgcatcctccctccagccctcaggccctccaccttccccaggtgggacatccccgaatctctgtctctccaggtgtgtcgagccccagggtgcccaggggagtgggggagtggaaggcctcccaccaccccagctccccaggcatcccccacctgcacgtgctgcagaatcctccgggcgcaccagtcccccagctctgcgtatttgcccgccagctcctcatctgcctccccgagctgctccaccaggttcagtagcatcatgggcaccgccatgggctccgcagccggggccccctggagctggggccggcccagtcccgacgcgtcctcctgcacccagtggacgatctgatccatcatctccaccgcttccgtctgggggtgcaggaggcaaggggaggcccaggctgaggctacatcctgtgccatccccctggacacggccctggggtgggagagccaattcctctcctgaacccagagacaccttcatccagggcctacttggggcctggcacccagcgtccagtaggggccagtcagatccgccccactctgctcccagtctgggggtgcagccccttccaggctgtggggtcagggtctggcagcacagggagcccagggaggagggaagggccttttcccagttgggggcagggcgtggatagggccctctccgtctgcgcccctgtgggggtaggggagcgttcagaggtgaaggggacttggcccacagatgggtccatgggaggggacttgcgtagtgagtgggaatgcatcaggtggccatggcagggtcgcagggtggggtcttcaggggcaccctcctctcacacacctggtaccgcacttcccctgtggctctccacagctcgttcatggccatggtgtagaaacactcactgaagatggttcgctgcaccttgaccgggcggccgtcccgagtcagcacaaaggcacacttcttgccaggaggtgccacccgggcataccgcagcaagaactcaccacctggaggttggggggttggcatgccaggggtaaggccaggacgccccgcacacaccacccttgagcctccccaagtccttcgctgcttctagatccctctaggaactccgcacatgtgccctgttgagtaaacatggacggagtcactgggagatgggcaggaagggggcacctacctgcttttgctgcgtccagaagctgagcatggcggaagcgctcgaaagtgcggtacaggcgacaatacatccatacctgcggggtacgggagggaaagtggcttaagtggccggctggggtgaggtggggagacctttgaggcgatgggccgtgtgcctgagcttccaggctgggaacaccatacctgcctcccctgcagccacacatacttgaggtcatcatacacccgcccctcgcggccaaggcacgtgaagaagcccctgtgggaaggcagggttagcaaagtctggaacgggccttgccagcccctcctgcccctctggggccagcaaatctgtgaggtgcctgagagtgagaaggggcctcaggaagggcaaaaaccctgctgaggactccagaagcacgccgagtacccgtgctcctggtcgtgggagtgctccatccagaaagccaccacgcggtccagctcctgccccacgcgctccttccaggcctgcagagtctctcgctctttctccatgtcctaggggaaatggggcttgaaggcgcagcccccacatgggacctaggcccccccagcctcgggaaccagccctcagggatctccccacctctgcacggggcttcagacgtcaccatccccgggaccctccaagacagcactccccccaagcaccccaccactggcctgtcgcgctgggagacccttgctcatccctcctgctcctctaggaagccagacagagttggtcgcggtcccgtgactgtcactcagctgacacagccgcgcccggctcaccctccccctcctcttcagggttccgctgggcctggggcggggctttgagcccgacccccgcacttgttcctgccgcgaccctccactcgaatgggccagtccctccagggcccctgctgggagctctggtctcaagatcctgcttggtgggaaaagctgggatggccggagggtctgggatgagggggaacggggctgccacccaccccgccctacaccaggggccccggcagggcggctgagggccttggccctaccaagcctgtggggcaggggtgcagcaggacagggaacagctagtgggcctgaatgcagaggtccctctgacctgtcaccacacagggtagacaggaggcaagttctgtttttgttgttgttgttgttgtttgtttctttgttttttgagacagtgtcctgtcgcccaggcagctcactgcagccttgacctgccaggctcaagcgatcctcccacctcagcctcctgagtaggtgggaccacaggtgtgggccaccatgcctggctaatttttgtatttttagtggagacagggttttgcaatgttgcccaggctggtctcgaactcctaagctcaagcgatcctcctgcgtcagcctcccaaagtgctgggattacaggcgtgagccaccgcacccagcctagcaagtcctctcttttgaatcagtttgtcaccaactacctcaacagtcagtaatgggcagccattggcgctaattttttttttttttttcccaagatggggtcttgctctgtcgcccaggctggagtgcagtggcatgatcttggctcactataacctccgcttcccgggtttaagcaattctcctgcctcggcctctggagtagctgggattacaggtgcctgccaccatgcctagctaattttttttttttttttttttttttttttagtagacggtttttcaccatgttggccaggctggtctcaaattcttgacctcgtgatccacctgcctcggcctcccaaagtgttggtattacaggtgtgagccaccgcgctcggccttggcactgacttctttacacaagtgacacagctctaaggccagacagtaactgcaggtaacagcccacaccccccttctctgggcctgttttccagctgcccagatctgtctgtagctctatgactgacccgatgatgctacaaggcagctgggctgaggtggttcctaccttccaggccaacagtgcacaaaatgggttccagcctctgggcgtgggtactgcactgctggtctttgatgccacagtggctgtctcagtccctgctgcaggctgacccacccaaccccaaacagttcccctttggggtgcttggtaatgaggctgatgccctggcagctggggaggcatcctctgtgtgctcccacccaccctcggcctcggctcatgctcaggggatgagctttgtgcccagccgggctgtatctacctgccctgctcacaggcctgtcatgttcacattcatgtccagcctccctcctgcctccccagactgagtggtgccctcagacggaaacgcggtattttcagataaacaccagaggcatgactgatgtggcccttgccttgtggagtgtgatgcagccgcggtgagacaagtgagctgaaggaatgcggagggtgggtagccccacaggtgccagctacagaagtggggtaggaagaagccttgtaccacccccaccaggcgaagcgcccacaacgccatttgccaaaggtatggcaaatccgcaaggcccctcggttctggggccagccccatgtggcccctggcctccaccagccccagccatgactcctaccgctctgctctgaaggacactttcccacccctctccttgggcctctgcgaggctaggctccaaggcaggtcacagttggtgcggtgggtaagacagagccatggctcctggtgtcaagccctggccagtctgcttccccccacccccacatgacacagcagaccccacaggacagaggcttcccagaagaggtcgcattcgacagggccttgcacacacacccatgccacaggtggagacacggaggctttggttactccaggagcttctggtagcggagtgcctgggtgctctgagaggaaggctgggcagtagaggtgtgtaggggaaacaaaggcaggcggcaggggcttggagggggcggggaatgcaggtgcgccaggagcaccaggccccagaagcagggtgtcactcccctcagacccgcctaggcctgtgctgctccggccaccttgccccggagctttctgggcctcctggtacaaattcagcccacgggatcccagctgtcctaccgacccagctgctaggtggtcagtctggatcacaagctcttgcttcttcccttgggggcatggctcacatttaagaggaagccagaggaagggatccacctctgcagtacccgtggtgtacttgactcagcccacctccccccaacccacccaaggaggctgccgctggtgacctgccaggcccttgccccatcctatcctctagtgcaggaggggagggagggagatctgggccccagacacaggaagtcagcagcagctgcccaaggggctctttggcccttgccctgcaaggcagctaccaagcaacctgctggaccctggtccgacttggtccaaagaccggaggccacagcagaggcctcactctggggccttctacgctttcaccagagctcaggtctccctccagggggctcccgtgagcctcgggcaggtctcagccttcccgctcaggcttcctgagaggatgccgggacacagtgagacacctagtggttatttcaaaaaaagtcttttaattgttcaaaatagcacaaaacgacatcgcactatggtaatattgagtcacaggggttactctacaatagtgaacggtgtactctcctcagaaacaaatcaataggcgcgcgagagaagggatggggtaaaacaacaggaccaggtgagtgggctccaaggtgactaaacgtgacattttccacagcgaaatatactataatacaacaaaccagaggccctggaggacacaggctgctgcgtctccaggcagaggtcggtaggggagggctggaaagattggctgctcggttcaaatccttctgacttgctggcaagccttgctcctcgacagaagtttggggtggggggcagaaaactccaagcagatcccccagcctcggagcctggcctgagttccatgctgcacagctgctgctggtggcctgctccattgccctagcctcccttgtgggtgacactacacagtcaccctcccaagctgcctccaaggacgcctggttcccctccattctccaccctttccatgacgatttgggggaggtggagcagtggctgcggaaaccagcagccctgtttgggaggcggtgccggtggtgctcagggagggggcatggggagagctggaaatccaggacaaggaggccccagccctccctcaagctcccctaggctcgaccctatagatgcggagtgatcgcccatgaggaatgagctgtccttcctttgttccagcggcctgaggacaggcaaaagggcagagggcaggggccagcaacaggaagttgggctgggtggcaaacagcaggcccctcgtggcagatttcacacctctcctgccctggctggccccagcttttcctccagaaagatccctgccaagaattagccaagaagaaaaaagtaaaaaaacaaaaacaaaacaaaacaaaacaaaaaaaagagaaaagaaaaaagattacacattctgtacacagctaacaacaacaaaaaagggacaaaaccccacacgctaaaattacaatgaaagtgtgaacttcaccaattgcaacctaaaaaacacaacaaatgcagcagttggcagtgcggcctgcagggaggtctgcacaggcgctgcccaggccgccgcggggctccttgccccttttttctttttccttcttttcttttttaaaatgggaaagaagagggggagggtagaagaggtgggagcacaaaggcctctgagaaaatgtgtaagcttcctgtggggtcactgagcagggtgggccgggggagcctgaggaagggaagttaggtgactggaaacacaaggggaagaaaagaaaacagaaccagacacccaggccagggtgccaggaaagccactctggggagggccaagagggacgcctttcctcccctccatgcctgcccccgacctggccctcaggaacgcacagccttgggagggcggagctggctgtcctcagctccgccttccctccccgcaaaagtctctccccagggtgggcggcagcggggaggaaaggaagcgcgctcctctctctgctttcccatctgcctctgcttcctcccaacagcaatggtaaaatgtgctttctttagattattttaaaaacagagagaaagagaaaggggagaggagtgaacagcggctcgcgagggtgaagtgcgaatgctgggacggggtgggaggggtgggccctggcgggtgttcctgaagcaggggggtctggagaagaatccaggggctagtcagcttcctctcactgaccatcggccttagatttctttggagcagatttccttggaaggcagaaaaaggaaagagaaagttagtgtgggccctgcaccactggaggccctgctggtgcagggccggttaggggcccccagtcatttgacaagaggctgaacccagctatttccacccctagtctcagaaggttcccgagaggggcttcctgcttacatttctggagaggacatgggccgcttgttggctggcttggtgccagagctgtctttactggtttctggaaggaacgggagagatgcgtgagcagcattgtgacagaacgagagcaaggaacacatgcgccctgcccgcctgcagagtctcttggtgccacatggcatgacccgcagctggcaagggtggggcgcctgccctatgggtggtcaccttttacgccactccttgggaccagaacacgacaccactcactcccctctggacgtaggttagaaacccactcagctcagctcccacctctcactgccctcccaggtcccagagccccaggggagctggagcaggagcatgacctgacaggaggcaggctggcctccatccctcacctgctgcactccagggacctgggacgtgctgttttcgggcctggaaacctacactttcccgccagccctctcactgcttgtcccctcaaacatcctggggtggcgtcccctgcacccccaggcccggagctgggtcccctgctctacttgatggccacccccgtggggggctgtgtgcgcgccaaaggaagcagggagacgccgcacatgggaaaaaatctcagatggtgacagttcctcctgctgcacccggcttcctgggccttccctgtgcctgaagagctccacgaaggacactcaccctgcagccacctcacttgtgtggccgggccatagcccttctcattgcgggcggcgatgcggaagatgatggcgggcttggtggtgtagtcgatgtgggcgttggaaaggctggaggactgcaccaggcaggaggggctgggcccgcagtacacccgcatgaaggccagctgggccggggtggagctcttgagctcgcccccagcctgtgagctctggatggccaggtacacggagtactcgataatcttgccggaggtcacagagggtggctcccaggtgaggtgagcaccatccggactctagaagccagggggtcagaaggtcaacagaacaggctagaggcttccagaactgactaatcatggttcccataagccattttctaacacagtagagatattccatgtggtagttcaaggagcttcaaagagatcttcccccaagtggaaggactaagacaaactgggactcaaaacctagctctcctatgcccccccccggccacctcatgtgctgaggcaggcagaaaccaaccagggacagacggccaccccacagcaagactcactttgctgattttaatggcacaaggggcccctgggaaaccaggcaggcacgtcttaaaggctgagatttcgctgaagggcccccggccacaggcattgattccggcaacacgaaacttataggctgtgcctggctgcagctcctgcttcttcagctggttatagtcagggacggtgcccaaatcatcctaggaaaagaggagtggcatgaacgccactgtggagaaggcagctctgggccaccccaggaacactgcaggtccatggtaactatgggccagagggaaaagaggtcagcggtggctggcccctcacggcaaggagggacgtggcgaggctgactgtggcccggtactggcgggaaggaaccaaagctctccttttctactgcttcaggggggatggtctctgcccaccttcctcaggcttcctggctactcagcttggcccaaagatggaggagtttcctgtaagccccgctcagggtggtggagccaagacccacccacctgaggacatcagcacctggggacacttacgtctgatgggacagcatcatctggtggcaggaaatagtgtgtcaccattacattggtgcccttaatgactcccacatcaaaccactggttttccttcttcatgggggctttgctgggtgggggcggcaggtctggcttctgcaagacagaatcggtgcgacgagatcaggccctcagcacctagaggcagtgctgccccccaggccacggactcaggagccccaacacacccgactcaccacacccagggactcgatgccattggccacttcggtcagggtagctgcagcctgcagcttggctgggctggccaccacaaccggctggggggccacaaatgtgttggatggagccaggcctaggaagaaagaaggtgtcagcgggaaagactcgggaaacctggctcccaagtgagaccgagcctcccgtcctgccctcacctccctgggtgcccccaccaccccagcaccaattcgccctcagtcgcttactctcagtggccgttgagggcagcagcgccacagtgctggggaccgtgccggccagctcattgaggcaattgctctcaatggctgggtcgttgagactgtcggcaggggccagggcctcagtggggaggtggtgatgctgctgctgggcctgggcctcctgcagctgctgctgctgcaccagggcagccagctcctgctgtgtcagcacaatgggtatggtggtggcctggccctcctgaccctcggccgacaggtgccccagctccgcctgagtcacggttgctgctgcctcggaggtgtccatgggctcgccggtgcctgctccagggtcgagagaaacactacttactaggaaggctggccagaagcgggcagcccgggcggaggcccccaaagcctgtcctagagaccccgtccacctcctaccgtgctccactgtaggctaagccctggccgaggggccctgcctgtttcccaggcgctaaccccagccagcctgttctacacggcagtctctactacttggcctgcctggggtcccctgtgctcgtcctccccatcacatctggctcatgccaccctcgagggaaatgggctcctcttcccaggctgtctccgcggcctattgctcccccgagcggcccggcttccccagggttgcaccggcactcacccatgacggcctgctgcgcggcctggagcaccgcctggatggccagggcctgggcttcctccgtggctgcggcctgggcagctgcttctgcagcagccgtcactgccagctcctcgggggtgagccccgttaccatgagggtggtggtgccagcttgggcctcggccattagctcttggggaagtgataactggtctacttcggactgtgtgggtgggggtggctggaccaccacagtggccaccaccgcagagccggcagactcctggcccgaagatggctcccctgtgctgctcagatccacggcggccgggagctcaggggtctgggaggctgacaggacctcggcggactcccccatcagggctgtggaagccgactgcagaagctgccgtggcggcagctgctggcgaggacctggcgacacctggagttcctctgggggctgcaggatgtcaacagcagagaagggcatgtcagaagtttctgtgttggctatggtcactgttattttggccgggatggggacttcagtagtcagagcccttggggcagtctcagtcattgatgagatcttctagaaagggagagaagcccctgtcagaggggaggagaggggccagagccaggcagcagggctgagaagcaagccagccctcacctttccttgtgggcctaagttttcattcttgatgggccagctccagcccatgttaaatagggaggggacagtggttctctgaccagcatgaggagaaaggcccttgagacccccggtcaggtttaacccgtcctcagtcaccctggcctggacaaatgggcactcagacccccgccatgtcttatacaggctgcggtgaagtgacacgcgatgagaaccagtcccagaaataaaagcgccccagagatgcgggggacggtgaggctcctgcctcctgccgcagcaggcaccgaggctgcccttttatggtccggaaaagggaccaggagcggccccatgcctggtacaagagcgacatctggcgtctgagtgtggaactgcacgggcgtaggccgggaaggcggggaagaacacggccccctgggctcttaccggcacagaggggcccgggaccggtgtggactgcgtcacggtggtcacagcccgcgtcagtgtggaggacacggttgtcgtgatggcactggagctggtgatgttcacgctgtcgccctgggtgctctccacctctccctgatcgctggcagcaggtggggggtctgtgggggcgacaggcaggcggctgctcagcaggagcccccccggcctgtacttggcttgaccaccacaggcttcctctaccaccaaggggagggccagataaggcaggacaggctcctggagacctctgtctgcttcaggtacagccaggacgccccagctctccccactggtaaattgggtgccaaggagcctgactggtggactctggacggacccccgccatcgttgtcttggcctttcagcctggggggctgggagaccatgaaagccaggctggccaccttcacttaccttggtttgaactcatgttggaagtgacagtggtggccgtgtgagtggtgcccgtctcgtgggtctcacagggggggttggagcacaccctctgtgttgggaaaggagccagcagcgcggtgccagcctggggggtgacgctgggtgccgccgccacctctaggccagactccacggtcctgtgggaagaagtggcgtcgggaagcagggcacccacgctgaccgacatggtggtgccagtggaagtggtctggtgtgtctcacaggggcgaccagcagggggctgctgcccaccctcgggctggcccgtgcccccgtttgaagtagcggtggtggccgtgtgggtggtgcccgtctcgtgggtctcgcatggcgggttggagcacaccctctgggcgctgcctgcattcgaggtagtggcggtgttggtggtgcctgtctcgtgggtctcacatggtgggttggagcagacttgggtcacggtggccgaggggcacagcagtgcctccagggctgtcacagtcactgtggtgctgggcgagccaccctggaggctctcgcacacaggtgccatgcggggctccccagcacccacgctggaacgggtcatggcagcggtgctgaccgcatggctgtggcgccccgcaggaaggtccttaatgcttgggctgctcagcctgactttgctgctcagaggggccaactgcacaaaagcagggctgcggcccccgggctcccgtgccatgctcggcccaaggagtgggccggccgagcacggggccccggtggccatcacagtcatggtggtgctggtcgcgctggtctggcgggtttggcactgggacttagagccctgggctgcctccagcgccccagtggccacactgatccggatcacggcaggggtgccagctgcacaggcccgacgggcatctcgctggtggttggcgccgacgctcgacatggctgtagtggcagtgttggtggtgcccgtctcgtgggtctcgcagggtgggtttgagcagccatgctgcccggccatgttggaggtggcggtggtggcggtgttggtggtgcccgtctcgtgggtctcgcagggcgggttcgaacagactcggaccacgctaccattctgctggcccacagtcgaggtcacaagagaagcagctgcctcctgtctgtcacagacgaactgcacttgggtgggctgggggtgtcccccaaggttagccacaacagtagtggtggccgtgttggtggtgccagtctcgtgggtctcacagggtgggttggagcacaccaaggtgacagtgccaggctgcacatcaccctggcctgagtcggcgatggtaactgtggcggtgggctgttctgtagtcggggaggccagaatggacacagggaggtcatgcacaggctgggcctccaccccactaggtgccgtgatcagagttacctgggtgggctgggacacgggctggggagacacacgaggaggagagttagtgctgcagctggctgtctgcctgtccctcccactgtcctgcactgtcaccacacaggctgggaccactgaccacttctcaacggccctggcagacgtaagacccactcacccctgcccccaagacactgacttgctcagaggccagggaagaggcaccactttgcctcaaaggcaactgggatgaggaagaggctgtgaggacagggcaaggggaaggcaggaggctggctgaagtcaagtcctttgtcagagaatggaaatccccctcaatgctcaaaggccaacaacaaacgtttcaccgttttccttaatatgtatgaacagaacactgcacacacatgcagacgagctgcggcgtcctgtagaacactgcgagaggaagaacccggtgttcaaacaccaggcatggccaaaccatgacagccaaaccacggactatgacacagggaccatgtgacaccagggaaaatgccccaggtgaggaaaggcctgccatggctgcacccggcagcagcgcaacaccaggaaggaaaggcctgtggacggacggcgtgagcctcacgtgcttccacttgtgtggggtccctcgcccacacgtggcctcaggccctgccctacctgcatggtgatggttggggttgtgagcccgcctgccgctgtcagcgtggtctgtgcggccgacacagtgatggcagtggggttgatcacctggcttgagagggtggcaatggtgcccaaggtggtgatgggcgtggccagggaagcactagtgctgtggccccccgccccggcaaggctggtggagacggtgcctgtcactgtgcctagggtcgtgacacctgaaggaaaggaggcaagagttgggccaaggctgctgctgtctccttcccagcagctcctcctgcacaggctggggcactctggagctgcttgcatagaaggctcgggagagaggagctgctgtgccacccagctgtgccatggggattgaaggccagccctgcttcgttataatctaggggtggcaggggacctggcctatgggtacacacctgtggtgcctttcacaaccaacgtggtgacggctggcttgacggcggagacggtgacgggtgtgaccaggcgaacaccccccatgggcacagtgcggaggatggtgcctggctgtcccggggcccccttaagcaccacctggaacaccagaggaaagtgccaccaacgtcaccaccaggctggtagatgccaccgatgctgcccctcccaggcctgtcgggaggacctgcgtggcgtgctggggtggactgcactaggacactgggctgagagacggctgggagtgcctcacctgggtcactccctgctgcccgtggccagtggcaattttggggacagcagtgatgattttcgcaggtgctccagttcctgaagtcatcaccttggtggtgatgatggtgatgggggacttgatgccaggactgctggtcacacctggatgggagagtggggcccaggggagacaggctctgtgagggctgcccctgctgcccctagactataatgaacatccacaagtcacagccatagccctgcccatctcctcactacccttagacacaaaaggcagcaaggagaagatagaaaagggtaaactaaacagaaacacagcacgccttataacccggactccatttcccctccagtgaggacttgcagacactcatatgtcgggggaggcccctacccgtggcgcccgcctgggtgatgatggccgacatggggatggttttgatgatggtggtcgtgccgggcttggtggtactgggggagacgctgctgatgcccaggatggtgggcttggtccccgccccactggcctgcgtggtagtgatgatggtggtgggcttgccatctgctgaggtcaccagcttcaggattgttcccgctggcaggggccctttggtctgaaagggggaagcaggtgcatgagccggcatcactgccaggaagggaagtgtggtctggctactctccgccggcagccttggcggctcagggaatgttctggaggctgtgggcgaggggagtgagcagcagaacttgctgagccatgtgtgctcatgggatcttccatgggcagggacatgagttcttcctgtggcctggcacccaggcccccactcttgcgtatgtgcaaagactgagagctcacctggatgatctgagtcacaggacccgtggacgcctggcctgtgactgctgaagtctgaactggtttggtctggaccaccgacatcactttgcccagattggaaatctaaaaaggaagggatggagcaaggagtgatctggaaaccaaacaagggcatggcctggctgagactctcctggagctggcccagggcggccattcaccactggcagtggccgtagcctggcagcacccatcactcaccagagcactgcctcctgggacagagatggggctcttcaccagggtgatggtcttggtgaccccgcccacaactgtggtcaccacctgggcttgctgggccactgtcacagtgcctgacttgtgcactgtgatgatagggcgggtagacgtgttggtggcggaggaaaccgatgtccccacctgggcggctgcagtcttcagcatgcgagtggcagggttgctcacctggaggaggcagagacgagtgacaggccaggcaaagaaagcgatggggaaaccacccaagatgtccacggtgggcccatagctcctgcctcaacactcaccttcctcctcctcctgctcccaagcccaagaacagcttggttcccccttcctttaacaggcaagggaggaggctgagcctgcagctctcacctgaggccatgacgcccctaatggagacagcttattctgcagcccacggtccaacggctaactctaaagcccggagggaatgactatgcttgtttgaccacagtgacaagccccggaagacgctcaccatgactggcgaggaggccaccttcacagtggctgggagggtggtagtgccaggtgtcacagccatggtcttcacgatggtggtacccgctgggacactcagcaccgtgggtgccgaggaaggggggatcttctgggtggcagcggccgcagcggccagtgcggccatcccactcatctgtgggctactgccaatcacctgcagcaggcacgggcatgtgaggccaggtcacaggtgccacccacctccctgcttggtggacctcaccggaacctgcccaggggctgccctgctcttgggagcctcatcccgccagcatggctcagctttctctactgccagaccccgctctcctggccccagacacagagggctcccaccacccaccatgcacggcaacccccgtggcaagaggcagctgggagctctggatcctttctaaagaccagagtcaggtcccgttgattctcatgggcctgtggcaagcccagctggctagatcctcctctcaggctgcaggacaagaaagtccacgtggcaaatgctcttaggatcaggcagcaggttaggccttctaggcattaacctattaattcccaccatgacctcgcaggagcgtttccccatctgcacgtcccaggagggaaaggtgtggggtgcgtggtaccagagcccgagagggatgtgaacccctcagtacacttgcaacttaatccactggatcaacaggaaatcccacccgccccagtgaccactcctcaccgttccctgggcactctgtgttggcacaaccatccgcactccggcgggaagggaggtcacggtgacaggggctttcccagcctggctggcaggtcgcatggtgaccaatggagttcctgttgtagcctgaggaccggtcactttgagaacagcagggacacctgatgagagaaggggccagccgtcagccatcaccttctgcacgatgtccccagcccctttgcaggcagccctgagccacttctgttggcctgcttgtgtgggagtctggctcttctctgtgccctgagagtgaccatttccacaggtggggccaggctttagcatccccctacaacccttggagacaagcccaaagctcccggctgctggcctgctgtctaggctgccgtctcgcagcccctacttggccgctgcctctccccggaggctagccccctactttcaaacgtccctggtcccctggctcaccttgagtcctggctgcggtgggcacagaaatggagctgccaggcaccgttggcaagacctggatggtggtggtggtcgggggtgcgggggcagcctggggcaggagcgtgatgcctacttgggtcagcggctgcacagcaggtgcggctgctgctggggcagggctcttgggagggttggcaggcacagatgggaccggattgggtgtaggggaggtggcagtagcagccgtggcaggaatgtcatatttctggagctggagaaggtagctgtcggctgttgccactgccccccagctcacctccagggagttggtgttggcgcgtaccagttgtactcgggctgggggtggtggcttttctgtgggagaacgcagttggtgagaaggggcgggaggctatgggaggaggggagtcggctgggccgggcctacctgtctctaggtaccagaggtccttgcagcagacctggttgttccaggccttgcggtagccgtcacgcccactccaaatgtacaggcgggtgttgatggcgactgcgcagtggccagcccgagcacgggggatgttgtcctccagtgtatccatcaggatggtctcccaggccatggtatctgggggagggcagacaagggaggtcagcaaggaggatggaggaaacccgccacccctggttgcccttggttcttttgttgtcaaggatgggaattaaaatcaagaagttattggattattacattaaaaacaacaaaacaaagaaaccctttgtggcaaaaagcaacacaaaaaataaaattacaaaccaccaacggccaactaagaaaaccatgagaaacacagtcagaggtttacctccttgcccgttaaagaacactacaactcacagaaagagacggcaatgggaaagtggtttagggaaaacgtgatagaaagatcttaagaaaaaacacacactctcacgcaaaagaaatctaaacttcaaccatcggcgcctggcatttttattttcaggcccgcagcagctggggctcaaggtgagccggagggggagcttcggccacccatcaggcttggcaaagagtggcctgaccattccgtgagggcaccactggaggcgcctacgtgggcacagcctctgtgcagggcagttcagccgcatcggacagcaaccctacttctaggttttcacccctaggatacacttgcacacgggtggagatggtgcaaggatactcacggagcggcgcctgtacaagttacagcagcacaaccgcaactcgaaggaggctgctgcggggcagggacgtggagtgatctccaagatacggcggatgagaaaggccaggtgtggcactgcgtgcgccaggctgccactgtttgtttttaaagggacctatggctaatgctcagatatgaagagcccctgcagggtggacaggaaaccacccacatggctgcctctgagaagcagaaccggagaaccgggaggagggaaggaggccctgcaccgtagaggcttttgcacttttggatgttgggccatttggatggagagctcattcaaaaaactcagaggcggaacattgcttcagagagctctgcccactggatccttccagtggattccaaagggagccgggggcccagcttgctccccgcacaccccacacagctcttaggctgagaagggccagcctcctgcagcctcccacaggccactcggagcccgaggaggccatacccaggttgagacaagccagcgtgttggtacacttccactccttctcgtgtgtggccactttgacgtcatccatgacgagaggcacccagccaccaaacacgtacattctgggagtgaggagggaagagtgggaaaggattgtagagttggtgccaagctagaggccacctctgctaccccagttctagagctcagtcctctggctctccccaggagagtccccaaggatgcgtgaagcctcctgacgtggccctctcctgcctggtggctcagccctcaggagaactgtgtcacctctaccacataaaagtgccgttcagctcatctaaagctcaccttcatgtccacagtttctaggttccctttaggacctggacatccacaaagacacccaggtgcttgcacagaggacctagaacactctgtacctgatagggcggagcctcacaggcccggggagggtctcagactcagcttgtgtgtggccctctcccccctgaatctgtctttccttggtcccccagggtcgtaatggaaaaacagggctgccaaatgccagcccagccagaaagaggcatcctcaggccttagggtctgacaggacaaaactgagtgagagcccttcgggggaggggccacgccagtctagagaagagagacgcaggtgagcagccacttacttatttccgatggtggttgccgagtggagactgcgaggaagaggcgccaccccgctgagactgggcttattccacgtcagggtgtctgcagagagacggaggggaaagggttacacaaggtagactgcacacaggtcgttccctggattcaagctagctcaggaaggtaggatctgtctcagtgagagaattccatccctggcttccctatagcctacggcaggccctctgactgttgtcatggtagctagattcctgtgttacccaggcggtttcgaccaggctagcaatagcgctccttcaggtacatcctgagcacctgccctgagccaggactgcactctgtgctgggggaggagtggtgggcacaccccgaactctccatgaaatacgttcaccgccataaccaccttaggctacagacattttggcaaactgttggaaaattctctcacgggaaactgcttctttggagtgccgactctgatctataggacaacatcgccatctcctctctcccagctgaagaggcctccggagatccacagttagtaatctttcccagccactcctgataccaccacctggtgaccggcccaagcagtccccgaaggcctcacggtttaccggcatccaatggtaccacagcagtcagaccaggatgcagcactccacacagtctgaccactgacgagtcaagagggactaatgctacccggatccagagaattccattctagaaagccttaatgacttattctcttataagcccgcagaccaattcagcccactcagccagcacagggcagagataacagccccaaacctagggacgatccagggttccccaccctggcccaccatgacaagaggaaagcacgaagtggtatgctccagctccctaagagccccacctcaccatacaacagcgccacccacggggccagccaagaggcagacccgctttgtcccatggctgctggggtgctaccaccctgctcaccaatatctagggtccacaggtcccccagcctgcagccactcatcccgccgtagatcaccagcttggacttcttattgtctttttcggtgtagaccacggcagtatgtgactcccggggtggtggtaggaccccgtaagtgatgggaatgtcccaggctaccactccagagcctggccgtaattccaggatatataagtcattcaggtacctgacgaggaaagatcagttacggcaagtctcgactcctcacgccagaggcttcgctggatggctatcagtgagtggcagcctccccagaacacaaaggggctagggctgtgggagctctgaagttcttctaccctagctcttgaggaaggggctgccagaagctccctaggatgagtccaactggaacaggggacacagggtgggtgaggctgcacagcagccccgagtccagacccagcagcaggcccccgccatgcacacaaagctgggtattatatgagggctccgcagagcaagagggggcgctggcttgggactacctccagacagagagtccttggccacgggccttggaaaatacccatcaggaaacttgtaggcagcggaggctgagaaggaacgcgagcagctctaagccgactccgagagctgggccagcccaaggcaaagtggcttccacctccagcttggccctcctcccacgaggcctgctcagggtcagtagcgattttggagcccgaaagctcctgagagggcatccggtgccgctctctcatttacaacccagcacgagaaagggacccggccacggggctctgctgcgcacattctttaggacaccatggagccctgtgcatgtgagagcacacccacccggggggttccagagaaaaggaccaagcctcaccttggaatgttgttctttgggtcctcgctatcattggccagacccccaaacaggtagcatttgttgcccacaagggagaagctgtgcccgagtcgaggacacggagggggcccgtttttgggcgtctttgctttgagtctcttccactcccaccggctcgcctgcaaaatcaagacctggagactgaaccgtgggatgagaaggccaccactagggacccggggcaacttgtggtggaggaggaaatggccgggggtgagcgaggtgccttgctggagcaagaaggtcctgggtgttggtccttgctgccttcttctgaggtgggccaagttcagagcagccttggcagactctcaagcgtcccttccacctcccgcttgcctcaaccctgaagccactaccgtcaggtcacatggggccaaggaggcagagtgagaacctggggctgctttacctggagttcgtagaggtcattgctgtatttcccatactccaccatcccaccaaacaccaggaggcgagtcccgtcacacacgaagccataggctgcacacccagggggaatgtcccccctcacggctgggatgaaccactggttggttgctggggaacagaaggaggcagaagtcagaacacccgggagcccccattcctctcattccccaaatgtgccagccgtcaagcttggtgagaggggctgagccagcaccatccctgcgggcgctctagcaactccagctgcgctacctgggccatcttccaaacccctcgacttcaggccagtgcaaaagagcctgtgaccaccctgcttctcgccaaggtcatcttaatgagcgggaagttactgtgcaagatccctcatcagctactgggaatctagccactgccttccttccctagcactcagtgatcagacatgaatttctccccaaaataccctcttggtgggcctgtgctcctcctccctggagcccacatttttgtcccttcatcacagggtcaggacagccagagcccagagcagcactttcaagtggccaaaacagtgaccgctgcaggctacgaagagccatggggatgagacccggcctctgctctgacctcccggacttcctctggtctcctaggtgatggtccaccagcatccctccctgcccctgctgccacacctatggtactccagaacattcttgcaagccagaggcagcagtctcagcagagctgtgacagaagcttctcaaaagctcatgagggtgaggcgaccaccaagaaagagggaaatcagaccttaggcactgctttgcttccacaggatggcacagcagccttcagctgggaccaggcccctccctcatgtcctcaaacttgactcccctcacacctggcaggccagggcttccccgaaaacctcctcctatgaggggtccctcagaggattcaccacactctttccagaaaccccaaactgggggccaggtgcaaccccgactctgtgcctctgagctggcctgggtgagatctcagcaagcagacggcagaaggaactgaggcccctccacatgactcaagacgcaagatgggtcccccaggacgtgacagggcatggggggattcctgtggggtgggaaggcttccacacagggatgctgtgatattgtgatataatacagactattcagtttggtggccaaaagtgttgtgagaccatagaagaggaaaaacagtgttttttttccatattcaggtgtgcacccagggccaggcggctgaccatggttgggaatgcatgccccactgcactctggtcccacccagtctcacactgtcacccccagggctcaatgcggaaccgtgtgcaaggctagcccttatccaaagcacaactcccagcctgggtagcacagggagaccccgtctctacaaataattttaaaacactggctcagtgtggtggcatacacttgtggtcctagctactcaggaggctgaggcgggaggactgcctgaccctcagagtttgaggctgcagtgagctgagaccgcaccactgcatcccggcctgggcaacagagcaagacctaacctcaaaacaaacaaacaaacaaaaaaaacagaaaaccccacacagcacaactgtaccaccaccgctcctcctgaggcgagagcacccccaccccgctctccagcacccactctgcgggtaggcttcgagcaggctgacagcctctgcagccattcagctgagtcactgggcctcggacatgccgagcactagagctcccctgccatttccctaaagcagagggacaacacctgtgccgcccgcatgtgcaagctcggatcctggccctctgcctctttctcattcccagtgcaaaaaccaccccagaaaagcaagagctgccaaggccaacagccttgcgcactggagagccgtcctgaccaatccctggagggagctccatgcaagctaccagggtaaacgcataacgagacctaaggctgcctgggccaactgctctcggtaggtaaaggggcagagcccaggagggcaagcgacacctgaggtcacagcgtaaaacagagacagagacaacagccccatcactgacttgaagcaaccgatctgtgccttccctagggtcccatgtccaggcagccaccctcactcccctgagcaccctcgtggtcaaagcccacagctatggggctgcgggtcagagtttgggacaaagctaaatggcacgtggggtcagtgggcagctttcctatcacacgctgatcagtgagccggtgggccaggccagaagcgccctgtgatatctttggggatcccgctcaccagatccttctacaggacccaagaggtgctgatctcattctagaacactccaggcagggcaggggccctccccacccccgtcaagagaggtctgtcagggagcacagctcctggtgtgacgacaaacctgcggctcctcatctcacccacgagtcctggttccgccccctgaaagcacacgagcaagctctcctcccttctcccagcttttcaatgtgacagctgctctcagtcacccctgaatcatctggggggtgtcatgtaacccaatccttgggcccctcatcctggaaatgctggctctcagctgggaggggaaggtggggaaaggaccctgcactagatgaagaccactccagctcccctctcctgagcaaggctgtgccccggcctctctgtgtttcatcagctcccccaaccacttcatgctctgcaagctccatccctggttgccactgtcccatcaccacctagagactggtgcccatgcagtgaggtggccggtcaagttcaacgagctgccttcctctctgttctacctgtcacattagagcatttcctgtgtggcatacgacgtgctgggaggcacagaggacaccgatcttgtgctcatactcccaatggggtaggaaggctgcatgcccccctcccacgatgagacaaacaccctagaagagctctgaccaagccgggcccttgggagcacagagcagtgcgactgctggagaggggaggacaggagtggaaagggcttctcagaagaggtgacgtttcagccgggccttgaagggtgaacaggatttcccgacaaatgaaactagcagggccaatcaggaagtgactgcaagagtctagtaagaggagaggagggcttggtgtggaaggggacacatttgatgcctgcccaacgcaatgaacaattagatacagggacagaggagagaatggaggcatttcaaaggtgatgggccccaaagacaggtggcagaacggcctctatgaaggtttgcactcccgcccaactccgccaccagctgggagggcgaccctggacctgtcacttcccctcttggaccccaatttcctcatctgcagaaacaaggaagtagttccactaggtattttccaaggctccctccagctccaagaacctatggacattacagagccaccgtagccaaagctctcgctcccccaccccccacacctggcagcactctgaatcctttggcttgccacatggaactaaaattccctaaggacaagcacagtagctaccctaagagctctcaaagcacacaccccctgaagctttcttatcctagcaacgggaaccccttccagatcagctctctccaaaggtacaaggctttttgaggactgatcccgcagaactgcaaggggcacaggcgtgagaatatgccctgatctcatcccaaacacaacaaaagaagacaagacaaaggtgacgaggccgggctggcgggagggggcagaaaccccggtgaggaagagggcttcaggtctgccagctgctctctcgtctgaggaattgccgatgacagtttccaaactgctaccctggaggatcccagagcttcattttaagcagccctttggaaggcaggctacccctctaatgcacaacctgtctttgcagactggtaatgaattcatgccaaagtggtcaattcattttaataaactaatgaatatgcagaggccccaggaagccaaggcagcagtggtggtggactctggagccgactgtaattaggcccctgccctactttctaaaattgcatttccctgccagggagcctgctccaggccttatgagaagaaagtcggtccacagagtggagaaggtgctgctcatggtgacggtgcctctataaacagccccaccactggagaagccttagcttactgagctaattcctgctactgcagctgcctgggctggcgcggggcaccaccaaccaccaagcgcccccgcccgggggctgctgagaaaggccctgctccctggaggcaacaggtgctgagagacctggaacgaaaaacggtcacagacaacccaccagcctttcaaagtcaacgtggtaggtggcgataatctccgagatgtggagaaaccagcactttctgccttggggggtggggaaggaagcggcacccaagagcccagctccagccttcccaactccctaaaccaactttctccctccaggcagctccagcttcccacccccagagcatcgaggcactggagctcagccaaagaacagcagcctctcaccgctcaggacacaaagcccactcagcgagggtttgtctgcagggccaccaccgaggccaggggatcgctagagcccccaggagagaacggccgcggagcaaggggttagtgctgggagccgtgcctgccactcaggactagggcatcccaaggccctcccccagccgcctgcagggggcttttccctcacccagactcttccagctcttgcctgggaccgaactcaccctgaccctgccttctgggcaaggccagggtcctgtgggccaacgggcagtcagtaggcaacttgggaactgacccttgtgctaggggcacaaaacgggccaagtagccaccaagaaaaaggatgccacaaagctgtcgtggacagcagcaggctttctgccctagagactaagcaaggctactaggcagaggcaacaacaaacggcccccacgaaggccgtggtgcatcagccatacctgaagagagaggttcctccccttcccaactaacgggctttgggttttgcagggaggcagaagagcgggtggggtaaccccctggatccgcagaagcggggagacacacgactacgcaggccgctgaggggtaactggaattcagcttgtaaaccagaaggcaccagattaggagaaggggcgacttggaaagaaatgctgcagaagtaaacgtggaaagggagaggcggccctgccgccggcccgtcctaggggtccccaaggctccggcattacccgggtcggcggatgttaaactctgcgtcctaagagcgcttcccttccctccctttttcgagagacagagaacgaatctgtaatctagaaatggtcatttctccagaatgggcactcgagatgagggagagctgagcaggcgcaggagaagggagggagggagggaggggagctctgcctgcgccaaggggacacatccgcccgccccagccccagccccagcccgctgggtaacggtgtgggtctgaagtcaccaccgctggcgacagcccctctccctcaccagtcggactaggggctttcttttaactaacgaaaaccaatcctcaaacacgggagagacaagggaacggggagaagatcagagaaaagcactgaagcccggcacagcaaaggggaggggcaagccgatcagtggggagggagggggaggaggggagaagggggagggggacggggagaggggagaaggacgggtaagggaggaggggagagagagagggaagggtagagggtgagggaggagatggagggagggaggagagggagggagcagatggagggagggaggaaagaggagggagagggaggagatggagggagggaaagagccgaagacccagcgggctttgcactcacccgtgttgtacacgtgcagttcgtccactattccctcgttgccgccgccaaacaccacgatgagctccttgatggccacggcgcggtggccgtggcggggccgtggcaccggacccgaccagcccaccactcgcttccagcggggctgcagaagcaccgctggcaagttggcgggcgacacggccgaagccatagttccgggaaagggtgcggtggggagaagtcaacaagcgggaagggagcccctcaattcctttcacacaccccctttcgtctaaggcagctctcacggagaagcggtttctcacacagcggtagacgactccatggaggccgccatcttaactgccctccttccctttggctcttccctttcttctcgctcaccccgtctccgcaagagccgcccgaaactgtcgagcgcctaggctcaagaagctggaggccgctgagtcccgtcgccccgactacttgtccgggcgctcccgcttacaagctcgggcgggaggccctgggagccgccatcttgagccgcctctctctcctcccttcctcagtcgtagccctcccccgccggaaatggcggagccccggcccggttcccacacccccaagtccccagcactggccggcttccggggcgggtggaaaggagccacaagcgccgcggtcgtcgcagccccgccggcgctcagaccacaattgtgggagccgccatcttgagaccgtcccgcttccccgcccagcgccttagtgcagccgccgctcccgaaacagcctcgacacacctaacgaatggaggcgggccggaggccggtggaaccagctcgagctctcgagggccgtttgggggctcgcgccgtacggcttgtgaagtctcgcgcctctccccttagtccgcctctgctgctcaggctgcgcctgccgccgtgggagccgccatcttgagactagctccccgttcccccctattctcttcctcctaggtcagttcttccactgcacaccaaactcaaggcggtgtccgatcctcacttcccgccttatgactccttcccacaggagccgcttcaaagagctagagttaggccccgaagcggcaactgtacggcagaagaagcggtaacggcagggcgctcatgcctcctccctgggagccgccatcttgtgtgaagaagtaacaactaaacatggcggcagcggcgccggcggtcgggcgaggaggcggagccgggtgacgtcaccgcttccccccactcgccctcgcaccgcttcgcccctgggcccaagcctcttaaaggacccctgcgctgcctcgcggcgggggtgggggtcggcgctgccgcgcgctgggctaaagctcgagtcgcgctcagatcaggtgcaggcgcaggcgcgccccgccccacggcccccccaccgggcgagcctccacgcctccgccctgggagccgccatcttgccacttcccctcgcccggccgtccgcgggcgtcaatagcgactttcagcacaaaacaaagatggcggcggcggcatctcggaaatgcccggatgagactgctaacccctccgacgcgctcggccccgcccccttgggaacggtctctcgggttgataagggacgcacgcccgaagaactgcctttaaccagcactggggacagcggcacgcaggtggccggggttggcgaacagccactgcagccgcgcctgcggccgggaagcgagcattttcgcgccctgcacacccagcagccgcaggaggcggcccgaggcgcgccgcgggggagccgggggcggggcgacagtgggaggcgacgcagccgagcgccggcgcccgggggtggagcctccgcccgctcccaggctcccaggctgcggggcccgccctcgggcgccaccgcctccgcccgcgccgcagcaaaatgagccgggccgcgcgccccagaccgccgcgcgctcggccgcccccactgccgagaggcccgcagtcgggccggtggcgcacgagccgggcgggcgaccgcgggaggcgtccgcgtcatctcgcgtcacctcgccccgcccgcttcccaggcttcgagtcccgccctgcgcgcaggcgcaccggcgctgctcggatcctcccttttcggagatttgaatttcccccagcgaggcgagtgaggcgaaatacccgtatggtgatagctggccttttcgcgccaatactgtaagtgctcaccgcagccctgggaggtgggtcccggcctcgcccccacgtttcgcctcctctaggaggccgcccgggcgcggcggcggcggcggcggcggcggcatccgccctgccacgcgcaggccgcagcgcggggacccaagctgctgcccgggagcggcagtcgccagtagaaatggacagaccggtcctgtcagagcctgtggcttttgttgtaaacgtctagaagttcagttaaattacaagatctaccagatctaccggcgggcagaattattactttgaagttactgaagttatgcgtcctgctggaagaccttgtaatttaatgcgttagtaaagaagcacacgtcaccctctcacacattttcaacaatatttttaaagtcgcctctcaacatattacatgtattttgtaatcgtctgtgttttagttcatgcagttggaagtatccatttgagaagggacaaagagaagaattcttgcctgtctgtgccaccacctgctctttgtgaccttggctagttacctcacatatgtccccaagtcccccacccatggtaaataagaaaactaaggcctgatgcgttggctcatgcctgtaatcccaacactttggaaggctgaggtgggaggattgcttgagcctagccggggcaacatagcgagacccggaggcatggtggcacacgcctgtggtcccaggtacttggaacgctgaggtgggaggatggcttgagccagggagttcagggctgcagtgagctgagatcgcgccactgctccagcctgggcgacagagcaagaccctgtctcaaaaacacacacacacacacacacacacacaaaagcagctgctggtttccaagggccttgcctggaatcagtccagaagctaaattaatgttaattgatattcctttatccacagaaagacagcaagaaaggtcatgcggagcgggggacataactaaccataaatgctaaaggcctggaggtgacagtgcctgctgtttaaacgcgtgcgggagagtctggggcctttagccaggagattgtcaggcttcccagggcttccctgaaagaccccagacccaggggccagtgctgttgaggtgttggctttcccatgccaggcgctgggggaagctgtgacgagatttgagtgtcacataataaggatcatggcaattcaaaggtacagggaagctaggctataaggtaaccagctcggttttcctgggggtcttggacaggtgctttgattacatggtcactgtcagcccgtacccccggtcagatagactgaacccctgcagccggaaagaggagttgctttccatgcccttcctggagttcttcctcgatcaagttgacagtgtttgactcttgttccagctctccgccctgcttgctggcaggcaggagggtcagactagcatgggtgccatggggccctaggtgggtgcagggaaggacctgtagacgccatgcggggcctcagctggtgtctcagctggagtcaggagctgaacggggaagtgcctgagaggaaatgacagctgagtcaagggcaatggccaggcgaagtgggcaaagggcttccaggacagagctgggcctgaggagctcacagggctggatggggatggcactttaagtctggccaagactttgggacatgatccaggacatggaatgggaagctggtcatggaagggtggaaagccagggcagacatgatcccatccagggctgctcaaagatgctggggctgcggtgtgcacacccctggacccagaggcttttttgactgggaggacggggcaggaggagttcgggtgccccatgctgagatggcaggcttgtgtgaagcaaggacgtatggagtgatagtgaggactgtggttcctgtgtggcaacaccatgcttcagagggcaatggggcacccacatgccaagcctggtggccctcctcagcaacggaactccaaggcaagaaggctgagaatgaggcccaggaggatgcggtgggccccaggacctgcttgagaagtgaaatagcaaacaggactggtaaaagggagcagaggtgctggctttgttctttaatataattgaattgaaattgagcagggcttcactgggcatctgaggaagagcaaggaatcagaccctgtcccacccatttggggcctaaattgcagtagggcagatggacattgcacctcaaaaataaacagtgcttgtcacatgaatcatttgcaaatattttctcctatattgtctcttcattgttgattgcttctgtgctgtgcaaaagctttttactttaatatactcccatttgtctgtttttgtttttgttgcctgtgattttggggtcttagccataaaatctttcctggagcatttccccattttcttctagtagttttattttatttattttattatttgtatttatttatttatttattttttgagacacagtctcactctgaaacccaggctggagtgcagtggcacaatcttggctcactgcaaccttagcctcctgggatcaagcgattctcctgccacaccctcacaagtagctgggattacaggcgcatgccaccaccctggctaatttttatacttttagtagagatggggtttcaccatgttggacaggctgggctggaactcctgacctcaggtgatctgcccgcctcagcctcccagtgtgctgggattacaggtgtgagccaccacacccagcctttttttttttttttttttttttttttttttaaagacagagtcttgctctgtcgccccaggctggagtgcagtggtgtgatcttggctcactgcaacctcctcctcttgggttcaagcatttctcctgccccagccccctgagtaactgggattacagatgtgcgccaccacgcccggctactttttgtatttttagtagagacggggttgcactgtgttggccaggctggtctagaactcctgaccttaagtgatctgcccgcctcaacctcccagtgtgctgggattacaggtgtgagccaccgcgctggcctcttctagtagctttatagtttcaggtcttacttttaagtctttaatccatgttgagttgattactgtgtgtggtgagagataggggcctagttttcattcttcttcacatacttatccaattttcccagtgccatttattgaagagaccatcctttccccaatgtaggttcttcgtgcctttgtactacttataatagctaagatatggaagcaatctaagtgtccaccagtggattgatatgtaaagaaaatgtggtatagatacatgatggaatattattgagccatttaaaaataaactgttggcgggcgcggtgtttcaagcctgtaatcccagtactttgggaggccaagacggccagatcacctgagatcaggagttcgagaccagcctggccaacatggcgaaaccccatctctaccaaaaatacaagaattagccaggtgtggtggcaggcgcctataatcccagctacttgggaggctgaggcaggagaattgcttgaacctgggagacgcaggctgtggtgagccgagattgtgccactgcactccagcctgggtgacagagcgagaccctgtctcaaaaaaaaccaaaaccaactataaaaaataaaaaaaataaaaaactattggctgggtgcagtaactcacgcctgtaatcccagcactttgggaggccaaggtgagagggtcgcttgagcctaggagtttgagaccagtctgggcaacatagcaagaccctgtctttcaaaaaaaatttaaaaatttgccaggcatggtaacatgcctgtggtcccatttacctgggaggctgaagtgagaggaccacttgagcctgggaggtggaggctgcagtgagctgcaatcacaccactgcactcagcctgggagacagaacgagaccctgtctcaaagaaataaacaaactaataagataaatcttgttatttgtggcaacatggatgagcctagaggacgttatgttaagtgaaataagccaggaacagaaagataaatattgtatgtgttaattcttatgtaaaatatttaaaaaatcaagctcatggaaatagaagcatagtgggtattagaagctggaaagattagagagtagggaaagattcggaggagtcggataacaaatacaaaatgccagcttcatagcatgaatggatcctgctgttctgcactgtagggtgagcactgttaactacaatttcttgtgtattttcaaaagactataagaaaggatttggaatgttcccaacacaaagaaatgataaatgttccaggtgatggatatgctaattaccttgtttgatcattatacattatatacatgtatcaaaatgtcactctatatgctattaaaaataataaaataggctgggcacagtggttcacgcctgtaatcccggcactttgggaggctgagggggacagatcagttgaggtcaggagttcaataccaccccagccgatatggcaaaatcccatctctactaaaatacaaaaattagccgggcgtgatggcccgcctgtacttccagctactcgggaggctgaggcaggagaatcgcttgaacccgggaggcggaggttgcagtgagccgagatcctgccactgtaccccagcctgccccacagagcgagactctgtcccaaaaaataaataaaataggccaggtgtggtggctcacgcctgtcatcccagcactttgggaggccgaggcgggcggatcacttgaggtcaggagttggagaccagcctggccaacatggtgaaaccctgtctctactaaaaaaaatacaaaaaattagctgtgcatggtggcgggcgcctgtaatcccagctactcaggaggctgaggcaggagaatctcttgaaaacgggaggcagaggttgcagtgaggcaagatcacaccactccagcctggacaacagtgcagacagtgcaagattccgtctcaataaaaaaataaaataggccaggcacggtggctcatgcctgtaatcccagcactttgggaggccgaagcaggtagatcacgaggtcaggagttgaagaccagcctgaccaagatggtgaaaccccgtctctactaaaaatacaaaaattagccgggctaattttagttgtaatcccagctactcaggaggctgaggcaggagaatcactcaaaccccggagggagaggttgtactgagccgagaccacgccactgcactccagcctgggcgacagagcaagagtctgtctcaaaaaaacaaaataaaatgaagtaataataaaatagtgctaagtggtctgcatatacagatactttttttttttttgagacggagtctcattctgtcgcccaggctggagtgcagtggcacgatcttggctcactgcaacctccgcctcccaggtttgagcgattctcctgcctcagcctcccaagtagctggaactacaggcatgagccatcacgcctggctaatttttgtattttagtagagatggggtttcaccatattggccagggtggtcttgaactcttgacctcaactgatccacccacctcagccacccagagtgctgggattacagacgtgagccaccacgcctggccactttttttttttttttttttttttttgggggggagagggagtttcgctcttgttgcccaggctggagtgcagtggcgtgatctcggctcactgcaacctccgcctcccgggctcaagcgattctcctgcctcagcctcccgagtagctgggattataggcatgtgccaccacacctggctaattttttgttttgttttgttttgttttgttttgttttgttttgttttgtttttctgagatgaagtctcactctgccgcccaggctggagtgcaatggcacgatcttggctcactgcaacctctgcctcctgggttcaagcaattctcccgtctcagcctcccaagtagctgggattacaggcgtgcgccaccacgcctggttaatttttttgtatttttgtagagacagggtttcaccatgttggccagactggtctggaactcctgacctcaagtgatccacccgcctctgcctcccaaagtgttgggattataggcgtgagccaccgtgcccggcctaatttttttgtatttttggtagagacggggtttcaccacattggctaggctggtctcaaactcctgacctcagatgatccacctgcctcggcctcccaaagtgctaggattataggtgtgagccactgcgcctagcttttttttttttagagatagggtcttgctctgtggcccatagctcactgcagcctccatctcctgggctcaagtgatcttcctgcctcagcctcctgaggagctgggactataggtgcaccaccatgcctggctaatttttattttattttttaaatttaattttatgtattttgtgtagagacagggtctcactttgttgcccaggctggtctcaaactcctggactcaagcagtcctctcaccttggccttccaaattgctgggattacagatgtgagccaccatgcccagctacatatgctttttgatgtataacagggtaatgtccagataaacccatcataagtcgaaaatataggaactggactttcaacttaagaggggtttagctgggtgcagtggctcactcctgtaatctcaggactttgggaggccaaggcaggaggatcacttgaggccaagagttcgagaccaggctgggcaacatggtgagaccctgtctctacaatttttttttttttttttttttagatggagtcgcgctctgtcgcccaggttggagtgcagtggcgcgatctcagctcactgcaagctccgcctccagggttcacgccattctcctgcctcagcctcccgagtagctgggacaacaggcgcccaccaccacgcctggctattttttgtattgttttagtagagacggggtttcaccgtgttagccaggatgctctcgatctcctgacctcgtgatccacccgccttggcctcccaaagtgctgggattacaggcatgagccaccatgcctggcccaaaatttttttaacaaaaattagcagggcaggccgggcgctgtggtagggaggctgaggtaggagaatggcgtgaacccgggagatggagcttgcagtgagccaagatcgcaccactgcactccagcctgggcaacagagcaagactccgtctcaaaaaaaaaaaaaaaaattagcagggcaaggtggtggtatatccctggtcccaactacttgggaggctgaggcaggaggatagcttgggcccaggaggtggaggctgcagtgagctgtgattgtgccactgcaccccagcctgggcaacagagcaagacccccgtgtctaaataaaaatacccaggccatggcagcagaaagcaaggaagaagccacgtggaagccctcctggcgcttcttccagggaggtgagcagagagcacctggggccaggaggcggcatgcctgggtttctgctcctcctcactgtaactttcagccaagtcaaactgctagagtttcagtttctttatctgtgaaatgccggggctggcacagatggtttctaagatccctcccaggcctggaacttctaagcgattaggtcaaaggtgagctaaccgggctgggcacagtggctcatacctgtgaatcccagcactttgggaggctgaggcgggtggatcacttgaggtcaggagttcaagaccagcctggccaacgtggtgaaaccccaactctactaaaaatagaaaagttagccgggcatggtggtacacgcctctaatcaccgctactagggaggctgaggcaggagaatcacctgaacctgggaggcggaggttgcagtgagccaagattgtgccactgcactctagcctgggcaacagagtgagactccgtctcaaaaaaaaaaaaaaaggtgcacaaaccgaggcccaagacagttaaggtgcaagatcacatggttagtaagtgggagagccaaggtttgaacagtctggcatcagctgaccaggaactggagcccacccttctctctccctgagcccgcctacccgcccaccctcttgagtgcgaaatttattaatatggaagggagaagagctttaatgattggagtcattttcagagcattaaagctcttctcccttccatattaatgtatttctcagctactagggctcacttacagcaccagtggccccaaagcagttgacagtcagtggtaattaaattgtctctctggttctgtgactgaaggagacagaaggctttatggtggcctgaggaaagaaggtgatttggggcttggcacttcaggagagggcaggcgagtgagccagggaagctggcctgggaagcctgcgggtcacccccttgcctcccggcctggtgcttgagtggcagacggtgaatcctcctcctcctccatcccccaccttgtgtcagaggccagagctcggactccatctaatggtctctagttcagctgggtatttggtgaaaagggctttggggctggagacgtccacttttataacacactgacatgggaaggcgcattctgagttgtaatgacagagctagacaggtcttgtctgtagatgcagtggctttaaggaaactaggacgatgggcaggattttcctaggtgccaggagaaaggggtgatagaggattctagaggcttgagagagtcagtgtgcagcggtttcactctgatttgcttctccagtgaagatggttggtagctcctgaggccgggggtcaggaacatggaggcggtgctggggacggtttgttttctaaccacactccttttgtaaccacaaaggaaaaaggcagaacgttcctccgctggcgccagccaatcagcaggactcctgccttccttcggggcaaggtcgcagcatctgcctcggaaatcacgaaatcacggggcttctttctgctggctcagccgggaggcccagagtgttctgcagaggctgcgtattgaaggctgctctctgaagctccctgccccaggtcacgccgccggttccagatgaatccagagtgggggcaggccttcgtgcacgtggccgtggccggtggcctctgtgccgtggctgtgttcacgggcattttcgacagtgtttccgtgcaagtgggctatgagcactacgccgaggcgcccgtggccggcctccctgccttcctggccatgccgttcaactcactcgtgaacatggcctacacgctgctggggctgtcgtggctgcacaggggcggcgcgatggggctgggtccccgctacctgaaggacgtgttcgcagccatggccctgctctatggccccgtgcagtggctgcgcctgtggacgcagtggcgccgtgccgcggtgctggaccagtggctcacactgcccatctttgcatggcccgtggcctggtgcctctacctagaccgcggctggcggccctggctgttcctctctcttgagtgcgtctccctggccagttatggcctcgctctgctgcatccccagggcttcgaggtcgcactgggtgctcacgtggtggccgctgtggggcaggcgctgcgcacccacaggcactatggcagcaccacctcggctacctacttagctttgggggtgctctcttgcctgggctttgtggtcctcaagctgtgtgaccatcagctcgcacggtggcgtctcttccagtgcctcacaggccacttctggtccaaggtctgtgacgtgctccagttccactttgcgtttttgtttctgacgcatttcaacactcacccaagattccatccctctggcgggaagacgcgttgaacccagggaagaacctgctgaaaaccgatgacccccagcattgaaatggactctgagatggcagcgtggtgccagtgtcagacatcctgtgtgtgatgatatgcactgatcacacaagactgccctttcctgagaagctgcgggcttcggtgtggaggggtggagtgctgtgatctcgacaacttactttcaaagacataaagcacagatctccgcacaggggatgtgtgtgttcctgatgtaatttgcataacttttctgtagtttgaaatgtttccaaataaatattggcaaggggagtggaaatgacaccaagaagcccctcatgctcatggttggacagagagcgatcgtctggagtatctttggggtgtcagctctgggtgtggactggcagcagtgaggcaggccagtcagtggggtaccagtgagtgtccttagaggcggctggattcagggagactgagtcacactaaatacgtgcccagcagactgatggggaaatcactcaattatccccatgacatctgtgactgttaactgtaggcaggtcacgtgagagccacatcacctcagatcgtctgtggaaccaggcagtgtgcatccagatgaggaaacacacaaatgtcaaaagttgaactctcaacagaaagttgctttgtgggtctcccctcagagccagggtgtggcttagatgcccttagtggctacagtctgagcagtccccacctgcccgtcacccaggtccttgcgaaccagtctgctgacagtatcgtcaggcactgtgctggaggcggcacgtgcttctcatgcaggcaacagtttttgagccctcgagcccaaggcccagactctctagtttgtggtcaggatgctgggtcattcttagccgcagccagagaggcactgaggactccgtgccaccctctctactcccgggacagtccttcctgccggtcactatgttacttagaggcctgcctcacctcctttcatctgaaggcatctggtctgtaaaggggacttccttttttcgagacagagtcttgctctgttgcccaggctggagtgcaatggtgtgatcttggctcactgcaacctctgcctcccgggttcaagcgattctcctgcctcagctgcctgagtagctgggattacaggcacccaccaccacgcccggctaatttttgtatttttagtagagacggggtttcatcatgttggccaggctagtctctaactcctgacctcaggtgatccgcccgcttcggcctcccagtgctgggattacaggcatgagctcccgcgcccggcctgtaaaggggactcctgaagacaggtaatgtcatttaactcaggggctcttcatcccagactccatagtcttgtccctggagccttaagtactaaggagggtctgctttaagcccacaaattaaatggagaagtgaccagctccaaaggtgagggcagaggagagaggatgccctgtccctgccaaatggcatctcagcatgggccacccatgtgcacctgctcagtgccctcgaggttggcattcggcccacgactgtgatgactgagatgtttctggaactgggcacctgggctggatgttctgtcctggctggctgagcacattgccaccaggtaaggacctggggcaaatggcaggacccgacccagggcttggggcctgggggtggggcacgtggttggcaggggagagcaaggacagcacctgcttgggaaacagcctggttccatttgaggtcgtctcgaaagcaccatgtgccctagaagagggaagaggctgcacacatcaccagagaggccacccttacttcacagaggctggagggagggcgaaaagaaggcgggcttccatgcgggctcagagacagggtgggggcaggctcttcatccagcagtgggggatccccttttgtgatttctctgtgagtagctgtttccctcattgacagaggactgctgggacttcatgccacacctcgcagcaacaagcactcatcacgattttactttttcttcctaccaatacctgtgtaataaacagccctgcgagcctcctgggtcaggcggggtcccacgggaaacaggtggtgtgcctagattggggtgattcagggcggttttgtgggacacctggaagagtggaccccacccaaaggagaggcttatgtggaggggacacctccagaggggcagggactgcaggaagcctggctccgctccctccctctcctgccagagttgccagattatacgccaggcgatgaacaatggttttgcacaagcgtgtctcaaatgttgcatgagacatttctcctactaaaaaagtattgtttacctgaaattcagatttcactgggtgttctgattgttatttgctaaatccaacaaccacgtcctgagccaacacaagcagagccagaagccccggaacctgcgcaaggcagagcaggtggcaaagaaggctccaggcaggccccggcctggaacctgcactccccaggccctttttgaaattagtgtttctccaagtatggccagttgccattagtcacacagcttcctgcatcccttcctgcccaggcgaaccccccttctggggccgggacctcagagtgcctcagccctggcccggggtttgcggattccaccaacccctgagccactggaggaaggaggctggcggctgtgcctccctccagctctgcagtccacggaggagctcggcctcgcccagggggattggctgtcagggccgccgttgccgttactggtcttggtctcagtctcgctgctccactgcgtccccagcacagctggggagccaatggttgccagatggggcctctccccgacctttgacctaacggtttagaggttccaggcctgggagggatcttagaaaccatctgtgccagccccggcatttcacagataaagaaactgaaactctagcagtttgacttggctgaaagttacagtgaggaggagcagaaacccaggcatgccgcctcctggccccaggtgctctctgctcacctccctggaagaagcgccaggagggcttccacgtggcttcttccttgctttctgctgccatggcctgggtattttctccccacataaaatagttttagggcctggcgctctggctcacgcctgtaatcccagcactttgggaggccaaggcgggtggattatctgaggtcaggagtccgagagcagcctggccaatatagtgaaaccctgtctctactaaaaatacaaaaaattaaccaggcatggtggtgggtgcctataatcccagctactcgggaggctgaggcaggagaatcgcttgaacctgggaggcagaggttgcagtgagccgagatcacgccactgcactccagcctgggcaacaagagcgaaactctgtctcaaaaacaaacaaacacacacacacacaaaaatagttttaagcccggtgcagtggctcacgcctgtaatcccagcactttgggaggctgaggcgggtggatcacctgaagtcatgagttcaagaccagcctggcgaacatgacaaaaccccatctctactaaaaatacaaaaattagctgggcatggtggtgggagcctgtaatcccagctacttgggaggctgaggcaggagaatcgcttaaatccgggaggtggaggttgcagtgagctgagatcgtgccattgcaccccagcctgggcaacagagtgagactccatctcaaaaacaacaacaaaaatagttttaggccaggcgcagtggctgatgcctgcaatcccagcactttgggaggctgagaaggaagaattgcttgacctcaggagtttaagaccaccctggacaacgtagggagaccccatctctaccaaaaataaaaaaaattagctgggcttgatggtgtgtatttgtagtctcagctactcaggaggctgaggtggggaggatcacttgaacccaggagatccaggctgcagtgacacagttgtaataagatggcatcactgcactccagcctgggtgacagagcaagaccccatctcaaaaaaacaaaaaaattacagcatagggcacacactatcatgcattcgcttttctgggccccattttggcttggtgacgtgccaaggtctgctagaaactgcacacactggcccggagcaggcccttctccagttaggtctcaggagtgggattgtagggctgaagggaacttcagtttcaaatccctggagtgcttttcccagtgacgttcttgattcacatctctagcagcaatgtgagaggcttctccgccccccaccagcaaatgtcagggtgggtgcattttcatggtgtgccaatctgatgagggtgacatgagatttcattgtgactaactcagaccccttcccctctctcaccgaccccccgccaaaagtagtgtgtgtgcatttttgagacagggtctccctgtgtcccccaggctggagtgcagtggcgcaatcatggttcactgcagccttcaactcccaggctcaagagatcgtcccacctcagcctcccaagtaactgggactatgggcgcaggccaccatccctggctaattcttttgttttgtttttgtttttgtttttttgagatggagttttgctcttgttgcccaggctggagcgcaatggcgcaatcttggctcactgcaacctctgcctcctgggttcaagcgattctcctgtgtcagcctcccgagtagctgggataacaggcatgcgccaccatgtctgactaatttctgtatttgtagcagatacggggtttctccatgttggtcaggctggtcttaaactcccgacctcaggtgatctcacctcggcctcctaaagtgctgggattacaggtgtgagccactgcacccagcctccctggctaattcttaaaaaaaaaaaaaaaaaaaagaaaatttttttttaaaattactatgaaatgtattatttgttattaagttacaaattttttttttttttttttgagacggagtctcgctctgtcgcccaggctggagtgcaatggcgcgatcttggctcactgcaacttccgcctcccaggttcaagcaattctcctgcctcagcttcccaagtagctgggattacagctaaaattagcccggctaatttttttgtatttttagtagagatggggtttcaccatgctggccaggctggtctcgaactgacctcatgatccacccgcctcggcctcccaaagtgctgggattataggcatgagccaccgcgcctggccagagcccagcctaattcttacattttttttctagagatggggtctctctgtgttgcccaggaccacactcctgccttgccctcaaagtgctgggatgacaggcataagccactgtacccaacctcctcattttgtcctcggactcctgggctaaagcaatcctcccaccttggcatcccaaagtgttgggattacaggtgtgaaccactacacccagcctattgtttgtcttctgaagatttatgtggtcatgcatgtctgtctttttcttcgtagctttcggggttggtcttccttaaagcagttttctgagtgtctaggtaacacttgtctgtacctcagctaactttgttaaatctcagcatcgcctgtagctgcttcagatgtttttattataacattttcattataaaattattagatagttaaaaattatgtttataaagaaaacaatgcggctgtcacattgctgacatgacggtttacgtaactatagtgaagtagtgcacttggtgagggagggaaatgccagcacgcttgggcaaggtgcctcattgcagcctgggagaacgaaggtgggtgaggcatttccctcccacgccgaaggcctccgggaatagaaataccgggtaaatatccactggccagttcgtatcctccagtgggtcatcatgtgattggggagcgcttcttcccattcaaaggggatctttggggacccgggtttatggaaccctctctgcgttggtcctgggggctgcttctctgttcagtgaccctgtgactggagggcactgccttggcccggcgcgtggccatcttgttcctagggtcactggagcctgattgctgtggtggcacgccaggtccttcaaagctttcatgtttttattttattattatttcttttctttctttctttctttctttctttctttttttttttttttgagactgagtctcactctgtcgcccaggctggagtgcaatggcgcagtctcagctcactgcaacctccgcctcccatgttcaagcgattctcctgcctcagcctcctgagtagctgggatgacaggcatgagccaccacgcctgccctattttattattattttaaattttattttagtttcgggggtacatgtgcaggttggttccatagacaaattgcatgttgtgtgggttttgtgtacagattatttcatcacccaggtattaaatagtaagcctcatacccaataggtgatttgtttctgtttttctagcctttccttccattgccggcctttcactttgatctttgctgtctgtttctctttggaaccgctgacttctggttttgctcttgcctcttctcggccccacttgacctccactggggcctgggctagcttgtgtgtgccgccaccatctcggccagctcaggtctgtttctttggaagattctgtgcccctcccatgcctctcctgcatgtggcccatgcacagtagtgtgtggctgccctcgcccttgtgtgtgggttttttgttgtgttgttgttgttttgttttgttttgttttgtttttgagatggagtcttgctctgtcacccaggctggagtgcagcggcacaatctcggctcaccgcaacctcctcctcccaggttcaagtgattctcctgcctctgcctcctgagtagctgggattacaggcgtgcaccaccatgcccggctaatttttgtatccttagtagagatgaggtttcagcatgttggccaggctcgtctcgaacccctgaactcagctgacccacccacctcggcctaccacagtgctgggattacaggcctgaggccctgctcccagcctccttgtgtttctctacgtgcacattgtgcagagcctccccacccggctggacgtgaccgatggcacacgtccccagtctcacgctcctgtgcacgcctcttggtgcctatgtgtgagagcttcgcatttcaactcgagtagaatttgccaaatcccttgccagattgggggcagagctcctcaacagcacttgatgtggtcaccggggtgatctgctgatctgacaggagtgagtgacagtttcattttgtccttgtttgcctttttcagcttaaaatcgaggttgcctcaaaacattaaacatagaattcccatagggtccagcagttccactgctgggtataggcacaaaggagttgaaagcaggagcttgaagggatgcaattcacagcacccaagaggtgagagctggccaagtgtccatggatgaatacatagataaacacaatctgctttatccacacaatggaatattattcagccatgaaaaggaagggaatccttacgcaggctaccacatggatgaacctggaggacatcataattagtgaaagaagccaggacagaaagtacctgattccacttttgggagggacctggtgtcgtcagactcagagacacaccacaggatgatggtcgccagggtggggagagtggtggggagttagtcttttttttttttttagacggagtctcgctctgtcgcccaggctggagtgcagtggtgcaatctcggctcaccgcaacttccacctcccgggttcacaccattctcctgcctcagcctcccgagtagtgggactacaggcgcccaccaccacgcccagctaattttttttgtatttttagtacaggtggggttcaccatgttagccaggatggtctggatctcctgacctcgtgaaccacccgcctcggcctcccaaagtgccaggatgacaggtgtgagccaccgcgcctaacctggagttagtcttttttttctttctttctttttctctttctttctttccttccttcttttgtcctttcctttctttcttctttctcttctttcttctttcttctttttctttccttccttccttcttttctttctttctttctttcctttctttcttctttctttgcttccttccttttcttttctttctttcttttcttccttcttttcttctttctttgtttttttctttctcttctttctttccctttcttctttctttccttcctttcttctttctttccttccttcttttccttctttcttttctttccttccttcctttccttctttcttttctttctttcctttcttttcttctttctttcttctttctttctttgcttccttccttcttttcttttctttctttctttcttctttctttcctttcttttcttctttctttctttctttcttctttttttctttctttctttctttttttttttcagagactcactctgtcacccaggctggagtgcaatggttagtgcgatctcagctcagtgcaacctctgcctccccggttcaagcgattctcctgcctcagcctccagagtaactgggactacaggtatgcaccactgtgcccagctaattttttatattttattttattttattttattttatttattttattttattttattttatttttgagatggagttttgctcttgtcgcccaggctggagtgcaatgcacgctattggctcactgcaacctccacctcccaggttcaggtgattctcctgcctccgcctcccgattagctgggactacaggcctgcaccaccatgcccggctaattttgtatttttagcagagacagggtttcaccacgttggccaggctggtctcaaactactgacgtcaagtgatccacccccactcggcctcccaaagtgttgagattacaggcgtgagccaccgcgcctggcctctacttatttatttcttgtagagatggagtctcaccatgttgcccaggctggtcttgaacccctgggctccagtgatcctcctgcctcagcctccccaattgctgggatggcacacatgagccacggggcccagcctcctcattttgtccttaatatctgcttgtaaccacctcaactcagaatacctaccaaaacttagtttggatgtgtttcccaggttgcaatcctcaaatttggcccaaatacactctccttgtattaattttacctcagtgtgttcctttaggtcgacctcataaaatctggtatgggtaattctgcagagccactccctcaccaccgctgtctcgggccatgctggctagcagcgatcgagggcttactgtggacgaaagtcagtttagagaagttgaatggccaagttcacagcagtaggaagtggctgcggtgggctttgccctggggctttggactttgcctggagctgctcctcactcattccaggaagctcttgcaccatgaccgctgtgacttgggatccaaatttcaattgaaaatatatttttttcaatttttttcatttttaaaatttttttagaaactgagtctggctctgtcacccaggctggagtgcagtggtaggatcacagctcactgcagcctcaacctcctgggcttaagtgatcctcccatcccagcctcctgggtagctaggagtataggtgctcaccatcatgctcagctaatttttcttcttttttctttcctttttctttctttctttttttttttttttttttgtagaggcagggtcttgctatgttgtccagttgtcctgggctcaagccatcctcccacctcagcctcccgagttgccaagattacaggccactgtgcctggcccgatgttttttattggggtaaaatacataataacataaaatgtaccatgttaaccagttttgtggttagttagttcagtggtgttacctacattcgtaatatggtgcaaccaacatcatcgtccatctccggaactcttttcatccttctaaactgaaactctatccccattaaatgctaactccccagtccccctcctgcagcccctggaaaccacccttcaggtgtgccacaggtcaaatgtggacacagggaggccactgcacccggccctcagcatctgaacttccacccctgctgcttgaagctctccatctcgccgtccagacaggctgccttccccgctggctctgtataggatgcaaccccaacaggtggagaagctcagcccgcagcacccacacggagccgagatgtgcaggttgccgagccggccccgctgggggggcttctgctgggacagacataacaaacagcagatgtagccccctgccgaggacttcagattgggaattgtcagagattccggagattgtcagattggatggaaacccccacttccagcatatgctgtttactagagacacacctcaaacatatgtccatggaaatattacatgtgaaagaatgaatgctaggcagttactaccaaaagcaagctgccatggctatattaacatcagacaaaataggctttgggacaaaacaaaaacagtttaggaatgatgttaaaataggctctacatatcttaagcaaaagttgacagaactctagggagaaataggcacatgaagcatcgtagagggaggtttcttttttttttcttttttttttttttttttttgagacagagtctggctctgtcgcccagactggagtgcagtggcacaatctgggctcactgcaagctccgcctcacgggtttgagggattctcctgcctcagcctcccaagtagctgggactataggcgcccgccaccacgcccggctaattttttgtatttttagtagagacggggtttcaccgcgttagccaggatggtctcgatctcctgaccttgtgatccgcccgcctcggcctcccaaagtgctgggattagaggcgtgagccaccgtgcccggcttgcagttttcttttttaaaatgtttatttctattttgtgattcaaactgaggatcatcttgctgcaaagaagtttttaagttgataagaaactgctgaacagtgattcaaagtggctgtgccatttcacactcctgctggccgcgtgcgaacctttcatgcactccgcctcctcaccagtgctccctgcgaccagtcttcagtgacagtcattctgggtgcgattttatcttgcatttccccatgagaaatgggcatctcttcctatgcctcagtggggagaaccagagacgggggcagaagaggggcaggagaaggcagggagggtggttggaggagagagcattgggtgggggtggcaagtgctggaggagggggacggggaagtgggccctttgctcttgaaccattttaaccccaagcaaggtgcattcagggtttgggcaggggtctggccctcatgtcaccagatcctgagtgactgtaggggcctctcatcatgtcttcactcctggacttgctggctccaggtgagaagacgtggacactgctgtgggctgcagaggtttgggggtgtgtgtgtgtgtgtgtgtgtgtgcatgtgtgtgtgtgtgtgtgtgtgtgcgtgtgtgcgtgtgtgcatgtgtgcgtgtgtgtgtgtgtgcatgtgtgtgtgtgtgcatgtgtgtgtgtgtgcatgtgtgtgtgtgtgcatgtgtgcatgtgtgcgtgtgtgtgtgtgtgtgtgcatgtgtgtgtgtgtgtgtgtgtgtgtttgagacagggtctcaccctttctcccaggctggaatgcagtggcgcgatctcggctcactgcaccacggacctccgggctcaggtgatcctcccacttcaaccccctgaataactgggactacaggcgcacggccccatgcccagctaattatgtaattatgtcacttttcatagagacggggtctccccatgttgcccaggctggtcaggaactcctgggctcaagcgatccacccgtctcaacctcccaaagtactaggattccaggcctaagccactgtgcctggccttcagggttttaaggaacagtttcatttccacagtggggcggcttgagaagtaggggcaccccaccagcagctgagcagagaagaaatggtggctatcagacagcccaggcctagtgaatcctccagtgaattattcctggcctttaagagacaggtaattccagcgaggcgcagtggctcacgcctgtcatccaagcacttcaggaggccgaggtggacggatcacgagatcaggagatcgagaccatcctggctaacgcggtgaaaccccgtgtctactaaaaacacaaaacattagccgggcgcggtggcgggcgcctgtagtcccagctactggggaggctgaggcaggagaatggagtgaacccgggaggcggagcttgcagtgagccgagatggcgccactgcactccagcctgggcgacagagcgagactccgtctcaaaaaaaaaaaagaggtaattccagggtttcaaagaaagtaaagtttccagatgtgctttatgaagccagaataacctttgtcccccaggagaatgttagtgtcacaaagacagactcttgtgggtcctgcttgcttctccgctctgagtccacagcggtgtctggcacacagtaggtactcctgggtgactcactgaatctggttgcagacttgacacacacacacatgcacacacggaaaagtatcgatactgctgttaaacactggtaggcatttctaaaataaaaacattagctaatatcatccaaaagcagatcaaggcatgaatatccaggctgggcgcggtggctcatgcctgtaatcccagcactgtgggaggctgaggtgggaggattgcttgagcccaggagtttgaggccagcctaggtaacatggtgagtctgtctctaaaaaaaaatacaaaagttaggtggggatggtggtgcgagcctgtggtcctagctactcggaggctgagggagaattgcttgggcctaggagtctgaggctgcggtgagccatgatcacaccactgcactccagcctgggtgacagagggagacctgtgtgaaaggaaaataaatcttggggcccccaaatcactcagctaaagggaaaactcaagctgggaactgcttagggccaacctgcctcccactctattcaaggccactcctctgttcactgagataaatgcttattggattgcttcctttggagaggctcatgagaaactcaaaacaacacaatcattggtctcttatctacccatgacctggaagccccctccccacttcaagttgtccctttctggaccaagccaatgttcatcttacatatgttgactgatgtctcatgtctccctaaaatgtataaaaccaagctgtgctctgaccacctcgggcacatgtcgtcaggaccatcctcaaccttggcaaaacaaactttctaaattcactgagacctctctcagatattcagggttcacacctgactcttaaaaaaagcaaagaagtgaataaactataaccaaatgtacacaacatattgttattaaccatagtcacgatgatgtacaacaaatctcttgaactaattggaattcctcctaattggaattttgaatcccttggccaacatctcctcatccttccctccccacccaccaccctgcagcccctttatgagttcagcttttttattttctacatatcagtgaggttgtgtggtatttgtctttttgtacctggcttatttcatttaacatagtgttccccagtttcacctattttgttgcaaatgacaggatttccttctcttttatggctgaatgggattccgttgtgtacagatatcacactttctttatccattcacccattgataaactcttaggttgattccatctcttacctgttgtgaatagtgctgcaatgaacacgggagtgcaggtatctctttgacatggtgatttcaaatttaaatatatacctttaaatatataccaagtagtgaaattgctggctaatacggtagttgtgtttgtagtttttggactatactgttctccgtactgtctgtgctactttacattcacaccaacagcgtacgaggttcccatttccctgcatccttgtcagcatttgttatttttttaaacatctttttgttaaaagccattttaactggggtgagatgatatctcgtggtgcttttgacttgtgtttccctgatggtgagtgatgtggagcattttttcatagacctgttggccatgtctattcagatcttttgcccactaaaattttctttttttgagacaggacctcactctgtcacccaggctagagtgcggtggcatgaccacagctcatgcagcctcatcctcctgggcccagtcaaccctcccacgtcagcttcctaagtagaaaaaggccagctgtggtggctcacccctgtaatcccagcactttgggaggccgaggcaggtggatcacctgaggtcaggagttcgagaccagcctgaccaacatggtgaaaccctgtctgtagtaaaactgcaaaaattatccgggcgtggtagtgggcacccgtaatcccagctacctgaggctgaggcaggggaatcacttgagcccacggcacgtggatcacctgaggtcaagagtttgagaccagcctggccaacatggtgaaaccccatctctactaaaaacgcaaaaaatgagccaggtgtggtggcgggcccctgtaatcccagctgtctgggaggctgaggcaggagaatcgcttgaacctgggaggcggaggttgccgtaagccaagatggttccactgcactccagcctgggccgcaagagtgaaactccatctcaaaaaaaaaaaaaaaaagtgaaatctgcagagatgacagcttcatgagctgattgtatgaagccacaaacagtactgtgcttaatggtgaaacaccacagcattttcattagtcaagaatgagacaatattcccaggatcaccactgtttcttcccgtttcccaatgttaaattggccaatgcaattgaaaaagttagccggacgtggcgcacaaggaatacgtgttggaaggatgaagcaaagttctcattctttgtaaatcacttgattgcaccactgaaacgtcctctggtctgctgggcaggtttgagtcaggagattctggctgtcttcactgggcctatctgagactgggtgtcatttgctttgctcttgtctgattttactgtcagacatcactcctgtaaccagtctttgtagtaagtctcatttcttgcatgtacttggaagtacatgcaataaatggttttattttcccagcgactgtgcccgcccccaccccattgagttgtgccaaatcccccttaagacgtggggcccgagtccatcatgtttcagtcaggttgcttgtaattagtcttattctggttcttttttcttttcttttctttttctttttttttagacagagtctcgctctgttgccaggctggagtgcagtggcacaaactcggctcactgcaacctctgcctcccgggttcaagtgattctcctgcctcagcctcccaaatagctgggactacaggcttgcaccaccacacccagctaatttttgtatttttagtagagacggggtttcaccatgttggccaggatggtcttgatctcttgaccttgtgatctgcccgcttcagccttccaaagtgttgggattacaggcatgagccaacacgcccggcctggttgtcttttcttttctttctttttttttttttttttttttttttaagacagggtctcactctgtcacccaggctggagtgcactgatgagatctagactcactgcagcctcaacttcctgggcttaagcgatcctcccacctcagcctcccgagaagctgggactacaggcgtgcaccaccacgcctggctaatttttgtatttttagtagagacagggtttcttcatgttggccaggttggtctcaaactcctgacctcagctgatccacctgcctcggcctcccaaagtgctgggattacaggcatgagccacgactcccggcctacccttaattttttttttttgaagtgcacaagctaattttttaattactatttgtagagattaggtctccctgtgttgcccaggttggtcttgaactcctgagctcacgcaatccatctaccttggcctcccacaatgctggactgcaggtgtgcaccacgctctggcatcattctggttcttaaacccaagggtacttattttccaacatgaaccttaacctcacccttccagaaacttctcaggcatgggcaaggttgcagtctcccttactgcaggcagcaatgactttagcaacaggtgatcttggtgggctcgtaggggagtgggaatgggcagtggcttttgtcctccttttgttgtccgctggggatcttggttgggaagcctgaacccagcattgtttcctagccctgtgttcaacaatgccgggagcgaggtgccttcctatccccgtgataaacagttctgggacctgttgctctgccacacaatcctgagaactagcacaagtcaattcgcttgcaggaccaacacacccatgctcctgaaagatgagactcgcagagcccggcccgagactgcacccagccgtccaaggctgaccatgcttcccacccggccctccccacgccggctcggacttcgggcattttctctcctcctttcctccctggtgatctgaggccggctctgtcgggggagtgttcttcctctttgcagtgagtccaataaactcagctttgcctgaacaacaggtttttctggtggtgattttggggagtctacagccaacagctgaaattgggaaaacggggcgggggtggggaatccctttttgttttttgtttttattttttacagtaaagtgaaagcaagtttattaggaagatagaggaataaaagaatggctgctccatagacagggcagctgggaatcccttttagcacctggtggctgcagatgggtagaaatacagaccatatttggttcttagtttaattagccagagacgcagaacagggtgggaagccagacggccacacctagcacctcatcaggctgcagccaaccagggcctctcggggctgggaaaactcgattcttgctgtacttgggcttactcggctctccatcttatgcaaacacctctccttatgaaaggcaagaagaatttgttctacactggggatgggttgtgcctgtcacatggagcagcctggggacctagagggaccctttagaagcttagcacctagcaattccttttcacatgtgactcatggtctattcagttttagtacttcttttttttttgacagagttttgctctgtcacccaggctggagtgcaatggcgcgatctctgctcaccgcaacctctgcctcccaggttcaagtgattctcctgcctcagcctcccaagtagctgggattacgggcacgcgccaccacgcctggctaatgttgtatttttagtagagacggggtttctccacgttggtcaggctggtcttgaactcccaacctcaggtagtccccctgcctcggcctctcaaagtgctgggattaaaggcgtgagccaccacgcccggcttttttttttttttttttgagatggagtcttgctctgtcgcccaggctggagtgcagtggcaccatctcagctccctgcaacctccgcctcttgggttcaagcaattctctgcttcaccctcccacgtagctgggattacaggtgcccaccaccatgcccggctaatttttggatttttagtagtgacggggtttcaccatcttggccaggctggtcttgaactcctgacctcgtgatccatggcgcctggcctactacttctttattcatttattttttgagacggagtctcgctctgtcacccatgctggagtgcagtggcacgatctcggctcattgcaacctccacctcccgggttcagcttcccggatagctgggactacaggtgcgcgccaccacgcccagctaatattttgtattttgtaagtagagacgtggtttcaccgtgttggccagggtggtctcaaactcttgacctcaagtgatctgcctgcctcggcctcccaaagtgctgggattacaggcgtgagccactgtgcttggcgcagttttactacttcttgagacaactctgaagatttctatttttcacagaaagtcattcagttaatctagacttttcaaatgtattgccataaagttatatttactattttaaaattttaatttcctccttaacccaacatttatttaaaagggtcatttcagccgggcgtggtggctcacgcctgtaatcccagcactttgggaggtcgaggcaggtggatcacctgaggtcaggagtttgagaccagcctgggcaacatagtgagaccccatctctacagaaaaataaaaaattagccgggcgtggtggcacacatctgtagtcccagctcctcgggaggctgagatgggaggatcacttgaacctgggaggtcgaggttgcagtgagccatgatcgcaccactgcactccagcctgagtgacagagccagatcctgactgctgctcatagagatctcgcctaaagatcttgcctaagtgcaaaaacacacacacacagaaactggaacaaccgaactgaccctttggggaggctggcgaaataaatgacatggagtacattcatacagctctaaaaaaggacaaaagtcagggacatctgtgtccagggaacactctcgatttgtcttgttaagtgaaactggcgaggcgtggaatcatgagagaagcgtgagtagaggggacttaaaccagggactggtggccacagctagtgttagccaggggactggaggctgggagactgagaaggagattttcttacttcgtacgtgtctgtactgtttggattttttttttttttttttttttgagagggtattttttaaaaggaaaagcttgttttgtttttctttttaaaaaataggctctaaaaattctggagagaaataaaaaaggcaacatggtggccgggtatgggcgtctcttctgattccaggctggttggcactggccaccttgctcaatggttgccttagaaaccggcctagcgagggggtgtcagttgtctctggtagccattaaggcagtgactcagcagaaaacccaacccaagagggagttgttcattcactgactttccttctctcccagaaaagcatgggtgaggccatttctgttacatttgcgatcgggtggcagctgctccgccgtgaaggcggtagcgagaagtctgcccgctcctccagcctctcactaggtgagtggcgtctctgtgctgccctgtccctcagaaaccacaggttccggtccctctgccagcctgtcccctgtctctcccctcccgctgacagggtgaaaccagcttccgctcacaagcacttgctgggggttgccacaggcatggctcttggggagatctttagtaaaaaacccaaccaaacatcacgagtggaaccgagtgtggatcataaactcaactgagagaaaagccaagggacgcatgtgggcaaaatacacagaaaacccagcatgggcgcgggggctctcgcctgtcatcccatcactttgggaggccaaggcgggtggatcacttgaggtcaggagttcgagaccagcctggccaacatggtgaaaccccatctctactaaaatacaaaaattggtcgggcatggtggtggacacctgtaatcccagctactcgggaggctgaggcaggagaattgcttgaaccggggaggcggaggttgccgtgagctgagatcacaccactgcactccagcctgggtgacagaatgaggccctgtctcagaaaaaaaaaaagaatcacgtgctgagacatgctacaacacagatgaaccccaaaatcataatgctaagtgaaagaagccagacacgaaagatcccatgagtattatcccatttatatggagtgttcagagtaggtgaatctatagagacagaaaggagatgagtgactgcctcagctggaagggaaaatggggaagaaatgggtagtgactattaaaaggtatggtgtttttttttctttgtttttgttttgttttgttttgttttattttgtttttttgagatggagtctcgctctgtcacccaggctggagtgcagtggcatgatctcggctcactgcaacctctgcctcctgggttccagcaattctcctgcctctgcctcctgagtagctgggactacaggcgcccaccacgatgactgggcaatttttgtatttttagtagagatggggtttcatcgtgttggccaggttggtctcaaactcctgacctcaggtgatccacccacctcggcctcccaaagtgctgggatgacaggtgtgagccaccacgcctggccagtgtttctttttggaatgatgaaaatatgctcaaatagagtgctggttgcacaagtctgtaaatctattaaaaacacggagttgcacacttcaaacaactgaaccttgtggcgtgtgaggtagatgtcttaacacagctgttaaaaagcccaggatagctgggcacagcggctcagctgtaatcccagtactttgggggggctgaggaaggaggatcgcttcagctcaggggcttgagaccagccttggcaacctagcgagaccctgtctgtactaaaaataaaaataattagctgggcatggtgacatgcacctgaggtcccaggtactcgagaggctaaagcgggggctgtgggcaggagaacaaggctgcagtgagctatgatcacgccattgcactccagcctgggcaacataatgagatcctgtctcaataaacacatgaaagagacacatactgttatttcaaacttcactcaaaatacactgccttctatgtgctgggacccagagagggtttgtggcatgtttgtaggaataagtccggatcagaacggagctgagaatgggtgttcactcgtattcttcaatgtctcctattgagatgatgttatccacttgttattttcttgaccctattttctgccaagaaataaagtaatttgagagagagagagagagcgagatctaacgtggaaaaacagatctgcaggaaggcatggaacgcactagaaaggtaaaaaatgggctgtttagaccaacactaatagtgtcctttgggatttaaaatatacgaaaacaagagcacccgaggcccggcggaaacacagtctcgctgctgggaggctctggcgttgcttgagccactgcaccgcagactcaatccctagggtaactgctggagtaataatgaaaagtgacactgagaaaaggcaaaaaaagagaaagaaagtaaccaacgacagatgggacaacagagaacaaatggtaagctggtcctcacacacagccagagcaggagggtggcgggggtcagggtctaatggtgtggaggaggaggaggaggatgttgagggtgaagaaacaaagcccatgcccccgagttgtacacttataaatagttaaacagatgaatattatgttgtatatattttatcacaataaaagatctcacatacagccatattggcaaatccattaaaatgaaaatggataaacacacaaagattgccgggctggcgtagagggaaaataaaaccaatcaatcaatatgctgcctcaaagagacattctttctttcttcctttctttccttccttccttcctttctctctttctttcttttttgacagagtctcactctgctgcccaggctggagtgcaatggcgtgatctcagctcactgcaacctccatctcccggattcaagtgattcccctgcctcagcctcctgagtagctgggattataggcgtgcaccatcataccccactaatttttgtattttcactagagacagggttttaccatgttggccaggctggtctcaaactcctcacctcaagtgatcttctcacctcagcctcccaaagtcctgggattacaggaatgagccaccgtgcccggctgcattttattttattttattttatttttgagatggagtcttgccctgttgcccaggctggagtgcagtggcgtgatcgccgctcactgcaagctccgcctcccgggttcacgccattctcctgcctcagcctcccgagtagctgggactacaggtgcccgccaccacgcccggctaactttttgtatttttagtagagatggggtttcaccatgttagccaggatggtcttgatctcctgacctcgtgatccacccgcctcggccttccgaagtgctgggattacaggcgtgagccactgcgcctggcccattttatttcttaaaaacagcttttttttttttttttttttttttgacagagtctcactctgtcgcccaggctggagtgcactggtgccatcttgactcactgcaagctccatctcctgggttcacgccattctcctgcctcagcctcccaagtagctgggactacaggtgcccgccaccacgcctggctaattttttgtatttttagtagagacagggtttcaccatgttagccaggatggtctcgatctcctgacctaatgatctgcctgcctcggcctcccaaagtgctgagattacaggcgtgagccactgtgcctggccaaaaacagctttattgaggtataattgacataaaataaactgcacatttaaagtgaacagtttgaaagttatatctgccaaaccatcaacacaatcgagaatgaacccaccaggccaggcgtgggggctcacgcctgcagtcccagctacctgggaggctgaggtgggtggatcgtgtgagcccaggaattcgagaccagcctgggcaacatggcaagaccccatctctacaaaaaatacaaaaactggccggaactgggatctggaaggcggaggggacgcagtaggcatttgtgcactgtgagtcctggtgtggggccatcgcagcactgccagctcccatcaggtctccctgatcagatgttccaacatgtgtatacagatgtgtacaacacccaagagaaatgagtgtgtatgtgcagcaagacagattcggaaatgttcataacagctttatgccagccccaaactcaatccaaacgcccaagagtagaaagagtcaaatgcggcccattcttacaatggaacgctacctgggaaggcaaagcaatcgcttagcgctactcacggctgcaacagaacaacagtgcagagcaatagcaggcagacgcgagttcgtaccacgtgtgttaatccattctcacactgctgtacagaaatagccaagaccgggcaatttatatagaaaggaggttcaatgggctcacggttctgcaggctgtacaggaagcatggctgcatctgcttttggggaagcctcaggaagcttccaatcatggcgggaggcaaagggggagcaggcacatcagatggccacagcgggagcaagagccggacagtggaggtagcacacactgttaaacaactatcatgagaacagcacccagggatggcgcggaagcattcatgagaaatctgcccccatgacccagtcacttcccaccaggccccgcctccagcactggagattggggcagggacacacatccaaactaaatcacgacacaatctcattgacatgaaattccagaacatgcaaaactatctatgtgtttaaagccaggtttggatgttctctggtgctactctcatcaaaaaaggcggcccacagcgcctctccccttgcatacactggcctcagaggcttgcgtctagtgagcaggctgccggggaagtggcagcacctgatccccaggccaggccatcagatgacgtggcctccgctgggctttctagcttgagatgctccccggagaacccagcctcacaggcacatggaggtgtcctcaccccggcagcgtcctccgctggacacgaaggagccgctgggtggttccagctcgtggccatcgggctgccccggctaaccgactgcagcgggtgagctctgccaactgagacctcacagagcacaggctcgcgagcaaaacaaacattgccattattttcagcccgtacatcttggggtggcttggtacctagcaagagataactggagcagattcatatgtgggtctatgtggtggctgccacatggccgtgtacatataaaacagtcattgggctgtacgagtacggtttgtgtacttttctacctttaacttatacctccctaacaaagtctttcagaaaagcctaactcctgaggctctggtgtgggcagctgggtgggcgctggaactagtcccacacgctgaggtgggaagctcatggtgaaagggaatcccaagtctgcttggccatctaagtttacggtgcctgtgagaaaaatcagaaggccaaaacctcaggagagagagcatgacggaggcgctgccgtttgggaatggacatgatagagccgtgagaatgaggaagatcaccgtcgggaatgagtgcaggcagctaagaaggcgcagaggcgtgtctggagggactcacaccttgtagaggctgggtagagagagcccacgcacgctgagaaagaacacagacttcagcgtcacagaggtcacaagagacaagcggttggtgggggagtaggcaccggcgagagaaagtccaagaggactggatggatttgacaacacggagatccctggtgttctggatgaacgctgattggatggagtggcaggggtagaagcagaggaagagggactgcacagggaatgggcaagtgagaaaacagacaaggattctgaaaagtttagctacaaagaggaacagagaattagggttgtggttggagggggtgttgggtcaaatgagtttttatttttattcttcaagaacggaagctaccaggacatgtttgatgaaaatagatccagaggccgggcgcagtggctcacgcctgtaatcccagcattttgggaggccgaggtgagcggatcacctgaggtcaggagttcgagaccagcctggccaacatggggaaaccccgtctctactaaaaatacaaacattagctgggcttggtgacacatgcctgtagttccagctactcaggaggctgaggcaggagaattgcttgaacccgggaggcagaggttgcagggagctgagatcatgctgctgcactccagcctgggtgacagagtgactctgtctcaaaaaaaaaaaaaaaaagaaaagaaatagatccagaagcaaggaagaaattgatcatgtcgggtgacattatgagtgaagaagtcctcagaaaagaggagaaacttgcaattctggccacagtggaataactgatgccagttgtaaacacctaaaacactgggcaactatttttagatatcggacaataggctgtgcagggctgtgaccagagagaaaacaaagaaggtgagccttacaagtaccctgagtttctgcctggaggcactttcacaccatggttcagcaaaggggcctgagcggaaccagcagtctcactgaattactagagcgaccaagccaatagcagagaaaaaacagaatcccagaaatatgtaattaatccaaaagtcaaaacagatggggtaatagaaaacaaataacaagatgatagacttaactccaaccattaaatggaaatggattaaacagaccaactaaaggcagagattgtcagattgtttaaaagaataaggctgggctgggtgccacggctcacacctgtaatcccagcactttgggaggctgaggcgggcagatcacttgaggtcaggagttcgagaccagcttggccaacatggtgaaaccttgtctctactaaataaaaatataaaaattagctgggcgtggtggcacacacctgtagtcccagctactatggaggctgaggcagaagaatcgcttgaacctgggaggcggaggttgcagtgagccaagattgcaccactgcacttcagcctgggtgacagagtaagactcttgtctgaagaaaaaaaaaaaaaaaaaaaaagccgggcacagtgcctcatacctgtaatcccagcactttgggaggctgaggtgggtgaatcacctgaggtcaggagttcgagatcagactggccaacatgttgaaaccccgtctctactaaaaatagaaaaatcagtcgggcgtggtagcggacgcctgtaatcccagctactcgggagactgaggcaggagaatcacctgaacctgggaggcagaggttacaatgagccgagatcgcaccattgcactgcagcctgggtgacaagagcgaaactccatctcaaaaaaaaaagtaaatatacagacagccagggacaggtgcagtggctcacacctgtaatctagcactttgggaggccgaggcgggcggatcactggaggtcaggagttcgagaccagcctggtcaacatgtggaaaccctgtctctattaaaaatacaaaaaaattagccgggtgtggtggtgggcacctgtaatcccagctactcgggaggctgaggcaggagaatcacttgaacctaggaggcagaggttgcagtgagctgagatagcgccattgcactgcagcctgggcaacaagagcaaaactccatctcaaaaaaagaaaaaaaaaaaagaatttaaacaaggtcacagaatatacggttcatatgcaaaactcaaccgctttttttttttttttttttttttttgaggcaaggtctccctctgttgcccgggctggagtgcagtggtggaatcatggctcactgcagcctcaacgtcctgggctcaaactatcctcctgggtcagcctcctgagtagctcaaactacaggcatgcaccaccatgcctggctaatttttgtactttttgtagagacggggtttcgccatgttgcccaggctggtctcaaactcctggcctcaagtgatctgcccgccttagcttcccaaagcgctggaatcacaggcgtgagccaccgtgcccagcatcaattgcatttctgtataatatcatgatgaactagaaaatcaaagataccatttagaatagcataaaaaacatggactacatcaggaaaaacctgacacgggaagtgctgggtgtggccagcccagagtagtaacaagaccctggacgctcaagaaccctgaagtgtaaggcatcaggaaagctcaaggctttcggtgcaacaaagtccacaagtagagcccgagattgcaacatacgtttttattactcaaggacaacctggacgtcaccaatgcccagcttcacgggggcatgtagtgtgactcacggctgaacacaaaatcactgtgaagcctgtgctacagccctgggctacttttggacacgcaagaggacactcggttacatgaaacctgacttgcttctgaagacatgtgatacatgtcttttccctgaaaatgtttcccttccctgtctgccatgctcccaacttttctgccttccaggggcttctcactgtctgggtaactaggtcttgggcctagctagaccttgggtagtggcccctctgccacaatcagtgcctgggcctgaggctgagcttgtggcctccgaagcctgacctggctcggagctcgtctgtggcgcccagggatggcctggcttgcaggccaccacattaggccagctcgcaggtccccagtaaagcctgaagacactggcccgaggttggaggtgggtgctgctcgactttctggaggatctcagaattctcgcttcttgctaggactgaaccatgagacttacagccatacttcacttttcccagggtttttctttttgaaacagggtcttgctctgtcacccaggctggagtgcagtcatacaatcatgactcactgcagcctcgacctcccaagcataaatgatcctcctacttcagcctccccagcagctgggaccacaggcgtgcgctaccacgccaggctaatagtttaaaaaattttttggcagagacagggtctcatcatgttgccctggctggtcttgacctactgggctccagcgatcctcctgccttggcctcccaaagtgctgggattacaggcgtgagccaccgcacccggccacacttttccaaattgtaagcaggtaggagggccctaggcctcgtcggccccattgtgcagggtggccactgtccaaagagatgggcaaagagctgctgccagaggcctgggctgcagacgccctgcatggctctcaggggagccagctccctactccacacccctgcacagcagcccctctcctcccctcacgggtctgtgcagccagcagcctcccaacatgcgccagcctcctcactggatgatgccagccttccttgcccccagatgctggcatggaggcagggttccactctgcctgcctatgcccacagagcctagaacagcagggccacctccttctctcccccgcgggcatgggcccccacccccactgccggcagagtgctgaggactcgtgcaccatgagaacttctgaccatgagaactttgacttccggatttgggggatctgcccaggtgaacacatcagctctgaaattcatcactttcttcgggcccctgcctgtcctgttccaggcccaagcctacagaaggaagaggaaagtccgcttagcaaatgggggaggctcccctactgccagaagccctggctcaaggcctgggccatgctcccttatctcctggggcgttcgtgggaattgagggtttttgtttgtttgttcatttgtttttgagacagggtctaactgtctcccaggctggagtgcagtggcttgatcacagctcactgtagcctccacctcctgggctcaagtgatcctcccatcttggcctccaaaagtgctggtattataggcatgagccacctcgcccagctgagggttcctaagcagtggttcttcaaatagtacctgggatggaaaattcctgctggggcttcctatttcctgaaagcacagagtggggcaggcaccctcgggctaaaggaggtgctactgtcaggaggcgagggaaggagtgggccagggtcttgctaagggaggcatgtggggccggctgggcttctagaggtcgccagagccagtggcctgcccggctgccccacgccctcagcgcagtcgggacagacactctgctctttggggctgacacggatgcgcctgagcaccccagaggccagcctgggcggcagcacctgggagggagctggacgacagcagctgcaggctgtccagggccccatcctcgtacagggccagcttctggaccatcttctgtcgggcagggttgatgataatctgcggtggctctgacgacgatgatgcagagctgccaagggccagtcctggggtggagatggcactcccttagcctcatgctgtggctccccagcccgcagcctagcaccctgcctccctggcctcaggcctgaattcctcagagaagtccaagggcagggcccagctctcaggctaccagacagagccctccttgttcccagccttcaggaatggggtggggggagggctggagagcaagctccacctgggaaggatgtggcctggggaggggaaaccagggttgctaaggtcacagtgagctgaacatttggccctggttctcttctagaaggctggggtggggacttacaggggctttggcccaaagaggccttggtccctctcctgggaacccgtctccccagctaccttccacggctgtgggccgggatcctgggccactcccccagctcgattctcctgccgtgtccccctgaggacagccggcctccctgaggggtgctgggtccagagggcagcttggagtcaagtgccaggagcgcagggcagcagagaggccgcctaggctctcgtcactctccacgggctggttggggcctctctgcagctgctctgctgcctgggcactggctcctgatggcgctgccaggggctgccatggagcagccccactgtgggctctgccagtgctggacacgtaggagttctcctgcggggaaggggggatgcagctggcggcctccgaatgcccgggcacccccgccaccactgcctgcagcttctctagcctctcgtacacctgcaagtggaaaagagggactctcagggtgagatggcagccctggccggtcaccccgtgggcaaaccacagggctgctccaggccgtccgtgacctgccccagggctctaaaatgacataccctgcagctgggaacgctctgcccctcgcccctctgttcccatcacagggagtgctgagaagcgcggctgccaaaagcaaggactgagaatggcctcgttcttttctacaaaatgaatctcactgccccgctgccctcaaacggggcctctccattttcaactgtcaccagaggagaagaggtggggtactagggaggggacagaaaaaggcagatgcagtagtgcagtgcgcccagcagggggcgcggcagcagctctttccttctctctatgtgaagggggtcggagctgggctccgcaaagcaggactgcccggggcccctcagttcagaggggcgctgccccaaacagaaccaaagggcaagcaagaaatgtgtggagactccagagagacctagcaggtgctgagatggggtcactacagagcaaggcctggaatgcgggctttctatctggccaccccgtcccagtgcgcagctggctacctgggtcataggaggcctccttttggcccggcggtgcaggcagcagcaggccagctggcccaggcccaggcccagctcaggtgggcagggcccgggcctggggtccaggtgcttcttgtagatctgcatggcgatgggagcagcccaggcatctgcagccagacctgcttgcagtgtgctctgggtgcttctcaaagccactccagcctcctcagcctcctcttccaccaggtctttctgtgggataaatactgtcagtatggctaccaggtggccacacctgcagctgcagtcctcaggtccttgtcactcaatcgtatgggttttgataaaaaaaaaaaaaaaaaaaaaagagatggggtctcgctttgttggcctggctggtctccaagtaggctcaagtgatcctcccgcctcagcctcccaaagtgctggtgttacaggtgtgagacactgtgccacagctcttggtctttctacaacttactttttttctgagacagggactcattctgtcacccaggctggagtgcagtggtgcaatcatggctcagtgcagcctcaacctcccaggctcgtgatcctcccacctcggcctcccgagcagctgggattacaggtgtgtaccaccatgcctatcttgctatgttgcccaggctggtctccaactcccaggctcaagcgatcctcctgcctcagattcccgagtagcttctagagatttattaaacacctactgtgggccagtggtgctctgggccctagggatacaggaacaaacagaaccctgggacccggtttgacagagctgacttcctggtgggggagagccccatggagctggggtctgaaggcaggaagtagcctgagagggcagagccgagaaggaaagcgccccacagagaggtgccccacagacaaagaggtaccccagagagagaggcgccccgcagagaggcgcccccagggtggaaacaggaccggaggccatctccagttctgaaatcagacagaccaggaggaaccacctgggtgggcggtggcttttctcgcagagcgaacggcacatactaaggctgtgaagcaggcagcagggagcgccccgagtcccagggacctggggcgttggggggtcaaccacataagggactgggccttcaccccaagagcagagaaaaggcaaaggggcctttgaaaagagcactttggctgcagggtggggagcaagtggggaagtccaaggacccccaaggagcctggtgcgcttcttcagcaggatgcatggatggacggacggggaagggaaaggaaggagggctcaagcccggctcctgggttctcagcggggctgaatcctgacggagaccccacagcacacaggaaccgccccaaacaagaggagaagcagtgaagcaattactggctgagcacattctgtgaagtctgttttgcatatgggaaaacaggcccacaggggagcaggaatttgctggaaggccactgtcaggctggggctaaaacccaggtctctagtctcctggccccaccacagtccacggtgaggcagactgagtggagtaagaccgtgaggcagctcaggctgccctgcacggtgcggagagctcagctgcagcctgctggggcccaggaggttcctcggggcctgcttcttctctaccaccgcctttctccggccagagtcctctgagttccactgcagcttgggtctcagtgccctgggaccgcccttccccctgcccccagcccaggtggggtctgtacaaggcccatagtgtctgcaggacagacaggtttgtcctcggcaaggtaaacgaagttgtttggagccctgcctactttcaaaaatgaggccactgtggcagcagaggcatccatgggcactgcgccccagttatccccgccactggggctgtgcctgctggctgccagcagctgtgtgtccctcctggccctgcctcaaggggctcaccagatacttggtcctggcaccgtgcgtcttcacagccctctgaccagccaaggtctctagcactacctggagagagggaagagggagagcatggcagtggccttggcagggaagaggcctctggtgtggacatggattgggcctgacaagggtgtggacaaaggcagagccagatgttatgggactgaagctcgggcaactcggagagcccacttgaagacaaattacaaacacacagttaggtgcagggtgaggaggagggcctcggagggagggggaccctggagctgcagcctcctggggtcttggcagatggcccctggcccgcagtgcactctgcagcccccacctctgcctgcctgtggcttctcctcctctgagccagcagaggggtcagtggctcaccaccccaaagctgaaggtgtccgtgtccacagccagccttcccgtcttgatgtactcctcgggcaggtaggccagggtgccccgcactgtctgtgtccgggccaccatgctgctctggctggggctggacccggcaaagcggctgaaccgggccaggccaaagtctcccagcttgggtgtcagcctctcatccagaaggacgttggaacttggggagagaagacagtggcgtcagcccggtcctagctcctacacctgcccggcttagataaggctggactcgaggctgccagcccggtgccttgcccacagaaagcgctggcactgccctgagcgctccagctgcctgggggcctctgctcatcagtagggcccatccttggcccgttcccacacctgtgcgatgccggggtgttgaggtcccaggccatgcctgatccccacattgataggacgcggggccccccttgctgcaggccctgccccggcagttctcaagggcccctcctcacctcttgatgtctccatggatgaggctggggctgtcctgatgtagaaactgaattgcccgggctgtacccagaaggatgtccagtcgctgaggccaggagagaggtgggcaggcctgggtctggggtggcaaagggggacaggggaggttgctggatggccgttccttgatcccaaccatccttctacctgtcaccgtgcagcctggaacagccacttcactctctaggcctcagtttcccccttctggaaaacgaggagcaaagtctccgtgacctgcacttcttaagcaatggctggggacacgttcaatagaatctgctgggcttcggctcccagggctcatccctttgtccctggtggtcgggaagtccttgaaggcattcttcccgctctccccaaacgcagcatgcaggaggaggcaagggggccctccctcagctgtaggtggtccagctggtagccccagaccccctcgcctccggggcttgctgatgagaccctccagctacgctgcttgcaaaggggagaggcctgggaaagagctctatagaaaacattgggtcgggccaggcgtggtggctcacgcctgtaatcccagcactttgggaggctgaggcgcgcagaccacctggggtcaggagttcgagactagcctggccaatgtggcaaaacctcatctctactaaaaatacaaaaattaggcaggtgtggtggtgcatgcctgtagtcccagctactcgggaggctgcggcaggaggatcgcctgaacccgggaggtggaggttgtggtgagctgagatcacaccactgcactccagcctggatgacagagcaagactccacctcaaaaaaaaaaaaaaaaaaaaaaaaaaaaaaattgaccccaccgtgggccaaatcctgagccgggtgctgctggggagctggaagtgcaggcctggcctgctggcaggacccactcacacaggctgaaagccctaggccccgcgcccggctccagccaggtgtcaggagtgctttgggtcctgggaagcgtgccgggccaggtgagcctacctggcagtggagacggtcctccagggagccgttgggcaggaagccgtacaccaggcagtagaagccgttctgagcacagtagccagcaaagtccacaatgtttgggtgacgaaacctgtttgaaaaaggggagcactttccatcaggccagactgggtgggcagccctggctggggcctcagctcgcccgggcctgccaggcctcaggtgcccaagggagccaggtcctgtggtgtgcggtctgaagccccacgggacctggtgtggctccccctctggcctcacctggacagctgctccacctcggtcaggaagctctgcttcactgcagtccactccaggtcagcgttctgcagcccccagggtgcggtgggggaaggggcagggaagacgggcagcgtgaggctctcgaagcgaaggccttcgggccaccagtgccacctacccgaggcccagaaccaccaaggggccagggaccctacgccagaatgagggctgaaggagttgtgtggggaagcgagggggaaaggctggagaagtggtgagggttatctgatggccttccagggtccctgccagggtgcgacactcacctccttcagcctcttcacagcatacaccgtgttcctcatcaccgcccggtacacgcacccaaagccaccctccccgatcttgagctcctccgagaagttgtgggtgccccgggaaatctcacagaggggccagcaaaacggaaaggggcgggctccctgcaggagggacactgagctctctgggcctggctgtgggaagagagcctggatcaggtggggtccctgtctcttcccttctgcccaaggctccaggctctccccaccacagctgcctcccagctgacccagcttggctgactggggctctgcgctacatcaaaggctgaattccttcctccttgtctcgaatcttccctggggggcaggggacacctaccttggtagaagaaggggctggagatggcggtggaggccacagggaagcagggcttgggaccaggccgagctcaggccctgaatgggtctgggagcctggaaaagcttcataaagacaccagtgagaggcaggcagagaccagcagcagggtctacagccgtggccgtggtcaaggtgggctcttctttgggtccaccgagcctaacaaccgggccctcttacctggggagaggaaggtggaggctgaggatggcaacttccgggggctccaggcctcggcctcggcgggtgcagggatgctgctgggcctcggggcagtggtgcctggggacggaagcggggcgggagggtgccctgggacgccaaggaaggaaaggaaggttgaggcccgggtgggggagccccgtggggcccgccggcctcccagccgtggggtgcccggagtcccgcgctcacaggctgtgatgatgtcccgcgcacggagcagctgcaggtgcgtgaggatgtgcacgaggtcggccacacgggcgttgcggttgatccagggccacaggacgctggccgtgcgctgcccggagcgctcgcacagccgcagctcggtctggtcgcgcacgatcagggcggctgcggggcggggggcgtcaggcgtcggcgccaggagcccgcgcgcctcccgccccccggcagcccgccgccacccaccgaactggcaccagtcggcgggctccagggcgtccatcactttgtagaagcggcacatgacccagggcggcacctcgtacaagaagtgctgggcgccgggggctgcgggctcccccgggcccggccccccggccatggctgccgccgccgggccgggacctgccggggcctctcagggccgcggcgggcgcgggcctgggccggccgggtccgcggacactgactcacttccccttcgagccggcctcgtgcgacgcccggcggggcggaaggggcggtgcccgggcccgccgccatcttgcgcgccgcggccgcgcgctgggtcacacgggggcgccccgcgccggggagggcccgggtcccggcgggttccgcgagcggcgatcggcctcccgggctcgcccgggcggggctctggaggacgaacggcggctcccggcgttggggacagagggcagggcggaggcccgggctgctcggaaaggggccggggccgggccttccgaaagctcctgggcggccctgccggaaccctgctctccactgcggcctgcagggctgttaccaggagccctgcctgcccgccccacgtctagccccctgcacacggcagcagccttgagccattcagtctccttaggtgtcctgaaatatgccgagaacgctgcccgccacagccgtgagtgtatgcgttgctgctgccccagccctcatttggcaagggtgagctcaggcagctgtggtgaaggcttcctgagcccgccggcagagctcctgccaccccgtacctgtcccctcctgggcatcgtccttgattacttgtctggaccgccacccccggtccccgccctgagatggggaagaccccacaagcagcaacgcagacttactcttttgtttctccagctggatgtctcctccagcgacagttccccttgccctcttgatcctgacagcgaaggggttccccacccctagccctacagacttaggacttttcctagaaacgagaagtgcccaaggcccacagctggcccctgttggagtctctttcctgaagccaccaccactgtggccactcccaaggaagatgccaaccataccatgaaacccatggcttctcacgggacagactttactgagatgtaccaactcaagtatctgaaatgactgcacacccatgctaacctccacgggggcacttggtcctacttacacacaaaggcccatcagctcacggaacagggctggcatacgagatgctcaatgcatacaagttgacttttcaaccctgggatctacctttgaaggccaggccttccgagggtaccttctagcatgtgcatgtgaagctggactcctttgagcagttgtctcctccagccccttaccaacctggtgaggctgctcctgagagccaaggaagccagtaacaagggggccccctttgggcaaacccctcagcctgcccttgcctggtcagagaaccacgttagcagtcaacagagggcacgtgagggtcctggccagaatgagacacaggaggagccacagcctgcgggggtgggggtgtccaaaagcaccacagcacatccagacctagggggtgcccctaccatacgggtctggagcagggaggttgtgctgcaggctgactcatgccaggcccttcccgtcacacgctggagcagtgtgcctggagagcactggcttggaagaagctgaggggccagcgaggccagcatatggaggaggcttcccttggccgctcgtggcaggcctgaaggcagctacctgtgtccagggacagccagatccaatgaggaaacgcagcaccatgctgtcatgtgagctggagggggacttctgtcttataatgaaagcccagaccttgagtcactttcacagagagatttatcgagaatgctaacagcacaggatacagtacttcccaacaaaaggtgcaaacgcgtcacttagaaaggcatgctgagtattctttgctttcacatgtattaaaaaacttacaaaaataaaataaaactgcgtgctgcccatcttttccaatagtaaaagaaccttatgaaaaaatcacttgatttttacaacaaaagacacaaacggacatttttatgtaaatttataaggcaaactctttatataataaataggttacagggattcagtggggggggggtgtttttgaaacgtatacaggtacattcagacaggtttactgaaatggtacaaatttccttaataaattgccttttgtttttaaatatatcagtgctttcagtcatttggctatacacaaagaaccttttttctgaacactacaaaaaagcaatcaataatttttgtttttaaaacgacctacttattttctaaagtaattgtcccaaaacacaaaaactgaaggtgaatacgatacagggcttttagagacatctccagctaagtgtgtcccggcctctccctgtgccccaagtgcacctctcccaacctcagacaggtttccaggctggagccagctcccttctgcacagggtggcctgtgttactggcaatgctgtccatagctctcggcctctgggctggcacaggggagcatgacttcaactcaggagggggcagacaccctgcctagctcttccagatgctgcacccggcatgcaatggtcactacagtcagcactctccgcctctcagaggagggaggggctgtcaggtgttttgggagcccaaaaccatgcctaatgagggtaatggcttttctaaggagatgttttcgccatggaatgggaaggggttttctcacatctaagttttgctggcgatcgggtgacagccaagagagtgcaagccccctccatggtcattttattgccctgggaaggggagggtggggaatagagatgtcacagtgttgagccctggaggatggggtgggatgtgacggaagtgtcttaaacagtaatgcccacggggcacaccttggagagagaatgcccaccacctggcctgtccaggaagagctgcatctgccaacattagcctgacctgtgcccacagcagagcgtcccagcctcctgcttgggtgggcccagccccattctccccagctcttcagctctgcacacacacatcccctcctggctcccctcaaggaaacatcaatcttgcctttccttaaaagcacgggatggtggtaataatctcggggggaggggaagcaaaacaagaatccactgggcggaacaaaacctggttttgcagtgacttggaaagtggcaacacatcagctattcggcttgctggcttggagtgggactcctgggctccactgctttgggtggcttctggctgatctgggcaggggtcatctgttcagctctcccctctcatctcagtcaccatccccctccctccgaatgcttttgtttgtaaagaaaaagtgtctagaaatatttgtctctggaacaattactttaaacatagttacaatacagacttcagttcaaacacagaagagatttacttagcaaaattcctttcacccaccaaaaattacacaaatataagcctcaacaccacagttaagaggaccagtagagagaacctcatgtttggaacacaaaaggagaaataaaaaccaaaccaaacccaaacagaaaaaccccagaaagacaagtaaagggcaaagaaggaaggggaaggggagcaaacacagcacacgttacagtgtccagatacacgggagcccagcatgggcaagggctcggcacacattgagtaacagtcctggtgatatttggtcatatattcattgactactgactctggagcggctgttattgattgaagcagtgacaaatcaaacggaaaggaggccgtggtagcaagggaaggagcaggcttcaagttctgcaagccttttgcactccactgtccagctccccagaaacactgaaccgggtgggccccgctccatccgggcagggctagaggtcaccgggtgaggctaactcgggcgtcgatttcatgtcagtcagaaaacacgcacgtggacgcacgcagacacccacctgttcacggccaaacatcagcggcaacggcctcctcgcctcctctgcccctatcccaggctgggtgggaaagagcatcatgacccactgctaacactgaacacacgccggagctggccccggatgtgggcccagaggctgccccagccctggtcctccgaagggctcacgggtagcccggccactgaaagggcctatggctgtttttcttttggattcaggcctcagaagaagcaatgacagcagggagggaagcttttggccctggtgattataatgctctctgctttggaagaacaagtttctggatttttttggtgtttctaattattaaaaaaagatgatcaaaaagaactgttacagctaaactctctagcagatattgctcattaagaattacaaaagcaaatgcaattactcgtaggatgggggagaagaaagggacatttctggagtcttcactactcctggaggggaccccttggactgacgcacatgattctggggtccctggcgttctacctggtgcagctcacaggttccgagacaggccaggcctcccgtctccgctccagcccccaggctcgacagagtgggaaggatgaaacacactcggaccctactggcagggaggcctgcgaggctgactccacatgggctcaccctgaccaggtcacgggaaggggactgggggagtcaggccaccccagtggactccagctcccagaggtggaaggcgaccaggctgtgccgactacgttccggacttcagcaggtcaagggagcgctcctgcacccagaaccttgggacctctttcacaagcacgggagaaacaagagtgcaaaacctgggtgctgcctggagcctccttcacctggcacaggaaagcccttgaaagaagcgaggaaaagaccacgaatctgcttggacagaagaagtgaccagcagacagatttgtcgtttttttttcttttttttctttttttattttcccttgtcctatgctatggttatcagaaatattgtaattaagcaacaggtataattttaacaggtctttttttgtgtgtgtggagccacaagcaaaatgagtttataattgtgcaatatacagatatatatataaaaattcaactgctttgtgtgtctagtcggtgcgttaaataaaagggacagaaaaactaaaagcaaaactaaaaagcaaaacaaaagcccaggatagaggagacaaagcaggcctatgcgcacagtctatgtgttactggatataatcagggtcaccaggaagaacagctttgccacttgacacacaaacactgcggggagaggggctatcagtgggcaggagccaaacctcttggccttttcacctcatctgctctcactgctgagcaggacctgattaaaggtaggacagaatgggggtttgggggcaaagagatttccaaattccccaaatgttcttgaattcaaaggtaggatttcctccagggtctgggctctgcctgtgcacaagtcggagcccggagcgggagctgggggttgtgctccctccttgcactgccctcacacctgcttccttctgcctcctgacagggcaggcagggggccttggggaggcagtgagaggccagctcagaaggctcagctgatccgaggcgagcagagcaggagtgggcaaggcaggctgcccctcaggcagaagtgccttcctagttccctgggtgttttcctgacacgtcagcgctggggcaggctctgtcaagatgagaagagtgggaaggagggtggtgctgggccttccaggtcactggtgaacgctccaccttccataccactcccaaaagacaggttcagaagccatgtcctcaggtcggctacctccagattccccttgcctgtaatgctcaccaggcatctcaggccaagtgctaagtatttttagatcagcactgttgtaaaagcttgctcgtattcattcaaaaacatcgaaatgtaattttctgccaaatgttttctaggttttccttctaaattgttgagaactgacttcagtgttcagcttttcccctctaatatgtaattttagaccctgggggaggcagtatcctaacgatttataacaagtagactatgccttttctaaagattgatacaatatctaaaagagaaagacaccaaaatggagagaatcaacaaatcccgtcagagcagagagaagagtaggaagacccggagggagcagggctctgcccccccaccgggcaggtcctccagacccactccatggtaggaactctagaaacagctgactccctgaagtctaggacacaggtcctagaatctgcaggtgtgaacttgaaacaggaatccatttggggcaatgacacaggctaaaaatgtatatgcccaaagatcttcttaaagaactggtacctgtaacctcccctggcccagtcagcccagagagcctgactggaatgctctggaaaaggagctgtggttagacgggggacacagagttctggctgtcaggctccacttgggctaaaccaattccagatggtcccgcgcaggggactccgctcgtatccctctgctccctcctgggcttgagccgcttactaagtgatttaaaattcagagattctgtcagctaaagaaactcctttctccacccaacttggcagtttgtgtctggttattaccctctttcgccatcactgtcacagcaatgaaaagctgggcagagaagcaggtgacaatttggggctgctccctgtcccaggtgcactgttcatgcttcgggcctggaatgatgccacccaacagaagattgtctgcacccgcactggcgctcacgagtagcagcttccgccatccagcgagctgagaagctggggccgttggctagtttggcactgatggattgggggatgtggcgtttctgggtgtcccctgtgtcttttgatatgggaatacagcatcaacagaagggagctgtgctagcgcctggctgtgaccaagtatctccagctcactgagctgtcaagaccggcaatcccactggctatgacaagcccaccagcaggcagggccgggaggggtagacctggggggagctcgacgacatacagtattgtcaggagaggaggtagtaactaacaactggaacaagggtgggggagactgtggatgtggccttaatgacctagccccatgggtactggaaagctgtcggtcaattctgctgttcacaaattcactgaaagaggcccccatcttcataatgttcaagtacagacaaaattgaaattgaggtcacaccccaaaactgggccggacacagctggtgagaatcctgcagcttaaggctttccctccaacctcctgtcaacctgaccccaaggcaggggcagcatgagagctgcagggcccctgcctgccagggcgataaaccgccaaggctgcctgctgaaaggcgactgactcgtgatgcctttgggaaagacgagggaatgaggaagaaagggggaaatagagagaaaaccctaaggagcctcaggccccactggcagctctggaataaactggaagggaaagaggctgggcaactgcctctttgagggagctgcaggtggggcccgaatgaaataaagtgacgcttgaaatgctgtgttcccaaccacgactgccccatcggccctgaatgaactgtcatgggtgacaggggggcctggtgggccacgcactcctcttaccaggaccagatgacgcccaggtgacggggaagcagctctggacaatgattccagaagccacattacatttgactaagtataatacataaaaacccaactgaccaaaataaacatcttctcagtgacaacctggtcggatgctgcgctctcgtggataagtgtcctttggtagtgccaggagttcgaggccactatgggggcaggagccttctgtccttggaggaagagttctggaggactcaccctctcttctgaccccccttcccttcctggggaagagtcagaagtgaagctgggggggtcatcagcagagcaggtggaagggatcagggatcagggattgggctgatgggagtttggttgcaggacttgcttttacagcataaggaaatggacacatatatgctagaaagtccaactatgagactctacaaacagaacggggcaaactccctcacttctaaccattccagaagagacaaacacggttttttcttaagctactgattggaactgtcaactatggttcctgatcactaaagactggcaaggaagtgctagacagtttctatgatgtttcactccttcatgattacaccatagtaaggaagccagggacaataactgaaatacacaagacaacacacacttgacagttcatggcagcagctcacatgggacatgcctgtgggtgtttctggaagcataagactgctgtctcatttgctactttgataaggtacttctcagttggacagatttagatataagagacatctctgtaaacacagaaaaggatataccaatatgatgaagatatgcagctagataaggacttcctgaacagaggttaaaaagatgggatcccacatgaaaactgatc

SEQ ID NO: 2393 - DNA, 619 bp, Homo sapiens
tagttgaaatgtgtttgtcctctacttagaccaacaaatttccatgtggtcttaagtattatctcaaaacttacttaactagaagagctcagaagacggatgcgggcccaatcatgctatgtactcgtacgtaaggaccaaggaagcaagaacaatcacaggtcaaacaacttctagcatctcacataattttggggcactagaaggcagacatgatggggaggtgaaaaagttctagaaatggtatcggacaggtatcggaatctaggacacatggtaactggaggaattacttagaggagactgtaattttgctctacatttaagtggcactatctatgcagcattatcggaaacagaaatatccagcaccctttctctgcttctagtgaggtacaagaacatttcaattctatcattttccttgttaccaagggctgaatgtatacaacatacagtttaattggttagcatttatattctactcagaggaaatctgttggtacctgactcaggaacacaaaacaaaatgacaccaccatctcttgccctgaaagtcctcattctcatttcctctccttactacatccatcatctctactatcctgctcaaataaaa

SEQ ID NO: 2394 - DNA, 363 bp, Homo sapiens
taagctcatgagttatcattagtgttagcatattttatgtgtagcccaagacaattcttcttccaacatggtccagggaagccaaaaggctggataaccatggttgagaggatcatcccacagaactgttttatgcaactcaaacaggtaactgcgcaactttgattttaactaaagaggtagaagtcataagcaaagtccacaattctaagatttggttttctgtcctaaacaaattcctactcactcctcacaatgcaaaagtaacattttcccatgatttcatgacagaacgttacagcatttagaaaagactggacaaataatatgaccttaatgttacaatttgctaggaatgatgcg

SEQ ID NO: 2395 - DNA, 457 bp, Homo sapiens
gcctactactactaaattcttggccgcgtcgacagaaaatataagaaactttgtgaaaaaaaatgaatgagtgctaaagtgcttgctatactagttaagcaactacaataagatggattaatttaagacaatttaaatgcacacaaagcagatagttgtttagtatattgtgtggtagatcacgaaggatgagaggatgaaggcaggaggctgttaaaacattttagcataacacctacagagcttgagccagtcttccaggggcaaatatataaaaatgttgcaaaatacaaaatatttaataacagcatagagaatgagattcagctgtagagagatcatttgaatctactcccagcatttaagctagactgctggtgtactaacagcactgattctgttagcaacaagtagtggtagacaactagaaatatgtcagtttaaaacttgtgaagtt

SEQ ID NO: 2396 - DNA, 393 bp, Homo sapiens
  misc_feature (36)..(36): n is a, c, g, or t
  misc_feature (306)..(306): n is a, c, g, or t
  misc_feature (392)..(392): n is a, c, g, or t
tcatctttgggtggtggagtgcaaaggaggcgaccntgcaacagaggagtcccggtcaccagcaaccatgacggaccagcaggctgaggccaggtcctacctcagcgaagagatgatcgctgagttcaaggctgcctttgacatgtttgatgctgatggtggtggggacatcagcgtcaaggagttgggcacggtgatgaggatgctgggccagacacccaccaaggaggagctggacgccatcatcgaggaggtggatgaggacggcagcggcaccatccgacttccgaggagttcttggtcatnatggtgcgccaagatgaaagaaggaccccgaaagggaaagagccgaggaggagcttggccgagtgctttccgcatctttcgacaang

SEQ ID NO: 2397 - DNA, 356 bp, Homo sapiens
tttttgccattcagcctttattgatagaagacaaatgctcaattctacacttacagtcttgatgttgcccaaacacggagtctttgtgaataacagtttcaacatcttatcaggggtcatgttacacaaagcagatgagcagtgcaggtcagacgggtagcactgggattgtgtctaagggtggtggatactcggtagaaagttccagaactgggaaaaacttaaagctcgcccttcaaggcggggcttaatgccaaaactcccaggcagctggctgagctgttgattaaacagaacatcctggctctagggttcgggaactcccagacaccaagtcaacatccatctggtggaaa

SEQ ID NO: 2398 - DNA, 6280 bp, Homo sapiens
ggtgaaggacctgggcagcctcaatgggacgtttgtgaatgacatgcgcatcccggaccagaagtacgtcacgctgaagctcaacgatgtcatccgctttggctacgattccaacatgtatgtgctggagcgtgtgcagcaccgagtcccggaggaggcactcaagcatgaaaagtacaccagccagctgcaggtgagcgtgaagggtttggcgcccaagaggagcgaggcactgccggaacacacaccatactgcgaggcctcgaaccccaggccggagaagggggaccggagaccaggaacagaggcagcctcttaccgcacacccctgtatgggcagccctcctggtggggtgaggacgatggtagcacgctgcctgatgcccagcgccagggagagccctacccagagcgccccaagggacccgtgcagcaggacggggagctccacggcttccgcgcccctgctgagcctcagggctgctcgttccggcgggagcccagctacttcgagatccccacgaaggagaccccgcagccgtcgcagccccccgaggtgccggcacacgagatgcccacgaaggatgcagaggcaggtgggggcggagcggcccctgtggtgcagagccacgcctccttcaccatcgagtttgatgactgcagccctggcaagatgaagatcaaggaccatatcaccaagttttccctgcgccagcggcggcccccgggcaaggaggccacacctggcgagatggtgtcggctgagaccaaggtggccgactggctggtgcagaatgacccgagcctgctgcaccgggttggccctggggatgaccgccacagcaccaagagcgacctgcctgtccacacccgcaccctgaagggccacaagcacgaggacggcacgcagagtgactcagaggaccccctggccaaggcggcctcggccgctggggtgcccttggaggccagcggggggcaggtgcggctgcagaggcagatcaagcgggacccccaggagctactacataaccagcaggcctttgtcatcgagttcttcgacgaggacacgccccgaaagaagcgctcccagtccttcacgcacagcccgtccggggaccccaaggccgacaagcgccgtggcccaacgccggccgatagggaccgccccagtgtcccagccccagtccaggcagggggccgcagctcggggccacagagggccggctcgctcaagcgggagaagacagaggaacggctgggcagcccctcgcccgcctcccgaacccctgcccgccccttcggaagcgtggggcgccgctcccgcctggcccaggacttcatggcccagtgtctgcgggagagctccccggccgcccggcccagccccgagaaggttcctccggtgctgcccgctcccctgacaccccatgggaccagccccgtgggccccccgaccccaccgcccgcccccacggacccccagctgaccaaggcacggaaacaggaggaggatgacagcctcagtgacgcagggacatacaccatcgagaccgaggcgcaggacacggaggtggaggaggctcggaagatgatcgaccaggtctttggggtgttggagtcccctgaactctccagggcatcttcggccacctttcgcccagtcatcagaggggacagagatgagtctgatgacgggggcgtggcccagcggatggcgctactgcaggagtttgcctcccggccactgggtgcggccccccaggcggagcaccagggcctcccggtgccgggctcccctgggggtcagaagtgggtgtcccgctgggccagcctggctgacagctactcagacccgggcctcacagaggatggcctgggacgtagaggcggggagccggaggggtccctgcctgtgcgcatgcggcgacggctccctcagctgcccagtgagagggctgacagccctgcgggcccagagagcagcaggaggagtgggcctgggccaccggagctggacagtgagcagcccagccgcctcttcggccaggaggagttggatcctgacagcctcagcgatgccagtgggtcggacgggggccgaggccccgagccaggggtggagccacaggacagcagacgcaggagcccccaggaggggcccacgtggagcaggggtcggcgctcaccaagggcccccggggagccaactcccgcctctttcttcattggggaccagaatggggacgctgtgttatctaggaaactgcttgcggctccaggggatggggagggcctagggcagacagcccagcccagccccccagcacgggatggcgtctatgtcagtgccaatgggagaatggtcatccagctacggcctggacggtccccagaacccgacggccctgccccagcctttctccggcaagagagcttcactaaggagccagccagtggtcccccagcgcccggcaagcccccccacatctccagccacccgcttctacaggacctggccgctacccgggccgcacgcatggacttccactcccaggacacccacctgatcttgaaggagacggagacggccctggcggccctggaggcccgactcctctctaattctgtggatgccgagtgtgaggggggcagcaccccgaggccgccggaggacgccctgtctggggactcggacgtggacacagccagcaccgtcagcctgcgtagtggcaagagcgggcccagccccacaaccccccagcctctgcgggcacagaaggagatgtcgccatccccgccagctgcacaggacccgggaggcaccgccctggtcagtgcccgtgagcagtcctcagagaggcagcatcacccacttggcccgacggacatgggccgtggagagccggtacggcgctcagccataaggcgtggccacaggccccgagggtccctggattggcccagtgaggagcgtggccctgtcctcgcccacctacccagctcagatgtgatggcctccaaccacgaaacccctgaggccaccggggcaggacggctaggttctcgccggaaaccagcggccccaccgccatccccagctgcccgggaggagcagagccgtagctcagccagctcccagaaggggccgcaggccttgacccgctccaacagcctgtccacccctcgccccacacgggcctcccggctgaggcgggcccggctgggggacgcttcagacactgaggctgcggatggtgagcgggggtccctgggcaaccctgagcccgtgggccggccagctgctgagcaggccaagaagctgtcacgcctggacatcctggccatgccccggaagcgggccggctccttcacagggactagtgaccccgaggcagcccctgcccgcaccagcttctctggccgcagtgtggagttgtgctgtgccagccgcaagcccaccatggccgaagcacgggctgtctccaggaaggctgccaacacagccaccaccacgggtccccgccagcccttcagcagggcccgctcgggcagtgcccgatacacctccaccactcagaccccgagggctggcagctccagccgggctcgttcccgggcccccggcccccgggacacggacgacgatgaggaggagcctgacccttatggtttcatcgtgcagacggcagagattgcggagattgccaggctgagccagacgctggtgaaggacgtggccatcctagcccaggagatccacgatgtggctggggacggtgacacactgggctcctcggagcctgcccacagcgcctccctcagcaacatgcccagcacccccgcctcgaccatctctgcccgggaggagctggtgcagcgcatccccgaggccagcctcaacttccagaaggtgccgcccggctcgctgaactctcgggactttgaccagaacatgaacgacagctgtgaggacgccctggccaacaagacgcggcctcggaaccgagaggaggtgatcttcgataacctgatgctgaacccggtgtcccagctgtcgcaggccatccgtgagaacacagagcaccttgccgagaagatgaagatcctctttcagaacacagggagagcttgggaggacctggaagccaggatcaacgccgagaacgaggtgcccatcctgaagacatctaacaaggaaatcagctccatcctgaaggaactgaggcgggtgcagaaacagctggaagttatcaatgccatcgtggaccccagtgggagcctggacctgctcacaggaaacaggagcttggccagctctgcacagccggggctggggaagggccgcgtggctgcccagagcccaccctcacccgcctcagccgaggccctgctgccagccctgcccctgaggaatttcccacagcgggccagctgtgggcctcccagcctcccggaccccaccttcctccctgatgccgagaggttcctgatctaggccccagacctggccaggccagcctccctgtgcgtgtgcgtctctgccttccgtccgccgcacacccgcctgcctggccgcaggtggttctccctgaagacccccacatgtgccatatccctgtgggcgggtgcctcccacgcccttgccccctcgtcagctcccagccagcaccctactcaccctgtccagccccatggccacccccacccctgcctcgccccctacaggcctctgggcccagctcctggccaggctgctgccaaggtcaagccctcaagggcattaccccgcctcctcttcatcactgttatttttgtctttagctttaaaggaaagagttgttggtgccattgcaggtgccccctccaggcctgactggctccgccaggcactaacctgccataaccctttgtgctggcctgcggccaggcagaggaagagaggtcgactgtggggtcatttggtgccaaacatggaggtgggcaggctcacctgttcctgggactgtctgagatggcagggcacttgccctggtggctcccacctgaccccaggccttttataggcaggagccccactgcttccagcctctggtgccaacacagttgccaaacccattgagcttggggctgccccgtggaggcctcctgggtatggaccaggggcttgttgagagctgagccatgcacacaggtgcagacaccccccaactcccatgcacacggctagtccaggcgcctccacgctgcaccgtgaggactgcagggcatgtccccgtgaggggctatgggcctctgtaggtgggcttccaaggtcctgggtgcagccgggtgcatggcagcccttctggcgggggtgagcgcacgaccaaagtcactggaagccgggtttccggaagctcgcagcttggcctgcaccacacgccctccccttttggcttcacgccatcaggcctcaagtgggcatgggggcagggacgggcccaggaactgttgttttctcaggattctttcagctgggaacatggcaggtgagcagagcttggtgcctctgccgtggcccctgctggggcagcccgtgttgccggagcctctaagccaaagagcccgttggccgtggttggtgggggtggacgtgggggtgtcccacctggaccagactggcgtgggtgagctccacaccctgcctggcaatggtatgagagtcggacctggacagggccagctgctgggggagcggcactggggactggaggctggaagcgggtggtgtgtgtcccctgtttacttttagctgagctggggttgggtgtacgggttctgttcctctgagccctgcggcccacctgatgtttacgtgtgtgtgtgagggggggcgggggtggcaggtgtccccccctggtccccgccccaagagcctgctgtctgtatggaggaggtgctagcccggtccaccgggctgctgcccacccctgcatgccccagttgcccaccccgcctgcccctggacatgaagtggtcacgcttcatccacggctccttcccacccctcggcagtggctgtgcaatgttttaagttcacaagttcctgctcctccccacactgagctcctttgttcctccccctccagcctttgcctgggaactggtccttgtttgccgggcttctcggagggttcactgtacattcgttctcaggtggtcttgtggctgtctttcggaaaatggttattttatatgatttgtcatggaatttgttctaataaatcattcttctatc

SEQ ID NO: 2399 - protein, 1498 aa, Homo sapiens
VKDLGSLNGTFVNDMRIPDQKYVTLKLNDVIRFGYDSNMYVLERVQHRVPEEALKHEKYTSQLQVSVKGLAPKRSEALPEHTPYCEASNPRPEKGDRRPGTEAASYRTPLYGQPSWWGEDDGSTLPDAQRQGEPYPERPKGPVQQDGELHGFRAPAEPQGCSFRREPSYFEIPTKETPQPSQPPEVPAHEMPTKDAEAGGGGAAPVVQSHASFTIEFDDCSPGKMKIKDHITKFSLRQRRPPGKEATPGEMVSAETKVADWLVQNDPSLLHRVGPGDDRHSTKSDLPVHTRTLKGHKHEDGTQSDSEDPLAKAASAAGVPLEASGGQVRLQRQIKRDPQELLHNQQAFVIEFFDEDTPRKKRSQSFTHSPSGDPKADKRRGPTPADRDRPSVPAPVQAGGRSSGPQRAGSLKREKTEERLGSPSPASRTPARPFGSVGRRSRLAQDFMAQCLRESSPAARPSPEKVPPVLPAPLTPHGTSPVGPPTPPPAPTDPQLTKARKQEEDDSLSDAGTYTIETEAQDTEVEEARKMIDQVFGVLESPELSRASSATFRPVIRGDRDESDDGGVAQRMALLQEFASRPLGAAPQAEHQGLPVPGSPGGQKWVSRWASLADSYSDPGLTEDGLGRRGGEPEGSLPVRMRRRLPQLPSERADSPAGPESSRRSGPGPPELDSEQPSRLFGQEELDPDSLSDASGSDGGRGPEPGVEPQDSRRRSPQEGPTWSRGRRSPRAPGEPTPASFFIGDQNGDAVLSRKLLAAPGDGEGLGQTAQPSPPARDGVYVSANGRMVIQLRPGRSPEPDGPAPAFLRQESFTKEPASGPPAPGKPPHISSHPLLQDLAATRAARMDFHSQDTHLILKETETALAALEARLLSNSVDAECEGGSTPRPPEDALSGDSDVDTASTVSLRSGKSGPSPTTPQPLRAQKEMSPSPPAAQDPGGTALVSAREQSSERQHHPLGPTDMGRGEPVRRSAIRRGHRPRGSLDWPSEERGPVLAHLPSSDVMASNHETPEATGAGRLGSRRKPAAPPPSPAAREEQSRSSASSQKGPQALTRSNSLSTPRPTRASRLRRARLGDASDTEAADGERGSLGNPEPVGRPAAEQAKKLSRLDILAMPRKRAGSFTGTSDPEAAPARTSFSGRSVELCCASRKPTMAEARAVSRKAANTATTTGPRQPFSRARSGSARYTSTTQTPRAGSSSRARSRAPGPRDTDDDEEEPDPYGFIVQTAEIAEIARLSQTLVKDVAILAQEIHDVAGDGDTLGSSEPAHSASLSNMPSTPASTISAREELVQRIPEASLNFQKVPPGSLNSRDFDQNMNDSCEDALANKTRPRNREEVIFDNLMLNPVSQLSQAIRENTEHLAEKMKILFQNTGRAWEDLEARINAENEVPILKTSNKEISSILKELRRVQKQLEVINAIVDPSGSLDLLTGNRSLASSAQPGLGKGRVAAQSPPSPASAEALLPALPLRNFPQRASCGPPSLPDPTFLPDAERFLI

SEQ ID NO: 2400 - DNA, 372 bp, Homo sapiens
  misc_feature (265)..(265): n is a, c, g, or t
ggctcttttaaatgaccccaggcgtcgtgtattgaatcctagactcacgtccgtctcgccggcgcccgagccagtccgcgcgcaccgcgtctgcgtccccgaaagccccgcccgcaagggctgccctgcctacctggtctccgacgtgctcgtctggagggcggtgcgaggggccgagccgacgagatgttcttgctgcctcttccggctgcggggcgagtagtcgtccgacgtctggccgtgtacgattctgggatccggagtncttccacgcagacatgacgaagggccttgttttaggaatctattccaaagaaaaagaagatgatgtccacagtcacaagtgcaggagagaattttgataaattgtta

SEQ ID NO: 2401 - DNA, 415 bp, Homo sapiens
taaatgtttcagccttgggtactagattagaatttaacatgaaatagttgtgaaatgggaaagcctagaattgatggcaaacacatatgcataaagttatgatagaaacagccaaaaaaattaattaaagtaagcaaccctgttaccaggaaatcattaacctgggaaaaaaaaaatctaagaaatggtattgcctgaagtaacaaatggtggccaaataaaatcttcacttcttttgttgttttaaactactatattcttaatatccaagaatggcatcatacaaggaaacaagctatcatgcagctggaactacttataaactgtaattccactcattatttttcactgtcctgaactcactaaataaggctacacctgaaatctgcacactgaaggtttgatgttttctctc

SEQ ID NO: 2402 - DNA, 496 bp, Homo sapiens
tcagccagctgtgctttattgacaatgcgcccctcaggccttgaccgcgtacttccgcagcgggtacagccgctccttccgctgctgcttcttggtcttcaggttctcctcgtgcttgttgagccggcgcgcatggcacgtgtcttcttaggccgcagtccaggggcttgtacttcttgcccttgtagaatttcctgaggttttctttctgagtctggttaataactgtgagaacacgggcaatggatttccggacgactcggatcttagagagcttggaggccgcaccgcctgtcactttggcgacgcgcagctgggacagctccaccttcaggtcgtccagctgtttcagcagctcctccttcttcttcccgcgaagatctcgagccttgatcttggccattgctgcacaagccgccaacgccgccgcccgctccgagggaaagaggaagtaggcggggctgacctccgcaactactgccgggtggcggcgggc

SEQ ID NO: 2403 - DNA, 774 bp, Homo sapiens
gttgtgtcttcgttctttccgccatcttcgttctttccaacatcttcgttctttctcactgaccgagactcagccggtaggtctgcagagtggtcttcctggtaatttagttgtgagtgaatgtgtggaggagccagcgggcttaggacaggtcctgtggcacagtccgtggctttgagggaaaagggcctcgcggtggtcctccgccttcccccaggtcgtgatgcaggcgccatgggccggtaatcgtggctgggctggaacgagggaggaagtgagagatatgagtgagcatgtaacaagatcccaatcctcagaaagaggaaatgaccaagagtcttcccagccagttggacctgtgattgtccagcagcccactgaggaaaaacgtcaagaagaggaaccaccaactgataatcagggtattgcacctagtggggagatcaaaaatgaaggagcacctgctgttcaagggactgatgtggaagcttttcaacaggaactggctctgcttaagatagaggatgcacctggagatggtcctgatgtcaggcaggggactctgcccacttttgatcccacttaaagtgctggaagcaggtgaagggcaactataggtttaaaccaagacaatgaagactgaaaccaagaatattgttcttatgctggaaatttgactggtaacatctcttaataaattttacaggttctgccaaaaaacaaaaaaacccggctctttcggtcgggaaaaggttgaatggctggaagttccga

SEQ ID NO: 2404 - DNA, 393 bp, Homo sapiens
ttttttttttttttttttttttttttttttttgagggccatgttcctgtttatttaccaacttgatgatacctgggggagcctttgggactgtttgcccaagagccccctttacaagagtactgcctgctcgtcaccaccatgtgccctgccctatgccttggggcctggctctgctgttcctggtcaagcccagcccccaccctagggctccatcagcctcagctcctgggtggggtgggggttcttctggcacgagtttggggttaggaaccctccatgttcaacaggggccctcaccgcttgaggggtctcgggcctcacattgacttcctggggaggctgcatcccagcagcagtgcttgcagcccgagggtccagcagccccaggtgg

SEQ ID NO: 2405 - DNA, 4791 bp, Homo sapiens
caactataagactttgattattatctgcgcactcttcactttggtcacagtacttttgtggaataagtgttccagtgacaaagcaatccagtttccacggcgttcgagtagtggcttcagagtggatgggtttgaaaaaagagcagcagcatctgagagtaacaactatatgaaccacgtggccaaacaacagtctgaggaagcattccctcaggaacagcagaaagcaccccctgttgttgggggcttcaatagcaatgtgggaagtaaggtgttagggctcaaatatgaagaaattgactgtctcataaatgatgaacacacaattaaagggagacgagaggggaacgaagtctttcttccattcacttgggttgagaaatattttgatgtttatggaaaggtggttcagtatgatggctatgatcggtttgaattctctcatagctattccaaagtctatgcacagagagccccctatcaccccgatggtgtgtttatgtcttttgaaggctacaatgtggaagtccgagacagagtcaagtgcataagtggggttgaaggtgtgccattatctacacaatggggacctcaaggctatttctatccaatccagattgcacagtatggattaagtcattacagcaagaatctaactgagaaacctcctcacatagaggtatatgaaacagcagaagacagagacaaaaacaagcctaatgactggactgtgccaaagggctgctttatggcgaatgtggctgataagtctagattcaccaatgtcaaacagtttattgcaccagaaaccagtgaaggtgtatccttgcaactgggaaacacaaaagattttattatttcatttgacctcaagttcttgacaaatggaagtgtgtccgtggttctagagaccacagaaaagaatcagctcttcactatacattatgtctcaaatgctcagctaattgcttttaaagaaagagatatatactatggcattgggcccagaacttcatggagcacagttaccagggacctggtcactgacctcaggaaaggagtgggtctttcaaacacaaaagctgtcaagccaaccaaaataatgcccaagaaggtggttaggttgattgcaaaaggtaagggattcctcgacaacattaccatctctaccacagcccacatggctgcattttttgctgctagtgattggctagtaaggaaccaggatgagaaaggtggctggccaattatggtgacccgtaagttaggggaagggttcaagtctttagagccaggatggtattctgccatggcccaagggcaagccatttctacattagtcagggcctatctgttaacaaaagaccatatattcctcaattcagctttaagggcaacagccccttataagtttctatctgagcagcatggagttaaagctgtgtttatgaataaacatgactggtatgaagaatatccaaccacacctagctcttttgttttaaatggctttatgtattctttaattgggctgtatgacttaaaagaaactgcaggggaaaaactcggaaaagaagcaaggtccttgtatgagcgtggcatggaatctcttaaagccatgctgcccttgtatgacactggctcaggaaccatctatgacctccgtcacttcatgcttggcatcgctcctaacctggctcgctgggactatcataccacccacatcaatcagttgcagctactcagtaccattgatgagtccccaatcttcaaagaatttgtcaagaggtggaaaagctaccttaaaggcagcagggcaaagcacaactagagctcacaaccaaaactgcacttcagcctctgctgtacacagaaactacaggctctgtctcaggagagcataggcacattttaaaaggttatgtactaggtttttgtggattctatcaaagtgataagtgatccttaaaaccagccttctaaaataattgcattccatgggttgggtatttagaaatgtaggtggcatttagaacacaatgtttaatcaatgggctgaacaaagatgcttcactttgccttgcccatcaccctatacagtttcgcagatagtctagtcactctatgtgagaaagataatggtaagtagttgctactggccaactgtctagcacttacctgaaaacttagtatggagctcttttaaaatgtgattatttatatttatgttgaaagcggactttaaaaaaaataatgtgctgtaacacagtaaatatgtacttgtagcctggatagcagactgtgttcaactttttaaaaagatgtttcctttctatagattaatttcttgggagcaaatgagtatttgttgcatttgttcaatttgttgtatatggtgaatatttaattatggttttcttgaaacgtgtaaattaaaaacacaatcagtgttcaggcttcagttatataatgtaagcacaactaaaatgaaacttgttgactgcacaagaaattacaaaaatgtttctgttttgaaacttgatctacaatcagtaaaagtttgataatcagtatatcccttcccaacccccattgtgacagtttctttttgtcactgtctagaattttgtattttatttcagactataccttggagttttgtatattttgagagagatatttttgggacattattttggaaacttattacaaatctaaatttggaaaggagctagtagctttaaggccaccaccatattttacttttttaggatttttccccctttaaataaaaatattagatcaaatactatatgcaagaaatcatagcaaagtttttttttcctaccaagatcattcttgatcatcagcttcccaaactagtaagtctgtgcatcattgggtgtttttttttaatttaattttaaattatcccagctattagatagaagggatgttactgcacttatgtgtaatcagatctttatttaggtatacatatcctcctataccgcacataaatagatttcagagcccccatacaatgggcagtgtctgctatagggcttcaggcattaaataaaaccgagggttgttgattttgctgtgacagtacactaaatcaatactatatcttatacagtttgaaaatatgataccctacactttcaggggaccgagtctgacaaacacaatacatttatctgtgacctatatcaagtacacatttaggagccaggtaggttacctgcttacacactatattttaattgaattcaaactatcaagcactacttagaaactggaaaacatatatatgttagcatcaaagggggcagaagcaaagaagatacagatctgcactgaagacattagactggccatagaaaagtaagcttgaactcccaattgatgtgaccacctcttcttaattttgttcacagtaaaaacacttttttgagttattaggcttacccctagcttttgacctttgcatttcatatatgttagatgtctcagcaagaatatctggtctcccctaatttttattcccagtgccgatgttcaaaataaactttctccagtctgggaaccttttttacttccccatatttgttattatttagaatggttcatacgtctgctttgtttgcatactggtcttcagattatgagactcgatgataacagtatggtactgcttctgtgacaaatatcgtgccttaacaatgtggctgtccttttccactgaagaaggaaagacgttttgatctagaaatagcgttgtgatttccttgctgttggttttacactgccttccacattgcaacagcaagttgatttcttgtgatcccagaattttctaagaggatgagttgaatctatagcagcattgtcagtacagaccagtggttctcaaactttaaaatgcctcagcatcacttgggagcttattgaaatgcagatcccagagtcagtaaatctgcctgtgaagtatgatagtctgcatttgtaatgagcattcaagtgattctgatgcaggtgagctgggggcatacagggaggaacactgccctggactatccattgcatttttgcctctaaacaactacagaattttctagggttttaaattatgtaaaatgtttacttattctgagcttagagagaatggggagggtatttttaaattttattgttttatttctttaagtttttctttgctttaagattataggtattaggtttgtttttgtttttccacttatcttgagttcactttgatgttaaatctattgctacttcagttgtaaaaccagccaaaagtttctggatgaaggtcaagtttgaccttttaggagttattgtacataaaggcttcatccacgaaccatccagcgcacagaagcaagtgcaaaaatgacacaagcacaactctccagacgtggctccttctcctttctcagtgcagactctcactgaaagctgctattttcatcctccttgtggttgcttttcttgtttctcttccattgtacatgtgggttatataccatatgttaaatatgcaataaagtgtttacaggatgtccttctgaagggtagtcctttgtaaagctgtacagactttgcagtttaagcacaatgtgcacatgttagttttatatacagcaaaacttgattttttgcagatggaaaggtattttgtttctatacaaagtaaatggattgtttgtgcttaatgtaaagccgctttataaaactgtaaaataaagtttttttcttaaaaag

SEQ ID NO: 2406 - protein, 609 aa, Homo sapiens
NYKTLIIICALFTLVTVLLWNKCSSDKAIQFPRRSSSGFRVDGFEKRAAASESNNYMNHVAKQQSEEAFPQEQQKAPPVVGGFNSNVGSKVLGLKYEEIDCLINDEHTIKGRREGNEVFLPFTWVEKYFDVYGKVVQYDGYDRFEFSHSYSKVYAQRAPYHPDGVFMSFEGYNVEVRDRVKCISGVEGVPLSTQWGPQGYFYPIQIAQYGLSHYSKNLTEKPPHIEVYETAEDRDKNKPNDWTVPKGCFMANVADKSRFTNVKQFIAPETSEGVSLQLGNTKDFIISFDLKFLTNGSVSVVLETTEKNQLFTIHYVSNAQLIAFKERDIYYGIGPRTSWSTVTRDLVTDLRKGVGLSNTKAVKPTKIMPKKVVRLIAKGKGFLDNITISTTAHMAAFFAASDWLVRNQDEKGGWPIMVTRKLGEGFKSLEPGWYSAMAQGQAISTLVRAYLLTKDHIFLNSALRATAPYKFLSEQHGVKAVFMNKHDWYEEYPTTPSSFVLNGFMYSLIGLYDLKETAGEKLGKEARSLYERGMESLKAMLPLYDTGSGTIYDLRHFMLGIAPNLARWDYHTTHINQLQLLSTIDESPIFKEFVKRWKSYLKGSRAKHN

SEQ ID NO: 2407 - DNA, 441 bp, Homo sapiens
ggggtgccaccagcttaaccacagcacacactgcaactcattcatacgagaaacacatgaaatgtaggctgtgttgagaaataaatagcagaattgtaattaggggccagaggaaaagggtgtgaagaccatgtcaagatttatgcctgtgagatgggttgcagaattgacctgagcagaccaggcttccgagggtcaaaaaagcgtctgaaggagagacactgagtgcattctgggttcacattcccctcctctactgcattcctgaattttctgcctcacagcggcatctgaagcagtggctgtatgtgtccttaaccacccttcaagtccacaacatgtcatattacctcattttggctccctgggactattttggaggacctgaattagtcatgtggggtacttgattaaaaatcacttgaacagccaaaaaaaaaa

SEQ ID NO: 2408 - DNA, 3040 bp, Homo sapiens
tgtgccgttctttgttctaaacctgagttttttggccaagtgttggtgggcacatgcctgtaagttcccaaacactttgggaggctgaggcaggaggattgcttgagcccaggagttcaagaccagcctgggcaacagagtgagacctcatccctaaaataaaaccttttttaaaaaggagggatgtgtgaaggtgccctaagcccaccttctcctcctccctcagacaggtgatggcgtcaatgacgcccctgccctgaagaaggctgagattggcattgccatgggatctggcactgccgtggccaagactgcctctgagatggtgctggctgacgacaacttctccaccatcgtagctgctgtggaggagggccgcgccatctacaacaacatgaagcagttcatccgctacctcatttcctccaacgtgggcgaggtggtctggtgagcagctgggtgggcgtccaggaggaagccggggttagggtggggtggctgcaggtctgggaggcaggacagaggcgtgaccacctccttccccaccagtatcttcctgaccgctgccctggggctgcctgaggccctgatcccggtgcagctgctatgggtgaacttggtgaccgacgggctcccagccacagccctgggcttcaacccaccagacctggacatcatggaccgccccccccggagccccaaggagcccctcatcagtggctggctcttcttccgctacatggcaatcgggggtgagctggaggggttcctcgatcctccccaccccttgggactaaccccctctctgggacaccagctcccccatgcaggtgctgagagggtcttcttccttggccagcctgtccatggccacatgaggccctcaaccctcgatgccccctatctccccagccctgacccccgactcccctctctccaccacaggctatgtgggtgcagccaccgtgggagcagctgcctggtggttcctgtacgctgaggatgggcctcatgtcaactacagccagctggtagggggaggccacaaaggaggggaccaggaggggggggggatgcaggagggtaccaggagggtggcatggaggtggccctggacctcagtctcccgtaccttccctgcagactcacttcatgcagtgcaccgaggacaacacccactttgagggcatagactgtgaggtcttcgaggcccccgagcccatgaccatggccctgtccgtgctggtgaccatcgagatgtgcaatgcactgaacaggtgggggccccccagctacacccaccaccctcccctgaggccactgcccacatcctccactgtgccgcccacctccttctcctcactgttccttctccctccccttcccctctgcagcctgtccgagaaccagtccctgctgcggatgccaccctgggtgaacatctggctgctgggctccatctgcctctccatgtccctgcacttcctcatcctctatgttgaccccctgccggtgaggtttcttccgcccagggccgcccaccccagcactggggagcccacgggcgcccatgaccactcccaccaggggcgccgatgtgggaggctggtgggagtgggctgggcagtgctggtctctggctccctccccaccccctcctgagagggcgcttgtcccctgccccagatgatcttcaagctccgggccctggacctcacccagtggctcatggtcctcaagatctcactgccagtcattgggctcgacgaaatcctcaagttcgttgctcggaactacctagagggtaaggagtgccctctctgtcccaagccctggccccaccacagccccttccccatgacgtccgtcccccgtccccgccccgtactttgcaggtggtaagtttctcagccctggcaggacctgtgtccgccccgttccccctgcgcctgcaggccacatctccggggcagccccactgcctcctcagcccccacagcccctatagcccccatgccacctccctgccttgataacagtgcctcttgtcctctctggccataggataactgttccccctcctccatctctgagcccgtgtcacaggtatcacccccttcttgccctcagcccagctgctgtgcccctgccacccgcgccccctcagcccctttcgcgtcgcatccaaggtcacttgtgctcgcagctccacctggagccgttgccactgctgctgctgctcttccagtcagggtgggccgctggctcccactcgggcgtcagtttggctcccaggccctgggcagtgccagcctctgggcccgtctgctgcgctgcgttgcgctggctgtgtgctgggctgcagtgggggggggcgggtgtctggggacgcaggtgagtaggggagaaactggcagggtggtaagcttctgagcctccaggtaagtgcgtgcctgggagatgcacctgggagggacctcgctgccctcctgccgcctgcctcatcccttctcttttcccctttccagatccagaagatgaaagaaggaagtgagcatccttttgctctgtcctccccaccccgatagtgacacatcttcaggcagagctgtggcacagacccccgtcctgtcccccacacccgtgtcatgtgtctgtttataaacatgtccccttccctttccttccccctcggccacccgcctccctctcaaccttgtaaattccccttcccaaccccgaggggcttgcagggacaaggcgaccgactgcgctgagctgcttatttattgaaaataaacgacggaaaagtctggccttgcctctgtgcaagcttggaggcctgggtcgccgctgtggacaagcgtcttagtgtcatgcagaccagaaggcagctgctgtcccagggccggggcacctcactgcctctgatggggactccagcccccatggctccgctgttgccctggggcaggggacgggctggggggcaggggagggctggagcccaggaggcagcacagcagccagaaagcaggcc

SEQ ID NO: 2409 - protein, 1001 aa, Homo sapiens
MEAAHAKTTEECLAYFGVSETTGLTPDQVKRNLEKYGLNELPAEEGKTLWELVIEQFEDLLVRILLLAACISFVLAWFEEGEETITAFVEPFVILLILIANAIVGVWQERNAENAIEALKEYEPEMGKVYRADRKSVQRIKARDIVPGDIVEVAVGDKVPADIRILAIKSTTLRVDQSILTGESVSVIKHTEPVPDPRAVNQDKKNMLFSGTNIAAGKALGIVATTGVGTEIGKIRDQMAATEQDKTPLQQKLDEFGEQLSKVISLICVAVWLINIGHFNDPVHGGSWFRGAIYYFKIAVALAVAAIPEGLPAVITTCLALGTRRMAKKNAIVRSLPSVETLGCTSVICSDKTGTLTTNQMSVCKMFIIDKVDGDICLLNEFSITGSTYAPEGEVLKNDKPVRPGQYDGLVELATICALCNDSSLDFNEAKGVYEKVGEATETALTTLVEKMNVFNTDVRSLSKVERANACNSVIRQLMKKEFTLEFSRDRKSMSVYCSPAKSSRAAVGNKMFVKGAPEGVIDRCNYVRVGTTRVPLTGPVKEKIMAVIKEWGTGRDTLRCLALATRDTPPKREEMVLDDSARFLEYETDLTFVGVVGMLDPPRKEVTGSIQLCRDAGIRVIMITGDNKGTAIAICRRIGIFGENEEVADRAYTGREFDDLPLAEQREACRRACCFARVEPSHKSKIVEYLQSYDEITAMTGDGVNDAPALKKAEIGIAMGSGTAVAKTASEMVLADDNFSTIVAAVEEGRAIYNNMKQFIRYLISSNVGEVVCIFLTAALGLPEALIPVQLLWVNLVTDGLPATALGFNPPDLDIMDRPPRSPKEPLISGWLFFRYMAIGGYVGAATVGAAAWWFLYAEDGPHVNYSQLTHFMQCTEDNTHFEGIDCEVFEAPEPMTMALSVLVTIEMCNALNSLSENQSLLRMPPWVNIWLLGSICLSMSLHFLILYVDPLPMIFKLRALDLTQWLMVLKISLPVIGLDEILKFVARNYLEDPEDERRK

SEQ ID NO: 2410 - DNA, 293 bp, Homo sapiens
  misc_feature (99)..(99): n is a, c, g, or t
  misc_feature (145)..(145): n is a, c, g, or t
ctttgcagataaatatggcacactagccccacgttttctgagacattcctcaattgcttagacatattctgagcctacagcagaggaacctccagtctnagcaccatgaatcaaactgccattctgatttgctgccttatctttntgactctaagtggcattcaaggagtacctctctctagaactgtacgctgtacctgcatcagcattagtaatcaacctgttaatccaaggtctttagaaaaacttgaaattattcctgcaagccaatttttgtccacgtggttgagatc

SEQ ID NO: 2411 - DNA, 121 bp, Homo sapiens
gctccagtatataaatcaggcaaattccccatttgagcatgaacctctgaaaactgccggcatctgaggtttcctccaaggccctctgaagtgcagcccataatgaaggtcttggcggcag

SEQ ID NO: 2412 - DNA, 641 bp, Homo sapiens
ggagactcggcgggcgctgttgagggagtcgggccgcgactgtggtcgtttttataccttcccgcgcggacgccggcgctgtcaacggaagggcggagacggagtttcgtcatgttggccaggcccatttgagatctttgaagatatcctcaacgtgaggctctgctgccatgaaggtgaagattaagtgctggaacggcgtggccacttggctctgggtggccaacgatgagaactgtggcatctgcaggatggcatttaacggatgctgccctgactgcaaggtgcccggcgacgactgcccgctggtgtggggccagtgctcccactgcttccacatgcattgcatcctcaagtggctgcacgcaccagcaggtgcagcagcactgccccatgtgccgccaggaatggaagttcaaggagtgaggccgacctggctctcgctggaggggcatcctgagactccttcctcatgctggcgccgatggctgctggggacagcgcccctgagctgcaacaaggtggaaacaagggctggagctgcgtttgttttgccatcactatgttgacacttttatccaataagtgaaaactcattaaactactcaaatccaaaaaaaaaaaaaaaaaaaaaaaaaaaa

SEQ ID NO: 2413 - protein, 132 aa, Homo sapiens
MKVKIKCWNGVATWLWVANDENCGICRMAFNGCCPDCKVPGDDCPLVWGQCSHCFHMHCILKWLHAPAGAAALPHVPPGMEVQGVRPTWLSLEGHPETPSSCWRRWLLGTAPLSCNKVETRAGAAFVLPSLC

SEQ ID NO: 2414 - DNA, 385 bp, Homo sapiens
tttttttttttttttttttccaagtcttccacgggggaggttttattatgttttacaaccatgaaaacataggaaggtggctgttacagcaaacatttcaaatagacgaatcggccaagctccccaaaccccaccttcacagccttttccacacgtctctcaaagattgttgtccttcacttgcaaattcaaggatgttggaagtagacatttaaagtagcaggaacaccatcagtgaaacagaagcagaagtacgatgactttgagaaacaactgatgaaaaatacactacagaaaaccatttctattgtgttatgatgtcaggggggcagatgtgcccagggcttagtgtccatcctcccaggacactggtcataccgggcct

SEQ ID NO: 2415 - DNA, 462 bp, Homo sapiens
tccttttcaatattgatgtacctatagatatggtaagacaacatgaaagagcattatcctttttttcacataattttaagtgtctatatttctctttattatcacaatgccatacctggcccacagtggttctggttaataattatacttcaagtaacgtttctctaggtatatctttcactgtgaaatggactggtgttcaaggtcacatcttgaattcataaagctgtaagaagtgttatcattatttaactgtgtgtgtactggtgtgcatgcatgtgctggtgtgcacaagtgtgtgtggtcgatcccaaatgtgtgcgatgtgcagcgcttggctcctagaccattgtccgggtgactagctcgtctccagctccagattcagctctcctgcagggagcctacatagtccttttatttgcacacatcctgctgagaggatttcagaacaaacctgat

SEQ ID NO: 2416 - DNA, 296 bp, Homo sapiens
  misc_feature (111)..(111): n is a, c, g, or t
ttttagtagagatggggtttcaccatgttagccaggatggtctcgatctcctgacctcgtgatccacccacctcagcctcccaaagtgctgggattacaggcgtgacaccnatgcccagccctgcaaagagtatttttctagcgcctgggctggacagttgtttctaaaactaaactattttggtacctgcttctgggccagtccccagcctgtcatgagtgtgtgtgtgcgggcatggatgtgactgggagctctgctgggcacccacatctggggcctagtcaggtgtgtgtgt

SEQ ID NO: 2417 - DNA, 500 bp, Homo sapiens
tttctttttcactgctgtatccctagtacctacaatagtgcctagtacacagtaaatgctcaataaacaactacaaggattttcaagaaatccttttagctaagtgacaaagatttacacaggcccatagatccaagaccagaaacaaagaagcctgggcctgagtaaatcaggaattaaggaaaatgtacacattaataaaaatctacctctcctcatttatattctgtgcaattagctgtctacccattgataatattgtaaacatagacaaattctgagatgggtgcagtagcttatgcctataatcccagcccaaagctagttttagaaagtattttgaggattcccacttctgtaatattttttcctttaaatctctgttcaaatattaagttggcagagatcaaggagggctgatctgctacctttctatttaaccagagatttacaaattgaaggagttgagtgacctgtatatgtatctggagtaagagtgt

SEQ ID NO: 2418 - DNA, 411 bp, Homo sapiens
  misc_feature (354)..(354): n is a, c, g, or t
  misc_feature (370)..(370): n is a, c, g, or t
  misc_feature (405)..(405): n is a, c, g, or t
atttttatgaaacaaaagagcatttcttcaggtttctattgtattttttttaacattcttgcagagaaagcaagatccaaattgattttgggatattaaaagttaacagaacactgaacaaggaaagaatggcatagatctatctttacagtctggagttaattcctgttaactcattttatccattccttacataatcttctttcctgttagtccagtttgatggtgtgaatggtgaatttcaggcccagttgctaaattttgtggcatcttcctctagtccttcccacctccagtcatcagccccactctgtcttgggagacaggcagggaggtggggggaagagctggaantctctttattttcccngggtaggagacatcttccaaggcatggaattagcnttaaag

SEQ ID NO: 2419 - DNA, 244 bp, Homo sapiens
  misc_feature (105)..(105): n is a, c, g, or t
  misc_feature (177)..(177): n is a, c, g, or t
  misc_feature (222)..(222): n is a, c, g, or t
gggagctggacgagtccgagcgcgtcacctcctcacgctgcggctgtcgccgtgtcccgccggcccgttccgtgtcgccccgcagtgctgcgccgccgcggaccnatggctgtgtttgtcgtgctcctggcgttggtggcgggtgttttggggaacgagtttagtatattaaaatcncagggtctgttgttttccgaaatggaaattggcctataccagganagcggatcccaaacgtggttga

SEQ ID NO: 2420 - DNA, 451 bp, Homo sapiens
ttttttttttttttttttttttttttttttttggcataacactgacatttttattaaaattcatttgtaacaaatggaacttgggtcagcaaaaaactgattttcatacagacttttttcgcccccaatgtaacgaagtaagaaaataaaaagcacgcctttcattctgtaaaacatttacccgtactactaattagaggtaattgtattttttaacaagccattttacaagttatttgttttaatttttcagtctatgcatccaaaacgagagcaaagaacacaactgttattatctttgtaaagacactccaagctgggatggcaaagccacataacggatggatagaatggatctgtacccttctgatctctgctggagtatcagggcacccataaacccaaaaggaaccaaaacccaaaaagaaaaacaaaaggggaattaaaaata

SEQ ID NO: 2421 - DNA, 409 bp, Homo sapiens
ggaatttcctcagataccgtcgtagtcttaaccataaactatgccgactagggatcgggtggtgtttttttaatgacccactcggcaccttacgagaaatcaaagtctttgggttctggggggcagtacacaaagcctgtgggggagatctattgaccctatagatatattagcatcagggagacagggcaaaggtttcacccttcagttcagtccccaatccctgcttattatttccctaacagaagaccatcccccttgccactccctggtttttcttctctggcagcaatgaagcagctgctgacccagctctagttttcgggaagtcagatgaccttttccctcccgcggctctctacctctcgccgcccctagggaggacaccatgggcccactgatggttctt

SEQ ID NO: 2422 - protein, 7 aa, Homo sapiens
MGPLMVL

SEQ ID NO: 2423 - DNA, 495 bp, Homo sapiens
ggtcgacaccgctgagagcagctgcagtagctgagtagtggcagcagagaggcagacgtgagctgagggcgcagaggcaggcagcatctctgagggtccccaaggaacatggctgggagccgtgaggtggtggccatggactgcgagatggtggggctggggccacggagagcagtggcctggctcgttgcagcctcgtgaacgtccacggtgctgtgctgtacgacaagttcatccggcctgagggagagatcaccgattacagaacccgggtcagcggggtcacccctcagcacatggtgggggccacaccatttgccgtggccaggctagagatcctgcagctcctgaaaggcaagctggtggtgggtcatgacctgaagcacgacttccaggcactgaaagaggacatgagcggctacacaatctacgacacgtccactgacaggctgttgtggcgtgagccaagctggaccactgcaggcgtgtctcctg

SEQ ID NO: 2424 - DNA, 676 bp, Homo sapiens
tcagagccacgcggcacgccctgggaggctttctctggctggtaacctgctactcccgtgacaccagaccaccgccttcctgtacacagggtgccctgcatcccaccctcccggacctaagagcctggtgtcccctgtttccggagtgtcctgcttccctggaccccatgattcatggcatcccagccctcagtgtccaagacccagtgcagcccgggtccccgcctcccggatccaggcgtccgggatctgcagccaacagaacctagcctcctgacagacctccgaacatcttgggggcactcaacctcctgtgagccaagggccccacgatcccacccagagaaactctcgtattccacagctcctagtggccaaggaaccccgggacgctccgaactcccagctttacggacatctggcacacggtggcagacgcagagaagcctcagcgcccagccttggggaatttaaacactaccagcttccaagagccaaggaacttcagtgctgtgaactcacaactctaaaggagccctccaaagttccagatctccatggtgctgttactcaactcagtcctaggaacgtcgggtcctgggaaggagcccaagcgctcccagcagcttccaggcgctaggaagcccggtgcttcccatcatggtggcagaacatc

SEQ ID NO: 2425 - DNA, 638 bp, Homo sapiens
aagcttgcggccgctcagtctgggcgcttgcaggctgctaaacccaaccgcagttgactagcacctgctaccgcgcctttgcttcctggcgcacgcggagcctcctggagcctgccaccatcctgcctactacgtgctgccctgcgcccgcagccatgtgccgcaccctggccgccttccccaccacctgcctggagagagccaaagagttcaagacacgtctggggatctttcttcacaaatcagagctgggctgcgatactgggagtactggcaagttcgagtggggcagtaaacacagcaaagagaatagaaacttctcagaagatgtgctggggtggagagagtcgttcgacctgctgctgagcagtaaaaatggagtggctgccttccacgctttcctgaagacagagttcagtgaggagaacctggagttctggctggcctgtgaggagttcaagaagatccgatcagctaccaagctggcctccagggcacaccagatctttgaggagttcatttgcagcgaggcccctaaagaggtcaacattgaccatgagacccgcgagctgaccaggatgaaccctgcagactggcacaggcacatgctttgatgcggctcaagggaagacccgttc

SEQ ID NO: 2426 - DNA, 466 bp, Homo sapiens
attaaatgctgaagctgtcatcaaagagtttacactaaaatcttcagggctttaaataaaaggttaagtccagcttccaaacacaattttccacattagcagctccaatcttcttaaataaagctctgttttcctatatttttatgactgctgagaccccacagggaccaatatttgtattcaaattacatttcatggttcccattgtttcacaatgagttctaataaatgggatttactataataatccaagtatgacatagccggtatgctttcatgaatgtttttatgtagattttcctcccatgaacatgagtaaataaatctgtttcctgaatggattgtggttgcatttaaagctctgtaataattctaataaatttactctatagagttctgtgtgtggaaggtatagaacaattggaagtccatgaaaccataactataatcatatattattcagaca

SEQ ID NO: 2427 - DNA, 1717 bp, Homo sapiens
cgcctaccgtctccttcaaggcactttcttagacacccgggcaccaggcagatgcaccccccaacacacccaccccaagcaagtcacaaatcagcctgctccaactgtcttatggggagggtgtgagagaggtgcccaaaggcccctaaaaggtgagcctctcctctctccccacaggggtgaatgtgatgctgaggaagattgctgtggctgcagcgtccaagccagcagtggagatcaaacaggagggagacactttctacatcaaaacctccaccaccgtgcgcaccacagagattaacttcaaggttggggaggagtttgaggagcagactgtggatgggaggccctgtaaggtgagtgccagaaggggctccagggtcatggcgtcattgccctgcctctcaacctgccattttccaggctagcagttaactcctagcttctctctgtcccagtagggaaaatccctaggtagtggtgggggctagaaaggggctctctcccttatccctctcactgcattgcccctgctatgggcccagctcacttggccacctgtctcttgcagagcctggtgaaatgggagagtgagaataaaatggtctgtgagcagaagctcctgaagggagagggccccaagacctcgtggaccagagaactgaccaacgatggggaactgatcctggtaagtcctgcctcctccccactaatagcaaacccagtgctaccttccaagattctctgggagaccccagggtgcaggagactcaagaacaaccatggctggactccgcaccctgctgatgggactgcttgaacagaactaaggtgtccctatcccatacagtgccctgtgtgaattagaaatggtgttccttttatgcaagcaaagggcatgtactgagggatcccagcagttcttcagggagatcttcctggcttgaggaggaggacgggccccagggctctattgctatcctccctccattgatgcctgggcattctgggaccagctcctgcctgttggtcttgagccaagaagcaggtttggacctggaggccaagcagagtacctccattcaaccctcctctccaaagccacaggaccccaggggcctctcaggctaacaactacttctgtccttccagaccatgacggcggatgacgttgtgtgcaccagggtctacgtccgagagtgagtggccacaggtagaaccgcggccgaagcccaccactggccatgctcaccgccctgcttcactgccccctccgtcccaccccctccttctaggatagcgctccccttaccccagtcacttctgggggtcactgggatgcctcttgcagggtcttgctttctttgacctcttctctcctcccctacaccaacaaagaggaatggctgcaagagcccagatcacccattccgggttcactccccgcctccccaagtcagcagtcctagccccaaaccagcccagagcagggtctctctaaaggggacttgagggcctgagcaggaaagactggccctctagcttctaccctttgtccctgtagcctatacagtttagaatatttatttgttaattttattaaaatgctttaaaaaaataaaacctgtctctggctcattgggcaggtagataagtcacctgagttcaaccttgcctctgaaatgtagtatgggaaagacttgtgtttctgcagcat

SEQ ID NO: 2428 - protein, 138 aa, Homo sapiens
MPNFSGNWKIIRSENFEELLKVLGVNVMLRKIAVAAASKPAVEIKQEGDTFYIKTSTTVRTTEINFKVGEEFEEQTVDGRPCKSLVKWESENKMVCEQKLLKGEGPKTSWTRELTNDGELILTMTADDVVCTRVYVRE

SEQ ID NO: 2429 - DNA, 1712 bp, Homo sapiens
aaggtcaatgatagcatctgcctagagtcaaacctccgtgcttctcagacagtgccttttcaccatgagtgggtgcccatttttaggaaacaactttggatatacttttaaaaaactccccgtagaaggcagcgaagaagacaaatcacaaactggtgtgaatagagccagcaaaggaggtcttatctatgggaactacctgcatttggaaaaagttttgaatgcacaagaactgcaaagtgaaacaaaaggaaataaaatccatgatgaacatctttttatcataactcatcaagcttatgaactctggtttaagcaaatcctctgggagttggattctgttcgagagatctttcagaatggccatgtcagagatgaaaggaacatgcttaaggttgtttctcggatgcaccgagtgtcagtgatcctgaaactgctggtgcagcagttttccattctggagacgatgacagccttggacttcaatgacttcagagagtacttatctccagcatcaggcttccagagtttgcaattccgactattagaaaacaagataggtgttcttcagaacatgagagtcccttataacagaagacattatcgtgataacttcaaaggagaagaaaatgaactgctacttaaatctgagcaggaaaagacacttctggaattagtggaggcatggctggaaagaactccaggtttagagccacatggatttaacttctggggaaagcttgaaaaaaatatcaccagaggcctggaagaggaattcataaggattcaggctaaagaagagtctgaagaaaaagaggaacaggtggctgaatttcagaagcaaaaagaggtgctactgtccttatttgatgagaaacgtcatgaacatctccttagtaaaggtgaaagacggctgtcatacagagcacttcagggagcattgatgatatatttttacagggaagagcctaggttccaggtgccttttcagttgctgacttctcttatggacatagattcactgatgaccaaatggagatataaccatgtgtgcatggtgcacagaatgctgggcagcaaagctggcaccggtggttcctcaggctatcactacctgcgatcaactgtgagtgataggtacaaggtatttgtagatttatttaatctttcaacatacctgattccccgacactggataccgaagatgaacccaaccattcacaaatttctatatacagcagaatactgtgatagctcctacttcagcagtgatgaatcagattaaaatcgtctgcaaaatctatgaagaatactggtttcacagcctattttttattttctatggattttcataaatacagtttgaatatatgtatgcatatattgttcagcaccacgatgctctgatttaattctagaaacaatttgattacctcttgtttgtgacaagactaagcattaagatgagaaagaatacatttaaatagtaacattgtacatagggtgttttcctattaaaaatcagtttcccctgagacttaatgtaaccacttaatgtaatcactatctcattgtttcatctttataaacttgtaaacttcatctatttcaaatattttatgcagtacattatattattctgtacaaaggctttcaaacaaaatttttaaaataataaagtattaatctttcaaaaaaaaaaaaaaaaaaaa

SEQ ID NO: 2430 - protein, 406 aa, Homo sapiens
MSGCPFLGNNFGYTFKKLPVEGSEEDKSQTGVNRASKGGLIYGNYLHLEKVLNAQELQSETKGNKIHDEHLFIITHQAYELWFKQILWELDSVREIFQNGHVRDERNMLKVVSRMHRVSVILKLLVQQFSILETMTALDFNDFREYLSPASGFQSLQFRLLENKIGVLQNMRVPYNRRHYRDNFKGEENELLLKSEQEKTLLELVEAWLERTPGLEPHGFNFWGKLEKNITRGLEEEFIRIQAKEESEEKEEQVAEFQKQKEVLLSLFDEKRHEHLLSKGERRLSYRALQGALMIYFYREEPRFQVPFQLLTSLMDIDSLMTKWRYNHVCMVHRMLGSKAGTGGSSGYHYLRSTVSDRYKVFVDLFNLSTYLIPRHWIPKMNPTIHKFLYTAEYCDSSYFSSDESD

SEQ ID NO: 2431 - DNA, 428 bp, Homo sapiens
ttcggcacgagaaaacaagaatctgtactatcttttccttcctcccaatatttcttcatttctatgctcaattttctaatactttttcacatgcttaatcatttactctttcatcgccttccctcaaaaaaacctgctccgttgaagtaaactaagtaactcaatattctttattttggtttggaacctgtctcaattttttgtatccatattaagaagtcaccctataatctaaactttgtaattctaatttttttgtcccattatcatacaaagtgcttttaaacttgtttttaaaaaatgacagataatgccacatgaataggaagatgattcattctaaaacttgtatttacataattaaaaataaatttataatcattctacatacaaaaaaaaaaaaaaaaaactggagactaggaactagt

SEQ ID NO: 2432 - DNA, 393 bp, Homo sapiens
tttttttcccacttacagcaagtaaaagtggcctgaggttatccttgtttttcttcgcggtttgccatgtgtgaaagtagatttcctgctattgatatattctcattatagacagaatagtggagaacagtgttgccatggacaaaatccagttttggtccactctggggagcatttggacctgtggtgcttctaacaattaaaagtctagatggtccttgactgtcccccagccatactgcatactactttgtgcattctactttgtgtcattaatgaaagattggttctgtccctgtaacttaggcatttattattcttaactcctcattcctgttctgtagccacccagcagtccattttccctatgttcaggccaaaccacagggcttg

SEQ ID NO: 2433 - DNA, 426 bp, Homo sapiens
  misc_feature (23)..(23): n is a, c, g, or t
tttttttttttttttttgcttanaaatataatttattacctgtttaaaaattctttcttacattttgtacatgttggctgacagaataaatgcaggcaatttacaaaccaaggggactgcagggaaaatcaggattggcagccagggagagaaaagaggcacacccggagctggtatccctcacctccaccactcagcaaggcgccggacagatatccggagggcactctgcctctgccggggggtttttttagaaaaggaattgcatagaagatacagcaagagggaactccacaacaacaaaagtgttccatatcggaaaagccaaggttgtcatgttttgtttaaaaaagaaaaacgacaaagcacaaaacctcaatccgacctttctgcagttgaactgttccaaaggggacagtaggtgga

SEQ ID NO: 2434 - DNA, 277 bp, Homo sapiens
  misc_feature (9)..(9): n is a, c, g, or t
  misc_feature (15)..(15): n is a, c, g, or t
  misc_feature (125)..(125): n is a, c, g, or t
  misc_feature (165)..(165): n is a, c, g, or t
  misc_feature (174)..(174): n is a, c, g, or t
  misc_feature (191)..(191): n is a, c, g, or t
  misc_feature (208)..(208): n is a, c, g, or t
  misc_feature (260)..(260): n is a, c, g, or t
  misc_feature (274)..(274): n is a, c, g, or t
gatgcggangagggngacgcactagctctccagttcgcccgttcctggcctgacccccaccaaggcccataccgctgtaggctcctcgggctgcccctcggttgacaatggtctccaggatggtntctaccatgctatctggcctactgttttggctggcatctngatggactncagcatttgcttacagnccccggacccctgaccnggtctcagaagcagatatccagaggctgcttcatggtgttatggagcaattngggcattgccaggnccc

SEQ ID NO: 2435 - DNA, 355 bp, Homo sapiens
tcaaaaacaacacaattaattatactcttttattgaaagaaaaaacaatacaatggactttaaaaagctacatttgttatggttcataaggacagaggtttacacaggttttatatatgtacacactcacaatactatatcacaacatcagaggcaccatttttgccacagaattaggtaatgaataaaacttctccaaattaatctgtttaaaaaatatctaaaatggtacagtatatttgaggattatataaatatgtgagacatatttagatattttttaaaaatagtgtttatatatatgcatcacaatcttctctaattctcaaaatattatggcaccaaaatttctgtt

SEQ ID NO: 2436 - DNA, 1667 bp, Homo sapiens
aagcacaggccaccactctgccctggtccacacaagctccggtagcccatggagccctggcctctcctcctgctctttagcctttgctcagctggcctcgtcctgggctccgaacatgagacccgtctggtggcaaagctatttaaagactacagcagcgtggtgcggccagtggaagaccaccgccaggtcgtggaggtcaccgtgggcctgcagctgatacagctcatcaatgtggatgaagtaaatcagatcgtgacaaccaatgtgcgtctgaaacagcaatgggtggattacaacctaaaatggaatccagatgactatggcggtgtgaaaaaaattcacattccttcagaaaagatctggcgcccagaccttgttctctataacaatgcagatggtgactttgctattgtcaagttcaccaaagtgctcctgcagtacactggccacatcacgtggacacctccagccatctttaaaagctactgtgagatcatcgtcacccactttccctttgatgaacagaactgcagcatgaagctgggcacctggacctacgacggctctgtcgtggccatcaacccggaaagcgaccagccagacctgagcaacttcatggagagcggggagtgggtgatcaaggagtcccggggctggaagcactccgtgacctattcctgctgccccgacaccccctacctggacatcacctaccacttcgtcatgcagcgcctgcccctctacttcatcgtcaacgtcatcatcccctgcctgctcttctccttcttaactggcctggtattctacctgcccacagactcaggggagaagatgactctgagcatctctgtcttactgtctttgactgtgttccttctggtcatcgtggagctgatcccctccacgtccagtgctgtgcccttgattggaaaatacatgctgttcaccatggtgttcgtcattgcctccatcatcatcactgtcatcgtcatcaacacacaccaccgctcacccagcacccatgtcatgcccaactgggtgcggaaggtttttatcgacactatcccaaatatcatgtttttctccacaatgaaaagaccatccagagaaaagcaagacaaaaagatttttacagaagacattgatatctctgacatttctggaaagccagggcctccacccatgggcttccactctcccctgatcaaacaccccgaggtgaaaagtgccatcgagggcatcaagtacatcgcagagaccatgaagtcagaccaggagtctaacaatgcggcggcagagtggaagtacgttgcaatggtgatggaccacatactcctcggagtcttcatgcttgtttgcatcatcggaaccctagccgtgtttgcaggtcgactcattgaattaaatcagcaaggatgagcagaaaatgagctgagcttagctctgccctggaacctaccagagcagagaagggcaggagaggaagatttgtctacttgctccactcgcacttatcaaacgtgttatattccatacttattattgatgataagatttacctttatgtaagtttatggccttgaagtgttttcatattgcttctccctttagttctgctgtctccctgaagagtgaaccctctttagtaaatgaaactaatcact

SEQ ID NO: 2437 - protein, 457 aa, Homo sapiens
MEPWPLLLLFSLCSAGLVLGSEHETRLVAKLFKDYSSVVRPVEDHRQVVEVTVGLQLIQLINVDEVNQIVTTNVRLKQQWVDYNLKWNPDDYGGVKKIHIPSEKIWRPDLVLYNNADGDFAIVKFTKVLLQYTGHITWTPPAIFKSYCEIIVTHFPFDEQNCSMKLGTWTYDGSVVAINPESDQPDLSNFMESGEWVIKESRGWKHSVTYSCCPDTPYLDITYHFVMQRLPLYFIVNVIIPCLLFSFLTGLVFYLPTDSGEKMTLSISVLLSLTVFLLVIVELIPSTSSAVPLIGKYMLFTMVFVIASIIITVIVINTHHRSPSTHVMPNWVRKVFIDTIPNIMFFSTMKRPSREKQDKKIFTEDIDISDISGKPGPPPMGFHSPLIKHPEVKSAIEGIKYIAETMKSDQESNNAAAEWKYVAMVMDHILLGVFMLVCIIGTLAVFAGRLIELNQQG

SEQ ID NO: 2438 - DNA, 440 bp, Homo sapiens
ttttttttttttttttttttttaaaaaaagaacacaagactgaattctgccaccagcaatatatgcaggaacaatccatttccttaagggacaaaatccactctaagtgttagctttcccctttgcataagggttggggtgtgatgtgtgtgcaagttgaggggaatgtgcatgtttatgaaaaaatggcatacctcattgggattctgaaattgcataaaaataaaatacttaataactgggcaaaacacattcttttttacaaatgtcaataaagacaatttttcttgaaaacagagaaagttaaatgaaaacagtaagaaccaaagaaagggtacagtacattttgaaatgagtaaaaaacatcattttcaaatctaaaatccttgtgtgtgtgtgtgtgtgtgtggttacctcaaaagtttgcagaccaacagcgt

SEQ ID NO: 2439 - DNA, 379 bp, Homo sapiens
tttttttttttttttttaccatttgaccatgttatattttaatttgcagagacaaaaatgacaagcaatttatttacataaaactgtacaaaagcaaattaaattatgcaaagtatttcataaatagttggacgagtgtttaatacatttcgccatgttaagcatagttgcgtgcatagtgactcataataaacgatgataaattgttctctgcttcactatcaacatccaagtagcagaacaatagtcaatgattaacattacaaacagatcgtaccacactgaacgcaagtgctttaaactgtaggaaaagtctgaaagtaaaccctaggtagctgaacaaatgatgcttcctccagatgttatcattacaccttca

SEQ ID NO: 2440 - DNA, 475 bp, Homo sapiens
tttttttcggtcaaataaatttttttttttttaaaaagaaaagaaacgaaaacaacctctatcttctggactgtaatagggtgtcacttcatctttggtataaaataggccatccataggctgaatttgatcacaactaggaaagactacagaaattgtcaacaatttctctatctattgctttttttttgtttttttttttgcactttttgaccataagctcctatctacttaagtttttttttttaatgctcttaagctaggttttgcaatgtgacaagcaaagctgactaaaaactttgtaaagctcataaaaaagactgcagataaaaagcactaatgcttttgctagcgatcacgctttgtaaattaaaaaaatctgcattctgccccccaaacacgcattatttctaatgcagttgtttttaaaccaaccttaataactttactgtaaaatgttttagccttttagaaa

SEQ ID NO: 2441 - DNA, 482 bp, Homo sapiens
ttttcttggacatttcaggcctccactggcagttgttttcactgtacaaatgtaaagtgtggaaaagggtaaggacctagaaaaagttatacaaaaaatatgtgccattgtcaggtgcaaaacctggcgactactctgaaccaaattaagtataatatccttcaaaataaatgagaatatataaataagctaaaatagaatccacacaggcttcatagaaactttgaaagcattacacattggtaaggccccaggataggaagaaaataacctaacatgttcaaaagggcaaggaaaaacctccctacactgggaagtttgttactaaataaacttttctaaaatggaagcacaataatgatcagctcttggaatttttattgcttaaaggcacgtctagtatacacgaaatactcttttaacattgctggtcttttggaaacattcttagttttaaaacttgaacctttatgcactgagtg

SEQ ID NO: 2442 - DNA, 582 bp, Homo sapiens
tttttttttaattattagtaaaatatgcttgtgtccaatggagaagataaggcatgaacctaaataccataaaactcagaacaaagtacctaacgcaatccccggtgctgagcagaaacttggtaaataatttctgaactactgaaagtggcaactgactgtaccatagatatggtccaccccactcccgccatcgctcctccctggctttggtgatcacacctgagagcatgtcataaacttatctgtttgctcactgcttatttgccccactagagcaaaagtttggtgacagcaggaactttgtcatattctccacactatcccccgaattttgcacagtatctggcaaacggtcggtgcttgtttggtgaataaatgaatgagtgaatgtctagcacaacatgcaacagatgtatgtgctccacaagtttctgctaatttattattgttggaaggggcttaaccaaagaaaaggtaagtgctgtggaaattcaaagaagtatgactgtttccacaagggcaaggacagcttcgtggaaagattatgatgagctgggcgttcaaagaaggctgttgtgt

SEQ ID NO: 2443 - DNA, 2470 bp, Homo sapiens
ttggcgggcggaagcggccacaacccggcgatcgaaaagattcttaggaacgccgtaccagccgcgtctctcaggacagcaggcccctgtccttctgtcgggcgccgctcagccgtgccctccgcccctcaggttctttttctaattccaaataaacttgcaagaggactatgaaagattatgatgaacttctcaaatattatgaattacatgaaactattgggacaggtggctttgcaaaggtcaaacttgcctgccatatccttactggagagatggtagctataaaaatcatggataaaaacacactagggagtgatttgccccggatcaaaacggagattgaggccttgaagaacctgagacatcagcatatatgtcaactctaccatgtgctagagacagccaacaaaatattcatggttcttgagtactgccctggaggagagctgtttgactatataatttcccaggatcgcctgtcagaagaggagacccgggttgtcttccgtcagatagtatctgctgttgcttatgtgcacagccagggctatgctcacagggacctcaagccagaaaatttgctgtttgatgaatatcataaattaaagctgattgactttggtctctgtgcaaaacccaagggtaacaaggattaccatctacagacatgctgtgggagtctggcttatgcagcacctgagttaatacaaggcaaatcatatcttggatcagaggcagatgtttggagcatgggcatactgttatatgttcttatgtgtggatttctaccatttgatgatgataatgtaatggctttatacaagaagattatgagaggaaaatatgatgttcccaagtggctctctcccagtagcattctgcttcttcaacaaatgctgcaggtggacccaaagaaacggatttctatgaaaaatctattgaaccatccctggatcatgcaagattacaactatcctgttgagtggcaaagcaagaatccttttattcacctcgatgatgattgcgtaacagaactttctgtacatcacagaaacaacaggcaaacaatggaggatttaatttcactgtggcagtatgatcacctcacggctacctatcttctgcttctagccaagaaggctcggggaaaaccagttcgtttaaggctttcttctttctcctgtggacaagccagtgctaccccattcacagacatcaagtcaaataattggagtctggaagatgtgaccgcaagtgataaaaattatgtggcgggattaatagactatgattggtgtgaagatgatttatcaacaggtgctgctactccccgaacatcacagtttaccaagtactggacagaatcaaatggggtggaatctaaatcattaactccagccttatgcagaacacctgcaaataaattaaagaacaaagaaaatgtatatactcctaagtctgctgtaaagaatgaagagtactttatgtttcctgagccaaagactccagttaataagaaccagcataagagagaaatactcactacgccaaatcgttacactacaccctcaaaagctagaaaccagtgcctgaaagaaactccaattaaaataccagtaaattcaacaggaacagacaagttaatgacaggtgtcattagccctgagaggcggtgccgctcagtggaattggatctcaaccaagcacatatggaggagactccaaaaagaaagggagccaaagtgtttgggagccttgaaagggggttggataaggttatcactgtgctcaccaggagcaaaaggaagggttctgccagagacgggcccagaagactaaagcttcactataatgtgactacaactagattagtgaatccagatcaactgttgaatgaaataatgtctattcttccaaagaagcatgttgactttgtacaaaagggttatacactgaagtgtcaaacacagtcagattttgggaaagtgacaatgcaatttgaattagaagtgtgccagcttcaaaaacccgatgtggtgggtatcaggaggcagcggcttaagggcgatgcctgggtttacaaaagattagtggaagacatcctatctagctgcaaggtataattgatggattcttccatcctgccggatgagtgtgggtgtgatacagcctacataaagactgttatgatcgctttgattttaaagttcattggaactaccaacttgtttctaaagagctatcttaagaccaatatctctttgtttttaaacaaaagatattattttgtgtatgaatctaaatcaagcccatctgtcattatgttactgtcttttttaatcatgtggttttgtatattaataattgttgactttcttagattcacttccatatgtgaatgtaagctcttaactatgtctctttgtaatgtgtaatttctttctgaaataaaaccatttgtgaatat

SEQ ID NO: 2444 - protein, 651 aa, Homo sapiens
MKDYDELLKYYELHETIGTGGFAKVKLACHILTGEMVAIKIMDKNTLGSDLPRIKTEIEALKNLRHQHICQLYHVLETANKIFMVLEYCPGGELFDYIISQDRLSEEETRVVFRQIVSAVAYVHSQGYAHRDLKPENLLFDEYHKLKLIDFGLCAKPKGNKDYHLQTCCGSLAYAAPELIQGKSYLGSEADVWSMGILLYVLMCGFLPFDDDNVMALYKKIMRGKYDVPKWLSPSSILLLQQMLQVDPKKRISMKNLLNHPWIMQDYNYPVEWQSKNPFIHLDDDCVTELSVHHRNNRQTMEDLISLWQYDHLTATYLLLLAKKARGKPVRLRLSSFSCGQASATPFTDIKSNNWSLEDVTASDKNYVAGLIDYDWCEDDLSTGAATPRTSQFTKYWTESNGVESKSLTPALCRTPANKLKNKENVYTPKSAVKNEEYFMFPEPKTPVNKNQHKREILTTPNRYTTPSKARNQCLKETPIKIPVNSTGTDKLMTGVISPERRCRSVELDLNQAHMEETPKRKGAKVFGSLERGLDKVITVLTRSKRKGSARDGPRRLKLHYNVTTTRLVNPDQLLNEIMSILPKKHVDFVQKGYTLKCQTQSDFGKVTMQFELEVCQLQKPDVVGIRRQRLKGDAWVYKRLVEDILSSCKV

SEQ ID NO: 2445 - DNA, 1450 bp, Homo sapiens
ccaggcagcagttagcccgccgcccgcctgtgtgtccccagagccatggagagagccagtctgatccagaaggccaagctggcagagcaggccgaacgctatgaggacatggcagccttcccaggcagcagttagcccgccgcccgcctgtgtgtccccagagccatggagagagccagtctgatccagaaggccaagctggcagagcaggccgaacgctatgaggacatggcagccttcatgaaaggcgccgtggagaagggcgaggagctctcctgcgaagagcgaaacctgctctcagtagcctataagaacgtggtgggcggccagagggctgcctggagggtgctgtccagtattgagcagaaaagcaacgaggagggctcggaggagaaggggcccgaggtgcgtgagtaccgggagaaggtggagactgagctccagggcgtgtgcgacaccgtgctgggcctgctggacagccacctcatcaaggaggccggggacgccgagagccgggtcttctacctgaagatgaagggtgactactaccgctacctggccgaggtggccaccggtgacgacaagaagcgcatcattgactcagcccggtcagcctaccaggaggccatggacatcagcaagaaggagatgccgcccaccaaccccatccgcctgggcctggccctgaacttttccgtcttccactacgagatcgccaacagccccgaggaggccatctctctggccaagaccactttcgacgaggccatggctgatctgcacaccctcagcgaggactcctacaaagacagcaccctcatcatgcagctgctgcgagacaacctgacactgtggacggccgacaacgccggggaagaggggggcgaggctccccaggagccccagagctgagtgttgcccgccaccgccccgccctgccccctccagtccccgccctgccgagaggactagtatggggtgggaggccccacccttctcccctaggcgctgttcttgctccaaagggctccgtggagagggactggcagagctgaggccacctggggctggggatcccactcttcttgcagctgttgagcgcacctaaccactggtcatgcccccacccctgctctccgcacccgcttcctcccgaccccaggaccaggctacttctcccctcctcttgcctccctcctgcccctgctgcctcttgattcgtaggaattgaggagtgtctccgccttgtggctgagaactggacagtggcaggggctggagatgggtgtgtgtgtgtgtgtgtgtgtgtgtgtgtgcgcgcgcgccagtgcaagaccgagactgagggaaagcatgtctgctgggtgtgaccatgtttcctctcaataaagttcccctgtgacactcaaaaaaaaaaaaaaaaaaaaaaaaaaaaaaaaaaaaaaaaaaa

SEQ ID NO: 2446 - protein, 248 aa, Homo sapiens [sequence omitted]

SEQ ID NO: 2447 - DNA, 1050 bp, Homo sapiens
ggggggggggggcacttggcttcaaagctggctcttggaaattgagcggagacgagcggcttgttgtagctgccgtgcggccgccgcggaataataagccgggatctaccataccattgactaactatggaagattataccaaaatagagaaaattggagaaggtacctatggagttgtgtataagggtagacacaaaactacaggtcaagtggtagccatgaaaaaaatcagactagaaagtgaagaggaaggggttcctagtactgcaattcgggaaatttctctattaaaggaacttcgtcatccaaatatagtcagtcttcaggatgtgcttatgcaggattccaggttatatctcatctttgagtttctttccatggatctgaagaaatacttggattctatccctcctggtcagtacatggattcttcacttgttaagagttatttataccaaatcctacaggggattgtgttttgtcactctagaagagttcttcacagagacttaaaacctcaaaatctcttgattgatgacaaaggaacaattaaactggctgattttggccttgccagagcttttggaatacctatcagagtatatacacatgaggtagtaacactctggtacagatctccagaagtattgctggggtcagctcgttactcaactccagttgacatttggagtataggcaccatatttgctgaactagcaactaagaaaccacttttccatggggattcagaaattgatcaactcttcaggattttcagagctttgggcactcccaataatgaagtgtggccagaagtggaatctttacaggactataagaatacatttcccaaatggaaaccaggaagcctagcatcccatgtcaaaaacttggatgaaaatggcttggatttgctctcgaaaatgttaatctatgatccagccaaacgaatttctggcaaaatggcactgaatcatccatattttaatgatttggacaatcagattaagaagatgtagctttctgacaaaaagtttccatatgttatg

SEQ ID NO: 2448 - protein, 297 aa, Homo sapiens
MEDYTKIEKIGEGTYGVVYKGRHKTTGQVVAMKKIRLESEEEGVPSTAIREISLLKELRHPNIVSLQDVLMQDSRLYLIFEFLSMDLKKYLDSIPPGQYMDSSLVKSYLYQILQGIVFCHSRRVLHRDLKPQNLLIDDKGTIKLADFGLARAFGIPIRVYTHEVVTLWYRSPEVLLGSARYSTPVDIWSIGTIFAELATKKPLFHGDSEIDQLFRIFRALGTPNNEVWPEVESLQDYKNTFPKWKPGSLASHVKNLDENGLDLLSKMLIYDPAKRISGKMALNHPYFNDLDNQIKKM

SEQ ID NO: 2449 - DNA, 4670 bp, Homo sapiens
gcggcgcgcacactgctcgctgggccgcggctcccgggtgtcccaggcccggccggtgcgcagagcatggcgggtgcgggcccgaagcggcgcgcgctagcggcgccggcggccgaggagaaggaagaggcgcgggagaagatgctggccgccaagagcgcggacggctcggcgccggcaggcgagggcgagggcgtgaccctgcagcggaacatcacgctgctcaacggcgtggccatcatcgtggggaccattatcggctcgggcatcttcgtgacgcccacgggcgtgctcaaggaggcaggctcgccggggctggcgctggtggtgtgggccgcgtgcggcgtcttctccatcgtgggcgcgctctgctacgcggagctcggcaccaccatctccaaatcgggcggcgactacgcctacatgctggaggtctacggctcgctgcccgccttcctcaagctctggatcgagctgctcatcatccggccttcatcgcagtacatcgtggccctggtcttcgccacctacctgctcaagccgctcttccccacctgcccggtgcccgaggaggcagccaagctcgtggcctgcctctgcgtgctgctgctcacggccgtgaactgctacagcgtgaaggccgccacccgggtccaggatgcctttgccgccgccaagctcctggccctggccctgatcatcctgctgggcttcgtccagatcgggaagggtgatgtgtccaatctagatcccaacttctcatttgaaggcaccaaactggatgtggggaacattgtgctggcattatacagcggcctctttgcctatggaggatggaattacttgaatttcgtcacagaggaaatgatcaacccctacagaaacctgcccctggccatcatcatctccctgcccatcgtgacgctggtgtacgtgctgaccaacctggcctacttcaccaccctgtccaccgagcagatgctgtcgtccgaggccgtggccgtggacttcgggaactatcacctgggcgtcatgtcctggatcatccccgtcttcgtgggcctgtcctgcttcggctccgtcaatgggtccctgttcacatcctccaggctcttcttcgtggggtcccgggaaggccacctgccctccatcctctccatgatccacccacagctcctcacccccgtgccgtccctcgtgttcacgtgtgtgatgacgctgctctacgccttctccaaggacatcttctccgtcatcaacttcttcagcttcttcaactggctctgcgtggccctggccatcatcggcatgatctggctgcgccacagaaagcctgagcttgagcggcccatcaaggtgaacctggccctgcctgtgttcttcatcctggcctgcctcttcctgatcgccgtctccttctggaagacacccgtggagtgtggcatcggcttcaccatcatcctcagcgggctgcccgtctacttcttcggggtctggtggaaaaacaagcccaagtggctcctccagggcatcttctccacgaccgtcctgtgtcagaagctcatgcaggtggtcccccaggagacatagccaggaggccgagtggctgccggaggagcatgcgcagaggccagttaaagtagatcacctcctcgaacccactccggttccccgcaacccacagctcagctgcccatcccagtccctcgccgtccctcccaggtcgggcagtggaggctgctgtgaaaactctggtacgaatctcatccctcaactgagggccagggacccaggtgtgcctgtgctcctgcccaggagcagcttttggtctccttgggccctttttcccttccctcctttgtttacttatatatatattttttttaaacttaaattttgggtcaacttgacaccactaagatgattttttaaggagctgggggaaggcaggagccttcctttctcctgccccaagggcccagaccctgggcaaacagagctactgagacttggaacctcattgctacgacagacttgcactgaagccggacagctgcccagacacatgggcttgtgacattcgtgaaaaccaaccctgtgggcttatgtctctgccttagggtttgcagagtggaaactcagccgtagggtggcactgggagggggtgggggatctgggcaaggtgggtgattcctctcaggaggtgcttgaggccccgatggactcctgaccataatcctagccctgagacaccatcctgagccagggaacagccccagggttggggggtgccggcatctcccctagctcaccaggcctggcctctgggcagtgtggcctcttggctatttctgtgtccagttttggaggctgagttctggttcatgcagacaaagccctgtccttcagtcttctagaaacagagacaagaaaggcagacacaccgcggccaggcacccatgtgggcgcccaccctgggctccacacagcagtgtcccctgccccagaggtcgcagctaccctcagcctccaatgcattggcctctgtaccgcccggcagccccttctggccggtgctgggttcccactcccggcctaggcacctccccgctctccctgtcacgctcatgtcctgtcctggtcctgatgcccgttgtctaggagacagagccaagcactgctcacgtctctgccgcctgcgtttggaggcccctgggctctcacccagtccccacccgcctgcagagagggaactagggcaccccttgtttctgttgttcccgtgaatttttttcgctatgggaggcagccgaggcctggccaatgcggcccactttcctgagctgtcgctgcctccatggcagcagccaaggacccccagaacaagaagacccccccgcaggatccctcctgagctcggggggctctgccttctcaggccccgggcttcccttctccccagccagaggtggagccaagtggtccagcgtcactccagtgctcagctgtggctggaggagctggcctgtggcacagccctgagtgtcccaagccgggagccaacgaagccggacacggcttcactgaccagcggctgctcaagccgcaagctctcagcaagtgcccagcggagcctgccgcccccacctgggcaccgggaccccctcaccatccagtgggcccggagaaacctgatgaacagtttggggactcaggaccagatgtccgtctctcttgcttgaggaatgaagacctttattcacccctgccccgttgcttcccgctgcacatggacagacttcacagcgtctgctcataggacctgcatccttcctggggacgaattccactcgtccaagggacagcccacggtctggaggccgaggaccaccagcaggcaggtggactgactgtgttgggcaagacctcttccctctgggcctgttctcttggctgcaaataaggacagcagctggtgccccacctgcctggtgcattgctgtgtgaatccaggaggcagtggacatcgtaggcagccacggccccgggtccaggagaagtgctccctggaggcacgcaccactgcttcccactggggccggcggggcccacgcacgacgtcagcctcttaccttcccgcctcggctaggggtcctcgggatgccgttctgttccaacctcctgctctgggacgtggacatgcctcaaggatacagggagccggcggcctctcgacggcacgcacttgcctgttggctgctgcggctgtgggcgagcatgggggctgccagcgtctgttgtggaaagtagctgctagtgaaatggctggggccgctggggtccgtcttcacactgcgcaggtctcttctgggcgtctgagctggggtgggagctcctccgcagaaggttggtggggggtccagtctgtgatccttggtgctgtgtgccccactccagcctggggaccccacttcagaaggtaggggccgtgtcccgcggtgctgactgaggcctgcttccccctccccctcctgctgtgctggaattccacagggaccagggccaccgcaggggactgtctcagaagacttgatttttccgtccctttttctccacactccactgacaaacgtccccagcggtttccacttgtgggcttcaggtgttttcaagcacaacccaccacaacaagcaagtgcattttcagtcgttgtgcttttttgttttgtgctaacgtcttactaatttaaagatgctgtcggcaccatgtttatttatttccagtggtcatgctcagccttgctgctctgcgtggcgcaggtgccatgcctgctccctgtctgtgtcccagccacgcagggccatccactgtgacgtcggccgaccaggctggacaccctctgccgagtaatgacgtgtgtggctgggaccttctttattctgtgttaatggctaacctgttacactgggctgggttgggtagggtgttctggcttttttgtggggtttttatttttaaagaaacactcaatcatcctaaaaaaaaaaaaaaaaaaaaaaaaaaaaaaaaaaaaaaaaaaaaaaaaaaaaaaaaaaaaaaaaaaaaaaaaaaaaaaaaaaaaaaaaaaaaaaaaaaaaaaaaaaaaaaaaaaaaaaaaaaaaaaaaaaa

SEQ ID NO: 2450 - protein, 507 aa, Homo sapiens
MAGAGPKRRALAAPAAEEKEEAREKMLAAKSADGSAPAGEGEGVTLQRNITLLNGVAIIVGTIIGSGIFVTPTGVLKEAGSPGLALVVWAACGVFSIVGALCYAELGTTISKSGGDYAYMLEVYGSLPAFLKLWIELLIIRPSSQYIVALVFATYLLKPLFPTCPVPEEAAKLVACLCVLLLTAVNCYSVKAATRVQDAFAAAKLLALALIILLGFVQIGKGDVSNLDPNFSFEGTKLDVGNIVLALYSGLFAYGGWNYLNFVTEEMINPYRNLPLAIIISLPIVTLVYVLTNLAYFTTLSTEQMLSSEAVAVDFGNYHLGVMSWIIPVFVGLSCFGSVNGSLFTSSRLFFVGSREGHLPSILSMIHPQLLTPVPSLVFTCVMTLLYAFSKDIFSVINFFSFFNWLCVALAIIGMIWLRHRKPELERPIKVNLALPVFFILACLFLIAVSFWKTPVECGIGFTIILSGLPVYFFGVWWKNKPKWLLQGIFSTTVLCQKLMQVVPQET

SEQ ID NO: 2451 - DNA, 481 bp, Homo sapiens
aatcacacacaagtattcataaccacagggttcaccagaaatctaaagcaaggagacactcactcatatagaaatggagttactcttccacagatcgttctgatcaaaggttttggaacagaaatgaattaatgatttttttgtataatatccaacatgtccactatcaaatacatttagtatgaaaaaacagatgaagaaaaggaacatacattaggacaaagtatctggttaaaatgctgttcatttaaataaagcccactctccttactttagagctccttggtgaaatggaggtgagtttgatggagtgcagttgatgaccactgaaaaacacgagccctttcaacaatgttgcaacactgttagtttttggtttaaacacacacacacactcacaaatgctaagtgtacactaccaaattctgcggtcagcttttccaagaactactggggaaagtttcaatgctgcaaatcctcg

SEQ ID NO: 2452 - DNA, 272 bp, Homo sapiens
  misc_feature (8)..(8): n is a, c, g, or t
  misc_feature (10)..(10): n is a, c, g, or t
  misc_feature (12)..(12): n is a, c, g, or t
  misc_feature (20)..(20): n is a, c, g, or t
  misc_feature (150)..(150): n is a, c, g, or t
ctcgtgcncntnggcgtcanagccgtcgtggctcgttccattctcggcggtggtacctgctcccggtggccctgaggacgtgtgggccaggggcggccccgaaattaggaagcggagggggagcagtctgcaggtctgcggggctaagtntcgcggcggcgcacctcgcgtcaagaatccggaggaggagactgcaaggataggcccaggagtaatggagtccaaagaggaactagcggcaaacaatctcaacggggaaaatgcccaacaag

SEQ ID NO: 2453 - DNA, 402 bp, Homo sapiens
tttttttttttttttttttttttatcagtcaactgctgttttattcacaccagatgctgcatggaaaaatcacgtccaaatttattttaaacaagagcaagtggtcttttttccaagactctttgagagagaacctcatcacagggacagcgcttcctcgtcagcgagcccgatggggcaggcgcggaagggaaaggccttctctgcatttggacttggcccactaaggcagaccacagagagacgccggagctggcaggaggccatttatgttctggttttctccgtgagttgtttcaaaaagggattgatcttaaaatctagtgtgattaaaaaggtgggtggggttaagagcaaaatatgctgctatatgtgtcccgcaggccccagtgtggactgttt

SEQ ID NO: 2454 - DNA, 4665 bp, Homo sapiens
agccagcccgaggacgcgagcggcaggtgtgcacagaggttctccactttgttttctgaactcgcggtcaggatggttttctctgtcaggcagtgtggccatgttggcagaactgaagaagttttactgacgttcaagatattccttgtcatcatttgtcttcatgtcgttctggtaacatccctggaagaagatactgataattccagtttgtcaccaccacctgctaaattatctgttgtcagttttgccccctcctccaatgaggttgaaacaacaagcctcaatgatgttactttaagcttactcccttcaaacgaaacagaaaaaactaaaatcactatagtaaaaaccttcaatgcttcaggcgtcaaaccccagagaaatatctgcaatttgtcatctatttgcaatgactcagcattttttagaggtgagatcatgtttcaatatgataaagaaagcactgttccccagaatcaacatataacgaatggcaccttaactggagtcctgtctctaagtgaattaaaacgctcagagctcaacaaaaccctgcaaaccctaagtgagacttactttataatgtgtgctacagcagaggcccaaagcacattaaattgtacattcacaataaaactgaataatacaatgaatgcatgtgctgcaatagccgctttggaaagagtaaagattcgaccaatggaacactgctgctgttctgtcaggataccctgcccttcctccccagaagagttgggaaagcttcagtgtgacctgcaggatcccattgtctgtcttgctgaccatccacgtggcccaccattttcttccagccaatccatcccagtggtgcctcgggccactgtgctttcccaggtccccaaagctacctcttttgctgagcctccagattattcacctgtgacccacaatgttccctctccaataggggagattcaacccctttcaccccagccttcagctcccatagcttccagccctgccattgacatgcccccacagtctgaaacgatctcttcccctatgccccaaacccatgtctccggcaccccacctcctgtgaaagcctcattttcctctcccaccgtgtctgcccctgcgaatgtcaacactaccagcgcacctcctgtccagacagacatcgtcaacaccagcagtatttctgatcttgagaaccaagtgttgcagatggagaaggctctgtccttgggcagcctggagcctaacctcgcaggagaaatgatcaaccaagtcagcagactccttcattccccgcctgacatgctggcccctctggctcaaagattgctgaaagtagtggatgacattggcctacagctgaacttttcaaacacgactataagtctaacctccccttctttggctctggctgtgatcagagtgaatgccagtagtttcaacacaactacctttgtggcccaagaccctgcaaatcttcaggtttctctggaaacccaagctcctgagaacagtattggcacaattactcttccttcatcgctgatgaataatttaccagctcatgacatggagctagcttccagggttcagttcaatttttttgaaacacctgctttgtttcaggatccttccctggagaacctctctctgatcagctacgtcatatcatcgagtgttgcaaacctgaccgtcaggaacttgacaagaaacgtgacagtcacattaaagcacatcaacccgagccaggatgagttaacagtgagatgtgtattttgggacttgggcagaaatggtggcagaggaggctggtcagacaatggctgctctgtcaaagacaggagattgaatgaaaccatctgtacctgtagccatctaacaagcttcggcgttctgctggacctatctaggacatctgtgctgcctgctcaaatgatggctctgacgttcattacatatattggttgtgggctttcatcaatttttctgtcagtgactcttgtaacctacatagcttttgaaaagatccggagggattacccttccaaaatcctcatccagctgtgtgctgctctgcttctgctgaacctggtcttcctcctggactcgtggattgctctgtataagatgcaaggcctctgcatctcagtggctgtatttcttcattattttctcttggtctcattcacatggatgggcctagaagcattccatatgtacctggcccttgtcaaagtatttaatacttacatccgaaaatacatccttaaattctgcattgtcggttggggggtaccagctgtggttgtgaccatcatcctgactatatccccagataactatgggcttggatcctatgggaaattccccaatggttcaccggatgacttctgctggatcaacaacaatgcagtattctacattacggtggtgggatatttctgtgtgatatttttgctgaacgtcagcatgttcattgtggtcctggttcagctctgtcgaattaaaaagaagaagcaactgggagcccagcgaaaaaccagtattcaagacctcaggagtatcgctggccttacatttttactgggaataacttggggctttgccttctttgcctggggaccagttaacgtgaccttcatgtatctgtttgccatctttaataccttacaaggatttttcatattcatcttttactgtgtggccaaagaaaatgtcaggaagcaatggaggcggtatctttgttgtggaaagttacggctggctgaaaattctgactggagtaaaactgctactaatggtttaaagaagcagactgtaaaccaaggagtgtccagctcttcaaattccttacagtcaagcagtaactccactaactccaccacactgctagtgaataatgattgctcagtacacgcaagcgggaatggaaatgcttctacagagaggaatggggtctcttttagtgttcagaatggagatgtgtgccttcacgatttcactggaaaacagcacatgtttaacgagaaggaagattcctgcaatgggaaaggccgtatggctctcagaaggacttcaaagcggggaagcttacactttattgagcaaatgtgattcctttcttctaaaatcaaagcatgatgcttgacagtgtgaaatgtccaattttaccttttacacaatgtgagatgtatgaaaatcaactcattttattctcggcaacatctggagaagcataagctaattaagggcgatgattattattacaagaagaaaccaagacattacaccatggtttttagacatttctgatttggtttcttatctttcattttataagaaggttggttttaaacaatacactaagaatgactcctataaagaaaacaaaaaaaggtagtgaactttcagctaccttttaaagaggctaagttatctttgataacatcatataaagcaactgttgacttcagcctgttggtgagtttagttgtgcatgcctttgttgtatataagctaaattctagtgacccatgtgtcaaaaatcttacttctacatttttttgtatttattttctactgtgtaaatgtattcctttgtagaatcatggttgttttgtctcacgtgataattcagaaaatccttgctcgttccgcaaatcctaaagctccttttggagatgatataggatgtgaaatacagaaacctcagtgaaatcaagaaataatgatcccagccagactgagaaaatgtaagcagacagtgccacagttagctcatacagtgcctttgagcaagttaggaaaagatgcccccactgggcagacacagccctatgggtcatggtttgacaaacagagtgagagaccatattttagccccactcaccctcttgggtgcacgacctgtacagccaaacacagcatccaatatgaatacccatcccctgaccgcatccccagtagtcagattatagaatctgcaccaagatgtttagctttataccttggccacagagagggatgaactgtcatccagaccatgtgtcaggaaaattgtgaacgtagatgaggtacatacactgccgcttctcaaatccccagagcctttaggaacaggagagtagactaggattccttctcttaaaaaggtacatatatatggaaaaaaatcatattgccgttctttaaaaggcaactgcatggtacattgttgattgttatgactggtacactctggcccagccagagctataattgttttttaaatgtgtcttgaagaatgcacagtgacaaggggagtagctattgggaacagggaactgtcctacactgctattgttgctacatgtatcgagccttgattgctcctagttatatacagggtctatcttgcttcctacctacatctgcttgagcagtgcctcaagtacatccttattaggaacatttcaaaccccttttagttaagtctttcactaaggttctcttgcatatatttcaagtgaatgttggatctcagactaaccatagtaataatacacatttctgtgagtgctgacttgtctttgcaatatttcttttctgatttatttaattttcttgtatttatatgttaaaatcaaaaatgttaaaatcaatgaaataaatttgcagttaaga

SEQ ID NO: 2455 - protein, 1014 aa, Homo sapiens
MVFSVRQCGHVGRTEEVLLTFKIFLVIICLHVVLVTSLEEDTDNSSLSPPPAKLSVVSFAPSSNEVETTSLNDVTLSLLPSNETEKTKITIVKTFNASGVKPQRNICNLSSICNDSAFFRGEIMFQYDKESTVPQNQHITNGTLTGVLSLSELKRSELNKTLQTLSETYFIMCATAEAQSTLNCTFTIKLNNTMNACAAIAALERVKIRPMEHCCCSVRIPCPSSPEELGKLQCDLQDPIVCLADHPRGPPFSSSQSIPVVPRATVLSQVPKATSFAEPPDYSPVTHNVPSPIGEIQPLSPQPSAPIASSPAIDMPPQSETISSPMPQTHVSGTPPPVKASFSSPTVSAPANVNTTSAPPVQTDIVNTSSISDLENQVLQMEKALSLGSLEPNLAGEMINQVSRLLHSPPDMLAPLAQRLLKVVDDIGLQLNFSNTTISLTSPSLALAVIRVNASSFNTTTFVAQDPANLQVSLETQAPENSIGTITLPSSLMNNLPAHDMELASRVQFNFFETPALFQDPSLENLSLISYVISSSVANLTVRNLTRNVTVTLKHINPSQDELTVRCVFWDLGRNGGRGGWSDNGCSVKDRRLNETICTCSHLTSFGVLLDLSRTSVLPAQMMALTFITYIGCGLSSIFLSVTLVTYIAFEKIRRDYPSKILIQLCAALLLLNLVFLLDSWIALYKMQGLCISVAVFLHYFLLVSFTWMGLEAFHMYLALVKVFNTYIRKYILKFCIVGWGVPAVVVTIILTISPDNYGLGSYGKFPNGSPDDFCWINNNAVFYITVVGYFCVIFLLNVSMFIVVLVQLCRIKKKKQLGAQRKTSIQDLRSIAGLTFLLGITWGFAFFAWGPVNVTFMYLFAIFNTLQGFFIFIFYCVAKENVRKQWRRYLCCGKLRLAENSDWSKTATNGLKKQTVNQGVSSSSNSLQSSSNSTNSTTLLVNNDCSVHASGNGNASTERNGVSFSVQNGDVCLHDFTGKQHMFNEKEDSCNGKGRMALRRTSKRGSLHFIEQM

SEQ ID NO: 2456 - DNA, 953 bp, Homo sapiens
tttcctgaaccaaaattttattttaaattaggtttttagtgcatatgaaaattgttcataacacatgacacataaagatgttggcacatttgaactacaatagaaaatatttttatacaacttttgaaattacgaatatgattatttctcctgtgaaaaaatgcagtttgcttaaatcagctttgttatggaatatcaagtaggtttaaaatttttatattattgtttaataaacttttaataaggctgtgactctccttgatctacacatattttttaatgtattgaatactgtagcagctttttctctcaactctggtggaacaatttaatatctaaatatacatagagtttagatctagaattacacagcatgttaataacagtatcgatgtcaacaattaaattacttgttcgtccaactggcaataactgggacttatacattgtttataaaatatgtactgctgctgcagctagagcaaggcttcgttttaggtgatctttagaggcttcaatatctactcaatatgctggagtgctggagtcactaagaagtgccagttgcacttgtgaatatataacaaaaaattaaacaaaaagtcaacaaaaacaaagctcagggagcattcaaaaacatcgggatatcatcgagatacactgaagagtgaagaaatctacagaatcagaaaaagtccaatgacagcctcgagccggattacaggacctgcagggaaatatacacaataaggaacagaatacaatagaaagaaaaggagatacagatacaaggagataatggtaataagacagaaatacaacaaacatacaaaacgggagtacataagagataacacagagaagacatagagagagataaacacaaatataagaatagacaaacaatacgtgatacaatagagagacaaatgagacacagaaaaaataaatag

SEQ ID NO: 2457 - DNA, 392 bp, Homo sapiens
gtcttgctctgtcacaaaaaacaaacaaaaaaagaaatgaatgttttaggcacacgctaagtatctcttagacgattccaaagatatcaattactgtgactgacgacgactcttccccttccctgggtgtgcctgtcctgcttccctagctcacaggtgctcaggactcaaaggcagcccgccacaggcatgggatctggctggctcaaaagggagagtgaggccattggaattttcccaggagtgagtctgaagcttgggaatgttttttggtggagggtcctgaagctaggaggcgatgcagacgtgggggctgagacattatttggggccatttgcaaagagggatactcaggccagtgaccccaagggaaagagccaaggggaggaga

SEQ ID NO: 2458 - DNA, 342 bp, Homo sapiens
tctgaacaattacattatttaatatttatggaaaagttaaattaaaagaaatacacataacagtgtcatggctagcctttgacattctcttaaaaaattaaagcacaacatactgaacaattacattattctaatgtaaggaagtgtgtgaagagcacaaagtcagaaatggccccagtggcactaagggtacatctggttgtagatgggcttgtacttgagtcctggcttgtctgaggatcagttccaacagttagtgattgaaactggacaccctgatggacttcattaaacctgcatctctgcatttctccagggccttattgaggacttccggtggaa

SEQ ID NO: 2459 - DNA, 767 bp, Homo sapiens
  misc_feature (296)..(296): n is a, c, g, or t
gtcgtggccatcctgggtatggggtggggggcgggcactggactggaaatgccctctgcagcctcaagaggtgcgagccttctgaatatgcagtcactggggctgtggacctgggactgcctgcagggtcactgggctcctttaattcacctaaactcaggccctccaagcggggccatggagaggagccccacgtggggtgaggctgctgaactctggggttcccacattctccttcccttcaggatccgccacaaacagacactttttgcttccttaaagtaggatccaaatcnagatcctctagcctgggcagtagaggaagaaatgctagcctggaagctcggcatttggtttcactaagggccatgtggttcccctgcagcctcatgcctggccccttgacacatccaaagcaaagggagtcctgccccctccccccacttcctttctaccctgcctgtgcacagtgggtgggttggtgtgtctggacactgaggacttcctccccctttgcctgtccttccctcggccctgtgtgcctcagggcagatatagcaagctctttcgaccatagttgatggtagacattttagactttgtttctcagctctgtacaaacacaaatacacacccccacaaaactaaaatcaaagtttcactacataacactgggccttactgcatgtggttcattctagcatttctgttctgtgctgtgctaagctatactactgtatgttctttcagtaaaaaagcggccgcga

SEQ ID NO: 2460 - protein, 94 aa, Homo sapiens
VVAILGMGWGAGTGLEMPSAASRGASLLNMQSLGLWTWDCLQGHWAPLIHLNSGPPSGAMERSPTWGEAAELWGSHILLPFRIRHKQTLFASLK

SEQ ID NO: 2461 - DNA, 3421 bp, Homo sapiens
aactccaggaatttgtggcggagagggcaaataactgcggctctcccggcgccccgatgctcgcaccatgtcgaggcgcaagcaggcgaaaccccagcacatcaactcggaggaggaccagggcgagcagcagccgcagcagcagaccccggagtttgcagatgcggccccagcggcgcccgcggcgggggagctgggtgctccagtgaaccacccagggaatgacgaggtggcgagtgaggatgaagccacagtaaagcggcttcgtcgggaggagacgcacgtctgtgagaaatgctgtgcggagttcttcagcatctctgagttcctggaacataagaaaaattgcactaaaaatccacctgtcctcatcatgaatgacagcgaggggcctgtgccttcagaagacttctccggagctgtactgagccaccagcccaccagtcccggcagtaaggactgtcacagggagaatggcggcagctcagaggacatgaaggagaagccggatgcggagtctgtggtgtacctaaagacagagacagccctgccccaccccccaggacataagctatttagccaaaggcaaagtggccaacactaacgtgaccttgcaggcactacggggcaccaaggtggcggtgaatcagcggagcgcggatgcactccctgcccccgtgcctggtgccaacagcatcccgtgggtcctcgagcagatcttgtgtctgcagcagcagcagctacagcagatccagctcaccgagcagatccgcatccaggtgaacatgtgggcctcccacgccctccactcaagcggggcaggggccgacactctgaagaccttgggcagccacatgtctcagcaggtttctgcagctgtggctttgctcagccagaaagctggaagccaaggtctgtctctggatgccttgaaacaagccaagctacctcacgccaacatcccttctgccaccagctccctgtccccagggctggcacccttcactctgaagccggatgggacccgggtgctcccgaacgtcatgtcccgcctcccgagcgctttgcttcctcaggccccgggctcggtgctcttccagagccctttctccactgtggcgctagacacatccaagaaagggaaggggaagccaccgaacatctccgcggtggatgtcaaacccaaagacgaggcggccctctacaagcacaagtgtaagtactgtagcaaggtttttgggactgatagctccttgcagatccacctccgctcccacactggagagagacccttcgtgtgctctgtctgtggtcatcgcttcaccaccaagggcaacctcaaggtgcactttcaccgacatccccaggtgaaggcaaacccccagctgtttgccgagttccaggacaaagtggcggccggcaatggcatcccctatgcactctctgtacctgaccccatagatgaaccgagtctttctttagacagcaaacctgtccttgtaaccacctctgtagggctacctcagaatctttcttcggggactaatcccaaggacctcacgggtggctccttgcccggtgaccggcagcctgggccttctccagaaagtgagggtggacccacactccctggggtgggaccaaactataattccccaagggctggtggcttccaagggagtgggacccctgagccagggtcagagaccctgaaattgcagcagttggtggagaacattgacaaggccaccactgatcccaacgaatgtctcatttgccaccgagtcttaagctgtcagagctccctcaagatgcattatcgcacccacaccggggagagaccgttccagtgtaagatctgtggccgagccttttctaccaaaggtaacctgaagacacaccttggggttcaccgaaccaacacgtccattaagacgcagcattcgtgccccatctgccagaagaagttcactaatgccgtgatgctgcagcaacatattcggatgcacatgggcggtcagattcccaacacgcccctgccagagaatccctgtgactttacgggttctgagccaatgaccgtgggtgagaacggcagcaccggcgctatctgccatgatgatgtcatcgaaagcatcgatgtagaggaagtcagctcccaggaggctcccagcagctcctccaaggtccccacgcctcttcccagcatccactcggcatcacccacgctagggtttgccatgatggcttccttagatgccccagggaaagtgggtcctgccccttttaacctgcagcgccagggcagcagagaaaacggttccgtggagagcgatggcttgaccaacgactcatcctcgctgatgggagaccaggagtatcagagccgaagcccagatatcctggaaaccacatccttccaggcactctccccggccaatagtcaagccgaaagcatcaagtcaaagtctcccgatgctgggagcaaagcagagagctccgagaacagccgcactgagatggaaggtcggagcagtctcccttccacgtttatccgagccccgccgacctatgtcaaggttgaagttcctggcacatttgtgggaccctcgacattgtccccagggatgacccctttgttagcagcccagccacgccgacaggccaagcaacatggctgcacacggtgtgggaagaacttctcgtctgctagcgctcttcagatccacgagcggactcacactggagagaagccttttgtgtgcaacatttgtgggcgagcttttaccaccaaaggcaacttaaaggttcactacatgacacacggggcgaacaataactcagcccgccgtggaaggaagttggccatcgagaacaccatggctctgttaggtacggacggaaaaagagtctcagaaatctttcccaaggaaatcctggccccttcagtgaatgtggaccctgttgtgtggaaccagtacaccagcatgctcaatggcggtctggccgtgaagaccaatgagatctctgtgatccagagtgggggggttcctaccctcccggtttccttgggggccacctccgttgtgaataacgccactgtctccaagatggatggctcccagtcgggtatcagtgcagatgtggaaaaaccaagtgctactgacggcgttcccaaacaccagtttcctcacttcctggaagaaaacaagattgcggtcagctaagggagaacttgcgtggaaggagcaatgcagacacagtgaaatctctagaatctgctttgttttgtaagaactcatctcctcctgttttctttttcttactgatatgcaaatgatgtttactacgttggttgtgaccacaacctcaggcaagtgctacaatcacgattgttgctatgctgctttgcaaaaagttg

SEQ ID NO: 2462 - DNA, 304 bp, Homo sapiens
tttttttttttttttttttttttttttttttttttttgggggacacaacttgctttacttgaaccatttgggtgctgaccaggccctggggaggaaacaccccagcccctagtcagccacagggggcctgggaacaagggggccaaagtcaagggcctgaaactcagtgtcaaatcctaggctgggcttaaagcctcaaaaggggaatttggaattctgagaaaacaatctaaaattctaggaatagaccataaaatctcaaaaatggaatttgaaagtctaccaacactcccgggggtggggg

SEQ ID NO: 2463 - DNA, 305 bp, Homo sapiens
ggcacgagtttttttttttttttttttggtgaacaagtacaaatttagcaattttaatcaatattcttgcagacaagtgtggatatgtatatgcatatatacatatatatatcaaaattgagaatttacaaataagatttgatacatttattctagcagtgggtaagtccatagagtaaatttcaagtaggatatatttattttctttggtggtgtttttaataattcctttctactgcatacaaagggacctgaagcttaaattcagttagttttggagaaatccaaaatgagaaaaacagaaa

SEQ ID NO: 2464 - DNA, 1189 bp, Homo sapiens
cctgctggggccgtccagtcccccagacctcacaggctcagtcgcggatctgcagtgtcatgcctgggagccctcggcccgcgccaagctgggtgctgttgctgcggctgctggcgttgctgcggcccccggggctgggtgaggcatgcagctgcgccccggcgcaccctcagcagcacatctgccactcggcacttgtgattcgggccaaaatctccagtgagaaggtagttccggccagtgcagaccctgctgacactgaaaaaatgctccggtatgaaatcaaacagataaagatgttcaaagggtttgagaaagtcaaggatgttcagtatatctatacgccttttgactcttccctctgtggtgtgaaactagaagccaacagccagaagcagtatctcttgactggtcaggtcctcagtgatggaaaagtcttcatccatctgtgcaactacatcgagccctgggaggacctgtccttggtgcagagggaaagtctgaatcatcactaccatctgaactgtggctgccaaatcaccacctgctacacagtaccctgtaccatctcggcccctaacgagtgcctctggacagactggctgttggaacgaaagctctatggttaccaggctcagcattatgtctgtatgaagcatgttgacggcacctgcagctggtaccggggccacctgcctctcaggaaggagtttgttgacatcgttcagccctagtagggaccagtgaccatcacatcccttcaagagtcctgaagatcaagccagttctccttccctgcagagctttggccattaccacctgacctcttgctgccagctaataagaagtgccaagtggacagtctggccactgtcaaggcagggaaggggccatgacttttctgccctgccctcagcctgttgccctgcctcccaaaccccattagtctagccttgtagctgttactgcaagtgtttcttctggcttagtctgttttctaaagccaggactattccctttcctccccaggaatatgtgttttcctttgtcttaatcgatctggtaggggagaaatggcgaatgtcatacacatgagatggtatatccttgcgatgtacagaatcagaaggtggtttgacagcatcataaacaggctgactggcaggaatgaaaaaaaaaaaaaaaaaaa

SEQ ID NO: 2465 - protein, 224 aa, Homo sapiens
MPGSPRPAPSWVLLLRLLALLRPPGLGEACSCAPAHPQQHICHSALVIRAKISSEKVVPASADPADTEKMLRYEIKQIKMFKGFEKVKDVQYIYTPFDSSLCGVKLEANSQKQYLLTGQVLSDGKVFIHLCNYIEPWEDLSLVQRESLNHHYHLNCGCQITTCYTVPCTISAPNECLWTDWLLERKLYGYQAQHYVCMKHVDGTCSWYRGHLPLRKEFVDIVQP

SEQ ID NO: 2466 - DNA, 1960 bp, Homo sapiens
ggtgagtccgcgtgtggaagtctgtgaggcgcagaggtggggcaggccgtctggctagctaggcggctgggagcgttttcgtggcggggaacggaggttgaattgccctgcctgggctcatagggaaggaggatgtgaaggagcttgtgaaggcagaggaagattattgaataataaaatacagttttgaaaaaaatggatgaagaacctgaaagaactaagcgatgggaaggaggctatgaaagaacatgggagattcttaaagaagatgaatctggatcacttaaagctacaatagaagacattctattcaaggcaaagagaaaaagagtatttgagcaccatggacaagttcgacttggaatgatgcgccacctttatgtggtagtagatggatcaagaacaatggaagaccaagatttaaagcctaatagactgacgtgtactttaaagttgttggaatactttgtagaggaatattttgatcaaaatcctattagtcagattggaataattgtaactaagagtaaaagagctgaaaaattgactgaactttcaggaaacccaagaaaacatataacgtctttgaagaaagctgtggatatgacctgccatggagagccatctctttataattccctaagcatagctatgcagactctaaaacacatgcctggacatacaagtcgagaagtactaatcatctttagcagccttacaacttgcgatccatctaatatttatgatctaatcaagaccctaaaggcagctaaaattagagtatctgttattggattgtctgcagaagttcgcgtttgcactgtacttgctcgtgaaactggtggcacgtaccatgttattttagatgaaagccattacaaagagttgctcacacatcatgttagtcctcctcctgctagctcaagttctgaatgctcacttattcgtatgggatttcctcagcacaccattgcttctttatctgaccaggatgcaaaaccctctttcagcatggcgcatttggatggcaatactgagccagggcttacattaggaggctatttctgcccacagtgtcgggcaaagtactgtgagctacctgttgaatgtaaaatctgtggtcttactttggtgtctgctccccacttggcacggtcttaccatcatttgtttcctttggatgcttttcaagaaattcccctagaagaatataatggagaaagattttgttatggatgtcagggggaattgaaagaccaacatgtttatgtttgtgctgtgtgccaaaatgttttctgtgtggactgtgatgtttttgttcatgattctctacactgttgccctggctgtattcataagattccagctccttcaggtgtttgattccagcatgtagtatacattgtatgtgttaaaaagaaatttgcaactgtgaataaaaggacttctttagaagaagcttcatttaaaacatgaaaggataatctgacttaagaaactttttgctaagaaaaggtaatattttattaaattttaaatttgtgttgtcacagaaatacctgaaattcagtagtacttcattcaattaattttgttttctattattttgagttatactgttttcaaagtcattatgcagtatgtataaacttataagaattaaattgatgtgataattttatgtttttataattaaatatagaatctttatgatttatgttaattcattaatttagtgtaagaagaaagttaagtctgaatgtaaattcagtgtaagatgaaaatttatcaatacttatggaaattaggctgggcgctgtggctcacgcctgtaatcccagcactttgggaggctgaggtgggcggatcacttgaggtcaggagttcgagaccagccgggccagcatggtggaaaccccgttcactactaaaaatacaaggattattagccgggcctggt

SEQ ID NO: 2467 - protein, 395 aa, Homo sapiens
MDEEPERTKRWEGGYERTWEILKEDESGSLKATIEDILFKAKRKRVFEHHGQVRLGMMRHLYVVVDGSRTMEDQDLKPNRLTCTLKLLEYFVEEYFDQNPISQIGIIVTKSKRAEKLTELSGNPRKHITSLKKAVDMTCHGEPSLYNSLSIAMQTLKHMPGHTSREVLIIFSSLTTCDPSNIYDLIKTLKAAKIRVSVIGLSAEVRVCTVLARETGGTYHVILDESHYKELLTHHVSPPPASSSSECSLIRMGFPQHTIASLSDQDAKPSFSMAHLDGNTEPGLTLGGYFCPQCRAKYCELPVECKICGLTLVSAPHLARSYHHLFPLDAFQEIPLEEYNGERFCYGCQGELKDQHVYVCAVCQNVFCVDCDVFVHDSLHCCPGCIHKIPAPSGV

SEQ ID NO: 2468 - DNA, 489 bp, Homo sapiens
  misc_feature (437)..(437): n is a, c, g, or t
tttcgtatttctgaaatcattcttttattttgcacacacatagctgctatttactgaacactggaaattcatgaatgcgttacatatttaaactttcatagaaggctcagatcaacaaagcaaaacttctacagataataagtagttgtgtatgcttgtcactcttgggcccatcagcacctgttccctatcatattgctgaactctgcaaactccagaaaggaaggtttcttttccaaacttcagagaagctgcagatcaagaatttgggccgttgcatctgattagaaactctcttcttccagtgtgagaacgttggattgaaagcggcataatataaaaagagatggttgtctgtcagggagaggtcagatctgtaggggtctttcacctgtcaccctcggaagaagctgatgagaaaggcgcacagggcctgnaagggtttccaacaatgttcccaggccttcttctttgcttcctcattccctc

SEQ ID NO: 2469 - DNA, 257 bp, Homo sapiens
ttttttttttttttttagattttattttttttaatttttaaaaaatgttgaaaaataaatccatgtctgcataagttcccaacccccatttctccaagtttctggaaggtgggcttggtgggcaccctcagctccttagcatttcccagctggcccctgaagacagagcttctcttccagcctctgctgctgtaaggcccctctgcccacctccccccctgcagcctccctccccacctcaccccagacttattgct

SEQ ID NO: 2470 - DNA, 446 bp, Homo sapiens
tttttttttttttttttaaaaaaagtgttttcccctttattacagaactgatacatatacattattgaacattaaaaaatacaaagaagacattttaagaatgcaattaccaaacattttcccatccaaagataatcacttagttttttggtgtatccttctccccgccacccaactcttagtttgcaaaatttcaaacccacagcaaagccacattgatagtacaatgaacatctgtcgaccagtcacctagagtcaccaagtgttgtcattttactacatttgacttgtctctttctttctttatattcatatgttttatatttttccacttagtcactggaaattcagtggcagacactgtggtaattaatatctaaaaacttcagtatgtttgctaagaacaagaatgttctcctacatagccacagtacaaatgtctcact

SEQ ID NO: 2471 - DNA, 5551 bp, Homo sapiens
gacctttatttgttacttttgagctacagtgacaagaaagatcacctaactgtggaagaactggctcagtttttgaaggtggagcaaaagatgaataatgtgacaacggactattgtcttgacatcataaagaagtttgaagtttcagaagaaaataaggtgaaaaatgttcttggcatagaaggcttcacgaacttcatgcgtagtcctgcctgtgacatatttaacccattgcaccatgaagtgtaccaagacatggatcagcccctctgcaactactacattgcttcctctcacaatacatacctgactggagaccagctcctttctcagtccaaagtggatatgtatgcacgggtgctgcaagagggctgtcgctgtgtggaagttgactgttgggatggcccagatggagagccagtagtacatcatggttacactctcacttcaaaaattctcttcagagatgttgtggagaccatcaacaagcatgcctttgtgaagaatgagtttcctgttatattgtctatcgagaatcactgcagtatccagcagcaaaggaagattgctcagtacctgaaaggaatattcggagacaaactggacctgtcatctgttgatacaggggagtgcaagcagcttccaagccctcaaagtttgaaaggcaaaattctagtgaagggtaagaagttgccttatcaccttggggatgatgcagaggaaggggaagtttccgatgaggacagtgcagatgaaattgaagacgagtgcaaattcaagctccattatagtaatgggaccactgagcatcaggtggaatctttcataaggaaaaaactggagtcactgttaaaagaatctcaaattcgagataaagaagatcctgatagtttcacagtgcgggcactactgaaggccacgcatgaaggcttaaatgcacacctgaagcagagtccagatgtaaaggaaagtggaaagaaatcacatggacgatccctcatgaccaactttggaaaacataagaaaactacaaaatcacggtctaaatcttacagtactgatgatgaggaagacacacagcagagtactggcaaggagggtggccagctgtacagattgggtcgccgaaggaaaaccatgaagctctgccgagaactctctgatttggttgtgtacacaaactccgtggccgctcaggacattgtggatgacggaaccacaggaaatgtgttatcattcagtgaaacaagagcacatcaggttgttcagcaaaaatcagagcagttcatgatttataatcaaaagcaactcacgaggatttacccctctgcctaccgcattgattccagtaacttcaaccctctcccctactggaacgcaggctgccagctagtggcactgaattatcaatctgaaggacgaatgatgcagttaaaccgagccaaattcaaggcaaatggcaattgtggctatgtcctcaaaccccagcaaatgtgcaaaggtactttcaaccctttctctggtgaccctcttcctgccaaccccaaaaagcagctcatcctgaaagttatcagtggacagcaactccccaaacctccagactccatgtttggagatcgaggcgagatcattgacccttttgttgaagttgaaattattggattgccagtagattgttgtaaagatcaaacccgtgtggtagatgacaatggatttaaccctgtgtgggaagaaacactgacatttacagtacacatgccagaaatagctttggttcggttccttgtgtgggatcacgatcccattggacgagactttgttggacaaagaactgtgaccttcagcagcttagtgcctggctaccggcatgtctatttggaaggactgacagaagcatccatatttgtacacataaccatcaatgaaatctatggaaagtggagccctttaatactcaaccccagttatactatattgcactttctaggagctacaaagaacagacaactccagggtctgaagggactgttcaataagaatcctaggcacagttcttcagaaaacaattcccattatgtacggaagcgatccattggagatagaattctgcgacgcacagctagcgccccagccaaaggcaggaaaaagagcaaaatgggcttccaagaaatggtggagataaaggattctgtgtccgaggccacaagagatcaagatggcgtgctgaggaggaccacacgcagtttgcaagcacgccctgtctctatgcctgttgacagaaaccttctgggagctttgtcgctgcctgtatctgaaacagcaaaagacattgaaggaaaagaaaactctctagtacaaatctgaataggaaacaacttaagcagaagataaagatggcagaagaaaagggaaagcaagtataaaagatccacattttctaaatttcaacaaaaagttatcatcctcctccagtgctctgctccacaaagataccagccaaggggacaccattgtatctactgcccacatgtcagtcacaggagaacagctgggcatgtcaagtcctaggggtgggagaaccacatcaaatgccacaagcaattgccaggaaaacccctgtcccagcaagtctctctccccaaagcagcatttggctcccgatcctgtagttaaccccacacaagatctgcatggtgtgaaaatcaaggaaaagggtaatcctgaggactttgtggaagggaaaagcatcttgtcaggaagcgtcctttctcatagcaacctagaaattaagaacctggaaggtaataggggtaagggccgagctgcaacatccttttctttgtcagacgtctccatgctctgttctgacatacctgacctacattcaactgcaattctgcaggagagtgtaatttcccatcttattgacaatgtcactttaacaaatgagaatgagccgggcagttccatctcagccctgattggccagtttgatgagaccaacaatcaggctctcacagttgtttctcatcttcataataccagtgtgatgtcaggccattgtcccttgcctagcctgggcctaaaaatgcccatcaagcatggtttttgcaagggaaaatccaagtcttccttcctgtgctcatctccggagctgatagcactctcgagttctgagaccaccaaacatgcaacgaacacagtttatgaaactacctgcactcccatctctaaaaccaaaccagatgatgacctttctagtaaggccaagacagcggccttagaaagcaacctgcctggatcccctaatacttctcgtggctggttaccaaaaagtcctaccaagggagaagactgggaaacactgaagagctgcagccctgcctcttcccctgatttgaccctggaggatgtaatagctgatcccactctctgtttcaattctggggagagcagccttgtggaaattgatggagaatcagaaaatctttctctaacaacctgtgaatataggagagagggcacaagtcaacttgcttctcctttaaaactcaagtacaatcagggtgtggtagaacactttcaaagaggtttgagaaacggctactgtaaagagaccctccgcccttctgtccctgaaatattcaacaatattcaagatgtcaaaactcaaagtatttcttatctagcctatcagggtgctggctttgtgcataatcatttctcagattcagatgcaaaaatgttccagacctgtgtgccccagcaatctagtgctcaagatatgcatgtccctgtacccaagcagttggcacatcttcctttgcctgctctgaaactgcctagtccttgcaaatccaaaagtctgggggacttaacatcagaggacattgcctgcaattttgagagcaagtaccagtgtattagtaagagttttgttacaactggcattagagacaagaagggcgtgactgtgaagacaaagtcgttagagcctatagatgccctgaccgagcagcttcggaagcttgtgtcctttgaccaggaagacaactgccaagtgctatattcaaagcaggatgccaatcagctcccccgggcactggtcaggaagttgtcatccagaagtcagagcagagtgcgcaatattgctagtcgtgccaaggagaaacaggaagccaacaagcagaaagttccaaaccccagcaatggggcaggagtggttcttagaaacaaaccctcagcacccacccctgcagtgaatcgccactccaccggctcctacatcgcaggctacctgaagaacacgaaagggggtggccttgaaggccggggcatcccagagggggcatgcacggctcttcactatggccacgttgaccagttttgttcagataattctgttttgcagactgagccaagcagtgatgataaaccagaaatttattttcttttgagactgtgaattatttaaaactgcattcttaaggttttcaaggtattctgtagaatgtcagagttttcagtaaataagttccttggctttggaatgattttcaaatgtatttttaaacttgtatttgggtctccctttgacttcatgtgttctccctgttaatgcgtttgtatatagatttggtgacatttcccatgtacctattatgatctttctcccttgagttgttgtaaactgtatcagtatgaaatatgtgcatgccctagatgtgaaactcctcagcagctcgggttataatgtgtgtgtgtttcaccaagatgtcctttactgtgtcctcagattgcagtcacaaatgtagtcatttttactctctaactgttgagttgattaagagactttgcaaacgacaaagggatgaattccttactttaatctgttatcatttttcctatgtttccctctttgttcagaagcccagatgcatttttataactcagttttaaaaactttaaaatagttaccttgccttttaggatgttcttatcccacccataatgagagttgaaaggggatggatagctgctccccatgcccttcccactttttggaataggccgtgagggtgtgaggaagaaggctgtcttttgtacataaggacaaaattgtttgttttacataaattttgttacatatttttgctaatggctttgtatgtaacaagaagcgagttgccaaactacctgttgtacttttgaattttctgattgaattacagactgcgaacaacggctttcagaatgagggacttccatcagactctaatgataatagtagcacaaattgaaaacttccccaaagctttcacagaatattttctcataataaaatccaagtgaacagataattagaagaaacccttttccttcagggaaccaagcaactctattttagtactgacatgcattattttcactgtgaattcacttttttattgcatgttcagatgtccctctttgttttttttttttgtaacattaactgcaatgatgttcttcctggaattcatgaaaatataattaaaacacatttttaaac

SEQ ID NO: 2472 - protein, 787 aa, Homo sapiens
DLYLLLLSYSDKKDHLTVEELAQFLKVEQKMNNVTTDYCLDIIKKFEVSEENKVKNVLGIEGFTNFMRSPACDIFNPLHHEVYQDMDQPLCNYYIASSHNTYLTGDQLLSQSKVDMYARVLQEGCRCVEVDCWDGPDGEPVVHHGYTLTSKILFRDVVETINKHAFVKNEFPVILSIENHCSIQQQRKIAQYLKGIFGDKLDLSSVDTGECKQLPSPQSLKGKILVKGKKLPYHLGDDAEEGEVSDEDSADEIEDECKFKLHYSNGTTEHQVESFIRKKLESLLKESQIRDKEDPDSFTVRALLKATHEGLNAHLKQSPDVKESGKKSHGRSLMTNFGKHKKTTKSRSKSYSTDDEEDTQQSTGKEGGQLYRLGRRRKTMKLCRELSDLVVYTNSVAAQDIVDDGTTGNVLSFSETRAHQVVQQKSEQFMIYNQKQLTRIYPSAYRIDSSNFNPLPYWNAGCQLVALNYQSEGRMMQLNRAKFKANGNCGYVLKPQQMCKGTFNPFSGDPLPANPKKQLILKVISGQQLPKPPDSMFGDRGEIIDPFVEVEIIGLPVDCCKDQTRVVDDNGFNPVWEETLTFTVHMPEIALVRFLVWDHDPIGRDFVGQRTVTFSSLVPGYRHVYLEGLTEASIFVHITINEIYGKWSPLILNPSYTILHFLGATKNRQLQGLKGLFNKNPRHSSSENNSHYVRKRSIGDRILRRTASAPAKGRKKSKMGFQEMVEIKDSVSEATRDQDGVLRRTTRSLQARPVSMPVDRNLLGALSLPVSETAKDIEGKENSLVQI

SEQ ID NO: 2473 - DNA, 759 bp, Homo sapiens
attgcccggacacacacatgtgcacagatatgctgtctggacatgcacacacgtgcagatatgctgtccggatacacacgcacgcacacatgcagatatgctgcctgggcacacacttccggacacacatgcacacacaggtgcagatatgctgcctggacacacgcagactgacgtgcttttgggagggtgtgccgtgaagcctgcagtacgtgtgccgtgaggctcatagttgatgagggactttccctgctccaccgtcactcccccaactctgcccgcctctgtccccgcctcagtccccgcctccatccccgcctctgtcccctggccttggcggctatttttgccacctgccttgggtgcccaggagtcccctactgctgtgggctggggttgggggcacagcagccccaagcctgagaggctggagcccatggctagtggctcatccccactgcattctccccctgacacagagaaggggccttggtatttatatttaagaaatgaagataatattaataatgatggaaggaagactgggttgcagggactgtggtctctcctggggcccgggacccgcctggtctttcagccatgctgatgaccacaccccgtccaggccagacaccaccccccaccccactgtcgtggtggccccagatctctgtaattttatgtagagtttgagctgaagccccgtatatttaatttattttgttaaacatgaaagtgcaaaaaaaaaaaaaaaaaaaa

SEQ ID NO: 2474 - protein, 123 aa, Homo sapiens
MRDFPCSTVTPPTLPASVPASVPASIPASVPWPWRLFLPPALGAQESPTAVGWGWGHSSPKPERLEPMASGSSPLHSPPDTEKGPWYLYLRNEDNINNDGRKTGLQGLWSLLGPGTRLVFQPC

SEQ ID NO: 2475 - DNA, 404 bp, Homo sapiens
  misc_feature (9)..(9): n is a, c, g, or t
  misc_feature (120)..(120): n is a, c, g, or t
  misc_feature (204)..(204): n is a, c, g, or t
  misc_feature (300)..(300): n is a, c, g, or t
  misc_feature (403)..(403): n is a, c, g, or t
ttttttttncttttttttttttaaaataaaaagtaatcatttttatttgcattggcatttttgtcaattcagactgagaaatgatgagccttttttgttgttgtttttagtagcttacanggggcttttagttctataaaactcccatctttgttgaatgacgagattgtaaaccagaaaccaaaaaccaaaaaacacccacanagctgtcttatacttctgtaaccatttctggaacttaaaactctcttgttcgttacacctcattcattggcatcttaggttttaggcttgttcaangatcttttaggtaggcttctaacataggcccactaggctaaggtcttggtaaatggtggtataaggctgggacatttgggggaatattgatttttttaaaaang

SEQ ID NO: 2476 - DNA, 459 bp, Homo sapiens
tttttttttttttttttttgcaaaaatgacatatatttgatttattaactcagcattgatgcaataacaagagaatgaaaatagtatatcaaaagaagactggttaaatacattatggtacactcacacaatggaatactatgcagcggtataaaagaatgaaaaagtaatttatgtcttaatatgaaccgatgtctgagaaatattggtgaaaaaaagcaagatacagaccaatataaagtatgctaccatttgtgtaaaaaagcttgtgtgtgtgtatgtgtggtgtgtgtgcacacgtgcatacacttgcacatcgcctggaatctgtctgaaggaaacctcaaaacacaatcttgactacctttaaggaggtgacttgaatatctggcaagggagacttttcactgtacacttgaatgccttgtgatttttgtaccatagacaggcttatccatc

SEQ ID NO: 2477 - DNA, 301 bp, Homo sapiens
  misc_feature (231)..(231): n is a, c, g, or t
  misc_feature (234)..(235): n is a, c, g, or t
  misc_feature (237)..(237): n is a, c, g, or t
tgtttctcatgtattttaatgccatgaggtcattgtgtggtcattatcaacagagaattggacaaaaagcaacgtttttctcagtgcttacgtgctcctggacatggagcggaggatgaactcgactgcattctcaatgatctctgtgcccaggaggcttaggaatttggggaagtctggctttgggtctttgcccgagtcgtctggcttgtcgtctggcttgtctggttnggnntngtcgtctgcatagcagggtcaggaataagacaagcagtcccaggacaactgtcaggcgaagtac

SEQ ID NO: 2478 - DNA, 396 bp, Homo sapiens
ttttttaggagtggtggtggtggtgtggtggtgattaggtacagtgctttcaatgcagtcttgcagacagaaaaaaaatctttctcaaagcttacaaacatttcccccctactatttccacccttcctcaggccacatgaatttgtgtcacccagataataaagaagcagcatgtatgctcttaattaccagtcaaatataaatcaatactaccctaaattaatggctttctgcaagtctacattaagctgaggtctacatgttggcaaatcagggttttgacttttttttttaaggaaagtttccaaccagttcctttccccctctttattaccagttaatttccaggggtttgtttttgcctttttgttgttgttgttgtttttgttgttgaga

SEQ ID NO: 2479 - DNA, 288 bp, Homo sapiens
gttgtaacgtaacaacaggtataaaaggcacagttgcttattttgcattcactcatttattttttgtgtcttttattgatttttttcaaaagcactctatatatggagtggcaccagatttaacctatttaaaataaaagtcatacaaacacaaaatatatttctgtgtcatgccagctcattatataataaacatgttatgacagctaattctactagaattactgtgaatactacagtacactgaattttattctttcacatccattttagttgggcgtacgggga

SEQ ID NO: 2480 - DNA, 501 bp, Homo sapiens
tttttttttttttttttttttttttttgtaattaaaactttatttcatatctattgttaaattacacaaaatcagggaatggtttggaaagctacaccaatggacagatgtttacaggtgaaatcatgggatttacataatggcaaaaatgtatatgtatatttataacatcctctatatacaataatcagtatagacagagaaaaggcacttaatctttgcaaatcatgcacaccacagcaataacacaaaatgttttttctggaacaagcttttccactggctcaggcttaatcctgctttccaacaatacctatcagttttaaaagcaaacattttcaattaaaactaaagaaaattgaaataccatagggatctactaactattttaaaaacacaattgtacacaaaatagttttactttaaaacactgcgacttcaaggggtggaaaaattcctttcagttttttagctctcaggattttcaagactgcaatactg

SEQ ID NO: 2481 - DNA, 3426 bp, Homo sapiens
gtaggaatcgcagcgccaacggttgcaaggcccaagaagccatcctgggaaggaaaatgcattggggaaccctgtgcggattcttgtggctttggccctatcttttctatgtccaagctgtgcccatccaaaaagtccaagatgacaccaaaaccctcatcaagacaattgtcaccaggatcaatgacatttcacacacgcagtcagtctcctccaaacagaaagtcaccggtttggacttcattcctgggctccaccccatcctgaccttatccaagatggaccagacactggcagtctaccaacagatcctcaccagtatgccttccagaaacgtgatccaaatatccaacgacctggagaacctccgggatcttcttcacgtgctggccttctctaagagctgccacttgccctgggccagtggcctggagaccttggacagcctggggggtgtcctggaagcttcaggctactccacagaggtggtggccctgagcaggctgcaggggtctctgcaggacatgctgtggcagctggacctcagccctgggtgctgaggccttgaaggtcactcttcctgcaaggactacgttaagggaaggaactctggcttccaggtatctccaggattgaagagcattgcatggacaccccttatccaggactctgtcaatttccctgactcctctaagccactcttccaaaggcataagaccctaagcctccttttgcttgaaaccaaagatatatacacaggatcctattctcaccaggaagggggtccacccagcaaagagtgggctgcatctgggattcccaccaaggtcttcagccatcaacaagagttgtcttgtcccctcttgacccatctccccctcactgaatgcctcaatgtgaccaggggtgatttcagagagggcagaggggtaggcagagcctttggatgaccagaacaaggttccctctgagaattccaaggagttccatgaagaccacatccacacacgcaggaactcccagcaacacaagctggaagcacatgtttatttattctgcattttattctggatggatttgaagcaaagcaccagcttctccaggctctttggggtcagccagggccaggggtctccctggagtgcagtttccaatcccatagatgggtctggctgagctgaacccattttgagtgactcgagggttgggttcatctgagcaagagctggcaaaggtggctctccagttagttctctcgtaactggtttcatttctactgtgactgatgttacatcacagtgtttgcaatggtgttgccctgagtggatctccaaggaccaggttattttaaaaagatttgttttgtcaagtgtcatatgtaggtgtctgcacccaggggtggggaatgtttgggcagaagggagaaggatctagaatgtgttttctgaataacatttgtgtggtgggttctttggaaggagtgagatcattttcttatcttctgcaattgcttaggatgtttttcatgaaaatagctctttcaggggggttgtgaggcctggccaggcaccccctggagagaagtttctggccctggctgaccccaaagagcctggagaagctgatgctttgcttcaaatccatccagaataaaacgcaaagggctgaaagccatttgttggggcagtggtaagctctggctttctccgactgctagggagtggtctttcctatcatggagtgacggtcccacactggtgactgcgatcttcagagcaggggtccttggtgtgaccctctgaatgggtccagggttgatcacactctgggtttattacatggcagtgttcctatttggggcttgcatgccaaattgtagttcttgtctgattggctcacccaagcaaggccaaaattaccaaaaatcttggggggtttttactccagtggtgaagaaaactcctttagcaggtggtcctgagacctgacaagcactgctaggcgagtgccaggactccccaggccaggccaccaggatgcccttcccactggaggtcacattcaggaagatgaaagaggaggtttggggtctgccaccatcctgctgctgtgtttttgctatcacacagtgggtggtggatctgtccaaggaaacttgaatcaaagcagttaactttaagactgagcacctgcttcatgctcagccctgactggtgctataggctggagaagctcacccaataaacattaagattgaggcctgccctcagggatcttgcgttcccagtggtcaaaccgcactcacccatgtgccaaggtggggtatttaccacagcagctgaacagccaaatgcatggtgcagttgacagcaggtgggaaatggtatgagctgaggggggccgtgcccaggggcccacagggaaccctgcttgcactttgtaacatgtttacttttcagggcatcttagcttctattatagccacatccctttgaaacaagataactgagaatttaaaaataagaaaatacataagaccataacagccaacaggtggcaggaccaggactatagcccaggtcctctgatacccagagcattacgtgagccaggtaatgagggactggaaccagggagaccgagcgctttctggaaaagaggagtttcgaggtagagtttgaaggaggtgagggatgtgaattgcctgcagagagaagcctgttttgttggaaggtttggtgtgtggagatgcagaggtaaaagtgtgagcagtgagttacagcgagaggcagagaaagaagagacaggagggcaagggccatgctgaagggaccttgaagggtaaagaagtttgatattaaaggagttaagagtagcaagttctagagaagaggctggtgctgtggccagggtgagagctgctctggaaaatgtgacccagatcctcacaaccacctaatcaggctgaggtgtcttaagccttttgctcacaaaacctggcacaatggctaattcccagagtgtgaaacttcctaagtataaatggttgtctgtttttgtaacttaaaaaaaaaaaaaaaagtttggccgggtgcggtggctcacgcctgtaatcccagcactttgggaggccaaggtggggggatcacaaggtcactagatggcgagcatcctggccaacatggtgaaaccccgtctctactaaaaacacaaaagttagctgagcgtggtggcgggcgcctgtagtcccagccactcgggaggctgagacaggagaatcgcttaaacctgggaggcggagagtacagtgagccaagatcgcgccactgcactccggcctgatgacagagcgagattccgtcttaaaaaaaaaaaaaaaaaaagtttgtttttaaaaaaatctaaataaaataactttgccccctg

SEQ ID NO: 2482 - protein, 167 aa, Homo sapiens
MHWGTLCGFLWLWPYLFYVQAVPIQKVQDDTKTLIKTIVTRINDISHTQSVSSKQKVTGLDFIPGLHPILTLSKMDQTLAVYQQILTSMPSRNVIQISNDLENLRDLLHVLAFSKSCHLPWASGLETLDSLGGVLEASGYSTEVVALSRLQGSLQDMLWQLDLSPGC

SEQ ID NO: 2483 - DNA, 3935 bp, Homo sapiens
ggagagccgaaagcggagctcgaaactgactggaaacttcagtggcgcggagactcgccagtttcaaccccggaaacttttctttgcaggaggagaagagaaggggtgcaagcgcccccacttttgctctttttcctcccctcctcctcctctccaattcgcctccccccacttggagcgggcagctgtgaactggccaccccgcgccttcctaagtgctcgccgcggtagccggccgacgcgccagcttccccgggagccgcttgctccgcatccgggcagccgaggggagaggagcccgcgcctcgagtccccgagccgccgcggcttctcgcctttcccggccaccagccccctgccccgggcccgcgtatgaatctcctggaccccttcatgaagatgaccgacgagcaggagaagggcctgtccggcgcccccagccccaccatgtccgaggactccgcgggctcgccctgcccgtcgggctccggctcggacaccgagaacacgcggccccaggagaacacgttccccaagggcgagcccgatctgaagaaggagagcgaggaggacaagttccccgtgtgcatccgcgaggcggtcagccaggtgctcaaaggctacgactggacgctggtgcccatgccggtgcgcgtcaacggctccagcaagaacaagccgcacgtcaagcggcccatgaacgccttcatggtgtgggcgcaggcggcgcgcaggaagctcgcggaccagtacccgcacttgcacaacgccgagctcagcaagacgctgggcaagctctggagacttctgaacgagagcgagaagcggcccttcgtggaggaggcggagcggctgcgcgtgcagcacaagaaggaccacccggattacaagtaccagccgcggcggaggaagtcggtgaagaacgggcaggcggaggcagaggaggccacggagcagacgcacatctcccccaacgccatcttcaaggcgctgcaggccgactcgccacactcctcctccggcatgagcgaggtgcactcccccggcgagcactcggggcaatcccagggcccaccgaccccacccaccacccccaaaaccgacgtgcagccgggcaaggctgacctgaagcgagaggggcgccccttgccagaggggggcagacagccccctatcgacttccgcgacgtggacatcggcgagctgagcagcgacgtcatctccaacatcgagaccttcgatgtcaacgagtttgaccagtacctgccgcccaacggccacccgggggtgccggccacgcacggccaggtcacctacacgggcagctacggcatcagcagcaccgcggccaccccggcgagcgcgggccacgtgtggatgtccaagcagcaggcgccgccgccacccccgcagcagcccccacaggccccgccggccccgcaggcgcccccgcagccgcaggcggcgcccccacagcagccggcggcacccccgcagcagccacaggcgcacacgctgaccacgctgagcagcgagccgggccagtcccagcgaacgcacatcaagacggagcagctgagccccagccactacagcgagcagcagcagcactcgccccaacagatcgcctacagccccttcaacctcccacactacagcccctcctacccgcccatcacccgctcacagtacgactacaccgaccaccagaactccagctcctactacagccacgcggcaggccagggcaccggcctctactccaccttcacctacatgaaccccgctcagcgccccatgtacacccccatcgccgacacctctggggtcccttccatcccgcagacccacagcccccagcactgggaacaacccgtctacacacagctcactcgaccttgaggaggcctcccacgaagggcgaagatggccgagatgatcctaaaaataaccgaagaaagagaggaccaaccagaattccctttggacatttgtgtttttttgtttttttattttgttttgttttttcttcttcttcttcttccttaaagacatttaagctaaaggcaactcgtacccaaatttccaagacacaaacatgacctatccaagcgcattacccacttgtggccaatcagtggccaggccaaccttggctaaatggagcagcgaaatcaacgagaaactggactttttaaaccctcttcagagcaagcgtggaggatgatggagaatcgtgtgatcagtgtgctaaatctctctgcctgtttggactttgtaattatttttttagcagtaattaaagaaaaaagtcctctgtgaggaatattctctattttaaatatttttagtatgtactgtgtatgattcattaccattttgaggggatttatacatatttttagataaaattaaatgctcttatttttccaacagctaaactactcttagttgaacagtgtgccctagcttttcttgcaaccagagtatttttgtacagatttgctttctcttacaaaaagaaaaaaaaaatcctgttgtattaacatttaaaaacagaattgtgttatgtgatcagttttgggggttaactttgcttaattcctcaggctttgcgatttaaggaggagctgccttaaaaaaaaataaaggccttattttgcaattatgggagtaaacaatagtctagagaagcatttggtaagctttatcatatatatattttttaaagaagagaaaaacaccttgagccttaaaacggtgctgctgggaaacatttgcactcttttagtgcatttcctcctgcctttgcttgttcactgcagtcttaagaaagaggtaaaaggcaagcaaaggagatgaaatctgttctgggaatgtttcagcagccaataagtgcccgagcacactgcccccggttgcctgcctgggccccatgtggaaggcagatgcctgctcgctctgtcacctgtgcctctcagaacaccagcagttaaccttcaagacattccacttgctaaaattatttattttgtaaggagaggttttaattaaaacaaaaaaaaattcttttttttttttttttccaattttaccttctttaaaataggttgttggagctttcctcaaagggtatggtcatctgttgttaaattatgttcttaactgtaaccagtttttttttatttatctctttaatctttttttattattaaaagcaagtttctttgtattcctcaccctagatttgtataaatgcctttttgtccatcccttttttctttgttgtttttgttgaaaacaaactggaaacttgtttctttttttgtataaatgagagattgcaaatgtagtgtatcactgagtcatttgcagtgttttctgccacagacctttgggctgccttatattgtgtgtgtgtgtgggtgtgtgtgtgttttgacacaaaaacaatgcaagcatgtgtcatccatatttctctacatcttctcttggagtgagggaggctacctggaggggatcagcccactgacagaccttaatcttaattactgctgtggctagagagtttgaggattgctttttaaaaaagacagcaaacttttttttttatttaaaaaaagatatattaacagttttagaagtcagtagaataaaatcttaaagcactcataatatggcatccttcaatttctgtataaaagcagatctttttaaaaagatacttctgtaacttaagaaacctggcatttaaatcatattttgtctttaggtaaaagctttggtttgtgttcgtgttttgtttgtttcacttgtttccctcccagccccaaaccttttgttctctccgtgaaacttacctttccctttttctttctcttttttttttttgtatattattgtttacaataaatatacattgcattaaaaagaaa

SEQ ID NO: 2484 - protein, 509 aa, Homo sapiens
MNLLDPFMKMTDEQEKGLSGAPSPTMSEDSAGSPCPSGSGSDTENTRPQENTFPKGEPDLKKESEEDKFPVCIREAVSQVLKGYDWTLVPMPVRVNGSSKNKPHVKRPMNAFMVWAQAARRKLADQYPHLHNAELSKTLGKLWRLLNESEKRPFVEEAERLRVQHKKDHPDYKYQPRRRKSVKNGQAEAEEATEQTHISPNAIFKALQADSPHSSSGMSEVHSPGEHSGQSQGPPTPPTTPKTDVQPGKADLKREGRPLPEGGRQPPIDFRDVDIGELSSDVISNIETFDVNEFDQYLPPNGHPGVPATHGQVTYTGSYGISSTAATPASAGHVWMSKQQAPPPPPQQPPQAPPAPQAPPQPQAAPPQQPAAPPQQPQAHTLTTLSSEPGQSQRTHIKTEQLSPSHYSEQQQHSPQQIAYSPFNLPHYSPSYPPITRSQYDYTDHQNSSSYYSHAAGQGTGLYSTFTYMNPAQRPMYTPIADTSGVPSIPQTHSPQHWEQPVYTQLTRP

SEQ ID NO: 2485 - DNA, 436 bp, Homo sapiens
gcggacaattggggccaaacgaggaaggacacagacccaaaagccagacccaggtcccagcgcgcttctgggctctaacctgggagactcgcatccagcccggcggaagctacagtctctaccctgagctccgtggcgcagagcgctccacgcgtattcacgccccgtcctcgcctgacccccaccccgtctgggcctgccctcccggccggggagcctccaggcacacacccgcttctggacgtcggggacccagcggttgggctcaggccacaacggtctgagattgccccgggcaacccgtcggctcggcctgaggccgggtccccgatgtcgctggggccctaccccctcttgcgaagacggtgacttttttttccactaaaatattttaatgaacacaaaaaagaagaacaggagcacaaagagaaaccac

SEQ ID NO: 2486 - DNA, 394 bp, Homo sapiens
ttttattttctttgttatacgtctatttattaatgaaaaagtatcaccaacatccatttaaaaataagcaaaagacattaataaacattcttccaaagaggatatacaggtggcaactagatacaagatgttcaaatgttcaataccataaaataccagaaaaatgcaataaaatcacagacagatgctattatacagctattaaaacaactaaaattaaaaagactaaccataccaagtatggcaagaatgtagagaaataagaaggttcacatactgttgatgagaatgcaaatggtacagttaggttatagtctggccttgtctttaaaagtgacgcattcacgtacactgtactactgacccaggagaaataaagcatttctgcatatta

SEQ ID NO: 2487 - DNA, 5535 bp, Homo sapiens
ggactttagaagccgttgctgccctctctgtcacctgaagcggggccctctcccatcccacccttgccccgcctccctgcccccaccgggccggccctgcccgccgccggaccctggcatgtcaagacctggtccgcgcctgcctgcccagcccgcggaaccccggcggccccgcgagctaggatgaggggccaggccgccgccccgggccccgtctggatcctcgccccgctgctactgctgctgctgctgctgggacgccgcgcgcgggcggccgccggagcagacgcggggcccgggcccgagccgtgcgccacgctggtgcagggaaagttcttcggctacttctccgcggccgccgtgttcccggccaacgcctcgcgctgctcctggacgctacgcaacccggacccgcggcgctacactctctacatgaaggtggccaaggcgcccgtgccctgcagcggccccggccgcgtgcgcacctaccagttcgactccttcctcgagtccacgcgcacctacctgggcgtggagagcttcgacgaggtgctgcggctctgcgacccctccgcacccctggccttcctgcaggccagcaagcagttcctgcagatgcggcgccagcagccgccccagcacgacgggctccggccccgggccgggccgccgggccccaccgacgacttctccgtggagtacctggtggtggggaaccgcaaccccagccgtgccgcctgccagatgctgtgccgctggctggacgcgtgtctggccggtagtcgcagctcgcacccctgcgggatcatgcagaccccctgcgcctgcctgggcggcgaggcgggcggccctgccgcgggacccctggccccccgcggggatgtctgcttgagagatgcggtggctggtggccctgaaaactgcctcaccagcctgacccaggaccggggcgggcacggcgccacaggcggctggaagctgtggtccctgtggggcgaatgcacgcgggactgcgggggaggcctccagacgcggacgcgcacctgcctgcccgcgccgggcgtggagggcggcggctgcgagggggtgctggaggagggtcgccagtgcaaccgcgaggcctgcggccccgctgggcgcaccagctcccggagccagtccctgcggtccacagatgcccggcggcgcgaggagctgggggacgagctgcagcagtttgggttcccagccccccagaccggtgacccagcagccgaggagtggtccccgtggagcgtgtgctccagcacctgcggcgagggctggcagacccgcacgcgcttctgcgtgtcctcctcctacagcacgcagtgcagcggacccctgcgcgagcagcggctgtgcaacaactctgccgtgtgcccagtgcatggtgcctgggatgagtggtcgccctggagcctctgctccagcacctgtggccgtggctttcgggatcgcacgcgcacctgcaggcccccccagtttgggggcaacccctgtgagggccctgagaagcaaaccaagttctgcaacattgccctgtgccctggccgggcagtggatggaaactggaatgagtggtcgagctggagcgcctgctccgccagctgctcccagggccgacagcagcgcacgcgtgaatgcaacgggccttcctacgggggtgcggagtgccagggccactgggtggagacccgagactgcttcctgcagcagtgcccagtggatggcaagtggcaggcctgggcgtcatggggcagttgcagcgtcacgtgtggggctggcagccagcgacgggagcgtgtctgctctgggcccttcttcgggggagcagcctgccagggcccccaggatgagtaccggcagtgcggcacccagcggtgtcccgagccccatgagatctgtgatgaggacaactttggtgctgtgatctggaaggagaccccagcgggagaggtggctgctgtccggtgtccccgcaacgccacaggactcatcctgcgacggtgtgagctggacgaggaaggcatcgcctactgggagccccccacctacatccgctgtgtttccattgactacagaaacatccagatgatgacccgggagcacctggccaaggctcagcgagggctgcctggggagggggtctcggaggtcatccagacactggtggagatctctcaggacgggaccagctacagtggggacctgctgtccaccatcgatgtcctgaggaacatgacagagattttccggagagcgtactacagccccacccctggggacgtacagaactttgtccagatccttagcaacctgttggcagaggagaatcgggacaagtgggaggaggcccagctggcgggccccaacgccaaggagctgttccggctggtggaggactttgtggacgtcatcggcttccgcatgaaggacctgagggatgcataccaggtgacagacaacctggttctcagcatccataagctcccagccagcggagccactgacatcagcttccccatgaagggctggcgggccacgggtgactgggccaaggtgccagaggacagggtcactgtgtccaagagtgtcttctccacggggctgacagaggccgatgaagcatccgtgtttgtggtgggcaccgtgctctacaggaacctgggcagcttcctggccctgcagaggaacacgaccgtcctgaattctaaggtgatctccgtgactgtgaaacccccgcctcgctccctgcgcacacccttggagatcgagtttgcccacatgtataatggcaccaccaaccagacctgtatcctgtgggatgagacggatgtaccctcctcctccgcccccccgcagctcgggccctggtcgtggcgcggctgccgcacggtgcccctcgacgccctccggacgcgctgcctctgtgaccggctctccaccttcgccatcttagcccagctcagcgccgacgcgaacatggagaaggcgactctgccgtcggtgacgctcatcgtgggctgtggcgtgtcctctctcaccctgctcatgctggtcatcatctacgtgtccgtgtggaggtacattcgctcagagcgttctgtcatcctcatcaacttctgcctgtccatcatctcctccaatgccctcatcctcatcgggcagacccagacccgcaacaaggtgatgtgcacgctggtggccgccttcctgcacttcttcttcctgtcctccttctgctgggtgctcaccgaggcctggcagtcctacatggccgtgacgggccacctccggaaccgcctcatccgcaagcgcttcctctgcctgggctgggggctccctgcactggttgtggccatttctgtgggattcaccaaggccaaagggtacagcaccatgaactactgctggctctccctggaggggggactgctctatgccttcgtgggacctgccgctgccgttgtgctggtgaacatggtcattgggatcctggtgttcaacaagctcgtgtccaaagacggcatcacggacaagaagctgaaggagcgggcaggggcctccctgtggagctcctgcgtggtgctgccgctgctggcgctgacctggatgtcggctgtgctcgccgtcaccgaccgccgctccgccctcttccagatcctcttcgctgtcttcgactcgctggagggcttcgtcatcgtcatggtgcactgtatcctccgtagagaggtccaggacgctgtgaaatgccgtgtggttgaccggcaggaggagggcaacggggactcagggggctccttccagaacggccacgcccagctcatgaccgacttcgagaaggacgtggatctggcctgtagatcagtgctgaacaaggacatcgcggcctgccgcactgccaccatcacgggcacactgaagcggccgtctctgcccgaggaggagaagctgaagctggcccatgccaaggggccgcccaccaatttcaacagcctgccggccaacgtgtccaagctgcacctgcacggctcaccccgctatcccggcgggcccctgcccgacttccccaaccactcactgaccctcaagagggacaaggcgcccaagtcctccttcgtcggtgacggggacatcttcaagaagctggactcggagctgagccgggcccaggagaaggctctggacacgagctacgtgatcctgcccacggccacggccacgctgcggcccaagcccaaggaggagcccaagtacagcatccacattgaccagatgccgcagacccgcctcatccacctcagcacggcccccgaggccagcctccccgcccgcagcccgccctcccgccagccccccagcggcgggccccccgaggcaccccctgcccagcccccaccgcctccgcccccaccgccaccacctccccagcagcccctgcccccaccgcccaatctggagccggcaccccccagcctgggggatcccggggagcctgccgcccatccgggacccagcacggggcccagcaccaagaacgagaatgtcgccaccttgtctgtgagctccctggagcggcggaagtcgcggtatgcagaactggactttgagaagatcatgcacacccggaagcggcaccaagacatgttccaggacctgaaccggaagctgcagcacgcagcggagaaggacaaggaggtgctggggccggacagcaagccggaaaagcagcagacgcccaacaagaggccctgggagagcctccggaaagcccacgggacgcccacgtgggtgaagaaggagctggagccgctgcagccgtcgccgctggagcttcgcagcgtggagtgggagaggtcgggcgccacgatcccgctggtgggccaggacatcatcgacctccagaccgaggtctgagcgggtgggcggcggccacgcactgggccacggaggagggatgctgctccgcccgctcctgccgcagacgggcacagacacgctcgcgggcagcgggccaggcccgcaccccggcctcagggcgctcagacggcggccaggcacagggcccgcagtgctgggaccagagccagatgcaggacaggaggcggcccggccagcgggcacagggcaccagaggccgaaggtgcctcagactccgccctcctcgggccgaggcccagcgggcagatgggcggacggctgtggaccgtggacaggcccagcgcggccagcgtcccagggtacccgcctgagctcctgctgcggaggagctgcctgcttggcccggccggcctggcaccgttttttaaacacccccatccctcgggaagcagccagctccccacaccttccagggccctaggcccctcctagacccaggtggagggcacagccctccgaccctcatggcccccaggggcaggactgagtcccctccaggaagaagcaggggggaatctattttttctctccttttcttttcttcaataaaaagaattaaaaacccaaaaaaaa

SEQ ID NO: 2488 - protein, 1584 aa, Homo sapiens
MRGQAAAPGPVWILAPLLLLLLLLGRRARAAAGADAGPGPEPCATLVQGKFFGYFSAAAVFPANASRCSWTLRNPDPRRYTLYMKVAKAPVPCSGPGRVRTYQFDSFLESTRTYLGVESFDEVLRLCDPSAPLAFLQASKQFLQMRRQQPPQHDGLRPRAGPPGPTDDFSVEYLVVGNRNPSRAACQMLCRWLDACLAGSRSSHPCGIMQTPCACLGGEAGGPAAGPLAPRGDVCLRDAVAGGPENCLTSLTQDRGGHGATGGWKLWSLWGECTRDCGGGLQTRTRTCLPAPGVEGGGCEGVLEEGRQCNREACGPAGRTSSRSQSLRSTDARRREELGDELQQFGFPAPQTGDPAAEEWSPWSVCSSTCGEGWQTRTRFCVSSSYSTQCSGPLREQRLCNNSAVCPVHGAWDEWSPWSLCSSTCGRGFRDRTRTCRPPQFGGNPCEGPEKQTKFCNIALCPGRAVDGNWNEWSSWSACSASCSQGRQQRTRECNGPSYGGAECQGHWVETRDCFLQQCPVDGKWQAWASWGSCSVTCGAGSQRRERVCSGPFFGGAACQGPQDEYRQCGTQRCPEPHEICDEDNFGAVIWKETPAGEVAAVRCPRNATGLILRRCELDEEGIAYWEPPTYIRCVSIDYRNIQMMTREHLAKAQRGLPGEGVSEVIQTLVEISQDGTSYSGDLLSTIDVLRNMTEIFRRAYYSPTPGDVQNFVQILSNLLAEENRDKWEEAQLAGPNAKELFRLVEDFVDVIGFRMKDLRDAYQVTDNLVLSIHKLPASGATDISFPMKGWRATGDWAKVPEDRVTVSKSVFSTGLTEADEASVFVVGTVLYRNLGSFLALQRNTTVLNSKVISVTVKPPPRSLRTPLEIEFAHMYNGTTNQTCILWDETDVPSSSAPPQLGPWSWRGCRTVPLDALRTRCLCDRLSTFAILAQLSADANMEKATLPSVTLIVGCGVSSLTLLMLVIIYVSVWRYIRSERSVILINFCLSIISSNALILIGQTQTRNKVMCTLVAAFLHFFFLSSFCWVLTEAWQSYMAVTGHLRNRLIRKRFLCLGWGLPALVVAISVGFTKAKGYSTMNYCWLSLEGGLLYAFVGPAAAVVLVNMVIGILVFNKLVSKDGITDKKLKERAGASLWSSCVVLPLLALTWMSAVLAVTDRRSALFQILFAVFDSLEGFVIVMVHCILRREVQDAVKCRVVDRQEEGNGDSGGSFQNGHAQLMTDFEKDVDLACRSVLNKDIAACRTATITGTLKRPSLPEEEKLKLAHAKGPPTNFNSLPANVSKLHLHGSPRYPGGPLPDFPNHSLTLKRDKAPKSSFVGDGDIFKKLDSELSRAQEKALDTSYVILPTATATLRPKPKEEPKYSIHIDQMPQTRLIHLSTAPEASLPARSPPSRQPPSGGPPEAPPAQPPPPPPPPPPPPQQPLPPPPNLEPAPPSLGDPGEPAAHPGPSTGPSTKNENVATLSVSSLERRKSRYAELDFEKIMHTRKRHQDMFQDLNRKLQHAAEKDKEVLGPDSKPEKQQTPNKRPWESLRKAHGTPTWVKKELEPLQPSPLELRSVEWERSGATIPLVGQDIIDLQTEV

SEQ ID NO: 2489 - DNA, 635 bp, Homo sapiens
tgcaaagcacctgtgtaacttgcggaagtcagttcagactccagcccgctccagcccggcccgacccgaccgcacccggcgcgcgtggcctcgctcggcgtccccggccagccatgggcccttggagccgcagcctctcggcgctgctgctgctgctgcaggtctcctcttggctctgccaggagccggagccctgccaccctggctttgacgccgagagctacacgtgcacggtgccccggcgccacctggagagaggccgcgtcctgggcagagtgaattttgaagattgcaccggtcgacaaaggacagcctatttttccctcgacacccgattcaaagtgggcacagatggtgtgattacagtcaaaaggcctctacggtttcataacccacagatccatttcttggtctacgcctgggactccacctacagaaagttttccaccaaagtcacgctgaatacagtggggcaccagcaccggcccccgcacccatcaggcctccgtttctggaatccaagcagaattgctcacatttcccaactcctctcctggcctcagaagacagaagagagactgggttatacctcccatcagctgcccagaaaatgaaaaaggccatttcctaaaaac

SEQ ID NO: 2490 - DNA, 421 bp, Homo sapiens
tttttaagattttcttcaatattttatttatatagaaatacttaaaaaatgaagtagcaccattacttaagttttacctttattatgtagaactttaaatgtcagaaaaataaaactcttgatacaatttcaaatcttgtctcagcaaatataatattagtatttgaccatgaggttaaaggccctttatcataaaataaaatatactttgttttttaaactttgctcagtaaagtacatttaagctcaagtaacatcacctacatatacataaacaagtggtaaacaaatgtattaaaatagaaatactaaaactagagtggtgcaacagaatttttgtaacttgcactgaattctatttatacaaatgttagaaagcatcaacagttctttttgacatgtttatacatttccgtttttg

SEQ ID NO: 2491 - DNA, 1433 bp, Homo sapiens
tgtgtgtgtgtgtgtgtgagcgcgcgcgcgcgcgcgcgtgtgtactcgtgcgtgtgcctgtgtgtgcctgggagtgacctcacagctgccggaacataaagactcacaggtccgcctcccaggctcaaagctggctctgcaggggacatgagaggcacaccgaagacccacctcctggccttctccctcctctgcctcctctcaaaggtgcgtacccagctgtgcccgacaccatgtacctgcccctggccacctccccgatgcccgctgggagtacccctggtgctggatggctgtggctgctgccgggtatgtgcacggcggctgggggagccctgcgaccaactccacgtctgcgacgccagccagggcctggtctgccagcccggggcaggacccggtggccggggggccctgtgcctcttggcagaggacgacagcagctgtgaggtgaacggccgcctgtatcgggaaggggagaccttccagccccactgcagcatccgctgccgctgcgaggacggcggcttcacctgcgtgccgctgtgcagcgaggatgtgcggctgcccagctgggactgcccccaccccaggagggtcgaggtcctgggcaagtgctgccctgagtgggtgtgcggccaaggagggggactggggacccagccccttccagcccaaggaccccagttttctggccttgtctcttccctgccccctggtgtcccctgcccagaatggagcacggcctggggaccctgctcgaccacctgtgggctgggcatggccacccgggtgtccaaccagaaccgcttctgccgactggagacccagcgccgcctgtgcctgtccaggccctgcccaccctccaggggtcgcagtccacaaaacagtgccttctagagccgggctgggaatggggacacggtgtccaccatccccagctggtggccctgtgcctgggccctgggctgatggaagatggtccgtgcccaggcccttggctgcaggcaacactttagcttgggtccaccatgcagaacaccaatattaacacgctgcctggtctgtctggatcccgaggtatggcagaggtgcaagacctagtcccctttcctctaactcactgcctaggaggctggccaaggtgtccagggtcctctagcccactccctgcctacacacacagcctatatcaaacatgcacacgggcgagctttctctccgacttcccctgggcaagagatgggacaagcagtcccttaatattgaggctgcagcaggtgctgggctggactggccatttttctgggggtaggatgaagagaaggcacacagagattctggatctcctgctgccttttctggagtttgtaaaattgttcctgaatacaagcctatgcgtgaaaaaaaaaaaaaaaaaaaaaaaaaaaaaa

SEQ ID NO: 2492 - protein, 250 aa, Homo sapiens
MRGTPKTHLLAFSLLCLLSKVRTQLCPTPCTCPWPPPRCPLGVPLVLDGCGCCRVCARRLGEPCDQLHVCDASQGLVCQPGAGPGGRGALCLLAEDDSSCEVNGRLYREGETFQPHCSIRCRCEDGGFTCVPLCSEDVRLPSWDCPHPRRVEVLGKCCPEWVCGQGGGLGTQPLPAQGPQFSGLVSSLPPGVPCPEWSTAWGPCSTTCGLGMATRVSNQNRFCRLETQRRLCLSRPCPPSRGRSPQNSAF

SEQ ID NO: 2493 - DNA, 2830 bp, Homo sapiens
cccacgcgtccgctgggcccagctcccccgagaggtggtcggatcctctgggctgctcggtcgatgcctgtgccactgacgtccaggcatgaggtggttcctgccctggacgctggcagcagtgacagcagcagccgccagcaccgtcctggccacggccctctctccagcccctacgaccatggactttactccagctccactggaggacacctcctcacgcccccaattctgcaagtggccatgtgagtgcccgccatccccaccccgctgcccgctgggggtcagcctcatcacagatggctgtgagtgctgtaagatgtgcgctcagcagcttggggacaactgcacggaggctgccatctgtgacccccaccggggcctctactgtgactacagcggggaccgcccgaggtacgcaataggagtgtgtgcacaggtggtcggtgtgggctgcgtcctggatggggtgcgctacaacaacggccagtccttccagcctaactgcaagtacaactgcacgtgcatcgacggcgcggtgggctgcacaccactgtgcctccgagtgcgccccccgcgtctctggtgcccccacccgcggcgcgtgagcatacctggccactgctgtgagcagtgggtatgtgaggacgacgccaagaggccacgcaagaccgcaccccgtgacacaggagccttcgatgctgtgggtgaggtggaggcatggcacaggaactgcatagcctacacaagcccctggagcccttgctccaccagctgcggcctgggggtctccactcggatctccaatgttaacgcccagtgctggcctgagcaagagagccgcctctgcaacttgcggccatgcgatgtggacatccatacactcattaaggcagggaagaagtgtctggctgtgtaccagccagaggcatccatgaacttcacacttgcgggctgcatcagcacacgctcctatcaacccaagtactgtggagtttgcatggacaataggtgctgcatcccctacaagtctaagactatcgacgtgtccttccagtgtcctgatgggcttggcttctcccgccaggtcctatggattaatgcctgcttctgtaacctgagctgtaggaatcccaatgacatctttgctgacttggaatcctaccctgacttctcagaaattgccaactaggcaggcacaaatcttgggtcttggggactaacccaatgcctgtgaagcagtcagcccttatggccaataacttttcaccaatgagccttagttaccctgatctggacccttggcctccatttctgtctctaaccattcaaatgacgcctgatggtgctgctcaggcccatgctatgagttttctccttgatatcattcagcatctactctaaagaaaaatgcctgtctctagctgttctggactacacccaagcctgatccagcctttccaagtcactagaagtcctgctggatcttgcctaaatcccaagaaatggaatcaggtagacttttaatatcactaatttcttctttagatgccaaaccacaagactctttgggtccattcagatgaatagatggaatttggaacaatagaataatctattatttggagcctgccaagaggtactgtaatgggtaattctgacgtcagcgcaccaaaactatcctgattccaaatatgtatgcacctcaaggtcatcaaacatttgccaagtgagttgaatagttgcttaattttgatttttaatggaaagttgtatccattaacctgggcattgttgaggttaagtttctcttcacccctacactgtgaagggtacagattaggtttgtcccagtcagaaataaaatttgataaacattcctgttgatgggaaaagcccccagttaatactccagagacagggaaaggtcagcccatttcagaaggaccaattgactctcacactgaatcagctgctgactggcagggctttgggcagttggccaggctcttccttgaatcttctcccttgtcctgcttgggttcataggaattggtaaggcctctggactggcctgtctggcccctgagagtggtgccctggaacactcctctactcttacagagccttgagagacccagctgcagaccatgccagacccactgaaatgaccaagacaggttcaggtaggggtgtgggtcaaaccaagaagtgggtgcccttggtagcagcctggggtgacctctagagctggaggctgtgggactccaggggcccccgtgttcaggacacatctattgcagagactcatttcacagcctttcgttctgctgaccaaatggccagttttctggtaggaagatggaggtttaccagttgtttagaaacagaaatagacttaataaaggtttaaagctgaagaggttgaagctaaaaggaaaaggttgttgttaatgaatatcaggctattatttattgtattaggaaaatataatatttactgttagaattcttttatttagggccttttctgtgccagacattgctctcagtgctttgcatgtattagctcactgaatcttcacgacaatgttgagaagttcccattattatttctgttcttacaaatgtgaaacggaagctcatagaggtgagaaaactcaaccagagtcacccagttggtgactgggaaagttaggattcagatcgaaattggactgtctttataacccatattttccccctgtttttagagcttccaaatgtgtcagaataggaaaacattgcaataaatggcttgattttttaaaaaaaaaaaaaaaaaaaaaaa

SEQ ID NO: 2494 - protein, 367 aa, Homo sapiens
MRWFLPWTLAAVTAAAASTVLATALSPAPTTMDFTPAPLEDTSSRPQFCKWPCECPPSPPRCPLGVSLITDGCECCKMCAQQLGDNCTEAAICDPHRGLYCDYSGDRPRYAIGVCAQVVGVGCVLDGVRYNNGQSFQPNCKYNCTCIDGAVGCTPLCLRVRPPRLWCPHPRRVSIPGHCCEQWVCEDDAKRPRKTAPRDTGAFDAVGEVEAWHRNCIAYTSPWSPCSTSCGLGVSTRISNVNAQCWPEQESRLCNLRPCDVDIHTLIKAGKKCLAVYQPEASMNFTLAGCISTRSYQPKYCGVCMDNRCCIPYKSKTIDVSFQCPDGLGFSRQVLWINACFCNLSCRNPNDIFADLESYPDFSEIAN

SEQ ID NO: 2495 - DNA, 162 bp, Homo sapiens
  misc_feature (20)..(20): n is a, c, g, or t
  misc_feature (142)..(142): n is a, c, g, or t
  misc_feature (148)..(148): n is a, c, g, or t
  misc_feature (161)..(161): n is a, c, g, or t
ggggctctgcgttggggcancccctcacagctggtttcttaccacgtattgcgcaagcggaatctatgcctgttacccacactccctgcgcccccgcaccccgctcctgtgcgcaagtcggaatataaaaccgcggaggagngagctnttggggtgtccang

SEQ ID NO: 2496 - DNA, 1507 bp, Homo sapiens
aatcctggaacaaggctacagcgtcgaagatccccagcgctgcgggctcggagagcagtcctaacggcgcctcgtacgctagtgtcctcccttttcagtccgcgtccctccctgggccgggctggcactcttgccttccccgtccctcatggcgctgctccgacgcccgacggtgtccagtgatttggagaatattgacacaggagttaattctaaagttaagagtcatgtgactattaggcgaactgttttagaagaaattggaaatagagttacaaccagagcagcacaagtagctaagaaagctcagaacaccaaagttccagttcaacccaccaaaacaacaaatgtcaacaaacaactgaaacctactgcttctgtcaaaccagtacagatggaaaagttggctccaaagggtccttctcccacacctgaggatgtctccatgaaggaagagaatctctgccaagctttttctgatgccttgctctgcaaaatcgaggacattgataacgaagattgggagaaccctcagctctgcagtgactacgttaaggatatctatcagtatctcaggcagctggaggttttgcagtccataaacccacatttcttagatggaagagatataaatggacgcatgcgtgccatcctagtggattggctggtacaagtccactccaagtttaggcttctgcaggagactctgtacatgtgcgttggcattatggatcgatttttacaggttcagccagtttcccggaagaagcttcaattagttgggattactgctctgctcttggcttccaagtatgaggagatgttttctccaaatattgaagactttgtttacatcacagacaatgcttataccagttcccaaatccgagaaatggaaactctaattttgaaagaattgaaatttgagttgggtcgacccttgccactacacttcttaaggcgagcatcaaaagccggggaggttgatgttgaacagcacactttagccaagtatttgatggagctgactctcatcgactatgatatggtgcattatcatccttctaaggtagcagcagctgcttcctgcttgtctcagaaggttctaggacaaggaaaatggaacttaaagcagcagtattacacaggatacacagagaatgaagtattggaagtcatgcagcacatggccaagaatgtggtgaaagtaaatgaaaacttaactaaattcatcgccatcaagaataagtatgcaagcagcaaactcctgaagatcagcatgatccctcagctgaactcaaaagccgtcaaagaccttgcctccccactgataggaaggtcctaggctgccgtggcccctggggatgtgtgcttcattgtgccctttttcttattggtttagaactcttgattttgtacatagtcctctggtctatctcatgaaacctcttctcagaccagttttctaaacatatattgaggaaaaataaagcgattggtttttctt

SEQ ID NO: 2497 - DNA, 606 bp, Homo sapiens
  misc_feature (550)..(550): n is a, c, g, or t
agaggagaagggcagccaggagggggaccaggaagtccaggacatggggtcccagtggagacaccagaggcgcaggaggagccgtgctcaggggtccttgagggggctgtggtggccggtgagggccaaggggagctggaagggtctctcttgttagcccagtgaagcccagggaccagtgggtccccccgaaagcccctgtgcttgcagcagtgtccaccccagtgtctaacagtcctcccgggctgccatgccctgactgtcgggcccccaagtggtcacctccccgtgtatgaaaaggccttcagccctgactgcttcctgacactccctccttggcctccctgtggtgccaatcccagcatgtgctgattctacagcaggcagaaatgcttggtccccggtgcccctggaggaatcttaccaaagtgctgggattacaggcgtgagccaccgtgcccggcccaaactactttttaaaacagctacagggtaaaatcctgcagcacccactctggaaaatactgctcttaattttcctgaaggtggncccctgtttctagttggtccaggattagggatgtggggtatagggcattaaatcct

SEQ ID NO: 2498 - DNA, 329 bp, Homo sapiens
ggcacgaggggccagagtccggagcagccgccgcccgaccgcgccgagctcagttcgctgtccgcgccggctcccaccccggcccgaccccgacccggcccggtcaggccccatactcagtagccacgatggaggtgatgaacctgatggagcagcctatcaaggtgactgagtggcagcagacatacacctacgactcgggtatccactcgggcgccaacacctgcgtgccctccgtcagcagcaagggcatcatggaggaggatgaggcctgcgggcgccagtacacgctcaagaaaaccaccacttacacccaggggggtgccccc

SEQ ID NO: 2499 - DNA, 1192 bp, Homo sapiens
tcgacccacgcgtccgcggacgcgtgggcagatatcttttttttttttttttttagtatttattgatcattcttgggtgtttctcggagagggggatgtggcagggtcataggataatagtggagagaaggtcagcagataaacacgtgaacaaagttctctggttttcctaggcagaggtccctgcagccttcccacggtgtttgtgtccctgggtacttgagattagggagtggtgatgactcttaacgagcagcagaatcaggcccagctcccaattccctctccccagtcttctccaggtgtcccctcccacgagcgcacaggaaaaggaccacatggcctggcgagccctacacccactgctactgctgctgctgctgttcccaggctctcaggcacaatccaaggctcaggtacttcaaagtgtggcagggcagacgctaaccgtgagatgccagtacccgcccacgggcagtctctacgagaagaaaggctggtgtaaggaggcttcagcacttgtgtgcatcaggttagtcaccagctccaagcccaggacgatggcttggacctctcgattcacaatctgggacgaccctgatgctggcttcttcactgtcaccatgactgatctgagagaggaagactcaggacattactggtgtagaatctaccgcccttctgacaactctgtctctaagtccgtcagattctatctggtggtatctccagcctctgcctccacacagaccccctggactccccgcgacctggtctcttcacagacccagacccagagctgtgtgcctcccactgcaggagccagacaagcccctgagtctccatctaccatccctgtcccttcacagccacagaactccacgctccgccctggccctgcagcccccattgccctggtgcctgtgttctgtggactcctcgtagccaagagcctggtgctgtcagccctgctcgtctggtggggggacatatggtggaaaaccgtgatggagctcaggagcctggatacccaaaaagccacctgccaccttcaacaggtcacggaccttccctggacctcagtttcctcacctgtagagagagaaatattatatcacactgttgcaaggactaagataagcgatgatgatgatgaacacactttgtgaataataaaattatctgaatgttt

SEQ ID NO: 2500 - protein, 276 aa, Homo sapiens
MAWRALHPLLLLLLLFPGSQAQSKAQVLQSVAGQTLTVRCQYPPTGSLYEKKGWCKEASALVCIRLVTSSKPRTMAWTSRFTIWDDPDAGFFTVTMTDLREEDSGHYWCRIYRPSDNSVSKSVRFYLVVSPASASTQTPWTPRDLVSSQTQTQSCVPPTAGARQAPESPSTIPVPSQPQNSTLRPGPAAPIALVPVFCGLLVAKSLVLSALLVWWGDIWWKTVMELRSLDTQKATCHLQQVTDLPWTSVSSPVEREILYHTVARTKISDDDDEHTL

SEQ ID NO: 2501 - DNA, 499 bp, Homo sapiens
gaaaacagttcctttctgatggggagcgtctgagtgcagatcatgaggctctttctctaggtttaattcttttccatggtgaccggacttggtgtcttgtagcctggttacgaatgggacgttgagcttctactgacgatgccctgcatggaccagctgggatctggctggggctgccctgtgtccctaacgaccataggcaatccatcttcttgtgtcagcaatttctggacacccactgttttccaccaagagctgaggtggcaacaactcagtgagcaataaacaaaatgacacagaaatgcacagtgttgttatgaaggagcctgtttacctgtgttcaaaatctggcaccattcccttgagcagggcccgctcaggagggaccaggtctgccagtttctgtgcctgcagagagacgaagccccacgagccacaccctactctacaagaggaaagggggttggatgggaagaatctattttgccgttttggaaag

SEQ ID NO: 2502 - DNA, 539 bp, Homo sapiens
ctgggctttccttcgctgcgcgtgcccgctttccggtttattggcagagtccaggcgcgcccggaggccgtggcgctcgcgcgggactttcgagcctcgggcccggcctggcatgcacgcccctggccctcccgggctcttctctggcccggggctcacagtagctccgaggccccgaggcccggcggggcggcgggggcgaggtcggggtacaccaggaagccggagaaggtgatgtacttgccgtggttgctgtaggcgccgtagccgtcgtggtcgtggctgagcagccagacggcgtcgccgcgccgcagggccagcatcacgctctggctctgcatctcgcggcgccgcgacgcgccgtcgtcgtaaatcatggcctgcacctcgtcgcggttcttcatcagcttaaccgacagcgtcttacgcggcagcttgcccagcgtgaaggagaagaagtaggcgccgggcagacggcagcggaacacgccggccgccgcgtcgaagtcgccgccaatgttgacgaactcggtgtcgaa

SEQ ID NO: 2503 - DNA, 446 bp, Homo sapiens
tcccgtcctacatacgtgttgtcagaaaaaaaataaggaaaaaggaaaaaaacacctatttaaagagacgctgaaccttctccactaatcctccttatccctcaggattgccatcactgattggggttggctttgggtatggaaagaacatagaacttggagtcggaggacctgattgtatctcagcttaggcacctagcagatgtatgacctaggataagtcattaacctctctggtttttttagatgggatcggggttggaaggcaggtagcaatatctaccttactgtatcattttgaagactaactaggataacaatgtgattccttgtcagttggcaagtatcaatggaaacttagccaacataagctcactccttttggatatcccaatgtgtgaaaaggccctttagcacctgagaaatcagaatgcctgggacataca

SEQ ID NO: 2504 - DNA, 115863 bp, Homo sapiens
gatctttgcaattctagtgatgtcccctctacctcacgtgtgaaaccccccattgcttttgacagagcatctaaatcctgcaacatggacagctaagattatcgttggccatctctcagatcaaggattccagtcacaaaacttggtgttagcaacacaaagagtaaactcagggtcattccaattctggaatcttggcagattctgaggctgcatttgctagggcaagcactgcctgggaggatgtgaatatttggtaactgtgagagttctgaggttgacaacagagcacaggctttgtcagggccctctctggtcagaggcacatggatcaggaaaagcttctgccccgatcttgtcactttgtagctgtgtgacctttggcaaatcacttaacctctctgagcttcagttctgtttattatgcaaatacaaatgaggaagatggatgaaacaagctgtatgacttccagaatttaatgccaaaatgggtcattagatagaacccatgaaattatcaaaatttgacctttttaaagtttacctattaaaatacatggtaatatcatatgtttatacttctctaaaggaacagacatttgccagggctggcaaactttttctctaaagggccaaatagtaaatattttatgctttgatggttatttagtctctggggcatctattcaactctgcatgaaagcatccttagacaatacataaaaagaaaaagcaggaccatgttccagtgaaacttaatttacaaaaacaggaggaaagccaaatttggccagtgggctgtagtttgccaatgcctgctttaaacccatggattttctgttatcacaggaaggggaaatgattgggatgtgaagtttggagttttaatggagcttctgcaagtgcttagcaagcagcaaatatgagtttatttcctcccttccttgtatcttcttccaagaaaagcaacttagagacaataatatggggatattctgcaggctacggtgcattcatattgcactagatgtgttttaggggtggaggaagtttacagacaggaccacctatcattgatctctccccctcttagcccccactcttaatgacattttgaacagtgtagcaggatcctatatgccccactctctggaagctcctccctgtggctgggcatcatgaaaacttatcctgggaggaggtagggatggcatagctggggcaagtttccttacaccaccctgtgcacctcccttgtcaacctgaattgccttagcttatgctctgtcctcttctggtaacccggaaaagtcctctgagcctgataggaattcagatctgccttgtgtgaacagaacctcccgcacgcaagttctgagctgagaaaaaaaatgaatgcttccatcaaattaggccaagtaatatccatctactctagggggaaattatttaaatagcatcaaaatcaatttccatgccattaaatattctggtctgtgttttaattgagacgattacatattccccaaaaagagaagagctatttgaagaatcgtgtcttttctctcttcctctcactggaactgacaaggaaagcacctcagagagctgcaaaccgcctgttagcctgccttcgttcctatccatcttctttagagctaacctggtttattatttttctttaagaaataaaaatggagctctaagaggcacccagggcactgggaactctgagttcttcaaatagaataaaccaggtcattctctcttcttcttcttaagggcttgggtttgtggtcggtggcaagaggcagacatgcctttgatgtcctaggagcagatagggaggtgaggatcattcccaacctctgctgctcccaggccttcttcctattcagtaaatattttgggtgcatcttccatggtccaagaactcactgtggctccctggaggagctcccagtctgatggggggatgttcctgaaaacaagtcattataatgcaacatacaaggctctccacctgatcactgcctcgctgccatcatggacatgagctgtgtgcatcctgtcaagctagtcaaggccaccaaggttctgggtaggaccagctcacaaggacagtgcacacgggtgtgtgtggaatttatggtgagtcagagcaagaggctgcggaggctgtgctgcactcgattgctgagtcctcaatggcagagttgactgcttggcccacagagatgatctgtgactattaaatgaagcatttatgttgtgtgttaaaaaaatcaaaataaaaagcagctgggcacggtggcttacgcctgtaatcccagcactttgggaggccaaggcgggtggatcacgaggtcaggagatcgagaccatcctggctaacacagtgaaaccccgtctctactaaaaaaaaaaaaaaaaaatacaaaaatttagccgggcgtggtggtgggcgcctgtagtcccagctactcgggaggctgaggcaggagaatggcgtgaacccgggagacggagcttgcaatgagccgagatcgcaccactgcactcccgcctgggcaaaagagcgagactccgtctcaaaaataaataaataaataaataaataaataaataaataaataaatagcaacatattaggagcaagaataaaaaccaaggccccagtaagtgtccccatagctctcatcctggttgcaggtcattatctttgccatgctttattcaagtctgactttctttctagacttagggcagagaccaggtcagttctgtttctattgtgttcccaatacctataaagtggcaagcagagtagaggctcaatcagaattaaatgcataaagcaacaaatgaatgaatgaatgcaaggtgaaagcaatgaatgaatgaatgcaaagtgctgctggaatatgggggaagaagcacctatttctatcaaagggatgtaaagaaggctttgcaaagaaatgatgttagagctgagatgaataaaggctcatcttcaccagatggccaattagagggaaggtattttgagcagaggaaatcgtgtgtacagagtcaaaataatataattaaaccaagagctaacatttattatttactatgttctaggctctttacttgcatctgctcatttaattctcacaactaccatatgaggtggtgctctcatacccatttcacagatgaggagattgaggtcacgatggctaactctctaagctcacacttctaggaaatgacaaaaatgtgcctcagtggctttactaatcctgtgataccaagcttggctgtcactgccaggttttcctgcctgcccttccaaaacgtgggttttcaaaacacaggaaagtatccaggggtttgatatggctgtaaaatgagtgctggaaagtaggacatgaggctggtaatataaccaaggacctttttgtagagagctttgaatgctaggctaaagatcttgtggtcaatatttcccaaactggaattctgcaaaacactattttacaagatgtaaataagtgagctctgggtaaagagggagtaggggggaaattcattaagcaaattatttgggaaacatagcttcaaccaagctaaacacattttctgtttgctgcaggatttgtcagagcctctaccatgaaagtaggcattttaattgtgcaagagacagaaaaggcacttcgaacttaatttttgaggcgtatttctcaataacccacagaatagtgaatttgggcattgctagcatagatgatggagatccatggagggaatttaaggatttaaggtcagatgagaggggtcaccaggactgcagggaaggtgactgaaattaagaggcaggagttagagggtttgctgaattcaagaccctcccagtcaggatgtgctgaagaccaacaggaagaggaagtctggctgcatctggaccattggcatcaaagacaggtttctactcacagtgggtccagtggggaagaaactgaattcatacacatggcactattcaaacaaagccatgctgcctctctatagaacaatgggctggcttttcagggcaatttaatgactgtggcaaatagcccaggccatcaattaaataccaatccaatttccttccaatgcattctctgcctcaggagtttcctttgtaacgtggaacaaatctggctgatgaggtgggaagatggattggccaacatgcacaatgactttgtcctctgcctgggccagcttctcagatcttgtctctctttctgaaggagatcacccggtatgaacagaaaagtagatagaattagatcacaggacatttttaaagtgataagaggcatcttgtttagcctagcccctccacccctgctttacctaaggggaaactgaggctcagcaaggaggggcaacatgaccaaggtcacacaactgttaaattagcttcctaaactggtctcccagtttgagtctttctccagtccagcacactccctcttcagtagccagggggatctagcaccttaatctgatcatatgaccccttaagccaagaattccccggaggcatcccaatgaattcagaataaaatctgataagatggagcagagggcacataggccagggtctctccatctccgcacaactgacattcgggatgtttaattatttgttatgggaaaggtgcctgtcccgtgcattgtaggatgtttagcaataccctcggcttccatccactatataccagtagtaccactgccctagctgtgacaactaaaatttctcccgacattgccaaatgtcctctggaggaccaaattaccgtcagttgagaaccagtggcctatggaaaatttcagaaagcaagatgtgtctgaagaagggttagggaataaatactgcctggtttatttacccaacgtgagggcttttgcccagccctttagtctctctgagcctcaattcttttatctataaggtgagaaggataatttctcccctgcaaggtttttgctctaggatcaaacaggacaatggatgtgactgtgcacttgacatgaaaaggtgcttaaaagtcacatgattaactgtgatgctgttcaatgctgtgctggtataatggcatggttgggggatattatgggatgtaattgtctccatgtccagaactcctgaaggcagtggttcttaaatgttaataggcttgtgactcacctggagtccttggtaagtgtgcgaacaccttgctcccacctacatcagtgggtcagaatgaggcctagaaatctgccttttaaaaatcatccctggagattctgctgcaagtggtcttttacgcgtgtaggagaaggcttcctcagagcttgaactagcagtacccactgctctctggcagggggtcaggaacttaaatggatgcataaacctagagcaggagtgggagaaggtattgctaacaccaccccaggtcaagattggaaccctaacctcgttgtttgctgatctgagcatttattgcattttctgtgtccctctggaaatttgaggttaatcccaatcttcgacgcaccagctcccgtccttgcctttatttttcatttgctaattatgcagcgtgactgcctcccaaacatattttgctgctaacgtctcccagtctctgatcaaaaattgtggtaaaacattgtcttgtcatgaggctaataaagcgtgttatcctgcctgtcacagaagctgccttacagatgctgtttgctatctgccagggcctggcattaatctcccttccactcggctacaaggaatagagtctactgtgggaagatcaatattgtattatctcggccaccagtgttgttccagctatggccaatgagttgtcattctcgtgttacaagtcaagtgcacaaaggaaaaggaccagaaaaaagagggaagagaagccagcccagaaggggacaagaaagacagtatcagggaaaagaccccggagaaagactcagagaagcaaggacatgaaaagtggttaaggacacttgccccagccttggacagacccagggacactgctaagcctgccttcagaagcttcatgttgacaatttcattcttctgaacctcagttttcatatctataaaatggaccccccaaaaatagaacctggcacagaaggattgaataagatgatgcgtggtagaatgtttagcccagttaacgcacacagggagggctcagtgattattatggagatattattgctgttgttcttgttgtcatctttgtttcttcctgggtaacactagacaagtcacctttcctccctgggcctcaatttccccaactctaaaataagaattcctttgcatctatgaaacaaaaacaaaacaccaaacaggaggcttaacttgaaatagaattatcagagatttggggaacagagatgttggtgctgacaattgtgaggggtgtgtgtgtgtgtgtgtgtgtgtgtgtgtgtgtttcagagagtgaagcactcctggaggaagaaacagcatagatatgatggacaaaaattaagaggcaaatgtatggaataggagctatagacaccttcagtgctctgcagggagaggacccttagagatttacattttggattattgaagatttgagcaattttatctttataccccttctttatctcttcctcatcaagaggggatcaggtggaacagtggaggaggcattgcctcaagcttaaagcctgattgcctaaggctggctgtcaaggaaaacccctcgctggtgtctgctaggacactcatctttcctcctcctgcctggacaacctgctccccagcctcgagcttccaaccctcataagtgggcagccaccttgaaacttcattaaaggcaagcccagcccctgcattcatttcatgcttagttaaagaggaagctgtgagaagcaatccccattcaagggcgtaatgagatgtccactaatgatccagatacaaaaataaggatgaagcgtggccagtcgaccctcagaagatgacaatttgtcttagaataataatgtctgattgtcctctttgggtgcacatgtgtctgggtttttattcaaaccattcattcggtgcttagcatatcccttcattcccaagtccttgaaggataggaactatagaacagcaataaaatcgtaattattcgtagtatgtatataaacaacattaggtttctgttgctctgctggttacagcatcataggaaagcagctgtctagattcttcatcaaaatcagaacatttgcactaagtctttgttagtatctattaaatacaaaagtaccatatcctgcaaccagcattctgttgggaatattcctaacagaaatgaatatacacatacaccaaaaacatggaatggagttgatattgtttggatatgtgtcccctccaaatctcatgttgaaatgtgatccccagtgttggaggtggagcctggtggcaggtgttggatcatgggagcggatcccccctcatgatcataaatggcttggcgtctttcccttggtgatgaatgagttctcactcagtcagttcctgtgagatctggttgtttacaagtatctgggacctcccccttctctctcttgtttctgttcttgccgtgtgatgtgattgctcccgcttcatcttctgccgtgattaaaagctccctgatgcctccccagaagcccagcagatgctggcaccatgctttctgtacagcctgtggaaccgtgagccaattaaacctctttttttctaaactacccagccttgggcatttcttcatggcagtgcaagagcagactaacagagaaatgtctacagttgtactattcgtaataataactgtgaagcaactcatattgcccatcagcactaaaatggataaactgtgatgtagacagaagatgaataaattgtggtgttgtcctaaaatgaaatactacatagtgagaaacaaggaatgaactaccactgcatgcagcaacatagataaatcttgcaaatataatgttgactgaaagaagccggatacaaaagagaacacgttgcataattagccaatgaattctcagtagtcagaattggtccttggccatagaaggcaaaatacaggttacccttgaagagagcaaacctaaaaattcagaatgtgatggaaatgttttgcatatttatctggtagctatttatctaggtcctatttgaggaatttcatcaagctgtgttcttacaattggggggagttttctatgtccgagttacattcaataaaagtttatgaaaaacatgaaaagatatgcttaggaccatgtgactctaaataggttctgcatgacatccctcactttggatgttggaccccaaacacttggtttgtgtttgggccacaaaaaaaccgaatttttacccacggttatcaccactgggccaggctgcagctggtcatcttatgcccaggggaaaactcagactgcataggcaggggtgaaggataaactttgggatgtcccttgctcctggttccacagcctcagaaaggtgggggtgccttagagaggaaaaagcagggactctggagtattttatattcccttccatgttccttagcaaagcacctggcagccactgggtttgtagtgagtgtttgttgaatgactatatgagggtatggatgaatgaatgaattcatgagtgaattcattttattttgtgaaagttaaataatgtatttagaatgctcttaacatcacctaaaataaaatagagctagtagttaatggggctcatatcagacagacctgggtttgaatcccagacccatcaacctctctcagtgtgtttgtgggtatgtgtacttccatctctgagcctcattttccccatctgcaaaatgtagaaagcaacagtccccacatgacagagtagttctgaggattaaatgagacaatgcatgtaaaacacttagcacattgtaaggctgaaaaagtggtagccatggttgtcattatgaaagagttgctatcatcatgtgaatgaagttgtagctattgttcatgggtggggggaattggcatctttccttctccatctctctgcctctctcttcctccctttctctgtgtcacaagccccacgtgtgcttagccaaccttggcagagttgctgctgagtgaataaaagggcatctttcccccaccccaggacaatggcctagtgccaccgcatgcaggcatcatgcctgtgaagggggccaggtgggtgccagggcactgaggcgctctgtgtagcccctgccgggtggggagctgacaatggccactctgaggaccattaaatttgcctcctcctatgcttccccaagccccaaacccagcacctgcccactgggcaagcctgcaagtgaagggaggctctgtgcgccgcctcggcctcaggcccacacacatccgaggcattgttcttgttggctgcgagagctcgttaggctctgggcagaggctggctggactccaggaggcagacatcaagccccacaactcaaagaatggaggagcctggggcttggcattagatgatgccagtccactcctccgcatgcactggggctctgatgcccagtgagaacgttgactctggaggaagagggtagagatgatgtgttatgcatccctgtgtccccctagctcaaagtggtgctccatacaggattacaggatgactgggagctgggctgccgtggggtgagatggtgcaggatgggatagattggggtggggtaggatgggatagaatagaatagaatagactctggacattttcttcttttgttggagatccaaattcttcctcaagtggactgagaagtcagcaggtgtagacctggcgtggacagagtcacctgagagagcaggggcgataagcagacactatttctccctccaagtcctgcaattctcagccatggccccaaaagagaaattgtaccttaggatcacccatccatagaacacgagatctggaagggttattagagaactttctgtccagtgcttttcagattatgttcaagtcccagaactgccatctataatctatattgctttgagcaagtgactaaagtgatctaagcttcagtttcctcttttgtaaaatgtgggtaataacattatctacctcccagagatgttgagaggagcaaatgaaatgatccataagtttaagaccatggatataggaccttgaatataggaccatggatataggaccttggatataggaccttgcatatagaaccttggatataggaccttgaatgtaggaccttggatataggaccatgaatataggacctgacatgtaacaagcacttatcaccattggccttcatcatcaccaccatcatcatcaaagatgattcgagtaagggaaaaacttagggagctgctctcagactcctgcccccacttctgattaaatccatgtgctcctattttttacttattattagggttcagtggtcccctggactacttcagcttcaataattcactagaaggactcagaacttagaaaagccatcatacccagccataaccataaggtttattacagggagaggacacagactgaaatcagcaaagggaagaggtacatgaggcagagtcctagaaaccaggcacagcttccagctttcctctccgtgtggggccccatggacagcacttctgccagcaatggtgttgtggcgacacccacagagtattgcaaactagggaaactcacccgaccttcagtgcccagggttttatctggggttggtcacacaggcatgattgaccactcatgtggctaccgttagtctccagcctctccagaggtcaagctaataccaaggccaaggcccccaccatcaatcacaatgttagcatggagtatcttgctaacactggcattgcccaaggaccccaggtacacgaagactctaatcaagcaggatattccaaggacttagcggttacctctctggagccaagctcaagggccaaaccttttttcagactgtgcagggtgtggacaacccagacctgctgagttaatcctttactgcacagcagtatacagatggtccccaacttacgatggtttgacttttttttattttgaatttacaacgttgcaaaagagatacgtattcagtacttctaactttgaattttgattcaaaattctttatagcaatttcattataaaataggatttgtgttagatgattttgcctaactgtaggcctatgtaagtgttctgagtatgtttaaggtaggctaggctaagctaggatgttcagtaggttaggtgtattaaatgcattttcaacttaagatgttttcaatttacagtgggttagtcaggatgtaaccccatcataagtcaaagagcacctatattgtcattcctcttaaggttttatttgaaggaatgattccattatacagagggtaagttgaggcccagaaatgacaagggacttcccaaaggctgcagagtgagttaataaggctttctgactgtcctagcccagagctttctctgtcataccacaggcctcagtttgcccatctgtaaaatgacggtgctaggccagcacccccacctcctaggtgccttttggttctgcctttacagaagttattctcccacctttttctgcagtctagtcctcagttggagcatctggctgtcagctacctttggggccacgaagtgtcctccttcatccccaggactcctaccctgaggagtcactggggaccttttagctggagcagatcccctgctgatttgtttgtaataggtggtgctcactctggacacagccaggccaggattcagaggctggctggaggagagacatggagcaaatacagccccttccctcacctcactggggcataagtgtgtggtcaaccagcccggcttcaaatcctggccttgccacttaccagctgtgacacctctctctcagagccccagtttgctcaccattaaaacgaagttaacaatcacaaagtcactgctgtccctgttgtgtctaaagagagtacagttcccgcctcttaaatgagaccaattaagccttgcatttgtaaaactgctttcaacatctaaaacccaacccttgctttaccccagtgtttctttaaggttaaccagtcaaagatcactgtccaaactttacaaagcaggaaacttgaggttttgagagatggaatttgctcaaggtcacatggcaacttgggggcaaagccagtgctagaacccaggtctcctgatttcctggatcttttctacctccaagcacatccttgtaagtacctgggaaggtcaagctactctttattcttgtctgggaatctgagcaaacaggtggagagaaattgttaacttactcatgatggcttttaaactcacttggcaaactggattcatttccaagtattataattctctacataggtaattgaagtatagcatataggtaattgaatgcagatcgatttcccaccctgagcttcctctctgtgctgactggtgtgtctgtctccctccctcaatgactcactgattttttgtgtgtgtacacacataaatcacactgcattcctctcccccttgctggctacctgcaagaattcacaaagccgtaccatgagatgcgaaagcagtgggggttcatggggtgtgaggggaggtggttatgaaggagggaaggaagaggagtgtttaaatgctaatcagttggcattgatgtcagccacagttaatcagattgctaaagatacaagggtaagatcgtgcgcctgtgccagactctctgggctcattcacgaggaagatggatgcagggcccagccaacgctctaatgagatgtaactggacataaaagaatgttcaaggctttctgaacccaacatgaattacaaaggaggcccattcgtgggggagaagccagctcacagaagacgattatccgataattactcttgtagccgaaacactgagtctttttttttttttttaatatagcctctctctcagccaggctggagtacagtggtgggatcatgtctcactgcagcctctatctcctgggctcaagcaatcctcccaccttggtctcccaaagcactaggattacaggtgtgagccactgcacccagactgaaagaatcttttcttgcctgcacaagctttcccacttaacacctgctacaagtcccccaaaggcccctaggtttctgcagcagactcaggaggtatccagggtgtgagttcacgtgtgcagtttggtgtgttgtttagggtggcaaaaatccctgctccatctgtacgaccgtggcatatgccagaaaatgaagagaacagcaagaaattaatcagttgggcttctgtttgacctcctaatgctaaagcaaaccatgcgagttatgtggatgagttgccttcatgttctttgcttgtaagtcaaagcacgtttatctaggattaattttaccaaggattaacctttgtgataaccagtagcatacaccatctacaaatctacaatccgtcacttaaagagattgactttgtcatacacaccaagtcttgttctcagcactgcaggcacacttgtgattcattaaatagatgctgactgggggcctactatgtgtcagaaccatggccacagaatgggctctggggagacagtgatgaatagggtacacatgatctctgtcctcgagaaacttcctcctagtagggaagacaggaaagaagccaggtaattatgagtgtgtgattaatgctttggcttatttctttggtggagttaagaattaaggaaaggagagtaaatccaagtaacgataatagcctatgaaaatgctgggtatcttagaagagagggaaagagagaggcattgattgattgaactcaggagaactgaaataatttagttgccatgaggcaggcagtgagaaatgaggatggggaaatttgctgggacagatcaccaggaaccttccagggaaaggtaaggagtttgaagtttaccaggcagggaaggggcggtttagaacgatctctctggctgctgcggaggccagcaaggaggttgtggagtgagggccacgcaagaagcagggctttcctaacagttgctctgggaataataggatatctaaaaagaaatatctttctttaaaaatttaattttagattcagggggtccaggtgcaatgtgttacatgaatatattgcataacgatgaagtttgggcttctagtgtacccattaccaaaatagtaaacatggtgcctgataggtaagttttcaaccctcacccgtcttccaccctccccacctttggagtctccagtgtctactatttccatctttatgtccatgtgtgcccattgtttagcttccacttctaagtgagaacatgcagtatttggttttgtgtttctgagttagttcacttaggatatgcctccagctccattcatgttgctgcaaaggacatgatttcattcctaaaaatgtctttttaagagacagtttgctctcctggcttctcttgtggtgggacccaggttctttggtgtattgtaacaatgaaatgtgttccatcattaaaaggaatgaattttttaaaaaagaaaagaaggggaaagaaagaaggaaagaaggaaggaaggaagggagggaggaaggaaggaatgaaggagagaaagaaacagaaaaagaaaaggaaagaaagaagaaaagaaaagaaagagaaagaaagaaaaggaagaaagaaagaaggagaggaaggaaggagagaggaagggaagaagaagaaagaaagaaagaaaaagaaagaaagaggagagaggaagggagggagggagggaggaaggaaggaaggaaggaagggaaggaaggaaagaaggaaaaaatgaaaagtggagctcatccaacttcccccccaaccacgttgaatgactccccagtgcctcgacttcccatggaaagttaggcattccccttgggcatttcccatgctctgtctgtgactgcacaacaccactgcaagtaatcaccttaggcaagttttttgagtgttgagcagaacctaagggatgaccattggatggcttcctggtttaggcagacccagtattgagattttctttgtctctcctcccacggagggtgaactgcctgtgggagaatgtgatgggtttgcttccagcctcgttttcccacccagccaccgactctgagaggaagaggagggctggggatcttgggattttcctgtgccgtgacattggaggtgttgaatcacagagagtcaatctgtgaccccatcctccttctcttctttcctgcctttcctgtctcactgccaataaattcatctccagttagaggaagaacatggaatagagatctgtccatgttcatcctgaggaaaaaattgggcgaaaagaaaggaagttagaacaactgatctttgagaaggccaaggaccaggccgtagcagtttccatcaggatggggccagggcacttggtcttgtgtgagtaatgtctacaccccgcttcctgtcacccttgcacagctacgttcagaattatagaacttctggaaacgtcatcagctcctcagcatttgctaaacgcccccaaacatccctcctccccctggagaggtagaatacaagtgtcttttcttggggactccctgcaggagagaagctgatttccctgctccccacggaaatgtgagagcagttagaaaacctgagaaggctggggtttgttctctgccctcctctgaaattgaggtgacaaagggagttaattatttcgtttttaattattgctataaaaatagcatgcatgtggcaaaacaacccaactgtatacaatgatatacaataaaaaaaataaaaagtgattctctctttgagcccaaacctcatttctactctgctgaggtaaagcccattacctggttcaaatgttacacatgtgagggctgggatgcacacccgcctaccttgattgttcttgcttcacactgagttgtgttgacatacagctgtgccattctttttattatttttcaatttgttacatagtttttgaataagtaagtctccctataaatacatacgtacatttatacacatatatatatacatatatatgcatgtaaaaaaaggtctataatgaaaattctcctttccatctttattcctcatcattctacttccaatgccccacctcccctgtaaccaacatagttcatttcttgtgtattctttcaaagttcctttatgcacaggtaaacaaatgcaaatatatgtagccttgttttatctccctgtttttgcacgaaaggtagcatactctgcacatcattctgcaccttggtttttgttttctttttagaaggaagaagacttctttattgctagtaggactaagcagccaatttgtctatacagtctgaaaacattcctaaaactgcaccctacacctccacctctccccaccccacccttatgagcaaagagctatcatagttcaattctgagctgctcacctcccctgaatctatattgacatagggttgaacccaagggaaacctggtgttcagagaactcatttttcaaaatttatctatttttaattgactaataaaattgtatgtatttatcacatacaacatgatgttttgaaatatgcaggcatcgtggaatggctaagtcaagctaattaacacatgccctacttcacacatttattaattttggggtaagaacacttataatctaatctcttagccatttttaaggatataatacattgttattcactgtagtcatcatgtcatacaatagatcccttgaacttatctctcctatgctttggcttaaattattgtcccttctaagactcatgttggaatttaatccccagggtgacagtattgagaggtggtgactcaaaaaggctgttggataaggagggctctgccctcacaaatggattaactactcctgaattaatggattaatggattaatgggttatcatgggagtacaattagtggctttataagaagcaggagagagatatgagcatattagtatgctccgccctgcagccacgtaatgcactgcgtcactatgagaccctgtagatagtccccaccaggaggaaggcctgaattctcagcctccagaattgtaagaaataagtttcttttcttttctttctttctttcttttttttttttttttttgagacggagtctcactctgccgcccaggctggagtgcagtggcgccatctcggctcactgcaagctccgcctcccgggttcacgccattctcctgcctcaacctcccgagtagctgggaatacaggcgcccgccaccatggccggctactttttttaaattttttttagtagagacggggtttcaccgtgttagccaggatggtcttgatctcctgacctcgtggtccgcccacctcggccttccaaagtgctgggattacaggcgtgagccaccgcacctggccttcttttctttagaaattacccagttccgatgttctgtgataagcagtggaaaacaaactaagaaatcctaatttaaattatgtatcctttgaccaacatctccttaatccttacctacccctgcccacccctctggtaaacaccattctaccctctgcttctgtgagttcaaccttttggattccaccacatcttactttttaacattacggaatccttggtcatctctcctcttccgtgcatagatagcttcatcattctcttctctcagctgcatggcattccacctggatattctgtaattgatttaaccttattgatgtattcttgatttatcttctagccttttgctgctacaaatggggccgcattgcttaactcgtctgcatagcattttgcacatgggcaaacatctctctgtaggataaattcccagaagcagactcatgagtcaaagggaagatgtacaaataattctgaaagctcttgccgtgttacactctatgttattcaccagtgacttcatctcattcctttaaaccctgcagatattttactgtgttctacaatcacgtaactagtcccctatggatgggtatgtatgttgtttccagatttttgctactataaacaatgctttgtattgtgaacactttgcaacaccctagtacgtgtcaatgaccacaaaggtctctcagctttgggacatgaccaggcagcctgtttacctaaaaatctattgctgtttcagtgaagcctcttttgttctcaggccattgaacccagactgtcttcctagccctcatttaccatggatctccagtctgacctgttacataaactctggttgatgtggagcatgtctgcaaagcaccctagaataggctccctggatgctcttgagaaaaaagtgtggtgaggcaggtgaaaggttgggaccaaccgtaggcacagcttcaggtagaaagcggcatctagagaaagctcgagagtacctcaaaaatcatcaagggggctttttagaagcctaccgtgccagtatccagctgccccagattccattttagatggtctagttaaaatcttcagaaaagaaatgctgacttcactgctgaagagcagcagcactctcaaatagagttggtggcagggtaaataggttcagattattctgaaggtgattttttttctatgtcaatcaaaatttaaaatgtgtaaatcttttggctgagcaatgagcaatgcaatttctttttttttgagttggagtctctccctgtcgcccaggctggagtacagtggcgcgattttggctcactgcaacctccacctcccgggttcaagcgattcttctgcctcagcctcctgagtagctgggactactacaggtgtgccgccacacctggctaatttttgtatttttagtagagatggggtttcaccatattggccaggctggtcttcaactcctgacctcatgatctacccacctcagcctcccaaagtgctgggattacaggcgtgagccactgcatccggctgcaatacgacttctagtatgccctccttaagaaattatgtgaatgtaatccccaaagatgcgtattaattgcagtactaattggaggaaggtaggggaatggcaataatttgaatattaatcaataggagactggttcagtgaggtatatgtttatattttaatgtaatcatttaaaaagagtaaagtgactatgtgtgttctagtcgaaagcccacggcttctaagtacaaagttggtggtagaatactaatgtaatggaatactatacagcagtgaaaaatgaatccatcacagctgcacttatcaacatggatgaattctataaagtgttgatcaacaacaacaataaaaacagagaaaaaagcagttttcaggataattcctatggtatgacagcatttatataatatttttaaatgtgccatacaatgccatacattgttcacagatatttatatctgtaacaaataagtgcatacaataaataatagcagtaaaataagaacaagtgcacataataaacgagaatgctaaatgccacattcagggcagtagttcattccagggggtggagaaggagatggagaatattatgggggaggaaaggcaggggtttcaactatactaggagtattctattctttaagatgaaggtgcacatatgtgggtatttactgcgttagcctttaactctttttgattgactgaaatatttcaaaatgtgttactcagtaagttacagaacaatatatgccatgtgataactttgtaaatgttcagacagatagaaaatgacaactgtgttcatgatggctggcaggctgctgtgtgagctctgcattttactggcatgatttcattttactctctaaaactccaaaagacaaggctgatgaaaccccaccatacagatgagaacagtgagccccagaggaggggaatggctgtccagtgtcttaccggcagtaacagtgagctaagtccagaacacaaacagttctgactcccaatctcacactcctaggtgctattttgccttttaaagtgaaaatatgtaagtgtttttatatcaatacattttatttagagatgaaacaagacttggccgggtgcggtggctcatgcctataatcccagcactttgggaggccaaggcacatggatcacttgagttcagaagttcaaggccagcctggccaacatggtacaaccctgtctctactaaaaatataaaaaatattagccgggcatgttggctcatgcctgtaaccctaactattctggagattgaaatgggaggatcgctttaacccaggaggcggaggttgcagtgagctgagattgcaccgctgcactccagccttgatgacagatcaggactccaaaaaaaaaaaaaaaaaaaaaaaaaaaaccctaatgacggtttaaacaagattacaattaacactgataccctgtagaaagcaggattggtgaacagaacgtaggagagaagtgcttgtacttttgatttcttacctctcaggtgttctttaattttttgaataaactatttcacaggaaataattatttgaagatgtgggaaagaggaaaagtgcacaggaaacaaagtcagaaagtgtctaactctaccccagttttctctctatgatcttgaacaagtcacttcccccataggagtctttattttttttttcacctataaaatgggaaaaacaaaatgtcaactttacagtattgtttggagatcggaatgagatcctaagagggaatgaactctatggagtataaatcgccacttgaatatcagtattgttagcatgggcatacaggcagagggttgcaactgactgatagggaagacccctgctgcccccaaggccaccaccacctctgccttttgttccagaaggtcttctcaaagtgcaaatgggatcaatactatgaatctatccttccaagtggaccacagggggccggcagctgttgcctgggccagtgacgagcatgtaataagtgcagaatgaatgaatgaatgaacgataaatggataaatgaagtgatgatcaaatgtgcccgagacggaaactcggctcttgctaaatccaacttctttatttataaaatagacattaaactaagaccttctccaaccctcaaattcaatgatacaagcaacacaaagctgatcagttccaggaattgggaaggaagtctttctcagtcctgagggcagtgccagatcacctctgtgttgtgttcactgtgattaatccagtggtcttcaaccagaggcaatcttgccacccaggaaacatctggcagtgtttggaatcatttttggttgtcacaactgggcaggtgatgggagggtagggcatgcaggttgggggaggtttgctgctggcatctagtgggtagaagctagggatgctgctccgtttcctacaacgcatagagcagcttctgtcacccagcaaaaatgatccagcctagatgtcaaaggcataaaagtaactggcagtacagttggttctatgccttcaactatccagatgttcctggctttgtttttaattttgtgtgatgtgctctgctgtggtttttcaagcctcaaacagccttgttctttcactgctgctgatatgctgtgttgactctggacaaccgcttcccctctttgaacctcacactcctttactgggcagtttgtaaccgtgatctccaggagccttttgatctttaagatgtgatatttattttcagttttgtccccagtggggccaaacaatcaaggcaggttgggcgagtctttatagtggagtctgaagtataagaaataaccactggaatgggtattaatgaggattagaatagtgactaacagttttgcagtaccttttaccaaaagtacatccattgattcacctgtcagtcctgcgtcctaaaggtagttactgtaaatagtgccatgagggaataatgatcatcatctctaccaggaaactgcattccaaagaggctcaatgattccatctgtgaagtgcttctgtgattacaaccttgtgtgtgcattcctagacctctcaatcaccaggggctagagacagcatcttaaaatcagctcgttctgtaaatatttatttcatttaagaaagtcttttacgtacttattatacgtattttggaaaatgccaaaaagtaggaaggagaaaatacacccagaggccaccagggcctccatcttagtgccattcttcaagtcaaaacatgattctctgcattgcaatttgttttacttcgttgcttctagccattttcatacataccatagaattttatgtctcattcttttcactgaacattatagcagtagcatctcccagctctcgtttcttcactcacatcaccttgtacctgcatgatgatatgttacgctactgcttggaattccgtgcctctcccaggcattctgctgcggctggggatttaagatacaaaccttcagcttcagagcttgtgctttttttttttttttttttgagatggaatttttgctctgttgcccaggctggtgtgcagtggcacaatctcggctcactgccacctccaccttctgggtttgagtgattctcccgcctcagcttcccaagtagctgggattacaggcccctgccaccatgcctgactaatttttgtatttttagtagagacaggatttcacaatattggccaagctggtttccaactcctgacctcaagtgatctgcccacctcagcctcccaaagtgctgggattacaggtgtgatccaccatgcccggtcgagcttgtgctttttttttttttttcactttaataggatgttcccagtctaatctcccatctccccatcaaagttagaaaaatgggagagaaagagagatacgctgctgccccaacttggatggcagaacaaatgttcaattgccttctacgtggcatggctctgtcctttgggggaagagcaacatcagcgtgcatttaaggaaagctccatctcttctgtttgatctctgtagttgattatcagtgtgtgtgtgttttcctaactccttgagggcaggggccaaatcttagaatgttcactctcttgtgtcgggtgtcaaccataggagaaagtgaacacccaacactttgattgattgaccgcttttgagtagagcaccgactgtacgtgataaaggaagaatcagataaatgtgactatcatgatagaaaattttaaatgttctgaaaaaaaatgagttaatttaactcagcggtcatcggacaccaagaaaaacaaggctattggggcaagttataaagttgctggataagcagttttgtccccatgatgtaagtcttctctatctggacatcatcatggggatattctgattgctccagtttcctgctgaggccctgaagtacaattttcgctaattcccagtgggacttggttttgcatggcactaatctggccaacatcctggctaagaatgaggcctgtgggctgcctatgttgcagaccacagatgcatatcatctgtgttggacttggccttaagtttggagccagctggcaagatccaagcttgtgtatgattaaggaaaaggggatagtagggactgagagatgaatttatctggtggatacaaaactctccttgatggtcaggttttcagtgggaaagggctgactctgaacccagctgggtttccttcttagagtggtttatagctgctgcggttagcacccttgtaccctgggggacccagagagtaagaacagcagctgtgaagaggaagccagttggggaatctgttttcttgcatttccttctgttcttttgactgtatttgggtcttggaggactgggattgctaggggagatcacaagccttggaaagagtcaaagagtcaccatctgctgcacaaacccacactttgttttctgccaactgcatccttaggcacttggaagacaaaacagatgaggaacacatagtaagtcaggtgggttcacgtgttcccaaacttccctggcaactctgataataaaagtcaccagaggagtttttcaatcatcagcttcccaagacccacccctggagattcagatgtgatgggtctgaattctgtggagttggggttggagattagaaaaacactctagcccacccagcagagacaaacaaaatgagagggaaagggaagaggctgattcaagctgaggaggaggatgccaagtgacatcaataccccatatttcttaaaagagctagtagcatgatctttggggtcataaaaaccaagatttgaaacccagctttgctgtgtgacctcaaaaagtgatttaacatcccaaaacttcactttgatcattcataaaataggaacaataatttctgcctgatacggttgagaaggaattaaaaaggaggcaatggatgcaaagccctcttcattactcaacaaagcaatcacaattaaaacattataaatatcactgttattttggccaaggtgaattgatgtgctttttgtcacctccttgtgtgcagatgacacaacttgtttttccaatcttgctctctctctcctctctctcatccccacttataattaaggggtaatgtttgcaaaggagctggctggccagataacccaaaaaaaaacccccaacatccgccagtgttgggatttagcagtcaccttttccaatttagcagggttaacaaatggctctaagaataattgtcaattccctggtcatttcaaaaacccaacaatgtctgagctagaaaggcccttctttcatatgcagtctggctgcccatttgacacatagagaagatgcagagaagaggagacccatgcaaagtcatgctagtgaatagtggccaagatgggacaccacccagatccctcagctcctggttgtatccaagtactttgtgttgtaccacagctgggtcttggaagctgggtgtcctgacccctcccccctgctctttttgtccctatgccctcttttcactccacagtctacaaagatggtcaacatcaatcattttagaaaagcgacagtgagcataaaagccattgttttgaggcagatccacgtctggtctaatccaacaaggtagatagaatacctccattatacaaaagaggctgctgaacctcagcaaggttcaaggacttgcccagactcactcagctcataactgtaacaggcaggatttgaaccctaactctgaagcttcactactccccaccttggactaggaaatctgcctgatgcctgaatgaccttgacctgccctcatgccatccactcacgctgctcccagatacccattcctggcccagcatcactggcggcctggaaggaacactggctggtaatcaatgttacacaacaggaacatttgttgatgccagttgcaaactgttgcagtctatatagattaagccaccgccgccaactccatgaaagtaaatgagcctctccaacgactgctgaaataaatttaaatgacagcactggagggcctggagactgtagctgagtgagtgtctccctgcagaaaatcgacaaggacagctatcagtccgagggcctttgtccccgtgatgtaattcctctctatctagacatcttcacggggatgttctgattgctccagtttcctgccgaggggctgtgattgcaatgacaagagtaaaaaccatgacggcagctggcatttgctaagcactcactacgggtgaggcgctgtcctaagtgctttgcatacatcaactcgctgaatgatggcaaccccaggaaataggaaataatagccccatttgacagctgagggaactgaggcttggagagtgaagtcattaaccagcaattggcagaactgggtctttaaaaagcaaacaaagctggtttccagcaccattctgccagacagctgcctgggccagcccttctttaaaatgactattgggccgggcgcggtggctcacgcctgtaatcccagcactttgggaggccgaggcgggtggatcacgaggtcaggagatcgagaccatcctggctaacatggtgaaaccctgtctctactaaaaaatacaaaaaattagctgggcatggtggcacgcacctgtggtcccagctgctcaggaggctgaggcaggagaatggcgtgaacccgggaggcggagcttgcagtgagccgagatcgcgccactgcactccagcctgggcgacagagtgagactccgtctcaaaaaaataaataaaataaaataaaataaaatgactaaatggttttaccttccagacaaaaataaatcgcaaggatggggaccaaggtgggaggatcacttgatcccaggagtttgcaaccagccatagtgagatccgtctcaagaaaaaacaaaatgaattacaagaagttagcaaggtatacaaggccctccagggcctggcccctgcctccctaccttaccagctttatcccccgtactctccacttgtgctccaaaaccccttgcaattcttttgtgcccacctctgcccagcctccaagcctccatgggtcttcacacagtcctctgttctgaatctgcctcgtgactctgaatcctaaaacatttctgtgtctcccacaaggtcactcttacattccttcagtttaaaatgtacctcccccaaccctgcttttacactgttggtgggaatgtaaattaattcaaccattgtggaagatggtgctgagattcctcaaagatctggaaccagaaatagcatttgactcagcaatcccattactgggtcccattacatatatacccaaaggaatataaatcattctgttacaaagatacatgcatgcacatgttcattgctgcactattcacaatagcaaagacgtggaatcaacctaatgcccatcaatgatagactggataaagaaaatgtggtacatgtacaccatggaatactatgcagccataaagacaaacaaaatcatgtcctttgcagggacatagatggagctggaagacattatccctagcaaactaaggcaggaacagaaaaccaaacaccacatgttctcacttataagtgggagttgaacaatgagaacacatggacacagggaggggagtaacacacactggggcctgttgcggggtggagttgggggaggggagagcattaggaaaaataggtaatgcatgctgggcttaatacctagcgtgggttgataggtgcagcaaaccaccatggcacatgtttacctacataacaaacctgcacatcctgcacataggccccagaacttaaaattaaaatttaaatttaaaaaaactctcctcccccatcccccaagcccagccagagcacacagcttagaaaagagagtgtggcctggtgtccatccccactcatcctcttagctgcatgtctttgtacagggaacaatctgcccaactgtacatggcatgcctgtcctgcagacggggttagggcccgtcctctctgctctcttagcacacaagcttttctctttccaagcattcatcatatcaaatatgattgtgtctactttcccatcccccttcccagtacatatacaaccaggcagtgaggcccctgtgctttttgtttctatactcctaatgcttagctcagtcctggcatgatcaagcccaagtcttcaggaaaaggaaggaaggaaggaaggaaggaaggaaggaaggaaggaaggaaggaaggaaggaaggatggatggaaggaaagaaggaaggaaatgaaggaagaaaatgaaggaggaaggaagaaagaaaaaaatggaaggggaaaggaaggagggagggaggaaagaaagaaagaaaggaaggaaggaaggaaggaggaaggaaagaaggaaggagggagggtgggaggaaaagaaggaagaaaagagaaagagggagagagggaaggaggagaaaaaagaaaggaagggagggagggagaaaggagaagttggtttagaggccagccggacgagctttgggcaccgcccttaggagggccaccctcagagtctgacagcaggtgaaggtcctaaatctccccaaactaactggtgtcttttctcctcttccaagatgctcttcccgagggagatgctagccctttgggtccttacctcctgccctcaggagccccggagagaggcagtcctggcaaagagcaccctgaagagagagtggtaacagcgccccccagttcctcacagtcggcggaagtgctgggcgagctggtgctggatgggaccgcaccctctgcacatcacgacatcccagccctgtcaccgctgcttccagaggaggcccgccccaagcacgccttgccccccaagaagaaactgccttcgctcaagcaggtgaactctgccaggaagcagctgaggcccaaggccacctccgcagccactgtccaaagggcagggtcccagccagcgtcccagggcctagatctcctctcctcctccacggagaagcctggcccaccgggggacccggaccccatcgtggcctccgaggaggcatcagaagtgcccctttggctggaccgaaaggagagtgcggtccctacaacacccgcacccctgcaaatctcccccttcacttcgcagccctatgtggcccacacactcccccagaggccagaacccggggagcctgggcctgacatggcccaggaggccccccaggaggacaccagccccatggccctgatggacaaaggtgagaatgagctgactgggtcagcctcagaggagagccaggagaccactacctccaccattatcaccaccacggtcatcaccaccgagcaggcaccaggtatgcagcccccaactcctgaagccatcctgaaacagccatgaggcactcactatgttcagggcatgtgggtagaggaatctcaagaagccccggccccaccatcagttaccgtccattgagcactgactatgagcttcgccctgtggctcagaattaatagcctcatttcatttgtttgttgttttggggggttgttttagcaaaggggtcttgatctttcgcccaggctggagtgccatggcacgatcatagctcactgcagcctcaaactcctgtgctcaagtgatcctcttgcctcagcctcttgagtagctgggactacaagcatgcactatgatgtccagctaatttttttgttttttgtagaaagggggtcttgcttattgtccaggctggggaactcctgggctcaagcaatcctcccacctcagcctcccaaagcactgggattacaggcatgagccaggacactcagccaacatccccattttaaagatgagacaactgaaaccctgagacccccaagcaacctgccaaaggtcacacagctaatgagcaagattcaaaaccttttcatcttggaacggaattcttcatttaacctgcttcaaagccactagccttttcaaagcacatttgcttttagcattacatgtattttctagacttgataaaatgctcttctgtgttccagtcttctctaccatctttaaaatgggagaaggacccccaattgtcaagcatacatggattttggacaagtgcaatgtggccacccttcaaagcacgtgagctctgggtccaaatcctgcttgctgtttgagctcggcccctctctgagcttttgtttacttccctctaaactggggatgaaatattatcagtccctatgagaataagtggggtcacccctgttgactagctaaaatggtgcctagcaggatatagtaagtgatcattctgtgtcaattattgctatttttattatcatgtcaattctggagctgaggaattaacagcagaaggacagatgggaacagcaaaatgcaggttcccctaaagcccccattccaccccacagcccatggttgagcttacatccaagttgtctttggtgtcctaattaaagtccttccttccagctctctgcagtgtgagcttctccaatcctgaggggtacattgactccagcgactacccactgctgcccctcaacaactttctggagtgcacatacaacgtgacagtctacactggctatggggtggagctccaggtaaccccaggagagtacctcacagaggctgcctcgtctagcaggaagtctcaggaggattgtctgagtcaggcttactgttatgctaactagtttggttctgtctttgcccaaccaggccaactttagctgggttttggcgaatgagtaggagttcttaactcaatgctttgctaaaatagcttgtggggatagagggaacatgctgacaaattctgaggtatttcccagaaggaaaatcccttgatactctgcttatctcacacacacatacacacacgcatgcacgtgcataaacacacacacacacacacacacacacacacacacacggaagctccacctgattcatttgattctttcttgcttgcttgcttccttatttctctttctctttctttcttgcttgcttgcttgcttcctgctttcttgcttctttctctttctctttctttctttctttcttgcttgcttgcttgcttcctgctttcttgcttctttctctttctctttctttctttctttctttctttcttgcttgcttgcttgctttccttcattttctggttattaggacattttattcttaaacttttgcccatacagtaagaaaggaaaagcagggtggcataatgctcaaacatctgggttttaagtcctacctcttccagttaaaactgcgtgactttgaacaaggaacttcacctctctgagcctcagtttcccgatcaataaaataggaataatgttactgctttgtaaagtttgggggagcagtaaatatgacaatgcagagatcatttggccacagcccagcagagagagagggaggagagagagagaaatcatttggtcagagcccagcagaaatcgcgaccatgcagtgcatgttatccattatcttcagtatgctaatcaccctgaatgtgttcctttttctcatgggaaataaagagccatcaaaagtttctgagctggggcaggtgtatgaccttaccttaggaaggttttttgtttttgtttttgttttacttgtataagagagacaaaaggtaagcccctcagcagtagaacctgtagtctttgcagtccccagagctttgcacaagtgtgtggcacattgtaggtccttaataattgttcatggaattaaaataaactggagaaaacctgcagtccagattattatagtgcttaagaaccctttcctccatgtcatgaagagtattggacccagtatgtgtccagtactgtgtggagccttttaccaggcacagtagagttcattcattgagcaattagaatgcaccaggcaaagctgttgacacaggagaatatgttgatgtaaaaaactgatgcaatgcctgccctaaaagagaaatacgtaggatgccatttagtagggactctaattggtgttttagaggttgttgtagaatcgcagcaaaggaacaggcaaactccttggcaatcagggaaggtctcatagaggagggcaattttaatggggctttggtgaatgagtaggagttcatcaaagagaaaagaggataagatatagggcctgaaggaagaagagcttgtgggtaaggcctgccctgtttagaggagaggcagagaaactaaagttccaagccctactcataaaagcgtaagtcttcaaattaggcattgagacctgactaaattctcccttacacacacacgcgcacataccatttgttcagcctccctgcgtacaactaaagtatctcgcttctttcttctcaaatcccacagagtgtaaatggcaaagcaagtgtctgattctttgagataggggttgattgtcctgcagttgtagccaccactggggagaataagagaatgggccagagagtgccctagaaatgaggcccccacccctcacttaccaatttatgcagaaaatggaagaatatattcaatcttttttaaatattttctgagcacttaatatgtgccaggtactattctaggcactggaaacattgaacagcatggagaaatccctaaccttgcagagtatacattctggtagaatgcttctcccggctccctggagattggatctcaagcacaagctgatccaactgctgcctccactcaccagctccaggataatctatcccacccactagcatccagggcctgtgccaaaggcccctcttacaggacacagcaatgggggcctcacattgcaagtcccttgcaatgcctctgccttgcagtttggtttcactctatccccttggcttttggggaaattagggggaccttgatattcccagggctcctgtgggctcggcatggggcccaggggtcccgttgaccaggggctagcagtacctgggccacttttcactgacttctttgcaaccttagaaggctctgtctcaaacacaactcagagttcctctctgtctgcttctgcctgttcccaggtgaagagtgtgaacctgtccgatggggaactgctctccatccgcggggtggacggccctaccctgaccgtcctggccaaccagacactcctggtggaggggcaggtaatccgaagccccaccaacaccatctccgtctacttccggaccttccaggacgacggccttgggaccttccagcttcactaccagggtagggtcaggccaaggctgatgaaacataggcgtttgcctcagtttccctctggagaaaaggattttaaaactttttgtgccagggacctctctgacagtttggtaaaacctacaaaccccttctcagaataatgtttttaaaagtataaaataaaatatatacaattttaaagaaaacggtattactgagctgcagttatcaaaatactgttataatctatgatgccttaatctatgtgctttttattaattcattaaacaatgtcttctagtagttcttataattgctgacatttcaaagtactaaggagcataagaaataggttgagatatccattatgatatgaaaaatatctgtggtttctcttggtgtcaaagtcacaggttctactacaatgtttcagtttgttgccaggaaaatagcacagctaaggtagaggttaatgaaaataagcaagcagctttccttcattcaagttcacaggccctgaattcaatatatagatccactgtgcgtccacagactcctgataaagagccttaacagggtacttctctcttttcttcttcctctactggttttcctttttgtctgttcctgtcttctctgttttgctctctgttcattcctctcttctcttacttcctttctccttccttctcttctcctccctctttgcttgcttgttttatttcttcatttcctcctctctttctcttcctttccaccctctattttccctcccttctctctctctctcctttcctagtcccccttttcttcccctctcctccaccccgatttcctcctatgcagctcccatgacctcaggtctcctttgcctcacccaggaactttcccttggatacttaccaactgctgaaacatctgaatggaaagtggattcgtgaaccatgcaaccagatattgagagccatcatgtgttatatcaaattgtccagacatttgaaaacaacaacaactcattttcaacttttctctcacctgtttctgaaacaggtggatgactgcaaaggggagtgtccacttcatcacaacttttcattgtgggatactgccctttgctgttgttgtgaatttaaaagcaacaacaaaaaagaatgtgaatcatgaacttgaatgtattcctcctcatcagtactgagaataaagatattctgtgctgcaggagaggtcagaccatggtctagggtgaagaagctaggatgaatttgacatcctcttatgaaaactgaggaattcagtatgtccccatgcacccttttactacccccatctactgactgcgaaggaggctctttctctgtattatctcatttaatccccaccaccacctgtaaggtggaggcactgagtccttgtctcaaggtgacatcgttttgtaaactcacattagttttctttctaaagcccaagctcctgtctcgcaggccagtagttctcgagctttcatatccttgggcaattcccaaagacctggttcaagcatctgcatttttaacaagcactcaagatgtgcacgcaggtgggactaaacttcctgggtggtcttgcccctcccagtcccagagagaaggccaatctgtctctacatagatagagataggctcaaaggaggtatggaaactcatttttcatcccaaacctgctgtctctgtttaggcagggtggcgatttttaagtcccaagaaagtgctaacctggcagtttcagcctgatatgatcaaagagagtcacaaaaataccattctccagagctctggagtccccaggggcctcatcttctctccccagcacaaactggctcccaggatgtgggtcaggttcttgatctgccactccaagtgatgactgagtctgcctctgcatttcttcccagccttcatgctgagctgcaactttccccgccggcctgactctggggatgtcacggtgatggacctgcactcaggtggggtggcccactttcactgccacctgggctatgagctccagggcgctaagatgctgacatgcatcaatgcctccaagccgcactggagcagccaggagcccatctgctcaggtatgctccagcctcagccggaccaaacctgatggtccaactaagaggggaaagaccaacctgtaggacaccgagagtgacctcagggaatggctttcagcccaggggaagaaactgctccaaatatggatgactattgttatttatgtttttattggagtaaaatacacataatatgaaatttaccattggagacattttagtatgttcacgctattgtgcaaccatcaccactacctagctccaaaacatctttaacaccccaaatggaaacactgtacagaaagcagtcactccccatccctccctcctccccacactcgctggcaaccatccggctgcattctgtctctgtggatttatctattgtggatattttatgtaaatggaatcatataatatgtgactttcatgtctgacttctttcacttagcgcttggcactgtgttttcaaagttcgtgtatgttgtagcatgtatcagtacttcatttctttttacagctgaataatattccattgtatggatgtcccacattttgttgacctgtttattcgttagtagacatttgagttgtttctacttttcagctattatgaacaatgctgctgtgaacatttgtatgccagttttttgtgtggatatggctttcatttctcttagatatatactcaagagtggaattgctgggtcatagggtcattgtatgtataactttttgaggaaccatcaaacgattttccacagcagctgcaccattttactttcccctcagcaatgtgacagtaccagtgtctccacatccttgcccacatatgttcttttccatgttgttgtttttattgtagccatccttatgggtatgaaggtatctcatggttttagtttccatttccctgatgattaatgatgtcaagcatcttttcatgtatgtgttggccatttgtagatcttctttggggagatgtctagtcaggtcctttgcccatttttttttaattatactttaagttttagggtacatgtgcacaacgtgcaggtttgttacatatgtatacatgtgccatgttggtgtgctgcacccattaactcatcatttaacattaggtatatctcctgatgctatccctcccccctctccccaccccacaacaggccccggtgtgtgatgttccccttcctgtgtccatgtgttctcattgttcaattcccacctatgagtgagaacatgcggtgtttggttttttgtccttgcgacagtttgctgagaatgatggtttccagcttcatccatatccctacaaaggacatgaactcatcattttttatggctgcatagtattccatggtgtatatgtgccacattttcttaaaccagtctatcattgttggacatttggcttggttccaagtctttgctattgtgaatagtgctgcagtaaacatacgtgtgcatgtgtctttatagcagcatgatttataatcctttgggtatatacccagtaatgggattgctgggtcaaatggtatttctagttctagatccctgaggaatcgccacactgacttccacaatggttgaactagtttacagtcccaccaacagtgtaaaagtgttcttatttccattttttaatcaggttgtttgtctttttgttattgagttgtaagcaatcattatatattctgatcactagacccttatcagataagtggtttgcaaatattttctcccatttcatgggttgtcttttcacttactgacagtgttatttgatgcacaaagcttttacatttggcaaaattaaatatttttttcttttctttcttgtgctctgagtgtaactactgccatttttcaagccaagccaatatgtgttgcacaccgtgccagaggctgcatttaatcctcacagcaatgccataggatgggagccattatccccattttgcagatgaggctcatgtaggtgaagtcacttactcaaagcctccatgtagaaattgttggaggtagcctgctgacacagtctggtgccctctagtaaaaagaagtgggctttctgagccagcagacagaatctgagacttcgaggacagaaggaattttaagcacctgttgggcgttgtttgtcattcagagcctttcctatctaggtactcattcgacaaacatccgccgagcgcccactgtgtggtaggcattgcacctgttgctagagctattgcagggaccctgacccagttcctgctctcacagagtttccagtcaaggtgaggctgtagtatgtaaatgagtaaacaaggatgcaaacatgctggtaacagattgtgttaaggaccaggaaagaaattcacatggtggaatgatgcagagtgaggatggagaggacatcagttattgtgagaggcgttgcaatgcagaaaaggtatacaggaagaagctgtgatagaggacctcacctgggaggaggacagtgatgagcgaagggtcagggaaggattacctgataacactccaagatttggaagttgagtaggaaatagactgagggtggaaaatgggggggagaagggggaaacattccaggcagatgcactagcacatgctaaggttcagaggtcagaaggaactcgatgagtttgagaaagcaaataaataaataagatcaatctgactaaactgcagagaaaatatcaggacaggaggctggggcagtggtcagaaactgtattgctcaaggtcatgagaagacaggtggactaggtaggagatatctggaaaaatttaagcataagggtgatcattctgacttctatttggcaaaaatgattgaggatggtcagagtggatccatggaaatcaaggtggacaatatctactatttcacttgaactcagggagataagattaccactttcataggcaaagagaatgaggcttagagagatgaagtaacatacttgaagtggcgaacttagtccagatcccttctctcctgagctcctccccttacagcttccttactcaaagtgtggtcctcggactagcaaaattattagaaatgcataatcctgagccccatgcaaaaccaaatgaatcaaaattttcactttaacatggcccttgggtgactcatatgcacattacacctggagaagcactggtttgtaacgcactgtccctgcaccagtgggcacagccttggccatcttcagctatcaagagagcaaaacccttttagaattctcaaaagtcctgatggtggttgagagagtataggttgccctgccacctactatgtgccaggctatgagccatgtgtgaagagaatattggaactaatgagacataattcctgccctccagttattcatagccaagtggagctcaaaaaggaaatgagagctaatgataaattctgagattcaattgttacagtattgttcccccaaggcccttcagaatttttctttcttttttttaaacaaagataaaattccaaaccatagggcagttggtcttcacgcctctctcacattaatttttatctatgtgtgaaatcagggaggaattaagcttccatttgtgctaagaaagatggatggggagccacggctggcaaattgaagccaaacagagccatcagttggcttaatcaggcaaagaagggaagcagagaagccgcaaacgatcagcagcttgggaggacagatggccagagccccccaccagggacagtgtcctccatttctcagctcctgagccacagggcaatagagctggctatgttttgagtgcccactctgtgccagggatggcatgaagctccccatgcccatcgtttcattgatttctcactactgtcctataaggagggtggacttatcaccattttacagtgggtaaacatgtgacttgtcttagatccacagcagatgactggcaaggtttcaacctagggctggcttatttcacagaacaatctctcctctaggacagaagggcagcctggagagagaaatgaacctagctttctgtctgtggtcctgaaagaagtatggagcttcttggcaatgtctttgctgtaggtcacaacacagtctggagcagagataagagttatccaccgttctctgctactgcaagccccattcagtcatactgtcattcaacaaacatttaatgggtacctgctatgtatcaagctttgagctgatattagagatacaaaaaggaaaaaatatttattctttcattcaacaaacattttataaagcaactactatatgccatatacctttctggattagcaggttatcataaataagacagacagtggagtagtgacttcgataagagatactggagtgaggcagcctgagcttgagtctcaactgctccacttattatgtgtatgtccttgaggaagtggcgtaatacctttgaacttcttttttcctcttttgcaaaattaatcgtggttattcagtaaatatttactgagcacattctacataccaggagctcttctggttgctggtagtgtgactgaaagcaaacaaacaaaaagtagtcctagcttttgtggaacctacaaaccccttagccatctgtgagatggttccaaataacctgtcccacttttgcttcctctcctatatctctgaaaatgaagggggaaccaagcgtcctgtgcttgggaaggaaatatttttcaagctcctttgatcctcataaaagatagaaatggctcccaagacttgaaaccctggtcatggtgtagggctttactcaatcgtggccctgggctattcttcacatcccttcctcctggactgactgccacgctctgtgagaagcatctgctacccaccatctctcctcagaaaattcaaaactggctgagtgctgtggctgatgcctctaatccttacattttgggaggccaaggcaggtggatcacgaggtcaggagttcgagaccagcctggccaagatggtgaaaccccatctctactaaaaatacaaaaattagctgggcgcggtggtgggcacctgtaatcccagctactcaggaggctgaggcaggagaatcacttgaacctgggaggcagaggttgcagtgagctgagatcgtgccattgcactctagcctgggtgacagagcaagagtttgtctcaaaaaaaaaaaaagaaagaagaaagaaagaaagaaagaaagaaagaaagaaagaaagaaagaaagaaagaaagaaagaaaaagaaaggaaagaaaattcaaaactgttctctcatatagtacgtgagaaaacaatttcctaagaaccaaatatctcctaagaattagagtaaaaataagaataccttctcgcttgagaactggaaagtgttctttccagtgcacaaatcactttttaatatttttcattagatttttatgataaaagtaatagatgattctggtaagaaatttttcaagaaatagtgaagtgtaagaaataggaacaaatcacttttatattcatggtctcaattgattcttgaaaatagcttattaaaataggtatggcacactattttctaacttgctttttttttcacttaaaaaatagtgagcatcttcctatatgctgaagtattctttgagaacatggtatttagtttctgaatgggtggagtgtatttacagttatgcatcacttaacaatggggatatgttctaggaaatgcatctttagatgatgtcatcattgcgtgaacatcatagagtgtatgtacacgagccttgatggtatagcctactacatacccaggctatatggtacagcctattgcttctccgctacaaacctgtacagcatgttactgtgctgaacacattgtaacacaaaggtatttgtttatctaaacatagaaaagatacaataaaaatataatattaaaatcttatgggaccactgccatatatacactctgttgtaaattgaaacactgttatgtggcacatgatgtatttcactaaacatctgtgagtggacattcatcttggtgttttttttatttttcattcctagaaacaagatagccatgaatatcctcattcctaactcttggtgcaaatctctaaatcttttcttattataattatccagaaccgcatttggcggatcaaagtgtttgagcacgttttctaggcttttcactaaattgccctcccgaaaggtcataacagtttgcattctaaccagtcatgatgaaagtgagcatttcccatcacccttaccatctccagattttattgctgctttttatcttggccgattaggtggatgaaagtagaatacagcttagatttgcatttcatttgttattagtgaggctgaatttttagtgcttactgagtactagaaatatatttcttcttttgtgaactgcctgtttatatccttcttgattgccattttgtaattaaaagtcagggcacagccagcaccacagaactgtcgttaaattgcagtcattccctaccatgaaatacacatgttgatggttccaattgtagggtgaaatctcctgtcaaacaggattccctcccaggagaagtcccttccaagctttctctccctgcccggtttcctcccgctccaggtctctgatgtttcatcctgggcaaggggcaggggtggggatcaggggagaatgaaacactcacttccttctctctctctctctctttctctctgtctctctcctctctctctccctctctgctctctcccattgcccacccacccctttctggatcagctccttgtggaggggcagtgcacaatgccaccatcggccgcgtcctctccccaagttaccctgaaaacacaaatgggagccaattctgcatctggacgattgaagctccagagggccagaagctgcacctgcactttgagaggctgttgctgcatgacaaggacaggtaaagctctgaaggtccacacccaaccccgtttcttcccagaatattagaacatggcttgaggacttggagtcttgaaatggctgaagctttgaccctcggaattcaagaaaagaagagctggggtggatggcaaagatcttagacaccatcagcttcaatctcttccttttacagataaggaaaccagggtatgcagaaggaaatggacctgccccagctcaatcagcaggctaggggaagaggcaaaaagggaactgccctattctttctcttgcacacccctttttgcagttgaacaaaaagagagtatgtattgatcatctgctcagtacccagccatatattaggctccatggagaacatgaaagaagtagaaaatattagtttctgacatgataggaaattgagatggaaaaactagacgtatgcacatgaaagaatgaaggagaagttaccaggcaatatctaagcaagagtgtgtctgtagactcttaataatatgcatagaatccagaatatgcatagaatccagaattataaaactttaatattctgcagtattattctagaatatttggggatcttattctagaaattatggaatcttattctagaatgttctgaaatattctggtatcttattctgggatattctggcgtcttattctagaatattatggggtcttgttctagaatattctggattattctgagatcttattctaagatagtctagaaaactaggactttagctgctttgacttgctgtcttgagttgggtttccttggaatcagacatggtgataaagatgtgagaggaagtagttcactggggagctgatcctagtaagcactaggaggcacatgggaaagtgagattgtgaataccagctgcgttaataagcgggtgactgctgggaaaaccgggattctgtccactggaaacctctgggcaatgtgttgagcatacctcagagtggtcctgttggaagggtgagggagctagggtacttatgcaccagctcccattcatcactggatgagagatgtgatgaggagcactaactatccccaacatcagctgccaccctttgagctggttgagttgactgattctcagagacttgtggtcagaagccagcagaaaatgtgggagcagttgactgctgaggggtaggagagggtagggcactggcagtgtttactgcacttccagaatgcccccaccttagaattttggagtccaagaaactttgatctaagaattctaatgttttggcttctttgatggatcaaacctagactatgaggtctttagtttggaaagacttaaaaaaaaaaaaaagacaactgaataattttcccatacctcttgagtccacttccctctaggcagttcagctttatccagaacaactctatatcgataaattgctgctgtaaagtgtaaggtatcaagcaggggctcccgaacgtggctttttagcagcaccagaataataacctggggaattctttaaaaatcagattccctatcctttcttctggagactctgaaaatctgggcatgggaacccttggtgaaggaccatttccaaatcttaaacctcagatctgcctcttctgaggggtgcttgagatgagccaggcttaagtttatactagacaacaagaattagcagagacaaaagaatgcatcaaaatgagtattttcttattttctgcaagttgtttaagtcctgacaaatgggccccccactggcactggtcactagtagtttctctggggtcctgcaaagatctgcatgagctgacacttaccaggaaaaaaccagctttcaagtgtatcagtaggaagagaagtttgtagagttcatcaaggttaaaggtcaacacacacacaaaaatgatgaagacactactctctgggccaagaagaaaagagaaatcaattatgtctgtcccatgtactttattgagggggaaatggctaaaataccacaatatgtcagttgcaagaactcagagctagataagactctacataagaaatgggactttgacctaaagtcaaaatggaaggagattggataatggatccaaaaatacagagggaggggtattccaagcatggagaattggaggatgagcacaaagatggaggggaaagaattagcaaatttgttggggggctgcagcagaagctctcatgagaacaggaggaaagagatctgggaagctagattggggttatatcctgaaggattttgaatgccaggctacttttataggcaatagagagcctataaaagtctttttagtcgaggagggacatgaataaagattttaagatgattttcctcaaaatgaaccctttctaaactccagtctcataatatgcccccaaaaaagtgagttctctggtcaaacatgtttgggagacactgcgcccaccctatccttgccttgaaaggtcgtaatatgtactagctaacaaaggcactgataagtcctgcagggaaaaaaaagtttaatttttatttaattcagcattttgcaaatccatttgaccatagactattaagaatttgagagaaaatgtattactattgcagacattctagaaaatatggttagaaaattgttggttttaaaagattaatagactacagagattttgagatcttgaagctttcctccagagcaaccctctttgccaaaggcttctgttctttgaaagaggtgtcccaacacacagcccctaagatataacagagtcatcaggaatcagaagactatgtagatgccccttcccactcctggaatgccccctggactctaccacagcccccatccttgcctcagccatactggacacatggcaaaataaacaaactgtggctgcaacatttatacatcttagtgacattagaaattcatctgggcagcataaaataaactatttttatgagtcagtaaaaacctcaaaggcttaaaaatgtgtgtttatgactccataaaagaagcttatctaatttgtatatggttttcttcaccatttttgcataatttctttaaaaaaccaaggctagcaagaagtcaacttcaaatagctttaataacaataaaaataaatacccaacattttgtttaacacattttatttttcagggcactttttattttgcaatattctcaaagcccacctgtaagatgggtcagaacgacgttatggttgggtctctcctttcacagttgaggacactgaggctgaaaggtgttttaagacttaatgtaaatccagatggggaattgagaaatgggaattatgactcttgacttcccacacagtgctcttagaaaatggggatcagagacagagcctggtgggagtcaaatgcttaataaacaaaacttacctaccgtgtcctgttaactattttttttttaagaccgagtcttgctctgtcacccaagctggagtgcagtggctcgatctcggctcactgcaatctctggcttccaggttcaagcaattctcctgcctcagcctccagagtagcagggactataggcacgcgccaccatatctgtctgatttttgtatttttagtagagacggggtttcaccatgttggccaggctactatctaactcctgacctcaggtgatccacccaccttggcctcccaaactgctgagattatagacttgagccaccatgccccacactctgatataggtgcaattgtacccattttacagatgagaaaacagaggctcagagaagtgaagtgttcttgtgcaaagtcacacagctgagaagtgacagagtcaggactcacacccaggtctgcctgactttacaaaagccaccatttaggcaatgagattagtccattatttccaacttctcagttaataataatagtcaacatcaattcattagttcgtcgtttggtttattacatcatatacattactctccctacaacctcagaataaatccataaggaagccaggacaggcatttagtcccattgtacagaagaggaaacaggttcgataaggtgatgcttgtctgagcacataagaggtaaagtcaggactgggcgtggtggctcacgcctgtaatcccagcactttgggaggccaaggcgggtggatcacctgaggtcaggagttcgagaccagcctggccaacatggtgaaaccccatctctactaaaagtacaaaaatgtgctgggcatggtgggacacacctgtaatctcagctactcgggaggctgaggcaggagaatcacttgaacctgggaggcggaggttgcagtgagccaagatcgcaccattgaactccaggctgggcaacaagagtgaaactctgtcaaaaaaaaagaggcagagttaggtttgggatccggtaatgaggctccagaggcagtcgtagcacatcccttcctctgccatgtcagtgacccaggaagatctgtcagtgtccctcctctctgctcccactgccaggatgacggttcacagcgggcagaccaacaagtcagctcttctctacgactcccttcaaaccgagagtgtcccttttgagggcctgctgagcgaaggcaacaccatccgcatcgagttcacgtccgaccaggcccgggcggcctccaccttcaacatccgatttgaaggtgagggtccctgggagcttccctttctcttgtggggctgggggtagcctgggagcagggaaagcatggggagatagaaatctgggctgcgaaggatgtgggaaatcccatggccatgtggatcctttggtttccaaagacaggctcttggtttcattaataataacaatgcctatcattaactgtgcacttactacgtgctcagtgccttctgtgcactgtctgattggatttcagcttctgcatcatgtttgatcctcatcacactgaaacattagaactgttattctatctgatttttggtgaggaaactgaggtttaagacacttgggtgaccggcccaagaccaccagtgaacaagggtggagttaagatttctgtccatcctgtgctggggagccctgaagctctgctccactccacctagtagacctcttagaatttagccacttcttcctccaagaagaatttagcaagagcctctcctgctgagaccctgactcttgaagaaggggttcgctgggcatttcatgtacgctgggggactttctgttctggctttgccaagaaaagctggcttttatcatagacagccctacagtttccagtggcaaaaagtcagggctctgaagttacgggccatgggaaggatccatataggatgtggaaaggcattaaaacacaacaactccacagggtggagaagacagagattcttactcctattttagatttttttaaatgaggtcccaaggagtcaactgggtggccccagggttctcaacacgtcagctggaaccaggacacgtaatttggtacctgttttctttggggcttttctaaacagcacaggggacccatcttctgaaatatagcaccgtggggtagtccctgcatcatctgaactgctgcctctctttcccttcctcagcgtttgagaaaggccactgctatgagccctacatccagaatgggaacttcactacatccgacccgacctataacattgggactatagtggagttcacctgcgaccccggccactccctggagcagggcccggccatcatcgaatgcatcaatgtgcgggacccatactggaatgacacagagcccctgtgcagaggtgagcggatccacaacgctcttcccacggcaccccagggatctccaccctttggatgagaagaccaaggccccagcttagaggcctgtccccagttttcataccaactttaggattagaaccctttccagggttcactgtcctttggttcagggttgctgctggtcttgagaaaattacaaaatgggtgaattttagaaggtgcaccttcttccaggcataggtcccacagtgcacagcttagtgagctgaatactgcatggatttcagctcctaaatactccctctgctacgcatgcttgtgcagtgcacaacccacgcaataacctcattaataagaacaataatagttcttaattggtgtgtaataattatgctaccagcactttgctaagagtgtgtgtgcattatctgatttcaacctcaccatagccttataaagtagattgtatcggccccatttgtaggtgagaaactaatgctgtgaagtgacctgcctaagaacacacaaggggaattggcagggacaggaatggaactcatgtctctttgttctcagagcactgtgctctgagccccactggacagtgttgtagaaccctcatctacacaggctgcagtggactgtcctgccagtttccccatattctttttgttgttgagacagagactcgctcggctcactgcagcctccgcttcccgggttcaagcgattctcctgtctcagcctcctgagtagctgggactacaggcgtgtgccaccacagccggctaattttgtatttttagtagaaacggggtttcaccatatcagccaggctggtctcgaactcctgacctcaagtgatccacccaccttggcctcccaaagtgctggcattacaggcatgagccatcgcacctggcccgtttccccatattcaaggctgctgagccaccctgagcctgggtctcctgctggcatgtggagtaatgaaaggtgccctcactcctggcagccaccgcctcaatggcagttggtgtgaaatcacagccttgccatggtgagggattgatccctatattaaatgtgccgatttaacagagcggaatttattggtgctttggcctctgccatgttgagacctttccaaagtggtaaacacagagtagaatttaaagggcacctgccgcagccacatctctgcttccagttcagggccgggacctgtcatagcaacattatctaaattatcgagcagctaccatgtgccagacactgtgcagcatgtttgacattcatgagcttaagcctcaaaataacccaatgaggttggcagtggtattgcccccattttgtagagaaagggagctgaggctctgggaaattacatacctcctcctacagcctgttagcagcagaggcaagattgggaccccgggaccacctaacttgagtgggcggtctcttagccactactcaccccgcaaaagagcagaggctgttgaggagtcattctgaccactgagctctgtccttggtcttgaaagagcaatagcacctcttagcccaacttttaccaaccctcaggtgcaaggtaggcagctggccagctctcatttaatcattacacacacacacacacacacacacacacacacgcacacacacacacgtgctggctgcccgaggtgaagacacctgtccacagtacacagagattcacggctgtctgacttcatagcccacatggttagccgctatgccacattgacttctttacaaataaagtccgtcttcttgcctgtctgtcttttacagccatgtgtggtggggagctctctgctgtggctggggtggtattgtccccaaactggcccgagccctacgtggaaggtgaagattgtatctggaagatccacgtgggagaagagaaacggatcttcttagatatccagttgtgagtgtttaaaatgggtggccctctaatttggcaaaatttgggagattgagaaagaaattgctcctgctttattctttcaaccaatattaactaagcatctactatgtgccgggactatgcagagaacaggcattcccatagtgagaccaagaacagcatcacaaatacacacacacacacacacacacacagagagagagagagaggagagagagagagagtccctatctttgggaaattcagcctaggaaacaaatatgaaatgaggacatacacaaataattgcatactctaacttcaatatgtgatgtaaggagaggttaatggtgctatgagattctttaactggaatttgatataaaaaggaaggtcagagaagtcttccccgaggatctgatactaaagctcagaactaaaagatgagttggagtgatgcatcccaaatgaacagaatgtgcaaaggccctgtggcaagcatctcattttcaaaggaccaaatggccagtgtggccagcaagaagggggcactgtaacacccatttactggactacagttgtttattttcctgtttgtctccctcaactagaccagaaggtcctctcctctggggctgggtctgactaccctctgtttccacagtctaacgcagagtctgatacacagtagatgctcaggaaatgattgctgaatgaaaaaaaatgtttttaatgaacggacttacttagctgtgcggctgggtttcctgtattcacagggggtaaccattagattctccatccagaatgttccccgctagctccccaagagggtgacacttgcagggaagcagctactctgggccagatgcaaaagtgactgctctaagcatttctatcttaggtaattctcacagagaaccccccctgggaggtcattaaccccactgtctgagaaggcagcagaggtgcagggaggccacccagaaagccagcgagcagcggggctgaaattcaggcttctgtggcttctcagtcatgctctttccactgccccatgtgagatgggggtgagaagtggacaaagacagacggtggtgcctggagaaagcagaatacagggttcctgacagacccaggtggcagacgggagggtggttgggggcggagagagtgctgaaacccagcagcctggggaagcagcactcacagttctctggctctacagaggaaccttgcaagagaaagagaaattattttcaaattattagtgaccggcttttgaggctgttccttagacacagcaagtgtccttagtctgggtgcggtggctcatgcctacaaccccaacacttcgggaggttgaggcaggaggattgcttgagaccaggagtttgagaccagtcccaacaacatagaggcatcctgtctcttcaaaaaaataaaaattagctggatgtggtggcacacgcctgtggtaccagctacttgggaggctgagatgggaggatctcttgagcctgggaaattgaggctgcagtgagccatgatcatgccactgcactccagcctgggtgacagagtaagaccttgtctcaaaaaaaaaagaagtgtccccagaggctgtcccagaacctccttctccagtggagtcagagacttacacagcttgaatagctgccccttgtggacttggggccaggccaatctaagaaagaattccacctccttcccatgtgactttgggctgggctcacctgttctcgcctctctctggacctcaatttttctctcctgtaatgggggtcttggaacatcagtgctttgtggctgctggaggcagattttacgcgttcctagcccattgcctcactcctcaataaagctcatcctcatctgggcacggtagctcacacctgtaatctcaacactttgggaggctgaggtaggagaatcacttggggccaggagttcgagaccagcctaggcaacatagtgagaccccatctttacaaacaattaaaaaaactagccaggcatggtggcacctgtagtcccagctacttgggaggctcaggtgggacaattacttgagccctggagttccaggctgcagtgagccatgattgcaccactacttcagcctgggcaacagagtaagactctgtctcaaaaaaaaataaaaattcaaattgaattaaatagacctcatcctcttccccccattcctttctctctgacttctagagtctggaataagatgcttattcattcattccaaccgaactgtttgagtgtctactatcaaccaagcacaattttatgtgctggaaaggttctaatggttgttccttcagtggtaaaattcatattggaaagaatggaatggattgtctctcttaactctagggaaaaaattattgtgtacctaccgtgtgccagcagtaggcttagcactgaagatacagttgtgagaaaaacagggcagtcctcaccctgcatgcctagcaggtgaggcaggtaagaaagtaaatgcagtgtgaaaggagcagtgacaggcaggtgagggcacctgagtgaaatcaggagggcttccaggaggaagtagcttctataatagcatgaaagagaaggtaggcaggtgacgaggggaaaagaagaatgtcctggccaggcatggtggctcaggcttgtaatcccagcactttgggaggctgaggtgggtggatcatttgaggtcaggagttcaagaccagcccagccaacatggtgaaacaccgcctctactaaaaatacaaaaattagccaggcgtggtggtgggtgcctgtaatctcagctatttgggaggctgaggcaagagaatcacctgaacccgggaggtggagattgcagtaagccaagatcatgcctctacacttaagcctgggtgacagagtgagactctgaaaaaagaaagaaagaaaagaaagagagagagagaaagaagaaggaaagaaagaaagaaagaaagagaaagaaagaagaaagaaagaaagaaagaaaaagaaagaaagaaaagaaagaaaggaagaaagaaggagggagggagggaggacaggacaggaaaggaagaagaatgtcctacctacatgatgagaacatctgcaaaacatctacaaagcctggaaatgaaagagtgtgacccacttaatgacataaagtttaatgtggctggagcaaagcatggcaggtgggtagagactacagagggaatggatcaaagggaagctctggggtcttcttagctgaagcttcacatagaaaactttattctaaggctgcatcctttaggaagccttctgtgtcgcccccttgtccttgtccataaaaataaatttatggttccagcttatgaattccttcccccagaagttaccaggaaaactacctgtcttcagccaagagaaggtacgacctactcctgagttcttggcttctctggcagaagatcccacccagccccaggccccatgaagtcatctataatcccctctcttctgcttggcttgcctcttctggcctcacagggagcctcccagatgggtggttttgcttaaataagacgggcccacatctccctttggtgccagaggtctagaggaggaaacaagaaaatgggaatctttactttcatcatctctaggcatcaaatattcaattaaccttcagcctgacaccagattgggttttatttctaccactaagcatgcatgcaatggagcagccgatccgggaacctcatgcaattaaagcttccccaaagccaagccactggcattagcatcaggaagggagcccttgcagcgggggcaggctttctctcttctgaacattttcacaatcgtagattgagcattgaccaggagagagggccctcagtttccttcctccctgccctgatactccatgccctcagcagccctggacccagcacctagcatctctgggcctcagattcctcctctgcaagatgatgggctaccttgaatcaagggtagttgcaaatccaaaatcatgaagggccaggcaacacaaataccggaattagagctgttgtgagattatatggaggggaggggtctgcgatgaattaggaagtacataccctatctaaaatcatttaaattcaatttccattttattttattttattttattttattttattttttgtgatagagtctcactgtcacccaggctggagtgcagtggtgccatctcagctcactgcaacctccgattcctgggttcaagcgattctcctgcctcagcctcatgagtagttgggattgcaggcgtgtgccaccacacccagctaatttttgtatttttaatagagatggggtttcaccatgttggccaggctagtctcaaactcttgacctcaagtgatctgcctgcctcagcctcccaaagtggtgggattacaggtgtgagccactgccccgggccataatttcaatttttaaaaatagcatcccctcctccaaaaaaaaaaaagtgcctactggctgaatccaaactgaggaccaccagtttgcaacccttgcaaatgattaaggtgattgagggtttaagctcccttctcattgcagcaatgaagaaattcatgtttttaagcacttactatttgtaaggtctttactaacattaatttttacttcatataagttaaaaataaattgtattatttgttctttggattaatcccatgaagtagttgcaactattacatttaattatatcctcttgcttcctcaccacttcacttggatgtctaagaggcatctcaaatgaaatgtattcaaagacaaactcctgattctccctccctatatctacttatagggagatatttatttatctatttatctattatacttattttacccccatctttctcatatgtgtaaggtatgatctattccatcagttgcttgggggaaagaatcaaacaacgacaaaacagaaaccttggcgttattctggcccagtggagtgctggctttcttaacaagttggcggcacagtgggccacaccctgatttgtagcatctgtcaatttccacggtgtaaatactcccaccatgacccattttaatataccaacataatgacaacaggctctccaaatgcctggaccattagctcttacaagcccgtatgagcctgcccccagcccagcacactcactgtgaactggacctttctctttctcccacaccctgtagccaaatcctcaggaaattccattgcttctactcaaaagtcaaagtcttcccagagtccaagcagttctgacacctccactgccacctgcagggtccacgccaccactgcgtcttcccagggttattgcaacggcctttgagatatccttgttcccacttctgccccctctttttaaccaacactcagtgatcctgttacaaccgaagtcatagcacccatgctctgctcaaagttctgcaatagctccctgttttatttggacttaaagccagtattcttacaaaaggccctatgggatctagctctggttacatctccagcatcgctttattcctctcttctcctttctgtatggtacatttgaccatattagccttcttgccattccacacgcatacctcagggcctttgcactgctgtctcccctgccattgggatgctctgccccaaatatctgcagagcttgctccccatctctccatcctctgactttgcttcacttccatagcccttgccaccacctaacacactacgcattgtggtgtatcttgaagtatttcaactcccacacctccacctggaatgtcacctccaggagaagagcaggagtttattttttgtcttattcactgccgtaaccctaatatatagaccagtgcatggcccatagtaggtgcttaataaataaaaggcaaggaagtaaatgtagcttgtcaggatcatacagacatgaggcttcaaagcgagaatttgaacccaaatttatgttcagctggctatgatgcacgtggagggaaaaaagagggtcagaaaaatatggaaagaccttctggggacatggcctccattttttagtaagtacaggtttattacatgacagggaacctggttgataagaaataacatttggctaaaaattatcaggtaaagtattaaataatagaagtaggaggtctccccaagagaatattttatagggttatagtttcaaaggatgtgtcatcatggaccttagaatcagaatatctagcgggagggggacttcaaggtcccccaatccagtgatgctgagatatgctggcagagttcagggccaagtgccgtggggcttggggagcctgtatcattctcccgggtgttctgagcactggacactaagccaagcagaaagtgatgacggaaccacagacaggctcagaatggggccaataagggggggcatcgccctccccaaggcagctgtcacgacttgcgttaggacaagcagccagtgtcatcccggggccttaggatttgcagtgacatcaaaatcaattcagtcccagttttaatcatcatggacatgtgaggactgtcatttttgtcactgagcaagtttaaatcgattccacatatatttattgagcatccactatgtagcaggcattgaggctgggccctggcagtgagcaagacagatgcagccccgcccccggggagccatgttgtaggctgatacagcaccagcaagaggaaatacagcactctgggggcccagagcgagggaaggtgagcctggctgagaatgtgagggagaagctttcctgagaacagtaaagtctaagtcagtttttctcaaccagggtctatcttgccccaggggacacttgccaatgtttggaggcatttctagttgggacaatgggagggtgcgggggagagcacccccagcatctagtggggacaggccagggatgctgctatgcatcctacaatgcacaggacagtccccaccacaaagaatgagctgacccaaaatatcaacggtgttgaagcagagaaaccctgatctatgctaagacctgaaagacagagagaagatgggcagagatggaggggaacagtgttccagccaaaaggaacagcatgtgctaaggtccagaggcaggaaagcacagctcccttcttaattgtccatgatatttaatatttgctgagcacttaggacatcccaagcagttacatcctagacatcttcacgacaagcacatgccttgggttctgttattatctccattttccagatgagtaaactgaggctcggggtggtgggagagtgcctgtgatcgcacagctagaagctggcggagcttggactttaaccccacttgccatgtctccaggaccctgtgtgtctggagttcaagggtgcgtccatgaagtaggacagcctggcggtgaatgcgactcagcagcgccttgaaggccacattagggagtctgggcttccccaaattgggcagcaggaaaagggtttaagcacttaaagagattaaagctttgcagaagggagctgagtcctctggtcaccagcccgaggctcacgccgacaagcttggcacacacttggcagagtggcatctggacttggcacctcctccctcccacagagggagtgaaaatagcatctcaacagccagggttacgtgaggcccaagagctgctgggtttaatttatcttgcttggttttccactgacagttttagtaaaccaatttgggtttgatagtaaaaataattccatcctccgggcccctcagccctcctaagtgtttgcaattgttatttttcacatcgacgatggggagggagtgtgcactgcagaccgagctgggtaggtggcccatagtaggcgcatgacttagctgtctgctgagtcatgaatgaggacgtaagccacatttcccaggcgagaggggatctctctccctcttcgtctactgggcagtctgttgataccgtggccatggcggttctaattagttaccatttattaaaaacctactatgtgctaggcaggccctgagctgcatcgtttaggtccgtgagcaataataaatgtgaacattattatgcagagataataattacataaatgagagctaatgtgggtagagataattacagaagggtaattacccaaattagagataatgtatgccaagcacattgcatggtatctggcacatagttggtgcttcataaatggagactactattatcaggaatcctcagataaggcagatattatcattaccactttatgggttgggtatgacagcacagagaggttacgtggtttcctcaggtcacacagctagtaaagacggagcacacaccgtagcctccacttccactgacttgaacagctttcggggcaccagctgtgtgtctcggcaatgtagcagcgacacgggaaggctcccaggcctgtagggactcaaagttcaggaagggacacatagccataaacagacagcctggcaaaatgtaagcaaagtcctgtggcttggagggtgagttgaggaggtagaggggaactagatttatctccgtgaattatggaaatatccctgagaaggtgacatccagaaggaatcttgaagagtgccagttgcccggagttaatgggagaaaagtgtcgtgagcaaaggattcaagcagtgatgacagtgaccattaggcatgaaatgaatgctctgaatcacagcatcaattacaaccatctgccccacattgttggtgttggaggaaagaaggaggttgcaccaacttgggatgagtcaggagccctcaggctaaaccttcttcacaccccaaatgcctccctaacccaccacgtatccctcccagctccatcagaaatctgcctcttcctctaaaaacacaactgaacagaaacttttaaaccctaagggccttttcatattgctctcctctcactctctctcattcattctctctccacaccccttccccaactctcaaaataaattacggaaaggagaataagggaactaacattggtgaaggcatcgtagaatagaagatccgagaggggccccaagtgggcaggtaacttagcaagtatcacacagcaagagaggaccagaaagacaacttgcttgtggccacaagagctcagcacgggggccacaaccttgaagatgccttgcagccaaggagacataaaagcgcctagagtcaaaaagaggtgcatgtaagtgcatcctgatgttcaccagctctgtggcctcaggcagattattgaaggtgctggtgcctgcacccacaatgggatattttgttcactttatccccagtgtctggcacaaagaaagtgcttgataaatatctgttgaatgaaagagacggtaaggctgggcacagtggctcatgcgtgtaatcccagcacttttggaagccaagatgggaggatcgcttgagcccaggagttcaagaccagcctgggcaacaaagcaagaccccgtctctacaaataatttaaaaattagccaggcatggtggcttgcagctgtggtcccagctacttgagaggctgaggtgggagaatcacctgagctcaggtgttgagaccagcttgggcaacatagtgagaccctgtttctaaaaagagagagacagagaaggtgggtgtgtaaattaattaaataatgtaaaaattaaaataacagataacataaggtttctgacacaagataggcagataaccatagctaacactacttttacccctactatatcccagactttatgctaaatactggcacacattatctcattgatgatgatgatgatgatgatgataaagaccaacagctgacattcattgagtacttacaatgtgccagtctttacatgctttttttacctatagtaactcatttcactctccaatgcaatatcagtaccctatgcaatatctacatcacgtcagtgtgactactcctttgtacagatgaagaaactgaggctgagagagatgaaactgcttgcccaaggtcacacaattaggatgtggccaagtcaggacttgaacccaggtctctaagaccaaagccagtttttaaccacacacacacacacacacacacacacacacacacacaaacacacacacacacacaaacggtagggaagtgctccacatgagagaaattccgagctccatcttacagaagaagaaactgaggctcaaagtgtttcctgctccccgtttcctggacatctactgcgaacatacatccatctctgcagggaaaaagtctcaatcaggctccagcgtgccttcctttgctcctctgcagagttcccaacattgctccctgtttatgagccccagcacagttctctaaccaggaaataaaagggcctaataacaaacccaggtaaccatatgattgatagctgcagaacagtcctcttcagctgctgccaacctgttctgtgctaagttaattccaagccctaaaaattaagtgccttgtccagaggcacttcagttcttcaaacagagatatagctgctttggactgtaagaattctacctgagagccaggaaaggaggagagagattcaggagttgaggacaacgttagccctgggagaatagatttccagatatcagcaaaaatcacaggagaaatggccacgacaaaaataaaactggctgaactcagatcttctggcccattagcaagaggagacaggatttccctggagccaaaagttcgaaggaattagagaaggagcagaaaatttcatagagcccaaattccattatgttgcaaatgaggaaactgaggcccagagatgggaagagattgccccaagaccactctatcagtcagctattgctgtataacaaaccaccccaaattcactggcataaaacagcaggcatgtatttctgttcacgagtctagagatcagcgttgtgcttctggtcttagctgggctcgcaggtgggtctatgggcagccactggccttcttcatgtatttggggatgggttggctgtcgtggtctaggtgggcatagactgggattgacatagacacgcatctctgctccatgtgcctctcatcctccaattgctagcttgggcttgttcccatggtgattggccagagtttcaagaaaggaagaagatgcattcaaggcctcttgagcccacactaggaagtggcacagccgcacgtctgccatatcctatggcaagctacaaagcaagggccaacccagaggtatggtgtggatacagagaggggccaagctttgggatcatttttgccctcaagctaccatgaccatagaagagtggagattagaactcaggtctcctggtcccagcccaaagctccaaatgatattactgtgtacaatgatcctatgagatctgagcatcattatccccattttacagacgaggaaaccgaggctcagagagctgaaggaacttgtgtaaaatctcacagctaggaagaataagagacaagatttgcacctagggcttggtgcctggcatatagaagactcagaaaatgtttctttccctacatgatgctttcagcatgtgggagacactctggaaagatcttgaattccttcagggacaggaaaaagccttcacctacagtaagaagtcttgggttctagtctcaattctttcactgagtggctgtgtgaccttggataaagtcaccccacttctctggacctcggtttctttcatctttcaaatgaaaataacaatggtacccatctcttcgagttctgagatgatgaaatcataccatgtgcagaagcacttggcaagggcttagtacattacacacactcaacaatttaattggcagctgtgatgacgattaatcccttccatggcccatggtcctgtgtacaaactgagctcctttgcacgatcacacacaccacacacacacacacacacacacacacattgatccctctgagcttgcagtttgagtgttacagtaggaatgaagagaatccatacacaggtcctacccaggtatcccacctgactgattagcttcctctcccccacgatttgcaggggattgtggtggtaacttggaaacacaagcaccagggttaggtcctccaccaacacatgcccatgttctgctccttggccacgccacgctcttctcgccttggtgactgcaagagcctacttgggaggggacctgctgtctgtctgagctggacattgccttgtcggtgcacccctacaagctcaaggcattcgaatgcaattagacctgacatcttagggagacacgactgcttgttttacgagtccctgacatgcgctgtcctcctgaacttactattcgacaagtgtttattgagcgcataccatgtggctagagttgcatccaattatcagaggtctggagatgacaatcatcactcacatggattactgtggtgccaaaatactcacgtgcccttacctttgtgccaagctctgttctgagcacgttacctcttagttaattctcaaagcaacctaggagagtcacacgatttgttctccatgtaatagatgaggacagtgatcctcctccgaggggtgaaatggcttgccacttagacccaggagtgccagcctcacacccctcatcacccctcaaccctgcttcacagagtagaatcgacttcatcctgaaggcagccagcctcccttgagagctgagcaggcaagcagtgtagtcagacctgctgtttagacagcacccctgggaggaaggcagaggtgggccgaggtggcaggaagccaggcaggaggcagaggggcagcagcattggcttggcatggtcctgtgatggccgaggcctggggaagcccctgcaaacccctctggggccttccggggagaagctgggacaagccctccaggtttcaaagttcgtttttcttggaggagttcccacgccaggcggggacggcccctgtgtggagtttcctgggggtgttctggccgctcggattggccacgccagggctttcgccaggggaggccttcgagaatatgtgcacgatgcggacgcagaatggcaggaagcggcgaccccagccactgccagcttctgctgggagaagctctgtcaactcttcctccagcaatgcagagccccggcccaccgccctctgcacacgtgcgtgtctgtgtgtgtgtggcagtatataccacacaccacacacacaccacacacgctatacacaccacacaccctcacacacaccacacacacacaccaccccacacataccacacacacatgacactacacacaccacacacacccccacacacacaccacacacatgccacacatgccacaccacatgacactacacacaccatacacacaccacatacacaccacacacacacacgcacaaaccacacatatgacactacacacaccacacaccatacacacacacccctcacacacaccacatgacactacacacaccacacacgccacacaccccacgacactacacacacacaccacacaccatacacacaccccacacacacaccacatgacacgacacatgccacacatgccacacacaccacatgacactaaacacacaccacacgcaccacatgacacaccacgcccacaccacatgacactacacacaccacacacacccacacacaccacacgcacatgcgccacacactacacaaacacacatactgccacatacacatccgacctcaccagctgatcaagcttccctcaaggtgagctctcgcaccctgacttagatgtcccggaatgtagaaggccctgggttccactccgtgttttataaacctggggaagcttacatccagaaaaaggaagcaatgtgggcagtgccacagaggaaattcatggaagggccacagatgccatctggggtcacccctaagtctggaaaactcaggcctcagcagcctatttctaaagccttgtattccccagatcaaccccttccttgctattgagtggggaaatggggaaagtgtgtgggtccaaccttctccacagagggaagcatgcagtggcttggtcatggccattgttaatggacttttttacaatttgtggattctgcgatttgcatctggggaaactgagacccgggttgggaagcctcttgtccagtcacaggtcagaaaggtggcagcataagtgccctttactgaggtctcgtcacaccaggatttgttgccacgccgcccttgcccctcagcagggtgcctagttccttataaatagtttttgtaatagaggaaaaatgctcttgtagtggaattcctggcattaattgttatttacagctgtcaacaatattatccccattttacaggtgggaacactgaggctcagagaggctaatctgcttcaaggtcctgcagctagaatttgaacctgttctcttaatgctgcctcttgtgctggaggtgaaacaccagggtagttaaggacagccgtctttgtaggcaaagcagccggggagctgttgggttttcctggtcatggtgctaggtgtaaaacgttatcggtgaccttgccagagcctcgcccactgccttcggaaatggctcagtccagagatgtggaaatgagaaactgcttgagctgcccgtggggcaggcccagggggacggcaggccgagagcaggaatctctttcctactctttttctctttgggaataagagggaaattgagaaaagggagaaaggaggaggagatggagaaaaggaagaaaagaagaaaggccatggaaactgggagcctctctgaagtcagggctgggtctcattcaggctgcaaactccaggtctgtggctctcagtcctggctgcccaggagaaccccctgggaatgggagttttaagtgacactaattcccagtctccacccccagggtttctgatggcctgatttgtctggagtacaacctgggatcaggagtttttaaacctccgcggggattctgaggtgcggccaggattgagaaccacggggcagtgggttcacagcctggagtggacaagcgttttggtgaatatttttggagagaaacagagaggaagagagggtggaaggaaaggaagagagaaggaacaaagaagagactaaggaaacaggctgggcacggtggctcaaacctgtaatcccagcactctgggaggccaaggcaggtggatcatctgaggtcaagagttcaagaccaacctggtcaacatggtgaaacccggtctctactaaaactgcaaaaattagctgggcttggtggtgggtgcctgtagttccagctactctggaggctaaggcaggagaatagcttgaacccaggaggcggaggttgcagtgagccaagatcatgccattgcactccagcctggatgacagagtgaaacaccatctttaaaaaaaaagaaaaagaaaactcatcatttttgtgtgttttaaggtgtcctattagggagccaaagatactggttttctgtgtcctccctggagctgacatggtttcttggcctgtctgccattttatcaaattaaattgaaagcaaatttaattgggtttcactgggccaaaggcccctcgacaattctgtgttgctgagaggtgcctggcaaggttgtgctgcatctgaaatgagcacagaggccttaggacctgggtctttggggctcagtttactcctctatgggattcataatgttttttctctgaccacctgactgtgtgggtgaggggatcagatgagaaaatagatacaaaacaactttaaacatgtcccttctaaggccttcaaaaaaaactataaatattttatcaaagttttattgcatacaacggaatttacaggttttgattcttgtttttcctttctttagatcctatgatttatttcatcactatctctactgttccataaagatcttgcctgaagggcaagatagtgttttcttaggaaagtcacttaattcctctgagcctcagtttcctcatctggaaaatggacataaatttgccgtcattccttcatttaagtgaactttatttcacctgtgccaagccctgggtgggctccagggattggggtgaagacatgtgccttcagggagccgacacaggcagatgaaggttgctggtctgttgctcaggctttgtcttccaacgacgtctgtttggattccggctctgctatataaccagctgcttgagcttaagcgtgtttcctcacctctgggcacctcagttggcttatctgtgaaatgggtgtgaagagtcgtacttacagggttagtccgaggataagatgaaatggtgcatgtaaagtgccttgaaaagccacttgaaaaccttagctagttattacatagctgtaaatgcagggtggacagagggatcctgaggaattagcaaggtgttttctagcagagaagagaggagagggctttccaggtagagagactagcatgagctaaggcatgaaagatggaggctttaagggtctaggagctgcaaggggcttggtgtactggatgtttgagacagcaagagatgggctgagacccagctgtggacttcctgggaggtcaggctgagaaactggactttagtctgtgggctaatttttgcggtttccacagtccaattctattaccagctacttctttttgtgttaccgtttttgttttcccgaaactgcgtgtaaattggcttgcctttttcacttggcttactccagccaaaataatgtccatgaaattagaagtttaatgtgcaaaccatatatttatatatttttctaatttgcatttaaagaaatgcataaacattagacatttcaaagtatgtttgcctacctaaaattgtcctgtgaatgaggctcgaaaaagccttttaaaggcaagatttctaagccaagggtcaaatgtttgtttagaaaggaataaggaaaagaaaggtggcttgctcatcatgtctttctatgccctctccggaatattgactctagctcaatagttaccaacctcacctaccacctgctccccacatccaggctcctgattggttggggtaaaaagggcacctgctggggaagtcagcccattccatgcttaggcatacactgccctctgcaggtgagcagcaggattacataaccagagatgggttcgctggtctgtgtcagattctaatttgcattctatcctcacctcttccactctctagaccccagtgaaagcaatgagggtcccttaggctgtttttatcctttttgaagaggtactacattcatacgattcaaaattcaaaagtacaaaaaggtctactgtgaaaattgagtttcccatccttccccagcaaacagccccctctctggctctcctccctagaggcaattactttcttatgtatcttacatatccttccccagatctttctaaatatttcaaaaaccataacagaaagcttttatctatcaaaattaagccacccagactaagtaactagattaacactgattttattgcaaactctgttatacctgatcgataataaccatgaacaaaacacaaagaacattcgttaccaagaaatgtaaaatgttagggagacaaaatctttttaaaacaagaagtctgggccaggcgtggtggctcaagcctgtatcccagaactttgggaggccaaggcaggtggatcacctgaggtcaggagtttgagaacagcccagccaacatggtgaaatgctgtctccactaaaaacacaaaaattagccaggcatggtggcacgtgcctgtaatcccagttacttgggaggctgaggcaggagaatggcttaaacccggggagggtggaggttgcaacgagctgagatcgtgccactgcactccagcccgggcaacagagcaagactgtgtctcaaaaaagaatttaatttaatttttaaaaaacgatgtctgtaatacaaaaatcacagctatataggaggaatagcttctagtgttctataacactgtagggtgacgatagttaacaataatttgttgttcattttcaaacagctggaagagaggattttcaatgttttttttttttttttttttgagacagggtctcgctctgttgcccaggctggagtgcagtggcgcgatctcggctcactgcaacctccttctctcaggttcaagcaattctcctacctcagcctcccgagtagctgggactacaagtgcatgccaccatgcccagcttatttttgtactttttgtagagatgggatttcaccatattggccaagctggtcttgaactcctgacctcaggttattcactcacctcggcctcccaaagtgctgggattaaaggtgtgagccactgcacccagtccagattttttttttttagacagcatctcactgtgtcacccatgctggagtacagtggtgcaatcaaagcttactgcagcctcaacctccagtgctcaagtgatcttcccacctcagcctcctgagtagctgggaccacaggcatgtgccaccgtgcccggctaatgtttttattttttatagagatgggggtttcactatattgcccaggcaggtcttgaactcctgaactcaagtgatcctccagccttggcctcccaaaatgctgggattacaagcatgaaccatcatgcccagctgttctgaatatttaatttgtgtttttttattcatgttttctgacacaagactcaatcggaacacacttcttgaaaacgtgtgtatgtggctttcatgggctgttgtataaaatggtggttcagatctcaagctttggcatcaaaagacgtaggtttgaatcttgaccttcctggttgagcctcagtttccttatctgtataatggagcaagtcttactttgtgaggttgtttgaatgcttgatacttggcggacagcactgttgttattcaaaagctaaatgtgggtcctgtgaaatgctttcccattcaaaagctatccaatgggaccagtgtttccactgccctgagaaagggaggatttaaagaagcagccagaagtggtaacactaaatggcatgtccacaaatggctgctcaggcccttgaaggggctgcagaatgtgcccagagcagggtcaaggtggggaaggagaggaggctagacaagctggacaagccagcgggttggctttggagtggcctctcaggcatgcagggtgtcaggtggcattggacttgactctagtgacctacatatccaagaaggatcaaggcatggccaacaagaagccctagaggcaggcggggcagaaatcccttgaggcagcctccctctgataccaaagttttcaacttaaccctggggagcatgctgaaagcagccagggcactggctgagaggagtccccttcccaaggttggagcagggaagagtccagtcggggttagggtcctaggtaggaattggggtcaaagccacagtctactctgtgcaagatctgagcccgaaacctggccctatgccctgagctggcactgattcacccgagacacacactcagcatggtgctgagcactagggatacagccagcagtgagtgagacatgggagggcctcagggagctcctgatctgcagcagatgagcatccccagaccaatggggccccaagtaatgactgagctccataaggagggtgagcacaagggctgcaggccagaccaggaggggatgctgggggctctgtgcaatagtgaatcatggaaggctgaaactaaggggtgggtaggagtttcccaggtggagaattcagagcacagggaagggaatgtgaaaagtcccagaggtcaccaagagcatcgtgctttggaaagactgatgagcaatgcagtctggttggaggtaaaacaatggcttggaagagagagagtcagaaatgaggcggcagggacggggcaggcggcaatgcaaaagatagacctatagagccttgagactagggttaaaagttggcactctatcctaagatgtttcttttttttaattgaggtgaaattcatacaacatacaattagtcattttaacatatacaatatatatatctacatatgtgatacatttacaatattgtgcaaccaacacttgtatctagtgccaaaacatttccatcaccccaaaaacaaattccataccgattaagcaattgttccgcattcttctcctcaccccctaacccttgataaccacccatctgccttctttctctgtggatttccctattctggatattccttataaatggagtgattcaacaggtggcttttcgtggctggcttctttcactgcatgtcatgtttccgaggttcacctgtgctgcggcgtgggccagtgctgcattcctttttatggctgaataataactccgctgcacaaatagaccgtattttgcttattcattgatctgttgagggagcagatctgatttaccttctggaaagattcatctggctgctaaggggaggagtatcagggccaggtgaggatgaagtcaggaaaccaccgaggtgctgtccaactgcccaagagaaaggtgatgatggtctgaggatagcctgcgacagtgaccaagaagaaagaggtggatgtagagggggagatgggagctgagatcttctgccaggagctcacactttgtgcctgtggaaagcctttcactctggcacctgagaagggccagagtgggcagggtctggtcttgggaagctttgtggtcctacaggatcctcccagaagggatcctgccactcccagtcacagtcagaccaagcctgcctgcctgccagcatctctccatctccccttcatcctggagtcaaactgccatcccgttttcctagcgcctccttggatcgtatctagctgacatctcaattcagacctcagcggaaaaccacactctgccctgtggctctccctgcagtgaactcaacacattttcatctcggttgcttacaaaggtccgattccagggatgctagatgcacttggtaaatacatggatgagcaagtgaaaatgtaagctcctctttgcattgaggggaaaaaactaaattgccaaactctgtgtacataattggaaccagtctgtcaaaaaagattcagaagaatgaggcagagagtaacttgattatttctcccagtgacccttcaggcacatcctatattatttttttcctctgggtgaaagctgcgttttcataggtcttctggtcacaataagtgcagtccagtctgaaaatcttataaccctaagtatcattcattttgaaacttcatccctccctcaactgtgctcctctggctgggaattttgcaaagggcatgggaggtaagggaataggagactctaacttggctacactgttatgttatagaatatatagaatgctgattttttttctgtctttaataggatattaaatgtgtgaaagtctcctgagcacagctgctcttaactttcccttttgctggggttctatcaccctttcagtaggaagccacttttaaggagacctatagttggcttctgcctgcaaggttcacaactagacccaggaaacatagatcatatccctactgtcatcagtgatgggatgctcactgtcaatatctgcttttattctccttgctctgaccagaggcaggcaggcatccccagtctgattttatcatttcttttggtgagcatcaaatccagctactgttatccaagccacaaaagaaagacacctgccaagtcaccaagagttcccttgaagccctcctcactaggcttaatgtgagggtgatacacattcgaccctccctcctatgatgccccacagtgaccactcccctcaaggcagtccttcctgccagcctcctcaatggccagtgccttcttttccttctcttatataagctagaggtgggaagaagggctcagactggaatagctgcatcgatgttagtagatgatgccattggtactctgtctaagccgtgcaatacttgccaccatgtgcccataatgacttcctactgcaaggcccttcccacttctccagcatttctctgatgccatgtggtcacatgggcaagccagaagttctagggactcaacacatccaggagcatccctcagtcaataaaggatggaaactggaggataaataccccagctccttctccctatggatgtgttctgcaccatctctaaaattcctgcaggactgaacccaaaatgcacagtgaaacctgctcatcaatcccctcttcgttgagtccttcccttcttcttgtctcatttccccaccagtgctgcctaggatggcctcccagacaagccagacttcaaaaggcatttgtatgtttgcttgatctctgcatctggagaatccaaatgcaatcaacagccaagtatctctctttggaaagtggaaatccactgcacctattgtcttgttcttagcttagggagacactgctaaaatttcagaacaacagaagaaattgcatttaatggtctgttgcacaccgtttacaatgtgcatttatataagtcatggtttctcgagtttagccctgttgacattttggactagatacttttttgggttgaggggctgtcttgtgcactgtagtatgtttaacagcatccctggcctccactcacccatggtacccacctagttaggaaaaatatgtttccagacattgccaaatgtcacctgtgaggaaaactgcccctagttgaaaaccactgacataaatcatctgatgtcatttggcataaacagaaatccaaagaaggatgatggtggtgatgatgatgatgacgatagtgatgatggtgatggtaacgatgatgatgccaaaaatgaaagtggaatataacaacataacattcaaatgacatcaccgagcttgcccaggtgctaatgctgaagctggaatttgaatccagaccttctgcctgcctcacctcatccccagagctcatgacatagacgaggaatattaaggctgattcacagacaagaaatttcagaaaaatcacatgccttccatgaaagtgacaaagctgagaatcaaaccaaagctttctgatttccaagccagtgtgctcttccctgcacattgctccatcctattttatggagaacaaagagttgccgtatggttttaaaatgaaagctattttcacccttgaagatgctgctactgcgttttggccatttaagtgaaagaataaagccaagatgtgcattgtctgtaaactactgttaccagcggatcagctgtgaagtcggcttaaggaatatatctgccatctaccatgtttcacactagtctaatccggcactttcatgaacaattgatgttttcatggtacgtagagctaaagaggccctcccctactacaggtccaaagctgacatcagtcccactatttttgctgtcaagtagactctctgggaggctctttcataccttagcatttattgagcacctactgtgtgcaagaacaagtggcaactccagaatttcaatacagcaggggtttaggggcttcaatctggttaaaaactgtcaggggggtaggaggagtctggggattttgtcttgaagacatgtgtgcaaagcaagcaggtagcttttatttgaagatgttttgggagtagcataggggaaactggtgaaaattatggcggcaatcaaaatcttcctaagccaccccttggagcaactttacatgaggaactacgagaggtatggtggaaggtattggggtgaataaaatacaatccctgccctcccagaagcaaactttcaatacctttctttgtgtttctgttgttttgttctgaccacctgaaacaccaacatgggtagttgccacctcacctcccaactcccggactagcagcaaacaccactgttggccattggatgaagctatcagcagggagggccactgtcagtctgcatcagtttcaggaactctgctcagggccatttcccagaacacctctcctctggcattgaattgctcagtcatacagttcccgtataaaacccttcagtgtctccccgtctcctgcaagatgatgtccaaaagttgaagcttggctctttaagcccttcatgatctaatccctgcagaactctgcaggcttctatgcctatccccataccccaggcacactgaccactggaaaaattctttcaggaaccatggtcttactcctttcttccctctgccttctccccatcattcattgttttcttttgttttgttttgttttgtgagatgagttcttgctctattgcccaggctggagtacagtggcacaatcatagctcactgtagcctcaaacttctgggctcaagcaatcctcctgcctcagcctcctgagaagctaggactacagaggtgcaccaccacaccaaaaaaaaaaaattttttttgagacagggtctcgcttctttgcccaggctggagtgcagtggcacaatctcagctcacttcaacctccacctcccaggttcaagcaattctcctgcctcagcctcccgagtagctggaactacaggcatctgccaccacgcccagctaatttctttttttagtagagacggggtttcaccatgttggccagaatggtttcgatttcttgacctcgtgatcctcctgcctcggcctcccaaagtgctgggattataggcgtgagccaccacgcccggactttttttttttctttttttttttttttttgtagagacagggtctctctttgttgcccagaatggtcttgaactcctggcctcaagcaatcctcccacctcagcctccaaaagtgctgggattacaggtgtaagccactgcacctggactccctactctgtgtttatctgcctcgaggtctcctactctttcttgaggtttcagagcaagaagcatcacctactgcaggaatgcttccatgatgcccctaatctgagtttgtccttactttctctgtccttactttggttataactcctgccacaatccctggcttacaaatctaaatagatcactactctgtgacccttctgagctcagcacagtgcctggctcatagtagatgctcaaaaaaacaaacaaaaaagaacattaaggagaaggagacaagaaaaggagaaagacatgagagagaaagaagacagagagagggaaagaagaaaggaaagaaagaaatgtgagtttgtatctgtccatgattgatgaagccaaaggtgaattatctggcattctttcaattagagatcaattttatctagcatgtctgagatggcacatgtttctgtggtatagtgaagtgatttctggattattaactatccactgtggtttaattatttagtgtcaaggtactttcttgcattggagtctttgaaaatgtgtcatcctttaacagtatgaatggtgacaggtttgagcatatctcataagtaaggtgcctccatcccacctctgccctaccccttaaacataatggatcattcagttgactctgaggaatttgccccgtgataaatggaaagatcatttcaccttatataaaaatgcaagttgtaattagcaagctgtcagcatgttctgcactgaagaagaatgaaagatgcaggtcatagccccagcctgtagcctggtgcctaacacagagatgtcacctaagaaatggttgccaataatgggagttttgaaggtgattcttcttacaatgcagcatttgactttgcaatgagtcccatgcagccaagaccattgcatcaatgtgtcttcaaaaacccaactgacggccgggcacagtgactcacgcctgtaatcctagcacattgggaggccgaggtgggcagattgcctgagctcaggatttggagaccagcctgggcaacacggtgaaaccccatctctactaaatacaaaaaaaattagccagacatagcagcatgcacctgtagtcccagctactcgggaggctgagacaggagaattgcttgaacctggaaggcagagattgcagcgagctgagagtgccactgcactctagcctgggtgacagagtgagactctgtctcaaaaaaaaaatgacttacaaatctttgtgtcacatttgcagtctatgtcaatcttaccctcagcttggggttaagacacatagcctggagcctgacacatacacacttaacaaattttgtattgcctgaaaaagttaatcaagggtttattgaatgcccattctctatttcacatgactctccctcttctctgccctccaagcctgaatctgagcaacagtgacatcttgaccatctacgatggcgacgaggtcatgccccacatcttggggcagtaccttgggaacagtggcccccagaaactgtactcctccacgccagacttaaccatccagttccattcggaccctgctggcctcatctttggaaagggccagggatttatcatgaactacataggtaggtgtctcatctggtcaatttattttttctttgtgtttagatacaggttaaggtggtttcctctaggttatttggcagttttgtactacagcgatttttcattgtattgtattgaaatgtactcatttcatttttaaaagcctgggctctctagtcatgaggaccagggtttgagccctagcacggtcatcgatgtctgtgtggctttgggaaagttactgaacctctctgagccttctttttgtcatctgtaagatgggcatagtgatacctattccacaaggttgatatcaggatgtagtagacaatgcctcataacttatgtttcatgtgtggtcagctgagaacctgttgtccccatgtttcatttgtggtcagctgagatcttacatcaacatacttcctaatttcttcccaatttgtgcaacttctcaaacatcgtcttcaccttcttgcccgaactgaagctcagctctcctctaaggcctcttcttttcctgtagcctcgttgaacaaggacagccttcctttcgcacttcttgtactttaggagctatagatgcaaaagatgtctttcctcatcctcaatgtggcctccaaaccatgtctctcctgctcctcctaaaacaaacaaaacaaaaaaaaaacctgctatcaaattcaagctaagctcacacactcctatgacccctcgtgtgctttcatccaatcacactcttcccttctcattccccaccctgtaactctccctcattcattactagctctacgacccaccccttttcaacctttaaaccctggagggtcccaggctccatcctggactgtatcctctcttccagctagactcacgccctccatgccttcattagttcccatggatttaaacagtaccaatatccgttgaccggttcatacttacaaccttgaccttaaactccaaatccatctatccaactccctgccaactcctcccttgcctccatccagtagacatctcagatttaacatggccaaacagaatgatttcttttcctacccaccaccaccactacccaacagcatcccctgctatctgccaatcctaggaaatgagacaacaactctcctggtttctcaggctgcttcctccttccttgcccccatatccaatccatcctctcaactccacttttcaatatgtctcaaatccaaacacatgtccccgtctttctacggccaccactctagtccgaactaccaacattcccagatgtcagaggactgggacaccatgaagtcccactgattccagtcccagaagagacttgcactaacagaggaactggtccagccctgtcgtgttccagcagaagaaaccctggacaagcaaggatgaagggttgctcatcggggcagagccgagctccaatccatgcttcctcatccctagctccaaagcttcctccacccccaatattttgggcagcagcggagaacctgggagacacagagggtaattaagacctaacatcctttgacatctagaagaatgggtgagtggttgcaccccaagaatttcaatgggcaggattcggccagtgattaggaaacgtgcttgcacttcccaggaattagactggcatcttgatttccaggatggagcagagaaaaggagaattcatcctacccagccctctgccaccaccactaccacaaaagaccctgtggttggagcaagattccatgtctttggttctttctccccgttcacttaaagaattgtccatctcggccgggcgcagtggctcatgcctgtaatcctagcactttgggaggctgaggcgggcagattacgaggtcaggagatcgagaccatcctggctaacacagtgaaaccccgtctctactaaaaatacaaaaaaaaaaacattagctgggtgtggtggcaggcacctgtagtcccagctactcgggaggctgaggcaggagaattgcttgagcccaggaagcagaggttgcagtgagccaagattgcgccactgactccagcctgggtgatagagcgagactccgtctcaaagaaaaaagaaaaaagaaaagaattgtccatctctaactaggttggtgcagaagtaattatgatttttggagttttaatttgcaaaaactgcaattacttctgcgccaacctaataatatgaattgtcctctctgtaccagcacttgcacctaaaaacaagctacccccttgaccatgggctgtttcaagaagcctcatgcgtgccaaagtacattcctggcatttttatttccagatggtgaacatttttcatccctgcctgctacatgtccacctctcagagaggctaacacgagtattgatcttcttttttatgtttcccaggggccttttacctttgattgtgctgctaaatattttcagagtgttattgctacaatttcttgtgggttccccgctcttttctgggcagtgccctgggcttcaggggataactcatgttggctgtccaggcaatgtaccctccagactcagctgcctttggaggaagtctctggtctcctggctcctgtctctctccttagacgtcctctccctctccactgaaagatgaggtcatggtttttgctcatttatctcccctagcgcccaagtcagtattccaaacctgcattcagcttgatggccaaaaaaaaaaaaaaaaaactgactgactctatccaaggctggtcaaggttaaccagaaagtctggccagtgttcagtttggcaatatcttgaagaagaagtgtttttgttcattgaagttgaaactttttgtgatttgtgtgacaacttacagttggcaagcactttaacatatattattttatttcacatcttcaaatgcattatctccatttccagaggatttggttcataaaaaatcccttgacacctcctatatgctaggctctgcacaccaggatatagagatgaatagaatattctccctacccttaagacattagtggaaatgcgaaaggcagtcccattaatagacaataccaggatcacaagctgatgctgtgggagaggcagaaaaaggattgcagagaatgtttttcagggatacacagcttggctagtttgggtaacaaaaaagagagaacagttcctgattgttattcctgttaaagaaacacacagttaatttcacaagaatggcaaatagaccgttctagctaattgcgataccactcagttgcttactacttatgttgaagaccatgttgaaaagaactccaaggaggtcatgcctaaagtctatggcaaagaatgccatgattgattagtgatgcctgccatgggcatgagaagggtatttgttattctggctctagattttaccatacatgggagttacacagatgtaactcccattcaatggatgcatcagatagtaggtcaggggttcctgtggtcactagggaattctgaagatcctatattgacctaaatgcctaagcccagctctggaaggtggccaaagtttatctgctatgattgcaattagagccttccacaggaagactctgggcctacgtggttctagaatgtgaattctactcccagaattcacctttgaacagagagatgcaaagacccattcactgtttcctgttctttgcccactgtctatggccaaaggcatgggatggaagggaataagaaacagagataagtaagcagtgctttttgagaagacgttggttatttgtcgtgtgtttattcctccaagtctaggataataactaagctccatattgtaagtcaactccaatcaaatgacagtggctccctggagtgctgttttgaggactgggaggtttcctcttgattcaaacaaatagatggctgtgcttgattagagatgtctgccatgagcatgaaatggtagatggtggtgtgcattcagtgcatttgtgcatttcttttgtgcaaaaattgaaccttggtgctaatcttgtccatgagaccgaaaccatgacttcagatccctacatttctagagtctaataagatgctcataatatctcagtcaaacaaacaaacgaatccatctaactcatcttagtgttcacacaacatcgtcatatcctgcatgttatttaactttcacattgccttttggaatagacaatgtaataattcttgactccactctgcaaatgagaacaatgaggcttagagcagttaattggcatgactggaatcacaccatttatttaaaaaagaaagaagagtagaaaagaagtcttccaactcctaggacagttttctaattcttagtaaagttaacaagggcccatgggaacagaccattccagagcctccacttagggtgcttggtaaaaaaatacatgttcctgagtcagggtttctggggtacaagccctggaatctgaagaacaggaaggttatagggtggttttctaattattagcaaagttaacaagggcccatggggacggaccattctagaaacctctacttagggtgcttggtaaaaatgcatgttcctgaatcagggtccctggggtacaggccctgggatctgaagaacaggaaggttaagtgacttagccaaggccacccagttagtaaacagtggggacaagatttaagccaagcttctacatcgtggcagcaactgagaaattacaaatgcagtgggtgccaccaaggagacaggaggtcccacgggagcgtgcagccatggtggcccatattgaagtcagacaagcaaacctttctccgtctcaaagcatttggctcaaggcagaccacatttctggtgtctgctcccatttctcccctttcatccatagtctgagcatctgcagctgtgtcccaaatccagggcttggctgatttttcagaggcctaaaaatagaggctcctgtccccccaccaagcaattctcgaagctatttttttacccttcttcttgcagacacccatgagatctcctttccccaaataaaatcatgatgaaatcccgggaaaagccattgcttagttctcagaatgactttcctgcagacagcggaggtgctctcctttccccagaagcacataagaactgcaaattaattatacaacataattagcttgctcctccaaatctgtgcagtgggcactttgaagcaagaatagtaatagtttgccatgcattgctaccttagtaacaagagtttgtaggagaaaaacagaacaattacagagaaagacacagtaataagctgtgggtagcattttctggagtatggttcattttcactaatgatatgcaattggatttgaagaatataccaacagtttatttttatttatttctgttcaaattgttttttttttcttttcttttgagacagggtctctctctgtcaccgagcctggagtgcagtgaagccttcatggctcgctgcagtctcgaactcccagactcaagcaatcctcccacctcagcctcctgagcagctgggactacaaacacgtgccatcatacctggctcatttttttggttttattattgtttttgtagagatggggaggtctccctacattgtccaagctgatctccaactcctgggctcaagcaatcctcctaccttggcttcccaaagtgctgagattataggcatgagccactgtgcccaccttctttttattttgatagctaattatttctcttaatgcatattaaaaatgcatatattacttattcaccaaactcatggatttacagatattcttaggatgaagctgagcatattagtcacctattgctgtgtcatagattataccccaaattagcagtaaacatttatcatcttgcagtttctctgggttaaaaattcaggagcagcatgagttggatggctttgtcttggggtctctcatgaggctctggtcaggatgccagccagagctgcagtcacctgaaggcttgataagcactggatgatgaacttccaaatggctcacacatgtggctggcaagtcaatgccaactgttgacaggaggcctcagtttctcttcccatgggtctctctggagggctgcttgagcatcctcacaatatggcagctgcttcctctgaagcaagtgattcaatagagagcaagaagagaaactcaatgttgttatgacctaacctcggaagccacccagggccacttttgcaacctcctattcagtgttggtagggactacacaagagtgtaaattctgctgggcacagtggctcatgcctgcaatctcaacactttgggaggcccaggcggtaggattgcttgagcctaagacttcaagactggcccaggcaacatacaagagctcatctctacagaaaaaaaaaaaaaattagccaggccatggtggtacatgactgtggtcccagctacttgagaggctgaagtgggaggatcacttgagcccaggagtttgaggctgtggagagctatgatcatactcttgcactccagcctgagcaacagagaccctgcctgtaaaaataatgatgatgatgatgatgatgatgatgataagaataataataataaatgaaaagcaaaagtaaaataaaaaacaaaaatacaaaaatttttaaaagagtgtaaaccctcggaggtgagagtcatccagtgacatctggtaagcagcggccacagtgagacaggtgccgttgtaattattccctcatgaaaggtcaaggaacctgagctgcagagtcaaaaagtgattgtccccccgtcacaccgttaataagtggcagagataggattctgtctgactcgaaatcctaaactggttttatcaaaccaagagaatgttcagtgagttcaggggcccacagagagaggtaaccataaagcttcactatagacgagctcttgccagttaagcgattttggaagcgtgttgctcatttctagaggcttttttttctcttcgctcatccctctagccgtcataaaaggaggccccgacaacaagactgcttcccccatctaagactgacgtttctcttttaaagaggtatcaaggaatgactcctgctcggatttacccgagatccagaatggctggaaaaccacttctcacacggagttggtgcggggagccagaatcacctaccagtgtgaccccggctatgacatcgtggggagtgacaccctcacctgccagtgggacctcagctggagcagcgaccccccattttgtgagaaaagtaagagtggtcttgtttccttcctctaggtccctgggtggcaaatcccttctagggatctttttttggtgggtgcagtggagctgtttaatgtagaatctggactccccctccaccaccaattcacgagcattgctcacaaatgtcattttatagctgtcagtggaattacagactcaggtgccttcagaaacctggaccataatgtaaacgagtgagataagctgggtgtgagacattagggagtggtgtgaactccagtgaatgggagcgtatgtagcctggtgaaaaagaacatttggctgggtgtagtggctcatgcctgtaatcctagtgctttgggaggctgaggtgggaggatcacttgagcccatgagtttgatagcagcctgggcaatacagtgagaccctatctctaaaaaataataataagcataaaaattagctgggtgtggtgggacacacctgtagtcctagctactcaggaggctgagacagaaggattgctggaacgcaggtgtttgagctatgattatgcctctgccctttagcctgggtgacagagcaaaaccctgttgagaggggtggctgggagagagagaaggaaggaaggaaggaaggaaggaaggaaggaaggaaggaaggaagggaggaaagaaagaaagaaagaaagagaaagaaagaaagaaagaaagagaaaaagaaagaaagaaagaaagaaagaaagaaagaaaaagaaagaaagaaagaaagaaagaaagaaagaaagaaagaaagaaagaaagaaagaaggcaagggagggaagggagggaagggagggaagggaagaagggaggaagggagggggagggaaggggagggaaggggagggaaggggagggaaggggagggaaggggagagaagagagggaaggggggagggaaggggagagaagggagggaggggagggtgagggaaggggagtgaaggggagggaggggagggaaggaatgaaagaggggagggagggaaggaaggaagggagggagggaaggaaaaagagagaagggagaggagaggagaggaagggagggaaaaatcattattatttaaccattttaagggattggaatgaacatgaactagttccctatagaagtcttcttacctgcctcattttttgccaagaaaaggcccaaagtgggcaaataaatttgaattgggccccttctatgtgggactgtttgcatttccatgctgggtctctcacttatcctccatccaagacagtggagacccaccaatcacctctgttgttctctcttctgatgaaatgaggtcagaaaaaccccttggcacaatggtctccccatagaagtcactggatttcattaacctttcattggttaatctcctgtcttgacattgaaagacatatatagccatatcttaaaattacattggtaacgatgcttacttatagtacccaggcagtagtaaaatgatagaatagaaagtgaaaatctttgatgatgttactctttggaaacaacgctgctgttaaacatttattctatattgcttcaattgtgtgtgtgtgtacatgcacatcatacatacattacatgtcacacatagacatctatatatgtgtcatctgtcatatgtcaatcatagctcactgcaacctcaaggttttgggctcaagcagtcctcccaccacagccccccaaaatgctggggttacagatgtgaacaaccacacccagctaatttttaaaaattttttgtagagacaggggtcttgctatgttgcccaggctggtctcaaactcctggcctcagcctcccagagagctgggattacaggcatgagccaccgcacccagcagatccattcttacaaacttcctgcatctgcttttttttcagctcagaaatgtggatatcttttcatatcatacatgttgtccagtttattctcttttaattggtttattgttttccttttatctatattgattttttaatgtgaaaagtaatgaaagtttattttactacattccagcactacagagaaagcagtgaaggctccccctcactttgttctctttagcagttgctcagaatttcatgggatggctattccatgatatttaactctttccctgttaaactatttgcaatgtttcctttttaaaaaaatcgcaaataataatgcaatatgcaaccttatacataggtctttggaccctgatgcaaattatttgggcaaattcatatatatgtgtgtgtgtgtgtatatatatatatacacatatatatatatatatatttatatgtatttttttgaggcaaggtctcactctgttgcccaggctggagtgcagtggtgccataatggctcactgcagccttgacctgccaggcttaagcgatcctctcacctcagcctcctgagtagctggaaaaacaggtgtaccccaccatgccccattaatttttgtattttttgtagggaccggatcttgctgtgttgcccaggctggtctcaaactcctgagctcaagcgattcatccacctctgtcttccctttcaagtcctaggattacaggcatgagctaccgtgccccacctctttgggcaaattcttaaaagaggaattaaattcaaggctattttctcctggcctattctccagccacctatcaacaaaagatacattatcttccaaaaaggaaaagaactgagttaggaaactttttttttttttttttttgagatggagtctcgctctgtcgcccaggctggagtgcagtggtgcgatctcggctcacttcaagctccgcttcccgggttcacgccattctcctgcttcagcctcccgagtagctgggagtacaggcgcccaccaccaggccaggctaattttttgtgtttttagtagagacggggtttcaccatgttagccaggatggtctcgatctcctgacctcgtgatccacccgcctcggcctcccaaattgctgggactacaggcgtgagccaccgcacccggccaagttaggaaactttctagatcattctgtaattctcagcaaacccatggtcatccagaggtctgacgtcctcttggtctggtttcatcccgtgtagttatgtactgcaccgaccccggagaggtggatcactcgacccgcttaatttcggatcctgtgctgctggtggggaccaccatccaatacacctgcaaccccggttttgtgcttgaagggagttctcttctgacctgctacagccgtgaaacagggactcccatctggacgtctcgcctgccccactgcgtttgtgagtcctgtttaatgaattgggcccccagtaggtagaagcagattcactttctcttgttcatgatggaaggctgggctgctaggaggccttctgcttttcgacaggggcttttattatcattactatgacaaaacagtacctaacactgattgggagcacacatactataacatttacagtaaatttatcacgcgttgctctaagtcttctaccaaatttcactctttcttcctcaagtagccctgggagcatagtatactttgtttttttgtttgtttgtttgtttgtttgtttgtttgttggttggttggttggttttagatggaattccactatgtcacccaggctggagtgcagtggcaccatcttggctcactgcaatctccgcctcctgggttcaagcgattctcatgcctcagcctcccgagtagctgggattacaggcgcgtgccaccatgcctggctaatttttatatttttagtaaagatggggtttcaccatgttggccaggctggtcttgaactcttgatctcaaatgatccacccgcctcggcctcccaaagtgctgggattacaggcatgagccaccaccctggcttcactgatttcattttaagaagaggatactgtgctaggtgtggtggctcacacctgtaatcccagcactgtgggaggtcaaggcaggcaaaccactcgagcccaagagtttgagaccagtctgggcaacatggcgaaaccctgtctctaccaaaaaaatacagaaattagccaggcatggtggtgtacacctattatcccagctgctcaggaggctgaggtgggaggattgcttgagcccaagaggtcaaggctgcagtgagctgtgattatgtcactgtaccctagcttgggtggcacagcgagaccctgcctcaaaaaaaaaaaaaaaagaatactacttcaaggctctctagggattctgatatacaaacaatgttcacagtcattgcataaggaaagcatgaagttacacggaaggagcagagccttacacagtattttgggggttagaaactctcagctgcactaatattttaaattagtgtgttatgaacaactccattaggaatacagccagttcaaactccagaagccacagtgaggtcttgatagtgttgaagaaccaagaatttaactctggggggaaaaaaagaaaagaaaaaatagaattcctgtgagttgattataaattcccctacatctgatgtgagtaacactgtgtacaatttatagacttggccacctcctatagtggctatgttttgtgacttctcacaagtacctaaaacaggcttcacaaattttgatgaccacactaacaagcaactctacgatttagacgagcaaactgcagaaaggcaaccagaaagcaggaaagtccttgtccgttttcattggataggctgatacttactgagcacttactgtaggccaggtgtcattctaagaatggcgcatgcattaactctttgattcctggcaggaaaacaaaaatggagatgtctgttgcctgtcgttgaagacagagtatggccaaattcacactcacaagagaccttcctctctgctctattcatgagccagccaaagccaagttcccgtgtgctagttcataaattcagcttccccagcccacagaagggctttactctacagatcccaaaagaatgaagagttttaggcccaaagcgcttgcttcatagatttcccttaacatctgatccttttcttgtgagagaaaaatttccatttctgtgttcttattttctcttctcaaaaagggacactttattattctgtttccacaagtaacagggattcttggaccacacagccctgtgtctccatctgtctttttagtcagagtcccagaatttcagagctgaagggaatctgagagataaaatacaactgcaggatgacttagagataaaatgcaactgcccccattgtacagataataacaatagttacttattgaatgtaaaagacacattgctaagcacactatacatatctgtaaacatgtgtttttgtgtatgtgtgtgtatatatagtgtgtgtacatatgtgcatatatatgcatatacacatatactaaggaaactgatattcagagggaagtacaaataacaagaatcattgctcattgaatgtgtaagacacatttctagacactatatatatgtgaatctatgcatatgtgtgtatttatacacacatactaaacctagccccttaaccacaaccacacttggtccccaagccccagaaccttgggccaaatccacattggttggttcctgttataggttgaatctatccccaaaagatatgttaaagtcctaacccacagtatctgtaactgcgaccttgattggacatagcgtcttcgccatcctaacccatggtatctgtaattgtgaccttgattagaacttcaaagttctaacccacagtatctgtaactgtgaccttgattggacctagcgtctttgacatcctaacccatggtatctgtaattgtgatcttgattagaacttcaaagttctaacccacagtatctgtaaccgtgaccttgattggacacagtgtcttcaacatcctaacccatggtatctgtaactgtgaccttgattagaacttcaaagttctaacccacagtatctgtaaccatgaccttgattggacacagtgtcttcgacatcctaacccacagtatctgtaactgtgaccttgattggacagagtgtcttcgacatcctaacccatggtatctgtaactgtgaccttgattggacgtagcgtctttgacatcctaacccatggtatctgtaactgtgaccttgattagaacttcaaagttctaacccacagtatctgtaactgtggatttgattggaaatagaatctttgcagatgtggtcaagttaagctgaggtcgcactggattaagatgggtgttgatccaatgactggtgtctttgtaagaagagggaaatctggacacagatggggacacagatacagagaaggccacagggtgacagagggagagattagagtgatgcagctgcaagccagggagcacgaaggaaggaccccccccaaccgcccacagcattcagagggagtgtggccctgctgacaccttgattttggacttccagcctcccagccaagaagtttctgctgtcctaagcctcccggtttgtggtcctttgtcaagggcagccctaggacgtcagtgtcattcccatttccttctagtgactgcaagagcgatcagaagcagccactttagtaactccagctgcagagacccagagatgaaaagcttaaaataaaagcttctattaaaatactgaaaggtggaggcatcatttttttaaaaaagaaaaagcacttcaccaatgagacccagtctctaaagaccctctgagctgcggcagctgctgctggatttccaagacgcaagcctccctccctcccttcgggaatgcttttccctgaaatctcagcattggatctgcagtgctgagtagagacggcttcccttacacccatgctaatgagttcacgagccacgcggggtgtcaggagacacgcggtactcccaaaagcctgaagaagagccctgcgtgtggtggcagcgacgtgacaagcgggtgaggctgatgggagataacgcaggaggcgagagatggtccgattctggcagcgcggctcctgagtaagagggaggatgcagtctaggttctgaaggcatttttaaggttgaggttgtcagacataaaacagctttgaaacgttttgtcgactgaacaaagggaacagcacccatttgatgggccccttcagtaggctgaccttttccccaacactaacactcttcaccctcacggaaatcgcacaggtgaatgcctgtccacttaaaagcaggcaaagaaggactggagagggtgagtagctttcctgaggtcacacaacagaaaggaagaacagaattctaactcaagcctgactaaacccaaaagcatcttcccaacctcatcactctgcagttcagcttttgggcaaacctctggtgcttaagagtggacaaagatccaccaagaagttaatgaagcagacagaaaactgcataagcccctgggcccagtggtgaggtggctcacgcctgtaatcccaacacttgtgggaggctgaggcaggaggatcacttgcggtcaggagttccagaccagtgtggccaacatggtgaaacccccgtctctactaaaaatacaaaaattagccagacttgatggtgagcacctgcaatctgagctactcaggaggccgaggcaggaaaatcacttgagctcaggtggcggaggttgcagtgagcagagatcacgccactgcactccagcctgggcaacagagggagaccctgtctcaacaacatagaaacagaaaagaaaagaaaagaaaactgtataagctctggttgtctacagcctcttgcccagtcacttgcccaaagccatagtttggtcccctgggactgaaagccatatctttttaatcctagtccatttaccccagggcactttaagaacagacaggtcaggcagagataaagggaagagtctgggtgtcaaagtcagacacaccctccagctctgctgagtgaccttgggcaagtaacttgccctctctgggcctcagagcccccatctgtgaaagaaaataataccctttaccaagaaggattgttgggagcaactcactcagtcattcagcttactcagttgttcaggcctcctatatgcaggcacacgctaggacagaggttcccaaactttctcaactcatgacacccttggtgtctcaggaattttttcacagatttcctaggccaaaataccatttccatttattaaataccagttccatttattaaacagttaggtacaaacaactgaatgagtagttatctcttcacagcatagtagccatttgaaaaagtaatgcacatacattaaaagaaaaacggttttttttattattaaataatgacaattgctggctgggcgtgatggcttacacctgtaatcctagcactttgggaggctgaggcgggcagattacctgaggtcaggggttcgagaccagcctggccaacatagtgaaaccccgtctctactaaaaatacaaaaattagctgggtgtggtggcacgtgcctgtaatcccagctacctgggaggctgaggcgggagaatcgctggaacccgggaggcggaggttgcagtgagctgagatcatgccactgcactccaggctgggagacagagcaagattctgtctcaaataataataataataataataataataataataataataataataataatgacaattgctgctacgaggatgtgtatacccgttgggctgtgcaaatcttcttaaacgttaggatcagatgggacttcgccaccctaatttcctgttccacattgattttgtcacagttagcacgagcaccacaaaaaaatccagctttgcaatgatgagtcatcaccaaaacaaaggtgacgtgatctaatgttgaaacggtgaactatcttgagctggtagttcacaagggtccaacacatcattgtgtttcctcagaacttttttttttttttgagacggagtctggctctgttgcccaggccgatgtgcagtggcgcaatcttagcccactgcaagctccacctcccgggttcacgccattctcctgcctcaggctccagagtagctgggactacaggtgcccgccaccacgcctggctaattttttgtatttttagtagagatggggtttcaccgtgttagccaggatggtctcctgaccttgtgatccacccgccttgacctctcaaagtgctgggattacagccatgcgccactgtgcccggccctcagaactttttttaaaaatcccacagcaccccctgtgagttcctggtggcatcctgggtcaccttggtgaaagtttgggaaccctggcactagcccctggaaaaacagtaaggtataaacagatatgacccacattctcatggagcctggggcctatttggaaaggagggtggagagacaggtctatgaaggaaatcacaatgaatcgtcagcaccacctcctccaggaagtcctccctgatttcctaggccgggttgtgtttctgtcctcagaattcccatggaacctacagtgacatctgtcaccacagctgctgcagtttattgaaatgatctgtttatatgtttgtagaatcacattccctagagtaagaaagagaaagaattttaaaatatatatatagaataaacacataactcacctgctaggattgtctccagttgatccttgaatcccccaagcccaggaggctcgacaaatgatgttactattactgtcgttgatattgttagcaaaatgaatgtggtctttatcacacctctgctttgttgcaacttcccctctttgataaggacgtggtggatgactcctgaggtaaccatcccaaagacataaaccacaccaccaaaactaaaaagaatctgacaaatccggcaagggttttatgagtggctctccaggagccacttagcttgcttaagagacagcgattccccgggaggccctggttctcacagccctgagcccagaacacctgggatacgagacacagggatttcccagcctggacagagcccacaggtgctgtggccagactgtggccaccgtaggagcttccactgttgagccgtctcctgtggccacatcttggccagcatgtccagtgttagctgagttcccgtcctcatttagaaatctctgtctctgggaaagcggtctctcacagaaatccatgataaccctaggggatttgggtaaaagaagggcctttgttatagcagaaccattaaatggacagcactaaaaaccagcacgtccaggtttgtaccccagccctgcctcttacaagcaccatgactttatacaagccagctttctcaccaaaaagattgaaaaacgaacatgccaatcataaatataaaggcttttaatgaatggtgtgcttggcacatagcaagtcgtcagttaacattggctgctaatcaccactctgtttcaaagctccactgcttgtagggcatattgcaaaccatttgtaactattactaggggacttgatttcgagctttttgttcaaatgtgctccagaaatgtacattttcttctattgttaaagagaggggaaaatagaaaaagaaaacagaaacgagagtgggttcgtgagtagatctataaggccatcggtccaattcatttgcattcctgggagagaacggctggagttacaccagttgcaacccgaattgtttaaaacattcgaccagtggttttcaaccagaggcgattttgctttccaggggacatgtgtaaatacaatttctagagaaattatgagttgtcacaacttgtcagggaagaggggtgctaccggcttctagcaggtcagggcccaggatgctgctcaatatcctccagtgcccaggacagcccccaccacaaagaattatccattccaaatgtaaaacctgtctaagttgagaaaacctgccttagatgatcttatttcaaagtgtgactacatgtcactgcctagccatgtctcggctaaggtccagactgtttatgggcagaaaaaaatggagtatggagacataagcaactcactcaaggtggtgcagcagacacaggcctccagtttcaaattcaagttcctattcctttgactcttctgccatcttctaggtgctgaagatacacacaaatgccttccaagagctggttcctgctggggaaaaattccatatgacattgttttcaaactcttactgaggactgggtcaaaattgaatcaggctgacttgaaagctagagaatcctcagctcaaattgcagctcagccacttcctgcttgaggggacttttcaccagtgagttccacctgagcctcagttttctcatctgtaaaatggctgcatggtgcagtggttaagaccggacttggaccacctggatttgaatcttatttataccactaactagcttgtgacctttaacacgttacccaaccgttctgcgctgcattctccttggatacaaaatggagatgatgaccaggcatgatggctcatgcctgtaatctcaacactttgaaagaacgagacaggaggatcacttgaggtcaggagttcaggaccagcctgggtaacctcagggtcctcaggaccctgtcttcataaaaaatttttaaattagccaggcatgatggtgcacgccagtggtcccagcgactcgggaggctaaggtgggaggatctcttgaaagggaggtcaaggctgaagtgagctgtgttcacgccactgcactccagcctgggtgacagaatgagaccctgtctcaaaaataaaaataaaataaagtaggaataaagatataatatctgtgtcttagggttgttgtgataactaaatgagttcatagatataaaacactcagaatggaatctggctcagagaatgccctcagtaaatattgtaaatgttggctgttttggtcatgattgttattaccttcaaggactttgcagaaggattagaaataatatatgcaaatcatctaatacagaatggttgtgcaaatactttggaaattaattaaatgatgagttaatatgttaaccatgccaggacaccaaaccagtggttctgagcccttgccaaactttaaaatctcctggagagttttaaaaagaatactctgggtgactaattaaattaaaataccataggggcggagccagggcacaggataacccaaggccattctagcacttagcctgggggtcctgctcctaggtcggctgtcaatatcctcctttacacccaggtctaacgatttatcctttatgcaccttccatctccccagggcgaggacagtgtttagcacaggtttggtatcaggaaatacttctggaatacatacaggactgaattagtgttcagttacatgaaggcagggaccatgttcgccttgctcatcattgtatgcccggcgcatacaatgcctggcacacagaaggtgtccagtgaatatttgttgtattaattcatctgttaatttatgaaagaaaatttccgaggaaaggttcatgggggaattcttttgtgtcgccactgccacctgctggtcatttttctgcactgcaggtaatacagtagggatttgtgttctctgaagggagccaccaacgtcatcaagaaaaagcctccccgaccagggggcgggaaagtgaggcttctcctgtgcgctttccccagcacagctgagaccacactgggctgtaatgacccggtaactgttctctgttccccattcgactgagttttgggagaacagaaaacgtgattctctaattcactgcttcatacccagctcctagcacagggatggaacattggaggaacagagtctacgggctgaaaaaaaaacaaaaaacaaaaacaaaaacaaaaaaaacacggagagtgtattctggactctgggagttcaaaagctataaagtgttgtgcaccgggctgcacttcccgaggagtaggagtattagatacactacggggatacccacgcggctttaaacagtgtccagatgaactttttgtgagtcgtttggcttaagaaaattagaaaaattaaaactgacatgtgaaacctctgattataagactattattatttagagtgaggctaaattatactgtgcaatctaaatagaaaaacaagtcaatagaaatttttaaaaatatattacataggccaggtgtggtggctcatgcctgtaatcccagcactttgggaggctgaggcggatggatcacttgaggtcaggagttcgagaccagcctggccaaaatggtggaaccccgtctctactaaaaatacaaaaacaaaaaaaatcagctaggcttggtggcgcatgcctgtggtcccagctactcgggaggctgaggcaggaaaatcgcttgaacccaggaggctgaggttgcagtgagctgagatcacaccactgcactccatcttgagtgacagagtgagactctgtctcaaaaaaaaaaaaaaatatatatatatatatatgtattaagtgaacaacagtacaattggtatgaaaatatgacaagagttttaaaagccataaaaataatcagtgtatattgggtgctcactatatgctgcccatctcatgtgcgtgagcttgttttattctcataacaacaccttgagacagcccattttaaagatgaggaaactgaggctcagagaggtcagttgtgctcacagacatacaactaggatgtgcatcctgagcccttggacacttgaacccaagcgctcctgctctgcaatttgcctttaaatgaaatgatgtgaggtctttcaagaaatatttactgggcacctaccctgtaccaggttgccaaggatgcagcagtgagctcagctgggttgaggaccaaagacttcctcaggatattttcagaggaatcattagaatatgattggcactgggttctgttcattataccatctatgcttattgtaaagtaatgcagacccaccctgcattaaaaaaaaatacatcaaagcacaggctttaaaaataaaaataaaattctcccttcctacagtccatccccaaggcacgctctgcagggtgaatgattccttgccagccctcttaggtctcatccataaacacataatagagtgctgccttggagggagccccatgattgacttaagcaaggctttgtgatttgattctgggctcaaacacagaagcgttggctgcatatccatcctgctctggaatgccagggggcaaacttcaagtatacagatgaccttcaattagtggaaggattagccttggccaagtgtcagctgaaccacttactgcctcatctctgggagtcttgtggaaagggagctacattcaaaatctctgcctctctcgctcaactattccaacagccccttcccttggctactttaggggtcttctgcagccacccagggtcttctgagtttctctcttctatggcacctgccatttttaattaaattgtccatttacacatttgcttggccccttagagcatgcagaccatgagctctagaggacaggaatgatgtctgattcacctcctcaccgcattgctggacgcattgctgggcatgaagtaagcactcaagatatattttctgaataaatgcatgggtgcccgccagagctatctatggtgtcatccaagatgcaactccagctgcacagtgacctgggaagtctcttcccacaggctgacttctgggctagatttcaagggtgggaaggaaacagttcataactcccagggaagactgctattgaagtataaaggaaaacccttcaacctcaagagtgaagccagattcctacccgtccacccactggaggagatcaaagtcccgattcttcatgtatggtgattactgtgactaaaacatactcatcaattgattcattcatcttttcattggaaaagtgatacatttaaatgcctacaaggccaggcaagtaccacgtgaaagacaatagggagtggcagagactggggctaaagtaaagaatattcctggtctaacagggaaagccattactcaactccagccagtcattgccatgtaacaatgtgaacccagtattgcccaatcttctaatgtttcagaagaatccagaaatctaaattattatttgaaatctcctaatctgtgaaagcttggtaactattgtttcagttgacattactcaagctgagtagagcccaaatgtaagtcatgttcacagagaaaagggttctagctgggacctatactgtactgtgtgccttgaaccacaagtgccgtaggaccagggattatatctgttttattcacctctgtgtcctcagtactatttatgttgttggcacataataattgctcaataaacattatctgagtaaataaaggaatgcttcctgtgaaccaggcattgtactgggtatgagcatatatgagtttaaagcctgggaaagaagtgccagaaaagattctgaagttatgatgatgataagacagagttccaaggacagaattcatgcctttggggagcaatctgggtcttgaaggcatgcttgagattcatcgtgcaaaatgagacgcttcaaacaacacgtttattatctgacagtttctgtgggtcagaaatctgggcatagcttaacatgtacacccatgttcatagcagtattgttcagagtagccaaaaggggaagcgacacaagtgtccatcgatggatgaacgaaaaacaaagtgtgacacctgcctacgatggaatattagccttgaaaaggaagaaaatttttgacacatcttgcaacctagatgaaccttgaggacattatgctaagagaaagaagccagtcacagaaggcaaatactatctgattccacttacatgcgataactagagctgtgaacttcatagagacagaaagtagaatggtggatcccaggggctagggtaagttgtttaacgcatatagagtttaagatttgcaagatgaaaagagttctggacataagttgcccaacaatgtaaaagtacactaacctactggactgtacacttaaaatggttaagatggttagttttatgttatgtagattttactacaatttaaaattttttaaataataaagtttagaatgttttaggatttgtagtcctgtgtgtgaagcaatttgctggctgtccattccatccaggtgctgaaaaaggactagatctcacatgcggcctggaatgggttaaacctgcaggttcaactctccagtaaatactgtgatcctaacaccttgggaggctgtggcaggagaattgcttgagcccaggagtttgagaccagcttgggatgcatggcaagaccctgtctctactttaaaaaaaaaaaaaaaaaaaaagccgagtgtggcgggacacgcctatagtcccagctactcagaaggcttaagcaggggaattgcttgaccctgggaggttaaggctgcagtgagccgtgctgcaccactgcactccagcctgggtgtcttaggctaccgggtactttgtgtctgcagctgaagagagcagtcaccagatggcagtatgggcttatttgtaatagttgaggccttttgttgccaggctcccaggccctgagcttcaggcttgctctgataggctcatctccaatgagggaaacagataactaattcagtacagtacagtgcatgcagtgctggagaaactaagaagactgacgactcaattcacggtaggaggcatcaaggaaggcttcctggagaaggagaaatgaagattgagtattgaaagacaagacgtagtcataatggatgcgcaggttaggtgtcaggtgaaaagcaagaagaagatttcataattaaacaccaccaccgtccatcatttactaagtacgtatgacatgccaaaaacaaaacatcttaagcatttccttacttacctattttagtcctccaaattcctaggagatagatattactttgatcgtcgttatgctaatgaggaaactaaggatcagaaaggttatgccacttgctggcgatcacacagctaacaagtaacagaactcatattttaaccttgattcctcagccaacttcattctaccttgcctgtatgtaatctgtgcccagaggtggaagacagaaagaacagtttgagaaatagaaaacagtctgatgcaaggtggggatgcagagagaggatgctggagaggctgaccaaagctagatcacacgggttctgagcaggactccccaaagatttgcatcatctcatcagagctccttctggcttgcatttcagcggaggagtccctggcatgtgacaacccagggctgcctgaaaatggataccaaatcctgtacaagcgactctacctgccaggagagtccctcaccttcatgtgctacgaaggctttgagctcatgggtgaagtgaccatccgctgcatcctgggacagccatcccactggaacgggcccctgcccgtgtgtaaaggtaaagaaacctactcaccacacagggtccacggggcctggagatgtcaggctcctggctcacaggagttctgaacttgctctaaaaaattggactaggagttcgagaccagccgaggcaacatagtgagacccccatctctaccaaaaaaaaaaaaattagtcaggcatggcggcacacacctgtagtcccagctactcgggaggctgagatgggaggatcacctgagcctaggaggtcaaggttgcagtgagccttgatcatgccactgcactccagcccggacagaacgagactctatctcaaaaaaattaaattaaattttaaaataatagagctgagctgctgtacttcattaaatctaagatgtcaccatgactttatgcaccactaaaaaagaaaaaaacatgctgccaattatactatgacacaatgtcttctcctggcttagcatttttatttttacttactaaaggagcttttgaccaggcacagtagctcacgcctgtaatcccaacactttgggaggctgatgcaggcatatcacttgaggtcaggagttcaagaccagcctgaccaacatggtgaaaccccatctctacttaaaatacaaaaaaattagctgggcgtagcggtgcatgcctgaagtcccagctactcgggaggctgaggcaagagaatcacttgaatccaggaggcagaggttgcagtgagccgaggtggctccactgcactccagcctgggtgacacagcgagattctatctaaaaaatgaaaacataaaggtctttaagctttttatcatatatcacaattatgaaaatgttcaaatgaaaatataagcagcccaggtgcagtggctcacacctgtaatcctagcattttgggaagctgaggtgggaggattgcttgagccggggagtttgagaccagcctgggtaacatggtgaaactgtctctacaaaaacaaaataatgataataatacaaaaattaacctgatgtggtgacgtgtgcctgtagtcccagctacttgggaggctaaggtgggaggatcacttgatcccaggagacagaggttgcaatgagctatgatcatgctactgcactccagcctgggtgacagagtgagactctgtctcaaacaaacaaacaaacaaacaaacaaaatacaagcaaaataaactggttccagtgtatttaaaacttccccaccttcaaagtctggcacttttgattttctaaattattactaaatttttttgtagagacagggtcttgctatgttggccaggctggcctagaactcctgacctcaagcgatcctccctcctctgcctctgagtagctgggattgcaggtatgagccaccacacccagctgtagaatcattttttactccaagtcttcaacatcctatttttccactcaatatcgctcctgttgaatgtcattgtgtactaaaatatatatacatttacatacatacatagctcctgtcccattaaagcatcagggatgcagaattctgtaggaacgtccataacgaactaaagtctttgatacaaggggcttgcagttacattgaggcagggctgggacgagtctgaggcaaaagaggtgcctgaggtgaaaaatgtaaggaggtgaccaagcgtcccgtagaacagccttaaaaaaagagtctccgtacacttctcgccctagacagctctcgccttgccctagtcccggccctgtgatccagcctggtttttgttgatttgtttgtttgtttttgtttgtttgtttgtttggagacagggtcttactctgttgcacaggctggaatgcagtggcgtgatcattactcactgcagcctcaaccacctgggctcaagctatcctcctacctcagcctcgcgagtggctgggaccacaagtgcacgccaccacgcccagctaaatttttttatttttgtagagatgggggtctcgctatgttgcccaggctggtctctactcctggcctcaaacgatcctcccacctcggcctcccaaagtgctgggattaccgcatctgacctctgcctgcttttgacccctgcttagagaaccctgcttaattatttcccacctcttgcactgcctcctcacaaccagttagttcccatgggttaggagtgttcctccactgcctacagggtgatctcccagggcgttacctggcgttctgcaaaccctaatactcttaacgcccccagtttgtgcacacggggaatcgtgagcgccacctggtggcagctattattacacattattgctttaagcctcgcccccacctcccagatggtgaagtgagaaaattgcatcttagaatccattgaacactcatcactaaaattaagttgtaacacactaagtaaaatttggattcgtttatctggacttttgaagtgcacaatcagtaatagtaacggaaatatgttcagtgttttaggccagtggatcttaacctttattgctttagtgcccctttgagaatcaggcaaaaggctcgaatttgccctccagaaggaacagaagcatgaagttttatgtctctacttgggaacccctaacttcagtggatccccaaatgccttattcatgaaccccagctctgaggcttaaaactactttcccagttagtttgtccactccgaggtatatttccaaaagaagtgaaacaggtatttaagcaaaccctgtctaagaatgtttataggagcactattcacaatagccacgagatggaaacaacccaaatgcccaccaactgatgaatggataaacaaaagtgtggcagaaaaaagggaatattattcagccattaaaaggaacgaaatactgacacataccacaacatggatgaacctcaaagccgttatgctgagtgaaggaagccagacacaaaaggtcacatgttttagggttctgtttctaggaaacatctagaataggtaaatccatagagacagaaagcagagtcgtggttgtctagggactgcttactgagtatggggcttgttttggagatgaagaacatgttttggaactaggcagaggtcatggttgcgcaccattgtgaatatgctgaatgccactgaattgtaacactttgaaatggttaattttatgttatgtgaattttatctacctaaaaaaaaaaacaattcccctgaatcacctctgttaagtcttatgaccactgtctaagataggtgagccatcttacctgttttacagatgtggaaggagaagctcagagaagttaagtgattttcccaaagccacacagctagtacaagacaaagctaggacttgaacccgcatctcatgactgtaaatttcccgccttcagggctactaagaaagacccccaaccagccagtcaccgcagcatggaaacctaggtgtgttcacacattcccgaatctaacccagatctcccaaagcaaaatcattgagaggcgggcctggaataagccttttaacaagctctcaaatgcactttgaatgtgagaaccatttaaggccgtgatttccaaacataaacggagtcctgagccctttccacggagattctgattcactgggtctaaagcaggacccagggaccagtttaactaaccacacaggtgaattgtatcatcagccaagtatgggaaacactagcatgagggttgcaatttaatcttaccaggtatcaagcaggggctcatcacgtgaatgacaatgacttatataagcagttcttttgtttttttttttgagacagattctcgctctgtcccccaggctggagtgcagtggctggatctcggctcactgcaagctccgcctcccgcattcacgccatttctcctgcctcggcctcccgagtagctgggactacaggcgcccgccaccacacccggctaattttttgtatttttagtagagacgggttttcaccgtgttagccaggatggtctcgatctcctgacctcgtgattcgcccacctctgcctcccaaagtgctgggattacaggcggagtcactgcgcccggccgtaagcagttcctaataagagaacaaggggtccttttgaagagcagcgaacagtaagaaatccacaattagcattcaagacagctgccttccctcattcccccataattttgactaagtccagcccagtgtttgaatttattttatttgtgtatttttaatagagacggagttttgtcattttgcccaagctggtcttgaactcctgggctcaagggatctgtccacctcagcctcccaaagtgctgggattacaggcgtgagccatcatacccgacctgaatttatttttgatagcacaggaaacctgctttgcagagcttaagtattgggaagttcctgagtaaagattgcctgtaaaccctctaactgtcacatggacattaatagaaattaatttgacattgttgatgagttttctgcagggaagaaaaattagcaggatttgttttttaagaaaccttggccggcgcggtggctcacgcctgtaatcccagcactttgggaggccaaggcaggtggatcacgaggtcaggagttcgagaccatcctggctaacacggtgaaacctcgtctctactaaaaatacaaaaaaaatttagccgggtgtggtggcgggcgcctgtagtcccagctactcaggaggctgaggcaggacaatggcgtgaacgtgggaggcggagcttgcggtgagctgagatcgagccactgcactccagcctgggtgacagaacgacactccatctcaaaaaaaagaaagaaaaaaaaccctaaataagaaaaccatgaaaagggccactttggcctggacaacgtgtttgtatctgccacggtagctttttaaattcttcttggattaattgcaaaggtatctcatggaacaagtagaagaaatcagagcttcaaatggaaggagcagttttcctctctcctccatccctttctttcttctccagaagccagtgctaatcacctgaatttccagtgtcacacctttccctagtcttatacacatagacatatttggaaagagagagggatgtttgtttttgttttacagaaaaaaaaaaagaaaagaaaaaaaggctgggtgtggtggcttacacctgtaatcccagcactttgagaggccgaggtgggaagatcacttgagcccaggagttcgagaccagcctaggcaaaatagtgggacctcatttctacaaaaaatcaaaaaattagcggggcatggtgacacactcctgtagtcccaactacttgggaagctgaggcaggagcactgcttgagcccaggaggttgaggctgcagtgagccatgattgcaccattgcactccagcctgggaaacagagcaagaccctgtatcacaaaaaaaaaaaaaaaaaaagggagggaggttcatatcatgctgtattctgtgttttacttattacaaaagtagtgccatgttattttttttatttgccacccgtcattccacactttgcttgttccccagtgcattcagcccttcctctgttgatggagacatcagttctcttccagttttttgtttgttttgttttgccaaaaaaaatcttgcccatgaatccttggatgctggcacttttcatcctgcaggacagattcctcaaagcaggattgatggtgtgggcaaagatctatggatatcgagttgtcctggatgtcaccaaatcgtttcccacaattggagcaatccacgctcaccaacaatgtgtaatatgtccatttctccacctcctcgccagcactgtatgttttcaatttttttttaatgctgccaaactgaaaagaaaataaaactaccatcagaatatacacaaatgtagctgggcatggtggtgtgcacctgtaatcccagctacttggaggctgaagtaggagaatcgcttgaaaccgggaggccgaggttgcagtgggctgagattgcaccactgcactccagtctaggtgacagagcaagactctgtcttaaaaaataataataatatacacaaatgacaaaaaaaggaaaaaaaaaacacgaaaagataaaaagaggctccattttgcaggtgatccctgaaacctctcttttctatgggctagtatctctagaagccccacaaggtcaatcagctcactgccttctcccacaactgtgatggaattgctagcaagaaaggctctcaggagacccctgcacctttcttccctctccatttccactcctgagatccgtcccaccaccaactctgtaaggaaatgagaaatcacttcctcctcagaaaaaaactgggatgcatgacattgtggtatgcaggaggggaagcaactcagtgccaatgtgaggccacctgactgggacttggggaccccgggctccagtccagttctgctgtggaccacctgtgtgaccttgagtgagcccccctccctctctgaccttggtttccctttttgtgaaataactgggggagtccagatcagagtttctgaagaggagccagtgagcccactggatgcatcagaactgctgaggcattggtgagacctgcagaggtccaccgctgagaataccgctctgacaagtcccaggaatggcccaggaatctgcatttaacatgccctgtggggttcatgagcacagggctccaaggaacacatgattcaatgcctcctcccagttctaagattccatggacattcacgcactctcactcaaccacggtgcaactcacatcttggggcaggaccatctgcttcaatctttccattttcttgatgccaaagctgcagagaagtgtgcacttagttagccagctagcttttcagctggttttgtcatcatggtgtgatgatggcgtaaaccagagagtgactttaaccaaggcatggattagggtgtcttgggattggggacatcagtatagctaagcctttggtggccactccctcctatcccctaatgctgcaattttttcatcaaagtccttcatgctggggttttgcattcctgtaataaacatccatccttgttggtatatttttgtgcttagctaccatgatgactgatgacaaagatggggtgccagtccccatgatgttgaacctccggagaagttttacaaaaaacataaatgattaaaaatagtttcacatgggatacaaagcctcatcaatataaaaggaataaaaatgaaattagagaggtttacatagatagtcttcaaaacaggaaaacagttccacctctggctggattttgtatgaaggtctggggcctcgcaattcattcgtgctttgccccacatgaaaatgatgaaaagaccctaaccacataattgagagcagaaaccagagagcttgagcagcccagactgaaatcctgcctccatcactgagaagctgtgtgatgtcagagaagtcacttcacttctctgaacctctgtttgctcatctgtaaaatggggatgataatagcattgacctaacaagattgttatgaggattaactgagcaaatgtatgtagagttcttggcacaattttggacacgcggtgagtgttcagtaattattcactatcactgttgttgatcttgggtcttatctatctcatcttctcttggtaacttaggaagtgaatagtccaggcacgttcactgattatagtggcccaagataagtaaaaacataccactaacttcaccaaagcatggcatgggcttttgcatcaaattttttggcctcatttcatgcaaacgaagtgaattcactttacattgaccaatgcttcctgatttctctttcagttaatcaagacagttttgaacatgctttagaaggtgagttccagaacgaaaaaaaaaaaagttcaataaatcaaactaatagcacaaaacaagggcaggtctttgaatatctttatttagacacttaaaaaataaataaattctaccttcagactgccaaagataatcttaaaataatattgtaggggaaaaaaaattatgggatttgcaagtcaggaccctaacaataacctgaaagggatttgacagctgttctgtacatggtaacagcaatgagataaggaaagctcagagcccataagcctgagaaaggcataaccctattgtaaaacttttcatgatgccattctagaaggggaactaaatctagtgacatgtcaccttccatgctgagagtcctcctggtttccagagggaagagtttgccctggaagcattcaatggtccatttttccctgagtcttttttcccctcagcatacccaccccttctcccatctctccttacttcagctctccttttattagaaattcccaaatgagacttattaatgaggagcagatgttaaaatctatccaggattttatttcagttttgttttcattttgtggttccttccctttccaacccctcccgtgtgtaaaatgtccagcgttctatgtcaccgctattgaatttggtacaaaaccactcaccgggactgtgatgtaaaatatatactgtaatatattactgcatgtatatatatgtaaatacaaatgcagtatattatagcatatatatttaaaaatatatactgtaatatattgtttcttttttttttttaatgtttttaccaaatcaagcagtttttattattcctggagccatctttagctttctgacaataatgagttcacttagaatctggggctatgtaaattacatttcactagtggctgttccttgtaacagacaacacttgaatccaagcaggtggaactagggctcatatataaatgaaggagcatgaattatacactccacttggaaaacagagggcacttcgtgttagtctccattcagagtatcctttttctgccttttgccaaccagtgaaccatgagaacgtctcaaagggctggggttgctcggagcttatgagagccattgtaacgttttgtgctcatgcatttattctgggtattaggattgatttttcagaccccataaagtggtggttaatgggttatagattggtgtacagccaagctctattagatgtgaccgtggagaatggcagaggaaacctggaggccaagtttctagaaggaatgtaggatccccctttaagctatgctgggaaagcagccctctgccccaggcgcctgcagcagctgttatagttcttgcaattgccacagtgggaggttgagagagcagccgggaaatgtgcaggagtagcctctgggaatcaaaacgggccttcatatttggggtgtcattggggtgtgcaggacagagagctgtcagtccccaatgctcagagcccactcgtggactggagagtagaactcaaaaggtctaggacgggcccgtcagtctgcatgcaacaagctcaccagtccacaggtgagcaccaggtctgagaatcccttagaaaccttgcggctgaccaccagcaccgttcaactcaacgacatacacaaacccagattcgcccaccactcctgcatctggggtccagacccattcctgtttctcttctccactccatggaatgtccagcaaatctgctttcccagttactgaatttgggattttctccaagtcttcctgtgaattggactttaatcagattttaactgtagctcccaaaaaatgggaatggtacgatcaggtttcaaacagtgtaattctctatagctcctatggccaacccaccaaaggatgagtctgggaccccttgcaaaggaccaccaccatttcctctagtctttggagatggctctgcaaggtctaaggccctcccagagccttagaccttggaaagccgtctccaaaggggtggagaactgggcagttgggcactcactgggagtcagctacctgggaaatgaggacctcactggctcctgtgttcagtagcagaagcggcagcagagacgtcgctggaaggggggaacatggccctggctatcttcatcccggtcctcatcatctccttactgctgggaggagcctacatttacatcacaaggtagggagctgatgggggagatgactgccaagcacccagccaccagtactcagagggactgggcggttcacctctctgagcctcagggtctccacctggagctcgggcatagtggcatttgtgttattgcagagatgcccagattcagcccaactctgtgggataaatatttacattgggcaattatgaagcctccaagcaagtaagacaaatactattcctgccctcaaggaggttatggtttagtggggcacacagacataacatattgccaggcatgttgatttgttccttccatcactcactcattcactcatttattcaacaaatatgtactgacaatctgttgtatatcagacattgtcccaggtgttgagggtctagaaacttgcatttgatgcagaaggaagatattaaaccatgcaccagaatagccactcattcattcacattcacagttgttgagcacttactaggtgccaggcagttttctcggttccagaaacatcatttgtggaaaaaaaaaaatagaaggaaatatttgccctcctggggttcaggttctaacaaggaaagatagacaataagcaaagtatgtaagaaaatatgtagtgttagaaactgataagtgcaggaagagaaggctgggagggggcaagaattctggaagagaagtggtggttgacttttaaatagtgtagctagaggaggccccactgagaaatgacatttgagcaaggacttgaaagtgatcatgagaaacctatgcagtccaggcgtggtggctcacacctgtaatcccaagactttgggaggccaacgcaggtgaatcacttgaggtcaggagttcgagactagcctggccaacgtggtggaaccccgtctctactaaaaaaataaaaaataaaattagcctgggcatggtggtgggtgcctgtaatcccagctacttgggaagctgaggcaggagaatcacttgaacctgggaggaggaggttgcagtgagccaagatcatgacactgcactccagcctgggcaacaaagcaagactccatttcaaaaacaaaagaaacctatgcaaatatgtgaaaaaggagggtttcatgcagggaaacagcatgtgcaaaggtcctgaggcaggaacgtgactaaaatagatcatccctgcccttatggagcccacagtctactgggggcagggtagagtaaatacacaaataaattataacacactaagataaacacaatgaaggaaataggtaggtgtggtgagtaacagagaaatcacctttaaatagatggtcaggggccaggcatggtggttcatccctataatcccagcactttgggaggccaaggctggaggatcgcgtgagcccaggagtttgagaccagcttgggcaatgggcaatatagtgagagctcgcctcttaaaaaataaaaaaaataaaacacttaaaaagttagccaagtgtggtggtgcacgcaggtaggagaatcacttgagcccaggaggcagaggttgcagtgagctgagatggcaccactgcactacaacccgggtgacagagcaagaccctgtctctaaataaataaataggtggtcaaggaaggctgatctaaggcaatatggcatacagtaggtgctcaataaatgctcatccttgttcttgtttccctttgcattcaagagggacttgaatgaccttccaggagaaaacaaattaagctccgccccctccctagtaaggagagatcacaaggctttggttctcgctgcctgggttgcaagttgagagcaattatgatttctgctttcacctcactaggattctcgcctgcaaaaggctgtttgcacacatcctcgtcgtcattcacagaggtgccgctgctcaggaagtggcaccaactgttcccgttcaatattgtaatgtttctcctagctggggagaagtaacttctctctcctttctttcccccagatgtcgctactattccaacctccgcctgcctctgatgtactcccacccctacagccagatcaccgtggaaaccgagtttgacaaccccatttacgagacaggggtgagttggtctctctcgtctcttcccaattccctccctctttgctctgaattcaccaacaataagacaaaacatttcatttcctattgctcacaagaggcacagccagtggtcctgtcttatccccaccaagagccctaaagagataaatgctgggagaacccagctctctttgcaggtgattggtgctgaggacgagcctaggaggctgattactgtcagcagaacacccacagaaaaaagaggctgcacccaagacccacagagagcagaccaacggtggcctggtggcaacgtgctgcattcccacacatcccactgggctccaccctttattcaatggcagtgtgaaacatccctacacatttgagtatcaggtcctattttaggtgctaggaacatagtcatgaaccccaatagacacagattccaccattaatgagcctaccgtcttgtgaattattattatcaataataatacatgccatctgctgggcactttaaatgcataatctccttgaatccttgcagctctctgcaataggttccacagttatctctaattgattgatgaggacattgaggtccagagagaggaaagaataatttggccaaagtggcacacagccaggatgcacagcctgaagccaggatgcaaattcaacctgacactcttaatcatgatgctatcttgcttccctcgaacctctgacaatccaatgtgcccatgaatattttgattacaacaaataatactttttaaggactatgaaaaaattgaacagggcactaggagaatgtataatggggacacttagagggagttggggaaggcatcattgagaaagtgagagtaaagctgagacatgggaagtgggtagagcttggacaatgggctgaagaagatgccagacagaagggagagcatgtgcaaaggtccagggcacatgcgaggaagcaaaaggctggttatgagtttgcaaaaccaccatccttcaagttcactgtgtaatgatgtgcagccatctcccaacgtttggggggaataaacctgacttgtttcttatcctgctaaccttccttcacctccacttctctgatctcctgtgttagttatccactgatgtgtaacaatattactgcaaacttaggggcctaaattaacaacatacatttattatctcatagtttctataagtcaggaagccaggcacagcttagcctgaccccctgctttatggctcacaggctacaaacaaggcagcaactgggctgcagtctcatctgaggctcaaccagggaaggatccacttccaaactcacatggttgttgacagcattcagttccttgcaggttgttagaatgagggcctcaatttcttgcgggctgtcttctaggggccacccgcagtttcttccatgtgggcctctctatagagcagctcatgacatggcagctggcttcttcagagccagcaacagagagagagtcatcttgcaagacagaagtcacaatcctgtgtcatgcaaacatggaagtgacatcctagcacctgtgtattctcctagttagaatcaagtcacaggctttacccacccttaaaaggaggggaccccacaaaggcatgagccccagaaggtggggatcatggggaccaccttggggcctgcccaccaaaatcccatgtaccatgaagcatagatgtgattgcatatctgtgttggctgaatgggagctggagactttcattaaagcatgtgacagtgtcaacttccagggctgagccttcttctatctccttgctccttgtccctggagcttggaatacattactcacactccataaatattgaagaaatcaaactaccccccatgttgtagtcgtttcacatggcaatggtagatcagggcatatgttattttgcattctatgtagcttgctttgaaatcatgggaaaaggtcagactgaaataaaggagaattttagagactagacatgaatgaatacttattagtagagtgtatcagtgacctagaactatagtaatgctgagtaacaaagatc

SEQ ID NO: 2505 - protein, 787 aa, Homo sapiens
MAQEAPQEDTSPMALMDKGENELTGSASEESQETTTSTIITTTVITTEQAPALCSVSFSNPEGYIDSSDYPLLPLNNFLECTYNVTVYTGYGVELQVKSVNLSDGELLSIRGVDGPTLTVLANQTLLVEGQVIRSPTNTISVYFRTFQDDGLGTFQLHYQAFMLSCNFPRRPDSGDVTVMDLHSGGVAHFHCHLGYELQGAKMLTCINASKPHWSSQEPICSAPCGGAVHNATIGRVLSPSYPENTNGSQFCIWTIEAPEGQKLHLHFERLLLHDKDRMTVHSGQTNKSALLYDSLQTESVPFEGLLSEGNTIRIEFTSDQARAASTFNIRFEAFEKGHCYEPYIQNGNFTTSDPTYNIGTIVEFTCDPGHSLEQGPAIIECINVRDPYWNDTEPLCRAMCGGELSAVAGVVLSPNWPEPYVEGEDCIWKIHVGEEKRIFLDIQFLNLSNSDILTIYDGDEVMPHILGQYLGNSGPQKLYSSTPDLTIQFHSDPAGLIFGKGQGFIMNYIEVSRNDSCSDLPEIQNGWKTTSHTELVRGARITYQCDPGYDIVGSDTLTCQWDLSWSSDPPFCEKIMYCTDPGEVDHSTRLISDPVLLVGTTIQYTCNPGFVLEGSSLLTCYSRETGTPIWTSRLPHCVSEESLACDNPGLPENGYQILYKRLYLPGESLTFMCYEGFELMGEVTIRCILGQPSHWNGPLPVCKVNQDSFEHALEAEAAAETSLEGGNMALAIFIPVLIISLLLGGAYIYITRCRYYSNLRLPLMYSHPYSQITVETEFDNPIYETG

SEQ ID NO: 2506 - DNA, 474 bp, Homo sapiens
  misc_feature (380)..(380): n is a, c, g, or t
gtaattataaacacaatttataattttatttagcagctttgattttatatatatagtttcttgattcctaatattaacaaaattgcatgttatttatcctccaaaatgtatataatagattcagagtaacaatattaacatatattattattctatattaatactatttgtaaattaattttatttttaattttttatttatttttaatttagtttcatactttagggcatatccactaaaaatgcatagacaagtgactgtgttttaaaaatacttgaagtaattctcctctgtgtgtttaggacaccaacacaattagtttcatttatttcatttagcttttgctttggatatatagttacgcacctcataacattgnttcagtcaataatggaccacaatgaaccacgtatgcaccagtggttccataaggttgtaatggagctggacaatttctatcacctagtgacact

SEQ ID NO: 2507 - DNA, 1944 bp, Homo sapiens
gcagagcgggcggcggcggcggcggcagcggaggcggcggctccagccggcgcggcgcgaggctcggcggtgggatccggcgggcggtgctagctccgcgctccctgcctcgctcgctgccgggggcggtcggaaggcgcggcgcgaagcccgggtggcccgagggcgcgatggctgctcctgtcccgtgggcctgctgtgctgtgcttgccgccgccgccgcagttgtctacgcccagagacacagtccacaggaggcaccccatgtgcagtacgagcgcctgggctctgacgtgacactgccatgtgggacagcaaactgggatgctgcggtgacgtggcgggtaaatgggacagacctggcccctgacctgctcaacggctctcagctggtgctccatggcctggaactgggccacagtggcctctacgcctgcttccaccgtgactcctggcacctgcgccaccaagtcctgctgcatgtgggcttgccgccgcgggagcctgtgctcagctgccgctccaacacttaccccaagggcttctactgcagctggcatctgcccacccccacctacattcccaacaccttcaatgtgactgtgctgcatggctccaaaattatggtctgtgagaaggacccagccctcaagaaccgctgccacattcgctacatgcacctgttctccaccatcaagtacaaggtctccataagtgtcagcaatgccctgggccacaatgccacagctatcacctttgacgagttcaccattgtgaagcctgatcctccagaaaatgtggtagcccggccagtgcccagcaaccctcgccggctggaggtgacgtggcagaccccctcgacctggcctgaccctgagtcttttcctctcaagttctttctgcgctaccgacccctcatcctggaccagtggcagcatgtggagctgtccgacggcacagcacacaccatcacagatgcctacgccgggaaggagtacattatccaggtggcagccaaggacaatgagattgggacatggagtgactggagcgtagccgcccacgctacgccctggactgaggaaccgcgacacctcaccacggaggcccaggctgcggagaccacgaccagcaccaccagctccctggcacccccacctaccacgaagatctgtgaccctggggagctgggcagcggcgggggaccctcggcacccttcttggtcagcgtccccatcactctggccctggctgccgctgccgccactgccagcagtctcttgatctgagcccggcaccccatgaggacatgcagagcacctgcagaggagcaggaggccggagctgagcctgcagaccccggtttctattttgcacacgggcaggaggaccttttgcattctcttcagacacaatttgtggagaccccggcgggcccgggcctgccgccccccagccctgccgcaccaagctggccctccttcctccctcaggggaggtgggccatgcagctaacccacccaccaaagaccccctcaccctggccccttgggctggaccctccaatgccagcgactcccaggagcccttgggggacgtgaggggagcctctcacatccgatttctcctcctgccccagcctcctgtctatcccagggtctctgttgccaccatcagattataagctcctgatgctgggggggcccagccatccccctccccccagcacccacaattttcagtcccctcccctctgccctgttttgtatacccctcccctgaccctgctcctatcccacagtatttaatgccctgtcagtcccttctagtctgactcaatggtaacttgctgtatttgaattttttatagatgtatatacagggtggggggagtgggcggttctcattaaacgtcaccatttcatgaaaaaaaaaaaaaaaaaa

SEQ ID NO: 2508 - protein, 372 aa, Homo sapiens
MAAPVPWACCAVLAAAAAVVYAQRHSPQEAPHVQYERLGSDVTLPCGTANWDAAVTWRVNGTDLAPDLLNGSQLVLHGLELGHSGLYACFHRDSWHLRHQVLLHVGLPPREPVLSCRSNTYPKGFYCSWHLPTPTYIPNTFNVTVLHGSKIMVCEKDPALKNRCHIRYMHLFSTIKYKVSISVSNALGHNATAITFDEFTIVKPDPPENVVARPVPSNPRRLEVTWQTPSTWPDPESFPLKFFLRYRPLILDQWQHVELSDGTAHTITDAYAGKEYIIQVAAKDNEIGTWSDWSVAAHATPWTEEPRHLTTEAQAAETTTSTTSSLAPPPTTKICDPGELGSGGGPSAPFLVSVPITLALAAAAATASSLLI

SEQ ID NO: 2509 - DNA, 386 bp, Homo sapiens
tttaactcctgttttttaaatcattcattgaaaaaacatttatttctctttaactgacattttgttgcagtcatgggaagaatagacattatgtgtgttccatgaactataacttattctctttgatgtacttcatttttttttctatctagaacatgggttggcaaactttttctataaagggcctgataataaatatttcaggctttgagggtcacatggtctctgtagcacctactcaattctgccattatagtacagaagctgccacagacaatacgtcaacaaataagagtggctgtgtgccaataaaactttatttccaaaaacagatgttgggctggacttggcccacgagctgtactttgctgactccactatagagg

SEQ ID NO: 2510 - DNA, 824 bp, Homo sapiens
ccccgggcataactcagtcaagctcagtgagcattctcagcacattgcctcaacagcttcaaggtgagccagctcaagactttgctctccaccaggcagaagatgacagactgtgaatttggatatatttacaggctggctcaggactatctgcagtgcgtcctacagataccacaacctggatcaggtccaagcaaaacgtccagagtgctacaaaatgttgcgttctcagtccaaaaagaagtggaaaagaatctgaagtcatgcttggacaatgttaatgttgtgtccgtagacactgccagaacactattcacccaagtgatggaaaaggagtttgaagacggcatcattaactggggaagaattgtaaccatatttgcatttgaaggtattctcatcaagaaacttctacgacagcacattgccccggatgtggatacctataaggagatttcatattttgttgcggagttcataatgaataacacaggagaatggataaggcaaaacggaggctgggaaaatggctttgtaaagaagtttgaacctaaatctggctggatgacttttctagaagttacaggaaagatctgtgaaatgctatctctcctgaagcaatactgttgaccagaaaggacactccatattgtgaaaccggcctaatttttctgactgatatggaaacgattgccaacacatacttctacttttaaataaacaactttgatgatgtaacttgaccttccagagttatggaaattttgtccccatgtaatgaataaattgtatgtatttttctctaaaaaaaaaaaaaaaaaaaa

SEQ ID NO: 2511 - protein, 175 aa, Homo sapiens [sequence omitted]

SEQ ID NO: 2512 - DNA, 404 bp, Homo sapiens
tttcagaattaccttgagttccaagagattctgggatggtggtttgaaattttccatctctttggttccccctttagtttctcccttgttgaaccagagcagttatgggattattctgtcctgccaatactgaagcagaggttgacgtggtaccaaaaaaaagttgtgtagttgcctgcttctttgtagatgaattccatccactggtgtcaactcttacaattaaactttactgatggttctttttcctttcttagttttttcttattgcagtcataactcttttcttataatttccccttacatttttccactttttttggggcatttctcttcatagggactagataagccctcacatttggagatttacattgggataattaattttttcacctaagaca

SEQ ID NO: 2513 - DNA, 488 bp, Homo sapiens
tttttttttttttttttccattcacaaaggtttattgggtccctgcctggtgctggtttgggttagtcactgtagaggatccatctgggccagcctgggaggggcaggtctggagtccgaggcagacacgaaaccgggggtgacacccaggggctgtggaggctgccatgctgaggacagctctgggaggaccgctgaagaggatgactagcgggtggggagtggggttcagccatctcccgggagctgggagggcccaggtggaggtgagggcagcagaggaggaggaggaatgggggtctccaggtagaaaaagggagcagggaatagcatgagtggaagcccagaggaaggaaagtacccggagggtctctgtgcttcaagaggccagtggaggggacagagacaaacggccagtggtgaagcagggctgacaccctggcagcaaggacactgaggcacacacctgccattcaccagcactctcc

SEQ ID NO: 2514 - DNA, 489 bp, Homo sapiens
ttttcttaaattcaaatttattatggttcttaagaaaatatgtgattaggcacccaagatctttccaaaatgtcataaaaacattttaaaattattcatttgaaagtgttatccaatgttgtatacactttagttttcaatataaaaaggtaacaacatgaacgatattatgatttcatgtattcatgcaaggtgaagaggaaatgatgctgaatcagactcccaaacccaaacatctgagtaactgagtcaaatattttaaagccgatttatgtatgcctgtgtgtatatgtgtacacttattattttaactaccatatgattatccaaaaactgatctgaaagtgagaaaaaaagtgggatagctgatcgttgtcccaactcttcaaattcaacaatttcatcatttcttctctattacaacaccatgctacattaaacatccttcaagtacagaatcagtactaccatttctttcttttctttttt

SEQ ID NO: 2515 - DNA, 3682 bp, Homo sapiens
cgagacggaagcgggctgggaggcgtcggcggcggcagcgcacgtggtgacgtgcgagggggtgcggcgcgagcggtcggcggcggcggaggcagtgtctcccggtcgcgcgtggaggtcggtcgctcagagctgctgggcgcagtttctccgcctgctgcttcggcgcggctgtatcggcgagcgagcgagttcccgcgagttctcggtggcgctcccccttcctttcagtctccacggactggcccctcgtccttctacttgaccgctcccgtcttccgccgccttctggcgctttccgttgggccgattcccgcccgcttcctcctgcttcccatcgaagctctagaaatgaatgtttccatctcttcagagatgaaccagattatgatgcatcattatcacagaagaaattcgtgtctatagcttttaaggacttgattacatcattttcaagcctgatagttttggaatcaccattagagcttaagacacacctgccttcatttcaaccacctgtcttcataccctgacgaagtgcaccttttaacactcctttgtccttggattacttaagagttcccagaaatacatttgccaccaacagagtagccaaatttataaggaaaaatgattcccaatggatatttgatgtttgaggatgaaaattttattgagtcttctgttgccaaattaaatgccctgaggaaaagtggccagttctgtgatgttcgacttcaggtctgtggccatgaaatgttagcacacagagcagtgctagcttgctgcagtccctatttatttgaaatctttaatagtgatagtgatcctcatggaatttctcacgttaaatttgatgatctcaatccagaagctgttgaagtcttgttgaattatgcctacactgctcagttgaaagcagataaggaattggtaaaagatgtttattctgcagcaaaaaagctgaagatggatcgagtaaagcaggtttgtggtgattatttactgtctagaatggatgttaccagctgcatctcttaccgaaattttgcaagttgtatgggagactcccgtttgttgaataaggttgatgcttatattcaggagcatttgttacaaatttctgaagaggaggagtttcttaagcttccaaggctaaagttggaggtaatgcttgaagataatgtttgcttgcccagcaatggcaaattatatacaaaggtaatcaactgggtgcagcgtagcatctgggagaatggagacagtctggaagagctgatggaagaggttcaaaccttgtactactcagctgatcacaagctgcttgatgggaacctactagatggacaggctgaggtgtttggcagtgatgatgaccacattcagtttgtgcagaaaaagccaccacgtgagaatggccataagcagataagtagcagttcaactggatgtctctcttctccaaatgctacagtacaaagccctaagcatgagtggaaaatcgttgcttcagaaaagacttcaaataacacttacttgtgcctggctgtgctggatggtatattctgtgtcatttttcttcatgggagaaacagcccacagagctcaccaacaagtactccaaaactaagtaagagtttaagctttgagatgcaacaagatgagctaatcgaaaagcccatgtctcctatgcagtacgcacgatctggtctgggaacagcagagatgaatggcaaactcatagctgcaggtggctataacagagaggaatgtcttcgaacagtcgaatgctataatccacatacagatcactggtcctttcttgctcccatgagaacaccaagagcccgatttcaaatggctgtactcatgggccagctctatgtggtaggtggatcaaatggccactcagatgacctgagttgtggagagatgtatgattcaaacatagatgactggattcctgttccagaattgagaactaaccgttgtaatgcaggagtgtgtgctctgaatggaaagttatacatcgttggtggctctgatccatatggtcaaaaaggactgaaaaattgtgatgtatttgatcctgtaacaaagttgtggacaagctgtgcccctcttaacattcggagacaccagtctgcagtctgtgagcttggtggttatttgtacataatcggaggtgcagaatcttggaattgtctgaacacagtagaacgatacaatcctgaaaataatacctggactttaattgcacccatgaatgtggctaggcgaggagctggagtggctgttcttaatggaaaactgtttgtatgtggtggctttgatggttctcatgccatcagttgtgtggaaatgtatgatccaactagaaatgaatggaagatgatgggaaatatgacttcaccaaggagcaatgctgggattgcaactgtagggaacaccatttatgcagtgggaggattcgatggcaatgaatttctgaatacggtggaagtctataaccttgagtcaaatgaatggagcccctatacaaagattttccagttttaacaaatttaagaccctctcaaactaacaggcttagtgatgtaattatggttagtagaggtacacttgtgaataaagagggtgggtgggtatagatgttgctaacagcaacacaaagcttttgcatattgcatactattaaacatgctgtacatactttttgggtttatttggaaaggaatgcaaagatgaaggtctgttttgtgtacttttaagactttggttattttactttttggaaaagaataaaccaagaattgattgggcacatcatttcaagaagtcccctctcctccacatttgttttgccaatttgcacattaaatgactcttccctcaaatgtgtactatggggtaaaaggggtagggtttaaagatgtagacagttgggttttttaagggccctttttcaataactggaacactctataacaaaggatacttatttaaatagatgacattgactatttttgtttttattaaaaggaagcttacatgcctaccaatatttaatcttttatgattgcctttttataactttttatattctcagcagagtgctttaccaattgaagtaaaatgtggcaggctggagttattgaagcagagtggcagtcttcagtttgcagagtaggggtctgtcttttaaactctgagtgcaaacttcagagttcttgccttggctgcagtttttttccttcaagaatgcagtactaacatttatttgagtggagttactgaacagtaacatagctgtgatttttggtatttgaaacactggttttaaatattttgacttgttgagggtatgttttatatagcaagacattatatagcagtaaaaaatggtgttttatcttctatataattcctgtttttattattaacaaaacagtcctaaatagcagccctcaattgtgaaaaaatttactttaaactacattaggttgtgaatgcaggttttatcagaactatgtttttgttcagtttatctgttcatatggataaatattggttgggatgacttggtgtctaatgtgtagtgctacacacctaacttatggggccaaaatagcatgtcctaatgcttgctgctgatttaaacacattaaaggtactttgcagg

SEQ ID NO: 2516 - protein, 642 aa, Homo sapiens
MIPNGYLMFEDENFIESSVAKLNALRKSGQFCDVRLQVCGHEMLAHRAVLACCSPYLFEIFNSDSDPHGISHVKFDDLNPEAVEVLLNYAYTAQLKADKELVKDVYSAAKKLKMDRVKQVCGDYLLSRMDVTSCISYRNFASCMGDSRLLNKVDAYIQEHLLQISEEEEFLKLPRLKLEVMLEDNVCLPSNGKLYTKVINWVQRSIWENGDSLEELMEEVQTLYYSADHKLLDGNLLDGQAEVFGSDDDHIQFVQKKPPRENGHKQISSSSTGCLSSPNATVQSPKHEWKIVASEKTSNNTYLCLAVLDGIFCVIFLHGRNSPQSSPTSTPKLSKSLSFEMQQDELIEKPMSPMQYARSGLGTAEMNGKLIAAGGYNREECLRTVECYNPHTDHWSFLAPMRTPRARFQMAVLMGQLYVVGGSNGHSDDLSCGEMYDSNIDDWIPVPELRTNRCNAGVCALNGKLYIVGGSDPYGQKGLKNCDVFDPVTKLWTSCAPLNIRRHQSAVCELGGYLYIIGGAESWNCLNTVERYNPENNTWTLIAPMNVARRGAGVAVLNGKLFVCGGFDGSHAISCVEMYDPTRNEWKMMGNMTSPRSNAGIATVGNTIYAVGGFDGNEFLNTVEVYNLESNEWSPYTKIFQF

SEQ ID NO: 2517 - DNA, 303 bp, Homo sapiens
  misc_feature (143)..(144): n is a, c, g, or t
  misc_feature (151)..(151): n is a, c, g, or t
  misc_feature (165)..(165): n is a, c, g, or t
catttcggaaggagcagtaccccagataatcttttattcaacaaatataaattggcattttattcaattacaaaagattgctagtgtagttggaaacctttacaataaatgtttggggactctcaaagccagtgagggtatgnnctatcanttacaacatcagantatatactctattttagcttgataagatttatatgctgaaatgtaaacactcctggatttaaaaaatgtatatatgattgatagatttcttggctctgatagcattagaggatttgttttattttgttttgactgtag

SEQ ID NO: 2518 - DNA, 335 bp, Homo sapiens
tttttttttttttttatttatattctccctttattaaataagaggtagcatactctattaactattctacaccttgtttttttcacttaacaatatatcctaaagatcattttatgaaagtatacaaatttcctacccctgttggagctgcttagtattccacggggtgaatgcactgtagtaggttcaaccactcctgagttggtggacatctgagtcgtttccagtctttaactattataggcaatgcttcggtgaacatgtcttttcatgtttgtgccattgtatctttagttttgtatcagttagcttttgctatgtatagcacactgcct

SEQ ID NO: 2519 - DNA, 3531 bp, Homo sapiens
ggggctccgaggagcaggcgggggcgccggggcttttgctgagttggcggggttggccatggccgctgcccgcccagcgcgggggccggagctcccgctcctggggctgctgctgctgctgctgctgggggacccgggccggggggcggcctcgagcgggaacgcgaccgggcctgggcctcggagcgcgggcgggagcgcgaggaggagcgcggcggtgactggccctccgccgccgctgagccactgcggccgggctgccccctgcgagccgctgcgctacaacgtgtgcctgggctcggtgctgccctacggggccacctccacactgctggccggagactcggactcccaggaggaagcgcacggcaagctcgtgctctggtcgggcctccggaatgccccccgctgctgggcagtgatccagcccctgctgtgtgccgtatacatgcccaagtgtgagaatgaccgggtggagctgcccagccgtaccctctgccaggccacccgaggcccctgtgccatcgtggagagggagcggggctggcctgacttcctgcgctgcactcctgaccgcttccctgaaggctgcacgaatgaggtgcagaacatcaagttcaacagttcaggccagtgcgaagtgcccttggttcggacagacaaccccaagagctggtacgaggacgtggagggctgcggcatccagtgccagaacccgctcttcacagaggctgagcaccaggacatgcacagctacatcgcggccttcggggccgtcacgggcctctgcacgctcttcaccctggccacattcgtggctgactggcggaactcgaatcgctaccctgctgttattctcttctacgtcaatgcgtgcttctttgtgggcagcattggctggctggcccagttcatggatggtgcccgccgagagatcgtctgccgtgcagatggcaccatgaggcttggggagcccacctccaatgagactctgtcctgcgtcatcatctttgtcatcgtgtactacgccctgatggctggtgtggtttggtttgtggtcctcacctatgcctggcacacttccttcaaagccctgggcaccacctaccagcctctctcgggcaagacctcctacttccacctgctcacctggtcactcccctttgtcctcactgtggcaatccttgctgtggcgcaggtggatggggactctgtgagtggcatttgttttgtgggctacaagaactaccgataccgtgcgggcttcgtgctggccccaatcggcctggtgctcatcgtgggaggctacttcctcatccgaggagtcatgactctgttctccatcaagagcaaccaccccgggctgctgagtgagaaggctgccagcaagatcaacgagaccatgctgcgcctgggcatttttggcttcctggcctttggctttgtgctcattaccttcagctgccacttctacgacttcttcaaccaggctgagtgggagcgcagcttccgggactatgtgctatgtcaggccaatgtgaccatcgggctgcccaccaagcagcccatccctgactgtgagatcaagaatcgcccgagccttctggtggagaagatcaacctgtttgccatgtttggaactggcatcgccatgagcacctgggtctggaccaaggccacgctgctcatctggaggcgtacctggtgcaggttgactgggcagagtgacgatgagccaaagcggatcaagaagagcaagatgattgccaaggccttctctaagcggcacgagctcctgcagaacccaggccaggagctgtccttcagcatgcacactgtgtcccacgacgggcccgtggcgggcttggcctttgacctcaatgagccctcagctgatgtctcctctgcctgggcccagcatgtcaccaagatggtggctcggagaggagccatactgccccaggatatttctgtcacccctgtggcaactccagtgcccccagaggaacaagccaacctgtggctggttgaggcagagatctccccagagctgcagaagcgcctgggccggaagaagaagaggaggaagaggaagaaggaggtgtgcccgctggcgccgccccctgagcttcacccccctgcccctgcccccagtaccattcctcgactgcctcagctgccccggcagaaatgcctggtggctgcaggtgcctggggagctggggactcttgccgacagggagcgtggaccctggtctccaacccattctgcccagagcccagtccccctcaggatccatttctgcccagtgcaccggcccccgtggcatgggctcatggccgccgacagggcctggggcctattcactcccgcaccaacctgatggacacagaactcatggatgcagactcggacttctgagcctgcagagcaggacctgggacaggaaagagaggaaccaataccttcaaggctcttcttcctcaccgagcatgcttccctaggatcccgtcttccagagaacctgtgggctgactgccctccgaagagagttctggatgtctggctcaaagcagcaggactgtgggaaagagcctaacatctccatggggaggcctcaccccagggacagggccctggagctcagggtccttgtttctgccctgccagctgcagcctggttggcagcatctgctccatcggggcagggggtatgcagagcttgtggtggggcaggaacggtggaggcagaggtgacagttcccagagtgggctttggtggccagggaggcagcctagcctatgtctggcagatgagggctggctgccgttttctgggctgatgggtgccctttcctggcagtctcagtccaaaagtgttgactgtgtcattagtcctttgtctaagtagggccagggcaccgtattcctctcccaggtgtttgtggggctggaaggacctgctcccacaggggccatgtcctctcttaataggtggcactaccccaaacccatcttttgttctcctatatcctccttctcctgttccatttcagttcagtttcagcggtgccaacctctttgcgtttcctttttgttgatgaggacccagagctgctgcacacactcacctctaaccccctcccctcgctgctgggccccatctccacaggagagactggttcggctctagggcctcagtctggagtgggataggagcagtgagtgacaaagcctctgaaagatgcatcatctcttcctcacacccatttagtgggggatgggtcctctagacttgaggggctaccctgggaagctgccgtagcttcagccaggcaagaaagcttccttcaacctgcatagccggtgggtgaggagattcccaccttccatagcctccaaacatgttcccaaggccccactttcaagaatcagacagcaggaagccatagatgctggctgggttccaggttatggggagaagaaatacagtcaataaaaggtttttgtataaaaaaaaaaaaaaaaaa

SEQ ID NO: 2520 - protein, 787 aa, Homo sapiens
MAAARPARGPELPLLGLLLLLLLGDPGRGAASSGNATGPGPRSAGGSARRSAAVTGPPPPLSHCGRAAPCEPLRYNVCLGSVLPYGATSTLLAGDSDSQEEAHGKLVLWSGLRNAPRCWAVIQPLLCAVYMPKCENDRVELPSRTLCQATRGPCAIVERERGWPDFLRCTPDRFPEGCTNEVQNIKFNSSGQCEVPLVRTDNPKSWYEDVEGCGIQCQNPLFTEAEHQDMHSYIAAFGAVTGLCTLFTLATFVADWRNSNRYPAVILFYVNACFFVGSIGWLAQFMDGARREIVCRADGTMRLGEPTSNETLSCVIIFVIVYYALMAGVVWFVVLTYAWHTSFKALGTTYQPLSGKTSYFHLLTWSLPFVLTVAILAVAQVDGDSVSGICFVGYKNYRYRAGFVLAPIGLVLIVGGYFLIRGVMTLFSIKSNHPGLLSEKAASKINETMLRLGIFGFLAFGFVLITFSCHFYDFFNQAEWERSFRDYVLCQANVTIGLPTKQPIPDCEIKNRPSLLVEKINLFAMFGTGIAMSTWVWTKATLLIWRRTWCRLTGQSDDEPKRIKKSKMIAKAFSKRHELLQNPGQELSFSMHTVSHDGPVAGLAFDLNEPSADVSSAWAQHVTKMVARRGAILPQDISVTPVATPVPPEEQANLWLVEAEISPELQKRLGRKKKRRKRKKEVCPLAPPPELHPPAPAPSTIPRLPQLPRQKCLVAAGAWGAGDSCRQGAWTLVSNPFCPEPSPPQDPFLPSAPAPVAWAHGRRQGLGPIHSRTNLMDTELMDADSDF

SEQ ID NO: 2521 - DNA, 489 bp, Homo sapiens
tttctggagagaaactgcttatgaccaaaattgttcattggttattgcttaatttagaataatactaaaagtacttctgggaaccttctgtattaaaaaaagtatatttctcactactctctgtctatggctgattttaatattgttagaactctgtttctccaattgttacagaggagtgagagagagaacatttataccaaagggttatatttaatcgtccttcatactctgaaagtccaagattattcaaaatgtggtgcaacagataagagcatcgactagaaacaccattaacacaggttcagatccagacatcaacacttactagcactggaacttggggaaaattaaacactcttagcctcccatctgtaccatgagataatcatcaactttcatggttatttagaggattgagatgagatatatgaagcactctgcataggacctgaacaagtccatcaatcactggccatggataatgct

SEQ ID NO: 2522 - DNA, 3970 bp, Homo sapiens
acgatggcagcgtcagtggcagctgcagcccggaggctgcggcgggccattcgaaggtcgcccgcatggcggggcctcagccatcggccgctctcatcggagccccctgcagccaaggcctcggccgtgagggccgcctttctgaacttctttcgggaccgccatggccaccggctggtgccctccgcttccgtgcggccccgcggcgaccccagtttgctttttgtcaatgcgggcatgaaccagttcaagccaatctttctgggcaccgtggatccacgaagcgagatggcaggcttccgacgtgtggccaacagccagaaatgtgtgagagctggaggacaccataacgacctggaagatgtgggtcgagacctttcccatcataccttctttgaaatgcttggcaattgggcctttgggggtgaatattttaaggaggaggcttgtaacatggcctgggaactgctgactcaggtctatgggatccctgaggaaaggctctggatctcctactttgatggtgaccccaaggcagggctggacccagacctggagaccagggacatctggctgagcttaggggtgcctgctagccgtgtgctttcctttggaccacaagagaacttctgggagatgggggatactggcccttgtgggccctgtactgagatccactacgaccttgctggtggggtgggagccccccagctggtagagctttggaacctggtcttcatgcaacacaacagagaggcagatggaagcctgcagcccctgccccagcggcatgtggacacaggaatgggcctggaaaggctggtggctgtgctgcaaggcaaacactccacctatgacactgacctcttttccccgctgctcaacgccatacagcagggctgcagggcacccccttacttgggccgagtaggggtggcagacgaggggcgcacagacacagcgtaccgcgtggtggctgaccacatccgcacactcagtgtctgcatctctgatggcgtcttccctgggatgtcaggtcccccgctggttcttcgtcggatcctgcgtcgagctgtgcgtttctccatggagatcttaaaggcaccacctggcttcctaggcagcctggtacctgtagtggtggagacactgggagatgcttatccagaactgcaaaggaactcagcccagatcgccaacctggtgtcagaggacgaggcagccttcctggcctccctggagcggggtaggcggatcattgatcggactctgaggaccctggggccttcagatatgttccctgctgaagtggcctggtccttgtcactgtgtggagacctgggactccccttggacatggtagagctgatgctggaggagaaaggggtccagctagactccgctggactggagcggttggcccaagaggaggcccagcaccgggcacggcaggctgagccagttcagaagcagggattgtggcttgatgtccatgcgcttggggagctgcagcgccaaggagtgcccccaactgacgacagccccaagtacaactactccctgcgacccagcggaagttatgagttcggcacctgtgaggcccaggtgttgcaactgtatacagaggacgggacagcagtggcctccgtggggaaaggccagcgctgtggcctcctcttggacaggaccaacttctacgcagaacaggggggccaggcttcagaccgtggctacctggtgcgggcagggcaagaggacgtgctgttcccagtagcccgggcccaggtctgtggaggtttcatcctgcatgaggcagtagcccctgagtgcctgcggttaggggaccaggtgcagctgcatgtggatgaggcctggcgtctaggctgcatggcgaagcatacggccacccacctgctgaactgggcactgaggcagaccctgggccctggcacagagcagcagggctcccatctcaatcctgagcagctgcgcttggatgtgaccacccagaccccattgaccccagagcagctccgggcagtggagaacactgtgcaggaggccgtggggcaggatgaggctgtgtacatggaggaggtgcccctggcgctcactgcccaggtccctggcctgcgctctctggatgaggtttacccagaccctgtgcgggtggtatcagtgggggtgcccgtggcccatgcattggacccagcctcccaagccgcactgcagacctctgtggagctatgctgtgggacgcacctgttacgtactggggctgtaggggacctggttatcatcggggaccgccagctttccaagggcactacccgcctgctggccgtcactggggagcaggcccagcaggcccgagagctaggccagagcctggcccaggaagtgaaagcggccactgagcggctgagtctggggagccgggatgtggcggaggcactgaggctgtccaaggacataggacgactcattgaagctgtggaaactgctgtgatgccccagtggcagcggcgggagctgctggccacagtgaagatgctgcagcggcgtgccaacactgccatccgtaagctgcaaatgggacaggctgcaaaaaaaactcaggagctgctggagcggcactcgaaggggcctctgattgtggacacagtctctgctgagtctctctcagtgctggtgaaggtggtacggcagctgtgtgagcaggcccccagcacgtctgtgctcctactcagcccccagcccatggggaaggtgctgtgtgcctgtcaggtggcccagggtgccatgcccaccttcacagcagaggcctgggcactggcagtgtgcagccacatggggggcaaggcgtggggctcgcgagtggtggcccaaggcaccggaagcactactgacctggaagctgccctcagtatagcccaaacctatgccctcagccagctctgacccaggtccgcccagggacccacatggactaaaggcaatgccaggagccctgaaggagccagcagaaccttcccacatgctgaagcgaggactagaggctggaggccaagcagctgagccaaagaagatcacctgggccagggcctacatgacacaaggagacatgggctagggaaggcagaactgggcccaaagacacacacccccttggtgaaagagaagacatggacaattatggctgtgactgcacattagaaattatttcactggccgggtgtggtggttcacacctgtaatccaagcactttgggaggccgaggcaggtagatcatgaggtcagaagatcaaaaccatcctggctaacacggtgaaaccccatctctactaaaaatacaaaaaattagccgggtgtggtggcacacacctgtagtcccagctactcgggaggctgaggcagaagaatcgcttgaacctgggaggtggaggttgcagtgggccaagatcgcaccactgcactccagcctgggtgacagagcgagactctgtctcaaataaataaattatttcacagaggatagcaagctccagaaggttctattacctttaaaaaagagtagttttgcccctcccagcaacctggtatgggtgccctaagaccagtctgaactcacactgtctgaaaggccacccaggatccaaatcgggccatcttcattgccatgagtgttcggacaggctctgcgtgccaggcaacagtgggcagacaaagggctccctggctactgggaagatacagaaccatcctgtgaaaatcatttcagcactggagaccttctttgctattacttctttcattaacaatgacctctaatttaaattgggccctgctggtttgttgatgaattgagcaactgagaacgtggcgggcactaaactgacagttccttccttcatggagcctgcttcatgtggaggaaacaggaaataaagcaaaagaagagggtcaggc

SEQ ID NO: 2523 - protein, 986 aa, Homo sapiens
TMAASVAAAARRLRRAIRRSPAWRGLSHRPLSSEPPAAKASAVRAAFLNFFRDRHGHRLVPSASVRPRGDPSLLFVNAGMNQFKPIFLGTVDPRSEMAGFRRVANSQKCVRAGGHHNDLEDVGRDLSHHTFFEMLGNWAFGGEYFKEEACNMAWELLTQVYGIPEERLWISYFDGDPKAGLDPDLETRDIWLSLGVPASRVLSFGPQENFWEMGDTGPCGPCTEIHYDLAGGVGAPQLVELWNLVFMQHNREADGSLQPLPQRHVDTGMGLERLVAVLQGKHSTYDTDLFSPLLNAIQQGCRAPPYLGRVGVADEGRTDTAYRVVADHIRTLSVCISDGVFPGMSGPPLVLRRILRRAVRFSMEILKAPPGFLGSLVPVVVETLGDAYPELQRNSAQIANLVSEDEAAFLASLERGRRIIDRTLRTLGPSDMFPAEVAWSLSLCGDLGLPLDMVELMLEEKGVQLDSAGLERLAQEEAQHRARQAEPVQKQGLWLDVHALGELQRQGVPPTDDSPKYNYSLRPSGSYEFGTCEAQVLQLYTEDGTAVASVGKGQRCGLLLDRTNFYAEQGGQASDRGYLVRAGQEDVLFPVARAQVCGGFILHEAVAPECLRLGDQVQLHVDEAWRLGCMAKHTATHLLNWALRQTLGPGTEQQGSHLNPEQLRLDVTTQTPLTPEQLRAVENTVQEAVGQDEAVYMEEVPLALTAQVPGLRSLDEVYPDPVRVVSVGVPVAHALDPASQAALQTSVELCCGTHLLRTGAVGDLVIIGDRQLSKGTTRLLAVTGEQAQQARELGQSLAQEVKAATERLSLGSRDVAEALRLSKDIGRLIEAVETAVMPQWQRRELLATVKMLQRRANTAIRKLQMGQAAKKTQELLERHSKGPLIVDTVSAESLSVLVKVVRQLCEQAPSTSVLLLSPQPMGKVLCACQVAQGAMPTFTAEAWALAVCSHMGGKAWGSRVVAQGTGSTTDLEAALSIAQTYALSQL

SEQ ID NO: 2524 - DNA, 2505 bp, Homo sapiens
gctgagcgccggaggagcgtaggcagggcagcgctggcgccagcggcgacaggagccgcgcgaccggcaaaaatacacgggaggccgtcgccgaaaagagtccgcggtcctctctcgtaaacacactctcctccaccggcgcctccccctccgctctgcgcgccgcccggctgggcgcccgaggccgctccgactgctatgtgaccgcgaggctgcgggaggaaggggacagggaagaagaggctctcccgcgggagcccttgaggaccaagtttgcggccacttctgcaggcgtcccttcttagctctcgcctgcccctttctgcagcctaggcggcccaggttctcttctcttcctcgcgcgcccagccgcctcggttcccggcgaccatggtgacgatggaggagctgcgggagatggactgcagtgtgctcaaaaggctgatgaaccgggacgagaatggcggcggcgcgggcggcagcggcagccacggcaccctggggctgccgagcggcggcaagtgcctgctgctggactgcagaccgttcctggcgcacagcgcgggctacatcctaggttcggtcaacgtgcgctgtaacaccatcgtgcggcggcgggctaagggctccgtgagcctggagcagatcctgcccgccgaggaggaggtacgcgcccgcttgcgctccggcctctactcggcggtcatcgtctacgacgagcgcagcccgcgcgccgagagcctccgcgaggacagcaccgtgtcgctggtggtgcaggcgctgcgccgcaacgccgagcgcaccgacatctgcctgctcaaaggcggctatgagaggttttcctccgagtacccagaattctgttctaaaaccaaggccctggcagccatcccacccccggttccccccagcgccacagagcccttggacctgggctgcagctcctgtgggaccccactacacgaccaggggggtcctgtggagatccttcccttcctctacctcggcagtgcctaccatgctgcccggagagacatgctggacgccctgggcatcacggctctgttgaatgtctcctcggactgcccaaaccactttgaaggacactatcagtacaagtgcatcccagtggaagataaccacaaggccgacatcagctcctggttcatggaagccatagagtacatcgatgccgtgaaggactgccgtgggcgcgtgctggtgcactgccaggcgggcatctcgcggtcggccaccatctgcctggcctacctgatgatgaagaaacgggtgaggctggaggaggccttcgagttcgttaagcagcgccgcagcatcatctcgcccaacttcagcttcatggggcagctgctgcagttcgagtcccaggtgctggccacgtcctgtgctgcggaggctgctagcccctcgggacccctgcgggagcggggcaagacccccgccacccccacctcgcagttcgtcttcagctttccggtctccgtgggcgtgcactcggcccccagcagcctgccctacctgcacagccccatcaccacctctcccagctgttagagccgccctgggggccccagaaccagagctggctcccagcaagggtaggacgggccgcatgcggcagaaagttgggactgagcagctgggagcaggcgaccgagctccttccccatcatttctccttggccaacgacgaggccagccagaatggcaataaggactccgaatacataataaaagcaaacagaacactccaacttagagcaataaccggtgccgcagcagccagggaagaccttggtttggtttatgtgtcagtttcacttttccgatagaaatttcttacctcatttttttaagcagtaaggcttgaagtgatgaaacccacagatcctagcaaatgtgcccaaccagctttactaaagggggaggaagggagggcaaagggatgagaagacaagtttcccagaagtgcctggttctgggtacttgtccctttgttgtcgttgttgtagttaaaggaatttcatttttaaaagaaatcttcgaaggtgtggttttcatttctcagtcaccaacagatgaataattatgcttaataataaagtatttattaagactttcttcagagtatgaaagtacaaaaagtctagttacagtggatttagaatatatttatgttgatgtcaaacagctgagcaccgtagcatgcagatgtcaaggcagttaggaagtaaatggtgtcttgtagatatgtgcaaggtagcatgatgagcaacttgagtttgttgccactgagaagcaggcgggttgggtgggaggaggaagaaagggaagaattaggtttgaattgctttttaaaaaaaaaagaaaagaaaaagacagcatctcactatgttgccaaggctcatcttgagaagcaggcgggttgggtgggaggaggaagaaagggaagaattaggtttgaattgcttttttaaaaaaaaa

SEQ ID NO: 2525 - protein, 394 aa, Homo sapiens
MVTMEELREMDCSVLKRLMNRDENGGGAGGSGSHGTLGLPSGGKCLLLDCRPFLAHSAGYILGSVNVRCNTIVRRRAKGSVSLEQILPAEEEVRARLRSGLYSAVIVYDERSPRAESLREDSTVSLVVQALRRNAERTDICLLKGGYERFSSEYPEFCSKTKALAAIPPPVPPSATEPLDLGCSSCGTPLHDQGGPVEILPFLYLGSAYHAARRDMLDALGITALLNVSSDCPNHFEGHYQYKCIPVEDNHKADISSWFMEAIEYIDAVKDCRGRVLVHCQAGISRSATICLAYLMMKKRVRLEEAFEFVKQRRSIISPNFSFMGQLLQFESQVLATSCAAEAASPSGPLRERGKTPATPTSQFVFSFPVSVGVHSAPSSLPYLHSPITTSPSC

SEQ ID NO: 2526 - DNA, 6137 bp, Homo sapiens
ggccgcgtgctggtggcgcccgccagccggcccgggagaggggacttgagcgcttcgcggccggtgcgcagcgcggctccggccccgcagtctgtctgcaagtggccatccccgcccccgactcctgcggccggtgcgggagctgtcagctgcacgttgcgggggtaccggagaagccggggttgccttctcccggttctgtgcgctaaccccggagcccggccccggggaactagggagcgtctccggctgcacagcgctcaggttttagggtttcctttgggccacccaaaatgttttttaaatactttggataagagctaaaccacctgccactggggacttccatactctcggctcccttgtcatctgatggcattttgattgtctcgaggccaagtgacttgctgtccatgatgagtgatgagaagaaccttggtgtgtcccaaaaattggtatcaccttcaaggagcacaagtagctgctcttccaagcaaggaagtcgacaggacagctgggaagtggtggaaggactgaggggggagatgaattacacccaggagccaccagttcagaaaggatttttgctgaaaaagaggaagtggcccttaaaaggctggcataagagattcttctatctggacaaaggaatcttgaaatatgccaagagccaaaccgatatagagagagagaagctgcatggctgcattgatgtcgggctctcagtgatgtctgtaaagaagtcatcaaaatgcatagaccttgacaccgaggagcacatctaccatctgaaggtcaagtcagaagaagtctttgatgagtgggtatcgaaacttcgccaccacagaatgtatcgtcagaatgaaattgccatgtttccacatgaagttaaccactttttctcagggtccaccatcacagactcttcatctggggtgtttgactccatttcaagtaggaagcgtagcagtatatcaaagcagaatttatttcaaactggaagcaatgtatcattttcttgtggtggtgagacacgagttccattatggttacagtcttcagaggacatggaaaaatgctccaaagacctggcgcactgtcatgcctacctggtagaaatgagccagctcctgcaaagcatggacgtcctgcatcggacatactcggcaccagctatcaacgccatccagggtggatcttttgaaagtcccaaaaaggaaaaaagatcgcacaggaggtggcggtccagagctattggcaaagatgctaaaggaacactgcaggtcccgaaacctttttctggcccagtaagactacactcctccaatcctaatttgtcaacactagattttggagaagagaaaaattattctgatggctctgaaacctcatcagagttttctaaaatgcaagaagatctgtgtcatattgcccataaagtttacttcactttaaggtcagcttttaatatcatgtcagcggagagagagaaactgaagcagctgatggagcaggatgcctcctcctccccgtctgctcaggtcattggtctgaagaacgccctgtcatccgccctagcacaaaacacagatcttaaagaacgcttacgcagaatccatgccgagtctctgctcctcgactcccccgctgtcgccaagtcgggtgacaatctggcagaggaaaactccagagatgaaaaccgagctctagttcatcagctttctaatgaaagtagactctccatcactgactccctttctgagttttttgatgctcaggaagttctgttatctccaagctcttcagaaaacgagatttctgatgatgactcatatgtcagtgacataagtgataatctttccttagataatctcagtaatgatttagataatgagagacagaccttggggcctgtccttgatagtggtcgggaagcgaagtcccggagaagaacgtgcctgccggcgccctgcccgagcagcagtaacatcagcctgtggaacatcctgaggaacaacatcgggaaggacctgtccaaggtggccatgccggtggagctgaacgagcccctgaacacgctgcagaggctctgcgaggagctggagtacagcgagctcctggacaaggccgcgcagattcccagccccctggaaaggatggtatatgtggcagcctttgccatatcagcgtatgcatctagctactaccgagctggaagcaagccatttaatccggttcttggagaaacatatgaatgtattcgggaggacaagggcttccagtttttttcagaacaggtcagccaccatccgcctatctctgcgtgtcatgctgagtctagaaattttgttttctggcaagatgtgagatggaaaaacaaattctggggcaaatccatggaaattgttccaattggcacaacccatgtgactctgccagtttttggggatcattttgagtggaacaaagtgacctcttgcatccataacatcttaagcgggcagaggtggattgagcactatggagagattgtcatcaagaacctgcatgatgattcctgctactgcaaagtgaattttataaaggcaaaatactggagcactaatgcccatgagattgaaggcacagtgtttgacaggagtggaaaagcggttcatcggctgtttgggaaatggcatgaaagcatctactgtggcggcggctcctcttctgcctgtgtatggagagcaaatcctatgccgaaaggctacgagcaatactatagcttcacacagtttgcgctggaattaaatgaaatggatccatcatcaaagtctttattgccacctactgacactcgatttaggccagaccagaggtttctagaggaagggaacttagaagaagctgaaatacaaaagcagaggattgaacaactgcagagagaaaggcggcgggtcttagaagaaaatcatgtggagcaccagcctcggtttttcaggaaatccgacgatgactcttgggtgagcaacggcacctatttggaacttagaaaagatcttggtttttccaaactggaccatcctgtcttatggtgaaaaagtaaagaagaaagataacattagtgtatttctcctgtgcttgccttctgaagtggcacaaacctgtgtttatatatttaaaagatactctaggatgatcacttgtgcttagcttagcattgtaactctttaagtctatattttcctcagtgcgtttctttacaatttcaaatgttaccctgattgtttatatgaatgtagaacaccttgacatttctttttatatataaactatttaataaaaatgaaagattgaatgttcatgtgtgggttaaaaaaagaagctttaacactaattttccaaaggttagggaagattccaattaaatttatgccttataaaattatgttgtagaaaaaaaatcaacctctcccaggtgcattaagaaataagaattcccagggttactcacccatgcgtaagctacccaagtttaatttggtagctgaaatatctttttgcctcagacagctcttgaattgctcatacagaacaattctgctggtgctggagtctgaagaatattttcatttgcattttagtggttagggagaggatataagattaatggaatgtatatttttatataagacgtatacggcaccttcttgaaaaggaagcatttgaacttgttcctccctatagttctattgccttatatgcaaaattgtaccctgttgctcagagaaattattcataagagaaaagaattccaattaattaaatatcacaatagcatcccagagagacagtaggaaatttctccttagtgagagctgagtccttgagaagttaagagactgtttcctgcttcccaccccaccccgttttttgtccctccgtttgatcacctccctgttgagtatggaatgtcccagtttaatataaaacatacagtttattccacacagcagtttgactttgtaaaagtttagcaaaataactgattgttttggataactcaacatgtttttcttaaatgctgttttagtattttctacctcttaataagcaccatattttagatcttgtataaaaagttgccatctgccttatagacaaatgtagagaattgatgttcttgctttgtgttgtgttctggtaaagctttaagtgagtgtcttacccctttcctatactttcttgttatccatatcattcttttgtgagttttgcagcagtcttgaataatacagattataactactgaaaggggaaccttcgtctttttaaatgtgtcatttcacattacaataatatgtgtagtagttgaattgtgttatcaaagcatgtccaacttctgtccagatgacattaaaaccaaagcctaattgttaagcctcttattctaaagtccatagcaatgctatggaatatcaagtataatgatgtagtaaaaagatttctccagaaaacactttgagatacttaaagaaattcagagcatatcgaatgttatgaatgaagagtaaaataattacaggaaaagaatgcatgatttttcattgtcacaccaaataaccagttggacaatattgcattttcaaaatggagagttatttaaagtggatgtgtagccttctggaatctgcacgtgactggcattttaaaacaactcattaaatattggattcattttatcgagatgccaagatgaacacaatgtgaatatcatttccatttctaagcagttgaatgacacagtcagattctttggtgtatgctttgttctttccatctcaagcatttatccaaattctgctcacagacatgaggaagcaggctgtagatttaagggcactcaaggggaaaacaaatgtagtttccacagtgtgaggataaatgtagaatcgtggtaatattggctgttaaattggcctgctccagagactggctcaaaaaagaaagaagcaacgaaaacaaaatgcacagcctgaatggacgtagcactgtcatgtggcatttggaaaatctttaattatcctaatgttatttcacttgcccttatgctttattttagagtcccagggacaactggatgaaacattacgtctgtagtcatcttatttgagatgggggtgggaacgaattaaaatatgatagagaactatatgcagattttaaaatctagtcagtactagcatctataaagggcttttctgaaatttaaacagcttggtgatgcatcctgatattataagcttaaaactatcttgagggggaaatgacttcttttctccttctgtcccttttctcaaaagcatctttcccccaaatgtatgtctctaggacattttatagttttaagaggaagaaaacagaaacgtggcatcatttgggaagaaccaaggtagaatttaattttctggactttaaatctcctggttaaataatgctaatcactgtaccatttgagttacatgttttaacctcttttttttttctaattattccatccaaaatttctggtgaattacacagaaatttttggaaatgggactttgtgcaggtaaccaccctgcacttcaggtaatgttcctgtcacagctgtcgactaccccacgctgcaggaaatccattcagaaatgagctaacagtctccagtgtagcaggagagccagtcacttccctccccaggccccaaagcaccccaaggctggtattccttgagtcataggtattaataataaaagcctcaatgcagcttctccatgtagttcctctcctacaagccaggtggattctggtcctaactaaagagatgggagttcacctgagggcaagaagtacccaggatgcccaaacagccgcacaggtgtcctgtgcttcctgtgagacttcctgggggaaatatacaaactaatatattttttaatgtttacgtcatttacactgctgcttttctcatattctgcttttaattacttgtagtaaatcatttgtttgggcttcaagcactgtcttccatctgcatcttccagatttatcatgagtgatcttgttctactgttaaagatgtcaagcctaaaaagtaataaagtttttatttggctgtt

SEQ ID NO: 2527 - protein, 919 aa, Homo sapiens
ELNHLPLGTSILSAPLSSDGILIVSRPSDLLSMMSDEKNLGVSQKLVSPSRSTSSCSSKQGSRQDSWEVVEGLRGEMNYTQEPPVQKGFLLKKRKWPLKGWHKRFFYLDKGILKYAKSQTDIEREKLHGCIDVGLSVMSVKKSSKCIDLDTEEHIYHLKVKSEEVFDEWVSKLRHHRMYRQNEIAMFPHEVNHFFSGSTITDSSSGVFDSISSRKRSSISKQNLFQTGSNVSFSCGGETRVPLWLQSSEDMEKCSKDLAHCHAYLVEMSQLLQSMDVLHRTYSAPAINAIQGGSFESPKKEKRSHRRWRSRAIGKDAKGTLQVPKPFSGPVRLHSSNPNLSTLDFGEEKNYSDGSETSSEFSKMQEDLCHIAHKVYFTLRSAFNIMSAEREKLKQLMEQDASSSPSAQVIGLKNALSSALAQNTDLKERLRRIHAESLLLDSPAVAKSGDNLAEENSRDENRALVHQLSNESRLSITDSLSEFFDAQEVLLSPSSSENEISDDDSYVSDISDNLSLDNLSNDLDNERQTLGPVLDSGREAKSRRRTCLPAPCPSSSNISLWNILRNNIGKDLSKVAMPVELNEPLNTLQRLCEELEYSELLDKAAQIPSPLERMVYVAAFAISAYASSYYRAGSKPFNPVLGETYECIREDKGFQFFSEQVSHHPPISACHAESRNFVFWQDVRWKNKFWGKSMEIVPIGTTHVTLPVFGDHFEWNKVTSCIHNILSGQRWIEHYGEIVIKNLHDDSCYCKVNFIKAKYWSTNAHEIEGTVFDRSGKAVHRLFGKWHESIYCGGGSSSACVWRANPMPKGYEQYYSFTQFALELNEMDPSSKSLLPPTDTRFRPDQRFLEEGNLEEAEIQKQRIEQLQRERRRVLEENHVEHQPRFFRKSDDDSWVSNGTYLELRKDLGFSKLDHPVLW

SEQ ID NO: 2528 - DNA, 460 bp, Homo sapiens
tttttttttttttttttgagatttttatctaacaactttaataaatcgattataaatgaaaacacaaagaatgaagtgttcttttccatgcacaaggcccctaacttggatgtggttcccccgctaggcggtcaccaagtgatgccctccctgagggcaggcgttgatcgagtctgttttcttctcatgatttctcctgttgggaacatggtccctggcacatggcctcattgatgtttgccaaatgaatgaatgaggtgctgggtggtggctgcaggcccatgccactcccaccctggtcagcaagccccttgcatggcacgcggaggcaagcagggaagcacgtttgtggttctagcatggaggagaccccaggccaggcagcaccagaggccaagcccaagggtctgtcttccttgctgggcaggcgaggggcattgcagtgctcagcatttcccca

SEQ ID NO: 2529 - DNA, 529 bp, Homo sapiens
ttttttattttattattattttttttttttaaagataggggctctctgttgctcaggctggagtatagaggcaagatcatggctcatggcagcctccgcctcccaggctcaaacgatcttttcacctcagcctcccaagtagctggaactataggcccatgccaccacgccgggctaatttttaaattttttgtagagatggggtctttatgttgcccaggcttgtttcaaactcctggcctcaagtgatcctcctcggcctccaaaagtgctgggattacagacatgagccactgtgcctggcctgttatttttgtttcctcattaaatgcttgactgcttgcatcatccagcaaaaatcctttgctaccaagtctcaacagatggtcccgctggtagtttatgaacacaacacagaacagaaaatggacggggactgttgagaggaaagaagcaggtctctgctcttcttgcacagggggagtgctgacaaagaccctccctccccacactccagccaggctcctta

SEQ ID NO: 2530 - DNA, 406 bp, Homo sapiens
ttttaagagatgaggtctggctatgtttcccaggctcgtctcgaactcctggcctcaagtgattttcctgccttggccttctaaagtgcagaggttataggcatgagccatcatgcttggcctggtttttacattttaagtggttaaaaaattaatattttgtgatctgtgaaaattacataaggttcaaattttggtgtccataaacaaagctttattgaaacacagccccactgctttatgtatgcattgcctatggacgctacccagcagaactgggtagctgcagtcagctttatggcctgcaaagatgaaaatattcacgacttggccctttacagagtttgtccacctcagtatgaaacaactgctactgttcacaggcctggaccccgagcatctagcc

SEQ ID NO: 2531 - DNA, 439 bp, Homo sapiens
  misc_feature (13)..(13): n is a, c, g, or t
  misc_feature (48)..(48): n is a, c, g, or t
  misc_feature (78)..(78): n is a, c, g, or t
  misc_feature (94)..(94): n is a, c, g, or t
  misc_feature (122)..(122): n is a, c, g, or t
  misc_feature (148)..(148): n is a, c, g, or t
  misc_feature (427)..(427): n is a, c, g, or t
ttttttttttagnaacaattgcttttatttgaaaactgctggctatgnaatttcctccttccctcaattagggccagnaaactcatcatggggncatgcacagcatctaacaggaggtaagnccccagcttgtgggggctaggatggnagcagccgtgagagacacctaggccaaatgtccgtttttccatcataaacaatggagcgggggtcagggggagaagagagtgggtaagtgaatggccagaaactccagagggggcctcacacccacctgtgaggtacctccttgccctacccccactgaggcctcaggcccttgcttgggtcatgctgccccctgtcggctgctgcccctgcctcttcctctgagttctaacaacacagacactggtgcctgaaagccctgctgctgccagggagtcanaatttggctgcc

SEQ ID NO: 2532 - DNA, 452 bp, Homo sapiens
tgccacgacattccccagggtgcaggtgcccggtggccgagggtcagtccagtggtagagccttgcctcctaggctcatcctgctggcggtcctcctgcttctgctgtgtggtgtcacagctggttgtgtccggttctgctgcctccggaagcaggcacaggcccagccacatctgccaccagcacggcagccctgcgatgtggcagtcatccctatggacagtgacagccctgtacacagcactgtgacctcctacagctccgtgcagtacccactgggcatgcggttgccctgcctttgggagctggaactggactccgtggctcctcctgcctacagcctgtacaccccggagcctccaacctcctacgatgaagctgtcaagatggccaagcccagagaggaaggaccagcactctcccagaaacccagccctctccttggggcctcg

SEQ ID NO: 2533 - DNA, 214 bp, Homo sapiens
ttttttttttttttttttttttgctcaccaaaaacttgctttaatgtctaaatgttctaaagatgagaggggggagggaaatgcataaaaagcagtgcctcatggaaaacacacacatgtgcatgcacacacacccaaagtcctttgtgctttaaacattcctggtaacttcactgaccatcctggccggaatctttgaaatggttaaccaaga

SEQ ID NO: 2534 - DNA, 405 bp, Homo sapiens
  misc_feature (13)..(13): n is a, c, g, or t
  misc_feature (21)..(21): n is a, c, g, or t
  misc_feature (24)..(24): n is a, c, g, or t
  misc_feature (62)..(62): n is a, c, g, or t
  misc_feature (100)..(100): n is a, c, g, or t
  misc_feature (105)..(105): n is a, c, g, or t
  misc_feature (159)..(159): n is a, c, g, or t
  misc_feature (166)..(166): n is a, c, g, or t
  misc_feature (284)..(284): n is a, c, g, or t
  misc_feature (298)..(298): n is a, c, g, or t
  misc_feature (308)..(308): n is a, c, g, or t
  misc_feature (371)..(371): n is a, c, g, or t
  misc_feature (384)..(384): n is a, c, g, or t
attcggcacaggngtggtccncantgagctgccgtagcggacccagcacagccaggagcgtncgggatgagctcagccgcggccgaccactgggcgtggntgctngtcctcagcttcgtgtttggatgcaatgttcttaggatcctcctcccgtccttntcatccntcatgtccagggtgctgcagaaggacgcggacagggagtcacagatgagagcggagatccaggacatgaagcaggagctctccacagtcaacatgatggacgagtttgccagatatgncaggctggaaaganagatcaacangatgacggataagctcaaaacccatgtgaaagctcggacagctcaattagccaagataaagtnggtgataagtgtncgctttgttacgtatttgcag

SEQ ID NO: 2535 - DNA, 528 bp, Homo sapiens
  misc_feature (102)..(102): n is a, c, g, or t
tcgacaagaacacagaccacatccctgtcctcatgcggcttatgttttctggaggaaagtggagacacaagtccttggctttagggctcccccggctgggcnatgtgcagtccggtcagggcgggaggggaaatgcaccgctgcatgtgaaccttaccagcccaggcggatgccccttccccttagcactaccctggcctcctgcatcccctcgcctcatgttcctcccaccttcaaagaacgaagagccccatggcgccagccctgccctgggaacctagcagccttccagacctcaggggctgaggcagactattagggcagggctgactttggtgacactgcccattccctctcaggccagctcaggtcacccgggcctctgacccaggcctgtcactttgagaggggcaaaactgagaggggcttgtcctagagaaagagaacaaggagcttgccaggcttcatgtagccgacacacgtctcaggattttaagtccacattggcctcacactaccagggccaat

SEQ ID NO: 2536 - DNA, 609 bp, Homo sapiens
cacgaggccaaaaccatgccataataatataagtgctttagaaattaaatcattgtgttttttatgcattttgctgaggcatccttattcatttaacacctatctcaaaaacttacttagaaggttttttattatagtcctacaaaagacaatgtataagctgtaacagaattttgaattgtttttctttgcaaaacccctccacaaaagcaaatcctttcaagaatggcatgggcattctgtatgaacctttccagatggtgttcagtgaaagatgtgggtagttgagaacttaaaaagtgaacattgaaacatcgacgtaactggaaattaggtgggatatttgataggatccatatctaataatggattcgaactctccaaactacaccaattaatttaatgtatcttgcttttgtgttcccgtctttttgaaatatagacatggatttataatggcattttatatttggcaggccatcatagattatttacaacctaaaagcttttgtgtatcaaaaaaatcacattttattaatgtaaatttctaatcgtaaacttgctcactgttctgatttcctgtttctgaaacaagtaaaatcagtccta

SEQ ID NO: 2537 - DNA, 334 bp, Homo sapiens
tttaacacttctgttatatttattatttaccagaagaaaacaataataaagcaaatgtttaaaaaattttctttaacttctgcttcgggaaatatgactctaaatttcacctgagtcactcaaattgattgcaagtagaaaatattgcctctaaatattatattttatctccttccaccttcctcttcagcccctacttcttcatggcccaaacattctgccttttacaaatacccttatcagatggtagcattgtttccagttctgccacgtggatcctaaagtattgctgctgacatagtctccatgctgtaatccaagagtcactatttcc

SEQ ID NO: 2538 - DNA, 3774 bp, Homo sapiens
atgatgagcttcggcggcgcggacgcgctgctgggcgccccgttcgcgccgctgcatggcggcggcagcctccactacgcgctagcccgaaagggtggcgcaggcgggacgcgctccgccgctggctcctccagcggcttccactcgtggacacggacgtccgtgagctccgtgtccgcctcgcccagccgcttccgtggcgcaggcgccgcctcaagcaccgactcgctggacacgctgagcaacgggccggagggctgcatggtggcggtggccacctcacgcagtgagaaggagcagctgcaggcgctgaacgaccgcttcgccgggtacatcgacaaggtgcggcagctggaggcgcacaaccgcagcctggagggcgaggctgcggcgctgcggcagcagcaggcgggccgctccgctatgggcgagctgtacgagcgcgaggtccgcgagatgcgcggcgcggtgctgcgcctgggcgcggcgcgcggtcagctacgcctggagcaggagcacctgctcgaggacatcgcgcacgtgcgccagcgcctagacgacgaggcccggcagcgagaggaggccgaggcggcggcccgcgcgctggcgcgcttcgcgcaggaggccgaggcggcgcgcgtggacctgcagaagaaggcgcaggcgctgcaggaggagtgcggctacctgcggcgccaccaccaggaagaggtgggcgagctgctcggccagatccagggctccggcgccgcgcaggcgcagatgcaggccgagacgcgcgacgccctgaagtgcgacgtgacgtcggcgctgcgcgagattcgcgcgcagcttgaaggccacgcggtgcagagcacgctgcagtccgaggagtggttccgagtgaggctggaccgactgtcggaggcagccaaggtgaacacagacgctatgcgctcagcgcaggaggagataactgagtaccggcgtcagctgcaggccaggaccacagagctggaggcactgaaaagcaccaaggactcactggagaggcagcgctctgagctggaggaccgtcatcaggccgacattgcctcctaccaggaagccattcagcagctggacgctgagctgaggaacaccaagtgggagatggccgcccagctgcgagaataccaggacctgctcaatgtcaagatggctctggatatagagatagccgcttacagaaaactcctggaaggtgaagagtgtcggattggctttggcccaattcctttctcgcttccagaaggactccccaaaattccctctgtgtccactcacataaaggtgaaaagcgaagagaagatcaaagtggtggagaagtctgagaaagaaactgtgattgtggaggaacagacagaggagacccaagtgactgaagaagtgactgaagaagaggagaaagaggccaaagaggaggagggcaaggaggaagaagggggtgaagaagaggaggcagaagggggagaagaagaaacaaagtctcccccagcagaagaggctgcatccccagagaaggaagccaagtcaccagtaaaggaagaggcaaagtcaccggctgaggccaagtccccagagaaggaggaagcaaaatccccagccgaagtcaagtcccctgagaaggccaagtctccagcaaaggaagaggcaaagtcaccgcctgaggccaagtccccagagaaggaggaagcaaaatctccagctgaggtcaagtcccccgagaaggccaagtccccagcaaaggaagaggcaaagtcaccggctgaggccaagtctccagagaaggccaagtccccagtgaaggaagaagcaaagtcaccggctgaggccaagtccccagtgaaggaagaagcaaaatctccagctgaggtcaagtccccggaaaaggccaagtctccaacgaaggaggaagcaaagtcccctgagaaggccaagtcccctgagaaggccaagtccccagagaaggaagaggccaagtcccctgagaaggccaagtccccagtgaaggcagaagcaaagtcccctgagaaggccaagtccccagtgaaggcagaagcaaagtcccctgagaaggccaagtccccagtgaaggaagaagcaaagtcccctgagaaggccaagtccccagtgaaggaagaagcaaagtcccctgagaaggccaagtccccagtgaaggaagaagcaaagacccccgagaaggccaagtccccagtgaaggaagaagccaagtccccagagaaggccaagtccccagagaaggccaagactcttgatgtgaagtctccagaagccaagactccagcgaaggaggaagcaaggtcccctgcagacaaattccctgaaaaggccaaaagccctgtcaaggaggaggtcaagtccccagagaaggcgaaatctcccctgaaggaggatgccaaggcccctgagaaggagatcccaaaaaaggaagaggtgaagtccccagtgaaggaggaggagaagccccaggaggtgaaagtcaaagagcccccaaagaaggcagaggaagagaaagcccctgccacaccaaaaacagaggagaagaaggacagcaagaaagaggaggcacccaagaaggaggctccaaagcccaaggtggaggagaagaaggaacctgctgtcgaaaagcccaaagaatccaaagttgaagccaagaaggaagaggctgaagataagaaaaaagtccccaccccagagaaggaggctcctgccaaggtggaggtgaaggaagacgctaaacccaaagaaaagacagaggtggccaagaaggaaccagatgatgccaaggccaaggaacccagcaaaccagcagagaagaaggaggcagcaccggagaaaaaagacaccaaggaggagaaggccaagaagcctgaggagaaacccaagacagaggccaaagccaaggaagatgacaagaccctctcaaaagagcctagcaagcctaaggcagaaaaggctgaaaaatcctccagcacagaccaaaaagacagcaagcctccagagaaggccacagaagacaaggccgccaaggggaagtaaggcagggagaaaggaacatccggaacagccaaagaaactcagaagagtcccggagctcaaggatcagagtaacacaattttcactttttctgtctttatgtaagaagaaactgcttagatgacggggcctccttcttcaaacaggaatttctgttagcaatatgttagcaagagagggcactcccaggcccctgcccccatgccctccccaggcgatggacaattatgatagcttatgtagctgaatgtgatacatgccgaatgccacacgtaaacacttgactataaaaactgcccccctcctttccaaataagtgcatttattgcctctatgtgcaactgacagatgaccgcaataatgaatgagcagttagaaatacattatgcttgagatgtcttaacctattcccaaatgccttctgttttccaaaggagtggtcaagcccttgcccagagctctctattctggaagagcggtccaggtggggccgggcactggccactgaattatgccagggcgcactttccactggagttcactttcaattgcttctgtgcaataaaaccaagtgcttataaaatgaaaaaaaaaaaaaaaatgctgttattctctttccctgggaaggctgggggcagggcaggggaggtctggatgtgacaccccagactgcatgggactgagcaagcatcagt

SEQ ID NO: 2539 - protein, 1026 aa, Homo sapiens
MMSFGGADALLGAPFAPLHGGGSLHYALARKGGAGGTRSAAGSSSGFHSWTRTSVSSVSASPSRFRGAGAASSTDSLDTLSNGPEGCMVAVATSRSEKEQLQALNDRFAGYIDKVRQLEAHNRSLEGEAAALRQQQAGRSAMGELYEREVREMRGAVLRLGAARGQLRLEQEHLLEDIAHVRQRLDDEARQREEAEAAARALARFAQEAEAARVDLQKKAQALQEECGYLRRHHQEEVGELLGQIQGSGAAQAQMQAETRDALKCDVTSALREIRAQLEGHAVQSTLQSEEWFRVRLDRLSEAAKVNTDAMRSAQEEITEYRRQLQARTTELEALKSTKDSLERQRSELEDRHQADIASYQEAIQQLDAELRNTKWEMAAQLREYQDLLNVKMALDIEIAAYRKLLEGEECRIGFGPIPFSLPEGLPKIPSVSTHIKVKSEEKIKVVEKSEKETVIVEEQTEETQVTEEVTEEEEKEAKEEEGKEEEGGEEEEAEGGEEETKSPPAEEAASPEKEAKSPVKEEAKSPAEAKSPEKEEAKSPAEVKSPEKAKSPAKEEAKSPPEAKSPEKEEAKSPAEVKSPEKAKSPAKEEAKSPAEAKSPEKAKSPVKEEAKSPAEAKSPVKEEAKSPAEVKSPEKAKSPTKEEAKSPEKAKSPEKAKSPEKEEAKSPEKAKSPVKAEAKSPEKAKSPVKAEAKSPEKAKSPVKEEAKSPEKAKSPVKEEAKSPEKAKSPVKEEAKTPEKAKSPVKEEAKSPEKAKSPEKAKTLDVKSPEAKTPAKEEARSPADKFPEKAKSPVKEEVKSPEKAKSPLKEDAKAPEKEIPKKEEVKSPVKEEEKPQEVKVKEPPKKAEEEKAPATPKTEEKKDSKKEEAPKKEAPKPKVEEKKEPAVEKPKESKVEAKKEEAEDKKKVPTPEKEAPAKVEVKEDAKPKEKTEVAKKEPDDAKAKEPSKPAEKKEAAPEKKDTKEEKAKKPEEKPKTEAKAKEDDKTLSKEPSKPKAEKAEKSSSTDQKDSKPPEKATEDKAAKGK

SEQ ID NO: 2540 - DNA, 209 bp, Homo sapiens
gttgagaaatgactcagttcagccccaggcccctgtgactctgcttaaagcacacatttctcgctgactcttgtccctggggcagcaggataatcaccaacacactcttaacgggacacaacacaccaagcaccgtggagctctcctaggcaacactcgcggtctcaggctgcggtcggcgttctcctgcatgtcgtccagaccacctc

SEQ ID NO: 2541 - DNA, 468 bp, Homo sapiens
  misc_feature (25)..(25): n is a, c, g, or t
  misc_feature (28)..(28): n is a, c, g, or t
ttttttttttttttttttgactggnagnaatttattgttacacacacacacacacacacacacacacacacacacactaggttaacatcaaccaccgcaccatccaggcactccccagccaccacgtgtgggcacaaagacacacacaccccttttggtaggcagatttccctgtctgctcccctcttcctgtgggagaggcatgccttctgggcagtttaaaggtgggaagttacaggggcctaaaaaggtaaaagagcagcagctctgcactggccagctgtaaacagtaaataggccagtcatggagggtcctgaatccagatcctcaggaaggttttcaccaaacaccacagtcccatttgatgtgatgcccagcctctatccttaaggcatttccagcgtccctgaggcgctctgcttagacaactggcacagaagtggtcagggccttggctgtggctctgc

SEQ ID NO: 2542 - DNA, 1062 bp, Homo sapiens
gcggccgcgtcgacggaccggagtggggagcgcggcgtggaggtgccacccggcgcgggtggcggagagatcagaagcctcttccccaagccgagccaacctcagcggggacccgggctcagggacgcggcggcggcggtggcgactgcagtggctggacgatggcagcgtccgccggagccggggcggtgattgcagccccagacagccggcgctggctgtggtcggtgctggcggcggcgcttgggctcttgacagctggagtatcagccttggaagtatatacgccaaaagaaatcttcgtggcaaatggtacacaagggaagctgacctgcaagttcaagtctactagtacgactggcgggttgacctcagtctcctggagcttccagccagagggggccgacactactgtgtcgtttttccactactcccaagggcaagtgtaccttgggaattatccaccatttaaagacagaatcagctgggctggagaccttgacaagaaagatgcatcaatcaacatagaaaatatgcagtttatacacaatggcacctatatctgtgatgtcaaaaaccctcctgacatcgttgtccagcctggacacattaggctctatgtcgtagaaaaagagaatttgcctgtgtttccagtttgggtagtggtgggcatagttactgctgtggtcctaggtctcactctgctcatcagcatgattctggctgtcctctatagaaggaaaaactctaaacgggattacactggctgcagtacatcagagagtttgtcaccagttaagcaggctcctcggaagtccccctccgacactgagggtcttgtaaagagtctgccttctggatctcaccagggcccagtcatatatgcacagttagaccactccggcggacatcacagtgacaagattaacaagtcagagtctgtggtgtatgcggatatccgaaagaattaagagaatacctagaacatatcctcagcaagaaacaaaaccaaactggactctcgtgcagaaaatgtagcccattaccacatgtagccttgga

SEQ ID NO: 2543 - protein, 269 aa, Homo sapiens
MAASAGAGAVIAAPDSRRWLWSVLAAALGLLTAGVSALEVYTPKEIFVANGTQGKLTCKFKSTSTTGGLTSVSWSFQPEGADTTVSFFHYSQGQVYLGNYPPFKDRISWAGDLDKKDASINIENMQFIHNGTYICDVKNPPDIVVQPGHIRLYVVEKENLPVFPVWVVVGIVTAVVLGLTLLISMILAVLYRRKNSKRDYTGCSTSESLSPVKQAPRKSPSDTEGLVKSLPSGSHQGPVIYAQLDHSGGHHSDKINKSESVVYADIRKN

SEQ ID NO: 2544 - DNA, 326 bp, Homo sapiens
tttttttttttttttttttttttttttttttttttttttttaaaattttccattttattcaaagttgggacagaattgcaaacattcccaaaaaaaaattactatacttcggttacgggacaaaataccacagaaaggaatgtactttgcaagaaatgtagttcatcttaagtttccaaatacttttgagggcaaatgcagcagctggcaaaataacacacagtacacaaagaacagtgtattttacggggtcggtaatgaaaacggacagccctttagcagatatgcttttttcattttttaaacaaaaaccctttcaaaaaccc

SEQ ID NO: 2545 - DNA, 353 bp, Homo sapiens
tttttttttttttttttgaaatcgcaaaccacttgggcccaagacaaatttaattttgaaggccaaataacaacagggagcattactagtccacccaccctaggtgtgacctttcctgcaggcatcttcacataacaggaaggtaaggggtgcctgcctcagcctgaagcagagcacaggcatctttcaaatattaatggtgaccgacatgccacagtgactaccaagtagctgctgactggggaacttgatagtgggctctttgccggacagcacgaatggagggcacatgccaggtacagaaggggtatgaccattaatgaggtgttagtcaccacaccatgggccggttg

SEQ ID NO: 2546 - DNA, 284 bp, Homo sapiens
gcgagacggacgccaagcccggcagcccgagaggaagatgaacagccccagccagagcctctgcgagagtggaccccgagccgcccccaggtagccaggagcggcctcagcggcacgcgcaaactccagtagccgcccgtgctgcccgtggctggggcggagggcagccagagctggggaccaaggctccgcgccacctgcgccagcagcctcacacctgaacgctgtcctcccgcagacgagaccggcgggcactgcaaagctgggactcgtctttgaaggaa

SEQ ID NO: 2547 - DNA, 274 bp, Homo sapiens
ttttttttttttccaggggtttacatctttattaatcttttgccagattgcctcacttgctctctggggtaagctgaatgtgcgttcaagaaaggatatggaattgcctccataaacggactttagaatcttctttccttgcagcatgtctagactgtatttctttttatttatactatcctcatagaatgttctagacttaattttttagctctttgactcttcggctccagctttcacatttatttccatgtcttggttatgtcttctcact

SEQ ID NO: 2548 - DNA, 435 bp, Homo sapiens
  misc_feature (361)..(361): n is a, c, g, or t
  misc_feature (372)..(372): n is a, c, g, or t
  misc_feature (378)..(378): n is a, c, g, or t
  misc_feature (386)..(386): n is a, c, g, or t
  misc_feature (402)..(402): n is a, c, g, or t
  misc_feature (408)..(408): n is a, c, g, or t
  misc_feature (419)..(419): n is a, c, g, or t
  misc_feature (427)..(427): n is a, c, g, or t
ggaaggcgcgcggatttggcccctcttctcacatcagtgggtccaggcccaaccgacagactatgggggctccggcaaccaggcgctgcgtggagtggctgctgggcctctacttcctcagccacatccccatcaccctgttcatggacctgcaggcggtgctgccgcgcgagtctacccagtcgagtttagaaacctgctgaagtggtatgctaaggagttcaaagacccactgctacaggagcccccagcctgggtttaagtcctttctgttttgcgagcttgtgtttcagctgcctttctttcccattgcaacgtattgccttcctcaaaggaagcttgcaagtgggattcggaactnctgcaatcatnttattntgtttcanaacatggacaaccttnaatttncgataattttncacaattnttgtttga

SEQ ID NO: 2549 - DNA, 2282 bp, Homo sapiens
gcagcggcggcccacacagcagcgagaggcgagaggaggctgcctcgaggatgaagtgcaaacccaaccagacgcggacctacgaccccgaggggttcaagaagcgggcggcgtgcctgtgcttccggagcgaacgcgaggacgaggtcctgttagtgagtagcaaccggtacccggaccgctggatcgtgccgggcgggggcatggagcccgaggaggagccgggcggtgcggcggtccgagaggtgtacgaagaagcgggagtcaaggggaagttaggccggctcctgggcgtcttcgaacagaaccaggatcgcaagcacagaacgtacgtgtatgtactgactgtcacggagctgctggaggattgggaagattcggttagcattgggaggaagcgagagtggttcaaagtcgaagatgccatcaaggttctccagtgccacaagcccgtgcacgccgaatatctggagaaactaaagctgggcggttccccaaccaatggaaactccatggccccatcctcgccagatagcgatccctaatgaacagcaaagatgttcagtattgtgctgaaagaaacattgatgtgaacccagtgatcagtggaattgtcaagtacaggtgagcacttctgtgttcccaagaagacagctcatctggtttcttcctgcatcttgggacactccttccctgtctataccactgactcttgctctggttgttgtactcttatacgtgaatagactcttaattcagcacctatagccttttgttgtgcttttttgatgtgtctgccttcattagactatgatgtctttgagagcaaagactatttttccttactctttgcatattctgcatctgagacactacttgaaatatggttggcatcactgaaggttctttgattcaattaatattttgtaatcaccgtgtggcaaaacattccccttccaatctggtgctagtagagtatatgctatctaggcaccatgtgtgtggcttttgtgtatcaggtgtttcagaaatatttcaagacggttgtaagatgtttgaggacaagaattattactcctatttctatgtcataccacacagtagctgcacagttttaagattatgccatcacctagggtaatgttttgtagaatcagtccttcgtgtaacaactctagtgtttttgtactgttgatgatttacttaaattttattcaaaaactatcacttgctataaaggtaattgtaaaaataaatacagtggacgcaaaataatgttgtgagtttttataaaaataaattttaaaatgatatataagacatttttttgcaatgcctgccctaaccacttcttacatgtcatcttaacatctctttgaggaaacactgtttcctcattttacagatttaacatactgtattatttgatgccagagccaacaggctatatcataggcagtttccaaacttaattatgccatttagtttgtctagatttcttttgcctctctcactgatccatttggctgtagttttcatcccttttccagtacacacagctagctcctcatcctacctggtttctgcatatgagaatgcagagggctgagagagggcaaaattgttgtcatttagaaaaggcatttaggaaagaggctgctattagaggggaacacaaagtgaaggtttttttaaaaaagaggacttgcatcagctgcctccagaacaattttaagaaaataacaaagatgtttagaagaaatcttacggagtttgccatgggatgtgtgatatcagcagtcttcagctccttacaaattaccaaaagtggttctaatatgctagtttgtttgattttttcttttatattataaagcaattgcatcgataaaagcttggactccattttagtgtgacactcttcctcatgataccagtgaaatgtattgattgtgtccccagttgttacataatttgaaataaaaatataacttcttgatttattgttttttaagatgtgatatggtactgtggttatgttgttttaaaaaatgattatcttttagagaagtatactgaaaaatgtacaggtgaaatgatatgttactggtattcgcttcaaaatcatctgagtgtggggtaattgagtacatagatgaaacaagattggccataaattggtaattgctgaagctgtgtgatggatgtttgagagttcattatactattctctatacttttgtatatgtttgaaattttccataataaaaattgaaaaaagt

SEQ ID NO: 2550 - protein, 164 aa, Homo sapiens
MKCKPNQTRTYDPEGFKKRAACLCFRSEREDEVLLVSSNRYPDRWIVPGGGMEPEEEPGGAAVREVYEEAGVKGKLGRLLGVFEQNQDRKHRTYVYVLTVTELLEDWEDSVSIGRKREWFKVEDAIKVLQCHKPVHAEYLEKLKLGGSPTNGNSMAPSSPDSDP

SEQ ID NO: 2551 - DNA, 276 bp, Homo sapiens
  misc_feature (2)..(2): n is a, c, g, or t
  misc_feature (7)..(7): n is a, c, g, or t
  misc_feature (44)..(44): n is a, c, g, or t
  misc_feature (110)..(110): n is a, c, g, or t
  misc_feature (191)..(191): n is a, c, g, or t
  misc_feature (199)..(199): n is a, c, g, or t
  misc_feature (270)..(270): n is a, c, g, or t
anttcgngcacagcgcgactaagcagaagaaagatcaaaaaccnggaaaagaggagaagagcaaacaggcactttgaggaacaatcccctttaactccaagccgacagcngtctaggaattcaagttcagtgcctaccgaagacaaaggcgccccgagggagtggcggtgcgaccccagggcgtgggccgnccgcgganccacactacccggctgacccggtggtctcggaccatgtctcccgccccaagaccctcccgttgtctcctgntccccc

SEQ ID NO: 2552 - DNA, 6828 bp, Homo sapiens
aatctcccaaggcctaaggaggcaagaggcctgcaaatcgcctcctgctcagcaaacgggttgctcagcaggcccggggtcctggtccaccccaggtccctggtttgcccacctccgatggcggccttcgctggcagggtgggcgcctctggggagccagctccgtcccggcgcctttagagccccatctcttccacgtccctggccttcctccccttccaggcggctgtccccgccggggtccagatggtgtcggagggccggcggttcgacggcgggcccggggttcagcctcccggcctccctccgtccctgactctcctttcttcggagagggcgcgggggccggggccaaagcgccgctcttggggttctcctggactcggagttgccccaggcgggcgcagctctgccccgcggggtgccagcctcgggcgggcaaggtccgtgagtcaccgcctgtaaccgaacaccaggcctccctgccccctcccccagctccggccgccaggctgcggcgacacctacaagaaaatgaaggggcgcccaggcccgcggcggccccggccgtatcgcgagcaggtcccggcggcccccggctcgcggcgctctttcttccccggccccggggctcggccagccgcaaccgccgccccggcgccagcaggaatccaggccgagcgaccggccccggagcccgaggcggcggagggcccgcggtagctgcgactggcgagcccgagagcgcccggggagggggcgcccggcttggaatttcccggtcccttccggcccagcgaggacaaagcactcctggccgccgccgccgccgccgccgtggcctacgccgcgccgcacaaagggcgagtcgcgacacgctcccatccccctcccagctcacggcggccccggccccgggtggctgcagggaggtgggggaagccctggctgcaccgcccctcgctccccctcccctggggccgcgcgagcgccgcccccgccccgtctgcgcgtcctcccggggaggggttggggggcgcggcgccccacataacactccccctcctgcgctgcgagccaccctctcccctccctcctgcaaacaccaccgcctcccctgccaccgccgccacctcgcccgacgctccacagctcgccgcggccggggggcggtgcgcggaccgtgcgcgccgcgggcgccagatgtgcagtccccgccgccgccagtgaccgagccgcagtccgagcggtatcgggccgcctccctgatgctgcgggggcgaccttgagcgtacagcggcttccctcggtggggaccccgacatcccagcgctgtgcccggtcttgccctctgtagcccggctcgccccgcgcttggacatggaaggggccgccgcgcctgtggcgggggaccgccccgacttggggctgggggcgccgggctctccccgagaggcggtggcgggggcgactgcagccctggagcccaggaagccgcacggggtgaagcggcatcaccacaagcacaacttgaagcaccgctacgagctgcaggagaccctgggcaaaggcacctacggcaaagtcaagcgggccaccgagaggttttctggccgagtggttgctataaaatccattcgtaaggacaaaattaaggatgaacaagacatggttcacatcagacgagagattgagatcatgtcatctctcaaccatcctcatatcatcagtatttatgaagtgtttgagaacaaagataagattgtgatcatcatggaatatgccagcaaaggggagctgtacgattacatcagtgagcggcgacgcctcagtgagagggagacccggcacttcttccggcagatcgtctctgctgtgcactattgtcacaagaacggtgtggtccaccgggacttgaagctggaaaatatactgctcgatgacaactgcaatattaagattgctgactttgggctttccaacctgtaccagaaggataagttcttacaaacgttttgtgggagtccactctatgcatctcctgagattgtcaatgggagaccttaccgagggccagaggtggacagctgggccctgggtgtgttgctttacactcttgtttatggaacaatgcccttcgatggtttcgatcacaaaaacctcattcggcaaatcagcagcggagagtaccgggagccaacacagccctcagatgctcgaggactcatacggtggatgctgatggtgaaccccgatcgccgggccactattgaggacattgccaaccactggtgggtgaactggggctataagagcagcgtgtgtgactgtgatgccctccatgactctgagtccccactcctggctcggatcattgactggcaccaccgttccacagggctgcaggctgacaccgaagccaaaatgaagggcctggccaaacccacgacctctgaggtcatgctagagcggcagcggtcgctgaagaaatccaagaaagagaatgactttgctcagtctggtcaggatgcagtgcctgaaagcccatccaagttgagttctaagaggcccaaggggatcctgaagaagcgaagcaacagcgagcatcgctctcacagcactggcttcattgaaggtgtagttggtcctgccttaccctctactttcaagatggagcaggacttgtgcaggactggcgtgctcctcccaagctcaccagaggcagaggtgccgggaaaactcagccccaagcagtcggccacgatgcccaagaaaggcatcttgaaaaagacccagcagagagaatcaggttactactcttccccagagcgcagtgagtcttcggagctgttggacagtaatgatgtgatgggcagcagcatcccctcccccagccccccggacccagccagggtaacctcccacagcctctcctgccggaggaagggcatcttgaaacacagcagcaaatactcagcgggcaccatggacccagccctggtcagccctgaaatgcccacactggaatccctgtcagagcctggtgtccctgccgagggcctctcccggagctacagccgcccttccagtgtcatcagcgatgacagcgtgctgtccagcgactcttttgacttgctggatttgcaggagaatcgccctgcccgccagcgcatccgcagctgcgtctctgcagaaaacttcctccagatccaggactttgaggggctccagaaccggccccggccccagtacctgaagcggtaccggaaccggctggcagacagcagcttctccctcctcacagacatggatgatgtgactcaggtctacaagcaagcgctggagatctgcagcaagctcaactagcattccagggcgcccaggggcgggcgggggtacgagggaggaaggggagcaagacttgggctcacaggctggttacctctttgctggctgtgacaacagactgaaaaaggattggcactgtctcacttggccaagtttgcagccttgagccaacacctaaaagggagaggtgggctcttctgccagttctgtcaattgtcagtcagaatttgggccctgtttggcatttgctttatggcacctcctagaggaccagctgtccaggggaggtggtattgaccggcactcagtgggtggagaggaagcatatgtggaaggagcatttccttagaaatgcttcattcatccagatgcttctggaggaggggcaggagacacttgggctgtttgccttgggcgagcccaaagaacttgccccttttctccttgcattagcaagctaggtctggctgcgtggagctggcaagtagatttcagcaacttgagcttgagttgatgatcaattaatagtggctgccagttgtgctggcgtaagtggcccacatcatggggaaggagtgctgtgattgactagtaatggctaccacgggaaagggaaggggaagcagtagcactaatgctatgtagttgtcatctttgatctggctaggccctgggaatcgggtttagtcatcctgtgggatctgtgttaactctttcatgccactggtgaggcatttgttaatttgctactcaactttgaggaaagacagggccttggtcagagagagaatgctctgaactctgctaaggacatagagtcagcccatggtgatttagctccttgctgttcacctcctctttcctgatgtctgccttgctctacagcacaacctcttgagggtggacagggagaaagatgatggtgtcagaggtcaaaactattatatatgacagggcacaagatggtctgtgatctttgcacagatgaatggaagttgatgcacaccaacaagaggcaacttgtcactttctttctcaatattaactggaatgctgcctcttgggttctcacctgcatggatgctttgagttggatgtgatactgtccatattctccagaggattacctggctgaaccattggctctgttcaccagtgacagatggtttccccatccactgagtgtagcatcctcagaggtaggcaagtttgcttctagggagttagcatgtagatgggatattgggatgaggaaaggaaaatcaggtagatggtgctttttttcccccaaatctaagtattctatgtcatggttttaaactttgccatgaactcctgggctttgggggaagagaaagttccattcatttaaatgaataaggtgttgaaagagtgcagggggttgggaggaagcatgtaagagagggaacatttccttagatgttacccagatggttctgggggagacagaaaagaggtgcggcaggactcttatcttaaaaagtaaacaaaacaaaacaaaacaaaacaaaaaaactagatatgtaatttctaaacacccagatcacaatgacaagatgccactccaaccatgggacaccttcatgatactaggtttgtacttcctggtctctgggatgacttcagattctgctggccaaggcaaattgaactcagttcaagatggccaccactggtagacgtgtagatagaaaagaggactggtcttgggaacatctttggaaaaaccaacaaacaatagttctagggagatgagaaaaaaattcaccttacagtgctaagaaagtgcattagaatggaattgccctttccttaaggagacagtttgggctctccccttgccaccggctctggtgttttggcttatgcgttccttcaggttgagctgagcagtgtgttatgggaagctgctcaatttcctttcattcaattccacctccttcctgaactctaatagaggttaaaagggaaaaaaaaaattctgtagatagcaaattgtgtgtgtgggggggggtgggggtgtgggtgcatggaggacaacctgcaactctgagctccctacttcctgcctcatttcatgcagtcttttctgaacagcctatgctgctgccctgctggccccttgtgcacggcagctggccgtgtccgtagctgtcagtatgacttagatctagctcctacctactggttgatgtgttttttccttttgccaagtgattgagtctgtttagtagtttccatcattctagtctttaagtaaaaatgacactattgaggaaagtcagtctactcccttcttcctccccccaaacacgtgttctcttttgtcaggaaactcagccagtgggctgtggcagagaaagtcctccactcagaggcagagactgagttaagtcataggtggccttaggcatctgcattgtttgcaggggttaagttttccttccagtgagggctggagggatgaattagctggtacctgaagccccgcttagctctgacactctgccaacatcctctgattctaggtgtggtgttgactgtcctttcaaggaaaaacttgcaatagagggaaaagccattaaagcagctccctgcttcatcattaagtcctgtcatccctaccagccaatcccagtcaaagaagttatgctttattcacttctgtggaattacaagtgagagacacttttaggacctgatggacaaagcaggagattcactgtcagctttcctggtcctctccttacttctgtgggccttgcaccgtcttagtttacacatctgccaaaggggtagaattacacttctttttacaggtaaatgtcaaggcacaatcagttttcaggaagtgcttcaagaccccaggtgaaatgaaaatgctaagtaccctctgaatggccatgcctgttaccaggtgctgcttcttcagatgatggggagcacttttcagggtgaaattcaggcgagttttgcccaggcctgctgtcttgagtacaaatgtgaatgatcgactgactgcttgttgccaaactggaaatgttctgtagggatttactggcatggtatcattcctagaagaaaaaaagagagaaacttgactgcacattaaaaaaaaaaaaatccacattgtgacttttatttaatttctattttttttggtaataaaaagttgacttttttatttgaatttgtcttttttatttattggtctgaaaggcatttcaaaggtattataataatatattggtgtaatttaattggtgcaacatgctttatggctcctgtcaaaattggttttcactcatttgattggtttgagcccagaacagcctacaggggaaaaacaagctggataaccacccaaagtgtttgtattttcgttggaaactgatttttgtttcattttggtttttgtttctgtttttatttttaaattaaataaattgcaatgaactg

SEQ ID NO: 2553 - protein, 661 aa, Homo sapiens
MEGAAAPVAGDRPDLGLGAPGSPREAVAGATAALEPRKPHGVKRHHHKHNLKHRYELQETLGKGTYGKVKRATERFSGRVVAIKSIRKDKIKDEQDMVHIRREIEIMSSLNHPHIISIYEVFENKDKIVIIMEYASKGELYDYISERRRLSERETRHFFRQIVSAVHYCHKNGVVHRDLKLENILLDDNCNIKIADFGLSNLYQKDKFLQTFCGSPLYASPEIVNGRPYRGPEVDSWALGVLLYTLVYGTMPFDGFDHKNLIRQISSGEYREPTQPSDARGLIRWMLMVNPDRRATIEDIANHWWVNWGYKSSVCDCDALHDSESPLLARIIDWHHRSTGLQADTEAKMKGLAKPTTSEVMLERQRSLKKSKKENDFAQSGQDAVPESPSKLSSKRPKGILKKRSNSEHRSHSTGFIEGVVGPALPSTFKMEQDLCRTGVLLPSSPEAEVPGKLSPKQSATMPKKGILKKTQQRESGYYSSPERSESSELLDSNDVMGSSIPSPSPPDPARVTSHSLSCRRKGILKHSSKYSAGTMDPALVSPEMPTLESLSEPGVPAEGLSRSYSRPSSVISDDSVLSSDSFDLLDLQENRPARQRIRSCVSAENFLQIQDFEGLQNRPRPQYLKRYRNRLADSSFSLLTDMDDVTQVYKQALEICSKLN

SEQ ID NO: 2554 - DNA, 75270 bp, Homo sapiens
tcccagggtcccgggttgggggggtggagcagcatttcgtcgccgcgggggtgccgggactccggccgcagtgtcgccgccatcacggacttcctgtgggacaagcgcacgggcctcgccgccagaacggtgagcgcgcgggttggctggccgcgcgaaaagatggcgaccgcggggcgggcggggttaggcttgggttgggggcaagggacgggggcgagatttggagaggaggagagttgagacctacgaagcgacggagtagggagatgagggggaaggaggtcggcctgcgttagatgtaccaagaagacctgtaggaagcttgggcggaaccagactagaagggatgatagagtaaggatgggagtggttccagagatgtgaaggagtggaatatcaaagttggactcgggtccaatcaaagctggaggggaggaatacatcaccgtgtcacttggaacatgcaggaagaatttgcctgtaggagttctggattttctgagtaagaaaggaaaaagcaaaagatttcaaacttgagaaaggtaggctagtgatgttttgaggggacagtgctgtgaggccgtttgatggtagtatgtggtgagatggcatttatgtggctatgctgattaggataactatgctgggaaaatcttgtgcttgcagcttggtatgctaccggccccagttacaccaagaatgcatcaaataccaccctcctcaatttggggaggttgggaagaagtgtatacagaatggtggtcagacatcggaatcattaaaccttttgcatacgcgattctcatacacccccaccaagacttatgtccctgggcctgtttcattttattgtgccttcctattctcatcttcctggattgtgacagtgatttttctcttttttccttgaaggaaaaaaaggatttgtgaaccatcccattccaattccattaactggaaggtggccagctgtcagctaagtagggctgatattaattaaaaaccacttactggccaggcgcggtggctcacatctgtaatcccagcactttgggaggccaaggcgggcggatcacctgaggttgggagttcgagaccagcctgaccaacatggagaaaccctgtctctactaaaaatacaaaattagctgggcgtggcggcgcatgcctgtaatcccagctactcgggaggctgaggcaggagaatcgcttgaaccctgcaggcggaggttatggtgagccgagattgcgccattgcactccagcctgggcaacaagagcaaaactccgttttcaaaaaaaaaaaaaaaaacacaagaaacagttgttatctacgtcttaagcacaagagtggaggggccagatgggatgctgactgtattttgtggcctactacattaaaacctctcaagggagagttggccaaagatgtgagagatgattaagttaattcaaggggcccgacccagatccctggagctgatagtatttggcgtttacctggtatatgtagaaacctgggagactggattcctaccctcaggacactgatagtctacttgaggagatgagatgtactcttaatgagtgtacaacatttatcataactgtaaaccaaagctttactctattgacttgtgaggaactcagcatcacacagatctatatcttagatcctgaacggggatacactgtggcagtctccatcggtcgtcatacactttgctctgtagtgaactgtgtcctagacctgaaggtcttcatggagctgtgtttgaagaaaataaggatagaacacttgaactggctgggtgcggtggctcacgcctgtaatcccagcactttgggaggccgaggcaggaggatcacgagtcaggagtttgagaccatcctggccaacatggtgaaaccccgtctctactaaaaatataaaaattagccaggagtggtggtgcgtgcctgtaatcccagctacacaggaggctgaggcaggagagttgcttgaacctgggaagtggaggttgcagtgagccgagattgtgccactgcactccagcctggccacacagcgagactctgtctcaagaataaaataagaacacttgaactgaggggtgggtaatgagggatgggtttgggggctttctagagtttcagccagagttagtaggtggctgtactccaataaggaggaattgtaagtacagaggaagactgaggaagttgtgcctggtaaaaagaggcagaaataagaggggaaagcagcttagcatctttggagcagccagtccttggaggagatttctgaaaactcgaaactttcctatttccgctttcccttgccttccagatgccgcatcctcgaaggtaccactcctcagagcgaggcagccgggggagttaccgtgaacactatcggagccgaaagcataagcgacgaagaagtcgctcctggtcaagtagtagtgaccggacacgacggcgtcggcgagaggacagctaccatgtccgttctcgaaggtgaggcctcaggaagagatactcaaacacagggtcactcgctcattcctttgttcaacaaatacttattggttatatgctaaaaccattgccttaagtagctggctgaaggtaatgtcgggatagataaccacagaagccatttgggctgcagtgttaagtgttagaatacataatgaggaactgaggacgtacccagtgcgtttggttggagtggggcaggatgttaattcagataaaacattgcagaaagcaacatctgtatatgtctggaggacaagtagagtcaggtgggggaagtgtctttgggcagagggaaagcatgtgcaaaggactgggagctacaggtaactaataagctaacagataagacaaagttagatctttgtgtttttaattttttaaaaattttaaaatatcatttatttatttttgagacagagtttcactctgttgcccaggctggagtgcagtggcaagatctcagctcactgcaaactctatggccccaggttcaagttgattcttgtgcctcagcctcccaagttacctgggactacaggcatgcgccatcatgcctggctaattttttttttttttttttgtatttttagtagagacaggatttcaccatgttggcctcaaactcctgacctcaagtgctccacctgccttggcctcccaaagtgctgggattacaggcgtgagccactgtgcccggcccagttttaatattttagtggtatgttcagtggaaagaatgggttaaggatggtttagagcaaggggggatttcattcaggaaagcttgagaaaaaaatggctctttgtttctttgtatcactgcagcgggaaaaaggccccaatagggagtggttctgcagatgccttttcagaggttttggtgacatggcagatgtgcttggttaacctcaacttcttctggtcccttggtcctctccagtgactcaaacaagtgtctgagaacagtttttcttagcattcactctttgtcctcactaaggcaggaccttgtcacagggtatggtagggaatgtgatctgaacagatacacctcattggtatttgttatccaacagcagttatgatgatcgttcgtccgaccggagggtgtatgaccggcgatactgtggcagctacagacgcaacgattatagccgggatcggggagatgcctactatgacacagactatcggcattcctatgaatatcagcgggagaacagcagttaccgcagccagcgcagcagccggaggaagcacagacggcggaggaggcgcagccggacatttagccgctcatcttcggtgagtgccagcccaggcccttcctctccccactcttctgcaggccctctaggactctggtaagtgagcagtatccttgttctcagctgaacattggggcatgaacactgaggtgggcactgagtttgcctactttcttggaagctctccgactcttgaagggccctggatctgctttggagatggatgggcacggagcatttgtgacccccagtgctctccctggcatgttgggcttattgtgttgggagcagcttctccgccccagcggcctccactctttaatggggaccttgcttgttgaactgcctttttcccccaagccctgggctctgtagcccccttggcaggcgggcttgggtgggggcaaggggagatctgtgtctgcccggaagggcattgtgtagagcatggggttgtgggtgacattggcaacaacaccacttctctgctctgcccatgcctctccctgttcctgttttgggtttggggacttgggattatgcgccgctctctcttctcacaccgatccaccttactgcatctgacgtgttcccttccactgtcccccatcatcgtctgtcccccctggctgggcgcctgtgaccggtgacccctctaccacccaccccgcctccctccggcccccggctccgaacactgggcttggttcggaaccccccctgccccccgacagcagcacagcagccggagagccaagagtgtagaggacgacgctgagggccacctcatctaccacgtcggggactggctacaagagcgatgtacaagccaaatcgtaacaatcctatagcctgtaatggtcccatagccatcctaacgtcccaagccaacctgagtcacagcctcttgccttttgctcagtggtgttgtttatctgggtggtttgagttgctgttgagaattgacctctgttgtccactcccagctctcacggcccctgggttaaaggtggtgggaatcacgcaggggttttcttcccctgtgaccatctgtatctgttccccttccttcatctccaccccaggttgctgtccccttttttcttccaactcagctcattccccaccttctctccctccctctccccgaccctgctctctttcatttcagatgaaatcgttagcaccttaggagaggggaccttcggccgagttgtacaatgtgttgaccatcgcaggtaactgtcagtccctccctactatgtggggctaaagagatggttggggttatatggggcttttttgctaattaacctgaggtagaatttcttagtccccctacagccctgttcattttgagacattcttgagaacccagcaaaagcctctcctgccaacttacaggggtggggctcgagttgccctgaagatcattaagaatgtggagaagtacaaggaagcagctcgacttgagatcaacgtgctagagaaaatcaatgagaaagaccctgacaacaagaagtaagcaagcaaggaagtgtgtagggaggctgagagccccaacccctacacgggagagattcctagacctggtttaggcagacagggggagtcctagaccttctcatccattcatcttttgttcatcatcttagagtagtagaacatcagggtaggaaagggggggggcccatgacattccttaatccactccccttgttttcagggaagttagattgctctgtcgtttgaccccagcctagaatggcttctgtagagatataccctggacatagccctaggactgagcatcaacctcatcgaacaatgaattaagcttttataagtagaactatgctgataaggccacagacatttatgcagtaatattttgttcacatacattcacagtccaaaaatagaataaggactttaagccaagatatgaggccagtaggtataaataggagcccagtggtagctagtggtgaatgaatatcaggagttgggctggggtttgggatttaggatggacagtttgatgattccaggatctatactgtttggagcttggcactccacagctcttccagcaaatagtttttgaactatttaaaatgacgcaggaagatattttgaaacttgggctgggcatggtggctcacgcctgtaatcccagcactttggaggccgaggcgggtggatcacaatgtcaggagttcgagaccagcctggccaatatggtgaaaccccgtctgtactaaaaataaaaaaattagccgggcatggtggtggacaactgtagtcccagctacttggaaggctgaggcaggagaatcgcttgaacaggaggcagaggttgcagtgagccaagatcgcgccactgcactccagcctgggtgacagagtgagacgccatctcaaaaacaaaaaagaaaaaaacatggcagatagtaccatttctttcttgggtctggtagaggctactccttagctgaactgaattttggtgttagtactagctggcatggttttacacaagttatgtggaatcaacagctatgaagtacctccttgttggatggctgatgggcagatgggagctcatcagacaatcccccttcccccatctctcttctcagcctctgtgtccagatgtttgactggtttgactaccatggccacatgtgtatctcctttgagcttctgggccttagcaccttcgatttcctcaaagacaacaactacctgccctaccccatccaccaagtgcgccacatggccttccagctgtgccaggctgtcaagtgtgagtggggtgggccgaagtggactctggggcagtccctcccttcattggatctcttctgtcggttgtgcactggtgaagcccctaaacagtcagctgtctgttatctgcagttctttgatttactgtcatcttgaaacgtcttctgacttaactccttgactgatgtctttatcgtcactgattgctcttactctacacctagcctagcagcagctagaagagaaagcctttggaatcaaagcacttaattaccctccccttttcctttctccctttcttgggaaagcatcagtcagacagcaaacataaagagacaaaaatacactccttagggtaaaggcttacatttgtctgggatgagatgttcattcacagcaaaggagatgggaacacagagtatgtagttcagctaaggggcaaggtggggaattcaaagaaatatatcattcctctggagtcatcaaaataatacagtttcacagaattgagttaacataatgccagctagacacatgtcaaagtgtgtacacactacaactcaaagcaaactttttttttttttacatcagttgagctacatatgtatcttacattagaaagagcagagcttcttagaccaggcattccatttagacgtagagcggaaagcagccctagtgattctggacctgtctcctcactggctttgccctaggtaaccaggcctggggtcagctgataccagttagctctggccacctgcaccaagcctgacctggccttctcccctacagtcctccatgataacaagctgacacatacagacctcaagcctgaaaatattctgtttgtgaattcagactatgagctcacctacaacctagagaaggtaagatggatagggtctgcccttggttactgggggcaggcagctgcaccactttgccttctgccgagccctttgttttctcccttttatttcgtcctcccacattttctccctgactggctccaactgggtaaaactaaataggttgaaagggagaaatctcttaagaagacttaaattgggagataacttgtacaggggacttcagataactttccagtagagtgaaagtttttaaggttcttggtttgggctttatttatttatttatttatttatttatttatttatttgagacagagtctcactctgttgcccagactgatgtgcagtggcataatctcggctcactgcaacctctacctcccaggtttaagtgattctcctgcctcagcctctggagtagctggggttacaggcacccgccaccacgcctggctagtttttgtgtttttagtagagatggggttttgccatgttggccaggctggtctcgaacccctaacctcaggtgatctgcctgtctcgggctcccagaatgctgggattacgggtgtgagccacagtgcctggcccggacttcttttttgagatgtgtatttctgtgaggtaggaaagctcggctcctttgactaactggagataatgaagatctcagacctaaagaagctctccctcctttgacccctttgctacatgttacatatttttagagaaactcctttgctacatgttacattttttcagaaaaacccatttgctacatgttacattttttcagaaaaacccatttgctacatgttacatgttttcagaataactatatatctggcacttgagtgtagtcttcagatgcttacagatgtgcacgctgttctataatcatttcttaatccttttgctcccctacttctaaaagtattatgctggatgtggtggaagctgtaaaacaggaatttcccaggcttgtaaggccaggcaggagatcacagtaccttttttaaggctcagaagcaatgtagagaatactggtggaatctcagtctgggtgcagaggttcatcctctttctcctctgctcctagaagcgagatgagcgcagtgtgaagagcacagctgtgcgggtggtagactttggcagtgccacctttgaccatgagcaccatagcaccattgtctccactcgccattaccgagcaccagaagtcatccttggtaagggagggcaaggctgtccaagtgtgtgagatgatgtgagggtggggccacctaagcctcataacaccttttccctcccattctcacccagagttgggctggtcacagccttgtgatgtgtggagtataggctgcatcatctttgaatactatgtgggattcaccctcttccaggtaagtgatgggatgtcttacttgactgcctggcattcttctacctggttcctttgttttctgctgaggacctgcctactcagttctccacattgcctgccttcctggcagctgatccttagcatgcccttttcagtcccatgctcagtttctgtttttgtttcccagacccatgacaacagagagcatctagccatgatggaaaggatcttgggtcctatcccttcccggatgatccgaaagacaaggtgaaccttgagggggcactagttaactcttttccttttctctccacagaattggtctatttcacatcattttcttttttctttgatacctcctctccccccagttactttcagatggggaaataagggaattgtaacaagggtgaccttctgattcctcaacctccccttcccctctagaaagcagaaatatttttaccggggtcgcctggattgggatgagaacacatcagctgggcgctatgttcgtgagaactgcaaaccgctgcgggtgagctgggctcgggataaatagtgcccaccgtccagaagtcacttccttcttagggtggttgccccctggaatgctcttcaacaagccagagggttaggaaaggaggggaggaaagctgaaagaagacatctttggtcaacagaggaaacataagagggagtggttttgcggagggaaggaggttagacagcctaaccttgagacaaccagagatcaaagcaatgtcctggattctttaggtcagacagaaaagaataaactacccttgaagagcttacattttaatgaggaactaaagaagattcatgaagttgacaaggatatacaagtagaaagaactttcaaagattatggagtaattgtgctagagggaaggtaggttgagctataatatcagaaacgttggtcctggtgtggtcgtggttaggtagccttcaaattggttgcaagcagagccttggttctccaagaatgaaaggtagggtcttgaagaaggcagggtttgtaaggcatcctgcctcacctttttcctgccctcctccaccagcggtatctgacctcagaggcagaggaacaccaccagctcttcgatctgattgaaagcatgctagagtatgaaccagctaagcggctgaccttgggtgaagcccttcagcatcctttcttcgcccgccttcgggctgagccgcccaacaagttgtgggactccagtcgggatatcagtcggtgacgatcaggccctgggcccccctgcatcttttatagcagtgggtgtccagtccaggacactggtgcttttttatacaagagaacgagccagagttcactccttcctcctggctctctatatacctgtgaatatgtgaaatagtgtaaatatgaaagaacttgtacctatcacttcaacccctgccttgtacataatactattccatccacacagtttccaccctcacctgccccctcatacggagttggatgggggccgagtgaggtaaccaggtggcatctaccccatgttttataaggaattttgtacagtctttgtgaaataaaataacgtgcttcatttgacccccatccctggagttggaggtttgggaatgctggggtggagggatgaaactattggcaaactttctgagtttgggtatgaagggagtcctccttaccctccaaaatgaagcacagccaggctaccatttatttcccctgtccaccttatcatatgggagggtagtgatgggtggggcagcatttctttcagattaaaacagagaagtgttatgaggtggcacttctcggatgtggaattatgagagttgggaagatctgactcctagagtcattaggccgcggcccagtatagagccagaaactcaggttgaaaacgtgctcaacctggctcctaggggggattgccaggaccggtcagaaggctcccgtcgtccatctcgggagactaggaaggccggattcctacgcgaggcctgctgggaagtgtagttcgttagtggaaggaagtcacatggaagaggggcggtagttggttgtgggcactgggttagaggtatcacgtgggggcactttcgtcttagcttttggacaagacgcaggcgcaaacccacggctgctgcgggggatccttgtggccctttccggtcggtggaaccaatccgtgcaacagagaagcggggcgaactgaggcgagtgaagtggactctgagggctaccgctaccgccactgctgcggcaggggcgtggagggcagagggccgcggaggccgcagttgcaaacatggctcagagcagagacggcggaaacccgttcgccgagcccagcgagcttgacaacccctttcaggtgacttgcgccagtcggcctcttttgggcggtcaggttgattcttcccggttctgtagggtcgggctaacttgtatccccatttgtgacatttgatcctgggaagagccgccacgtggggtgacagtgactccagaccagtgagcactctggggggcgggccctgccccttaatgggctggtgctggcagtgttggatgatggatttgaggtaaatgttgtcccagtcctgggacaacggcgtggccccgaaggtgcagtacttggagccacaggcagtttgggaatggtccctgggaattcccctaggtggcactgggtgccagctgagacccgggtctctgccctcaggacccagctgtgatccagcaccgacccagccggcagtatgccacgcgtgacgtctacaacccttttgagacccgggaggtgagctactggagagcataggagttcaaggaagggaagggtttgccagtgagacaagttagcttgggtacaggggacttttctgcatgcacaggaaggaagaggcactgtgatcttagttccctgagagaggctagtcagccatgggatgcctcatccttctagggccaccagggccaccaacccaaatggtttgagctctaaaagtcagtcctgggaagatctggaggctggcaaggccttaaccaatgttctgtatgggaaggctttcttgaagaaaataaaggttggggctggttggagtttaggttaggtgtgcagtttgaaagcaaggaatgaggaggactacacctgtttgtcccactggattagaagatggtgagttgtaagaatttaaggggttttcatggtacttaaaacttaaaaaaaaaagccaagcatggtgtgcatgcctgtaatcccacttgggaggctgaggtgggaggattgcttgagcccaggaatttgatggagaccatcctgggcaacagcgagacccccatctcttgagacgttttaaaaattggctaggtgtagtggcacatgcctgtagtccttgctacttgggaggctgggatggaaagactgcttgggcccaggagtttgaggcttcgatgagtgatgattgcaccactgcactccagcctgggtggcagagagacaaccccacactccatccccagaagaaaagagaaaaaaaaaacacagttaagtggggagatatggtaaatgagtgatttgagtcctcactaaggaattggatatgagggatgataaggctgctacaggtcatcatagagttctctgacagaaattcaacagaagaactagcttcctaacaaatgggggaaaggctgcttccttacatcatgagttctgggtctaaaggtattcaagcagactatagattcctgtgttatgagggactagatgatcactaaggtcttttcctcaacagccaccaccagcctatgagcctccagcccctgccccattgcctccaccctcagctccctccttgcagccctcgagaaagctcagccccacagaacctaagaactatggctcatacagcactcaggtacaggaggtgtgcaggtgagggctggggagaagggccagtcctggggcccagggctcacatctccgtctgctcacactgggcaggcctcagctgcagcagccacagctgagctgctgaagaaacaggaggagctcaaccggaaggcagaggagttggaccgaagggagcgagagctgcagcatgctgccctggggggcacagctagtaagtaatagagtggggaagagcatctgagagtttgggaggagcaaaaacaggtcttaagggcctgggctcggctgggtgcggtggctcacacctataatcccagcactttgggaggctgaggtgggcggatcacgaggtcacgaggtcaagaaatcgagaccatcctagccaacatggtgaaaccctgtgtctactaaaaatacacacacacaaaaattagctgggcatggtggcgcgcacctgtagtcccagctactcgggaggctgaggcagggagaatcgcttgaacccgggaggtggaggttgcagtgatccgaaatacgcgccactgcactccagcctggtgacagaaatgagactccatctcaaaaaaaaaaaaacacaaacctgggctctggagtcagactgctgagtttgaattttagagatactgcttactaaccatgagcttttagggaagttacttaatcttgaatgcctcagtttccctatttataaaatgaaaaccacgtttgcatccgtttgacagggttgttgtgaaggttaaacaaaatatatgtgaagtacttggtacagtgcttagatgttttaaataataataaacagtattaatttttccactctcacttgtctccttggaccccaaattggagataaaagagaggatccagggctgggtatggtgcctcacgcctgtaattccaacactttgggaggccgaggcaggcaggttgcttgagttcaggagttagagaccaacctggacaacatagtgagatcctgcctccaaaacattaatgaaaaaaattagcagggcatgatgtacctgtctgtagtcctagctcctcaagaagctgaggtggacggccaggcgccggggctcatgcctgtaatcccagcactctgggaggccaaggcgggtggatcacctgaggtcaggagttcaggaccagccaacatggtgaaaccctgtctctactaaaaatacaaaaattagctgggcgtggtggcatgtgcccataatcccagctactcaggagactgaggcaggagaattacttgaacccgggaggcggagattgcactgagccaagatcacaccactgcactccaacctgggcaacaagagcgaaactctatctcaggagaaaaaaaaaaaaaaaaaaaagctgaggtgggagggttgcttgagcccaggaggttgaggctacagtgaaccatgatcataccactaccttccagcctgaacaacagagaccctatctcaaaaaaaaaaaaaaaaaaaaaagagaggatccagggatggagagaagggggagtgattcctttgttggtctctgttttacttctggggtccacctgttttttggcgccttacagctcgacagaacaattggccccctctaccttctttttgtccagttcagccctgctttttccaggacatctccatggagatcccccaagaatttcagaagactgtatccaccatgtactacctctggatgtgtgagtagtgagaagccttttggaggaagttacaggtagatctcttaactgccctggggtccgctcaccaagaaccaaacacttcacctctatttagaactcaccagcctgctagcaaatgttcttgccctctccccactttttattgtccatatgcaggaatatattttgaattctttagatgtctttgggctgggtgcagtggtatacgcctgtaatcccagcactttgggaagctgaggtgggtggataacctgaggtcagaagtttgagactagcctgatcaacatggagaaaccccatctctactaaaaatacaaaattacctgggcgtggtggcacatgcctgtaatcctagctactcaggaggctgaagcaggagaatcacttgaacccgggaagtggaggttgcaatgagccaagatcatgccattgcactccagcctgggcaacaagagcaaaactccatctcaaaaaaaaaaaaaaaaaaaaaaaaaaaaaaaaaaaggccgggcacggtggctcacacctgtaatcccagcactttgggaggcccaggtgggcagaacatgaggttaggagatcaacaccatcctggctaacacggtgaaaccccgtctctactacaaatacaaaaaattagccgggcgtggtggcgggtgcctgtagtcccagctacttaggaggctgaggtaggagaatgggcgtgaacccaggaggcagagcttgcagtgagccgagatcctgccactgcactccagcctgggcgacagagcgagattccatctcaaaaaaaaaaaaagaaaaaaaaaaattagctgggcgtggtggcgggcgcctgtagtcccagctactctggaggctgaggcaggagaatggcgtgaaccggggaggcggagcttgcagtaagctgagattgcgccactgcactccagcctgcgcgacagagccagactccgtctcaaaaaaaaaaatgtctttgcaaggggatcacacattattgacatttgctttctccatctcccctgttgaggattccatgaaggcagcagctgccttcatttccttactctgccatgtttggtgaatattataggatgagcatagatgggaaggagccttcattgcagtccagaagggctcctcatcctgtccctctgccccttaggcagcacgctggctcttctcctgaacttcctcgcctgcctggccagcttctgtgtggaaaccaacaatggcgcaggctttgggctttctatcctctgggtcctccttttcactccctgctcctttgtctgctggtaccgccccatgtataaggctttccggtaagtgtgttagtggtgggagagtgatggagacctgggatgggccccacgtctgcccatccttcagctctaattcttctcccaccctccccatttttttcctctttgtaggagtgacagttcattcaatttcttcgctttcttcttcaatttcttcgaccaggatgtgctctttgtcctccaggccattggtatcccaggttggggattcaggtttgtgaggctgttatccaccctcacctttccctctagatccagccagcactgggtgctggataggagttgttcagaaaaaggaaatgtggttttaatccttgggaggtactagtttaatgagatacaagacatacttccaggatagagcgcagacagcactcttgacacatatagattgaagggaagaatgctgcatttggccaatctaaggtggcttcctggaggaggcatagaaccatggttgaaaggaggaagaagaatccccagatgagtgcctggaagagcttggagagctcagggctaatggttcagaaactggaattaaactatgaagagattagatacagtttgggattgtggtgcttggaatgctgctcgattgacagggagccactgctgatgggaagggtaggaacaggggatgctggtgacataaccagtggagaagctgaggagcccctcttcactggtacatccttccctttacagtggctggatctctgctctggtggtgccgaagggcaacacagcagtatccgtgctcatgctgctggtcgccctgctcttcactggcattgctgtgctaggaattgtcatgctgaaacgggtgagggctgtgtcgaaggtggggccgggatggtgagatcatgggtccccaggggcgtgggtggaacattcaggagcaactggcacaggtcaggctgctgggttgttctcagctaatggacctctggggtgtgtgtttctgtgtgtgagtgtgtgtgctgggcagcaggctgctgagtggtagtgatgctgttaggctgggggtggggaaccagtggctggaatgggcggtaatgtctttgtcctctacttgcagatccactccttataccgccgcacaggtgccagctttcagaaggcccagcaagaatttgctgctggtgtcttctccaaccctgcggtgcgaacccgagctgccaatgcagccgctggggctgctgaaaatgccttccgggccccgtgacccctgactgggatgccctggccctgctacttgagggagctgacttagctcccgtccctaaggtctctgggacttggagagacatcactaactgatggctcctccgtagtgctcccaatcctatggccatgactgctgaacctgacaggcgtgtggggagttcactgtgacctagtccccccatcaggccacactgctgccacctctcacacgccccaacccagcttccctctgctgtgccacggctgttgcttcggttatttaaataaaaagaaagaggaactggaactgacatccccgtttcctgaatcttcattgggaattaggccttatgaaagagaaaggagagtgtggagtgaggtgggaaggtcggacccggctttagtgtaaactgggagagagatgaggggcggggcggtggagcccgagtggctggcgcaggaaggaggtgggaagtccacggaaacgcgaaacccggagacgccagggagccctgctccccacccctctccattaatgacggggaagagccaccgcctctgccgggaacgccaaggaatacgcgggcctggagcctgaaaagctggatggggctcaagtggaggcccaaaggatcactagcagcctagccagggtccagagcgaggcagggactggaggagcgcttatccgactgcctcgccctgccgcgggatcccccaaccccgacagggtctcagtcccgaactacaactcccggggtgcaccgcgccggccctcgccgccatgcccctccttcccgcaccatccccattcccatcccccttctctagtccccgacctgcggcagccggagctcggggagcggagcgtggtggggaggggagcgggacaggcgacacaggagacagcggcgccgcggcctctccccaccaggcggccccggatcctactggacgccctgagggcacaccgaccgcgcctctagagtcaccccacgccgacccctcccctcttctctagacttatttccatccttcccgcttttaccctccccacccgtccctgggctccaggccgccgccccctcctcactcctggaccggcccttctcggtgcccctcttccctagggagatgcgatgagccggtgcccccgcgtcctcatcgtcgccccgggcacggtgcccgtccagtgcccgtggtggggagggagcactccgcggtccctccgtgacgcccctcgcttggccccccccacagctggcgtccctcggccatgccccaggggacccagccagggggtgggctctagagcgagtggggtggagaggagaaaggacggggccttgggggcctctgagatgctcccaagtgccagggagggccgagcgaggcgcaggcaaccgggcagcaggcatgatgccctcgcctagtgactccagccgctcgctgaccagccggcccagcaccaggggccttacccacctccgcctccaccgaccctggctgcaggccctgcttacgctggggctggtccaagtgctcctgggcatcctggtggtcaccttcagcatggtggcctcttccgtcaccaccaccgagagcatcaagaggtcctgcccgtcttgggctgggttctcggtgagttgggtgcacagttgttgggtgggggaggctcctcgggccccaccctccacaccagctgcaagtccacatgcttgcctctcctccctctcctggtcctctgcctccttacagggctgggtgcatcctgtggtgaggggctcactcaggagcctccccctgccaggctgagcctgtgcccactctgtccccagctggcgttctccggggtggttggcattgtgtcctggaagcggccattcactctagtggtaggtgccagggtccagtgcccactgggaggcaggtgcccagcacgcaaggggaagcccatttatgacctcaagaagggaactggctccccagttggtgccagccgggtgggcacgaagttctgtgaaggagggggactctgtccgtggcagaggagtactcatgagggtcccagccctgagtctgcaccctgttttccccagatctccttcttctccttgctttcggtgctctgtgtcatgcttagcatggctggctctgttctctcctgtaagaatgctcaactggcccgagacttccaacagtgctctctggtgagatttgaggagggagagctggaaagaactggctgggggaggtgtgcaggacacctcagtttgtgctgactcaggctgcctcaccctccctgctccactcaggaaggaaaggtctgtgtgtgctgtccctctgttcccctcctccggccctgtccagagtcggggcaggaactgaaagttgcccctaactccacctgtgatgaagcccgaggggccctcaaggtgagcttgcaccctgcaaacatcctcctggttctcactcttgcctcccctgctggggatctcacaggcccataatgtgtggaacttagccgtctcctgactcctctcctcctttcccttccccagaacctgctcttcagcgtctgtgggctcaccatttgtgccgctataatctgtacactctctgctattgtctgctgcatccaaatcttctccctggacctcgtgcatacggtgagaagggagcaggggccagggcacgcaggtatggtgggggcaggggtgtgtgtgctgagacttgcctgagggaacaatggctacagatctggcttttgagcaccaggggctatgggttatctattatcctcatctattggaggaatggatgtttagtggggaggatgagaaggggagatggcagggagtgagttaagtatgtgatgctggtctgggaccaggagagggtgctttagagaatgggactggatggtggggtagagtcaagaaggtcctatgctgggcacggtggctcattcctgtaatcccagcactttgagaggcccaggcaggcggatcacctgaggccaggagttcaagacccacctggccaacatggcgaaaccctgtctctattaaaaatacaaaaatcgggccgggcgcagtggctcgtgcctataatcccagcactttgggaggctgaggagggcagatcacctgagatcaggagatcgagactatcctggctaacatggtgaaaccccatctctactaaacatacaaaaaattagccaggcgtggtggcgggcgcctgtggtcccagctactcgggaggctgaggcaggagaatggcatgaacctgggaggcagagcttgcagtgagctgagatagtgccactgcactccagcctgggcgacagagcaagactccatctcaaaaaacaaacaaacgaaatacaaaaattagccaagtgtggtggcgggtgcctgtaatcccagctacttgggagtctgaggcaggaaaattgcttgaaccggggagtcagaggctgcagtgagctgagatggtgccactgcattccagcctgggcgacaagagcacagactccgtctcaaaaaaaaaaaaaaaaaaaaaaaaaaaatatatatatatatatatatatatatatatatacacacaaaattacaaaaattaggctgggctccgtggctcatgcctgtaatcccagcactttgggaggccaaggcaggaggatcaccagatatcaggagtttgacaccagcctggccaacatggcgaaaccctatctctactaaaaatacaaaaattatccgggtgtggtggcgggtgcctgtaatcccagctactcggaagactgaggctggagaatcgcttgaacctgggaggcagaggttgcagtgagctgagatgtagccattgtactccagcctgggcgacaagagtgaaacttcgtctcgaaataataataataataataattagctgggcatggttgcacacccttataattcctgctactcaggaggatgaggcatgggaattgcttgatcttgggaggtgggggttgcagtgagctgagatcgcgccactgcactccagcaacagagtcagactctgtctcaaaaaaaaaaagaaggtcctagatggaggtgaggctaaagggtggacattcctgtgaagacacagaatgtgtggagcttctggatggaggtggggccataaagaggaatttgtgggtgggcagggccagaggctagaggtacagggtgacggtggggttaaggagagctgattttgggtgagggaggggccagaataagagcttctctcaggggatagggccagaaaaaataatgtagatgagagaggagtttggggcccaggaggagctgtattcccagaatccagacttgctgacctgctcgcttccccagcagctggcccctgagcggtcagtctcaggcccactgggacctctgggctgcacgtccccgcccccagcccctctcctacacaccatgctggacctggaggaatttgtcccgcctgtgcccccaccgccctactatcccccagagtatacctgcagctcagaaacagatgcacagaggtaaggcctggtggggtcttgctgggggagctaaggaaggggactggggctgggcctggattgctggagagagggatctttgtggagggggaattatttctcctacattgaccctcttcctcatctgccagcatcacgtacaatggctccatggacagcccagtgcccttgtaccctaccgattgccccccttcttatgaggcagtcatgggactacgaggagacagccaggtgagagcacagcacggcttggggcgggctggggagccgggttgtagcctggaaagctgaacaggctgtagcctctggataaagatagtaacagtggtcaaggtctttacagcaccagcatgcccactgttgcctttgatcttccctagagcctggtgaggtgagtgggttggaagctatcatttctgccatacagacgtggaagctgaggctgcacaattaagtgacttgtacaaagggacaaggctggtctggaatctaagtctccagagctctgtctagcacatgggggtgttcagtgtgtagggctgaacccttgaccctgtgtcttctgcaggccactctctttgaccctcagcttcacgatggctcgtgcatctgtgaacgagtggcctccattgtagacggtgagcagggcgtaatgaggggtggacaagggcggggctgccagggatagctggggtgggtagagacaatagaaggggaaaacaaggcggagttggtggtttggggacataggagggctgtggcaacttggaaccctggacttatttttctcctctgagataaagctggaggcacagtggcccctagaggctgggcttgggagaagaggaactgcctgggcagggctaggccaggccaggctggtgctacacagcgccccctgccgcccacagtgtccatggacagcgggtctctggtgctgtcagccattggtgacctccctgggggctctagcccgtcggaggactcgtgcctgctggagctgcagggctccgtgcgctccgtggactacgttctctttcgctccatccagcgcagccgtgccggctactgcctcagcctggactgtggcctgcggggccccttcgaggaaagccccctgccacggcgccccccacgggctgcccgctcctattcctgctctgcccctgaagctccacccccactgggtgcccccacagctgcccgcagctgccaccggttggagggctggccgccctgggtgggaccctgcttccccgagctgaggcggcgggtcccccggggagggggccgcccagccgcagccccgcccacccgagccccgactcgtcgcttcagcgatagctcaggttccctcaccccaccggggcaccggcctcctcatccggcatccccaccaccgctgctgctgccacggtcccacagcgacccaggcatcacgacctccagtgacactggtgagccccctccccgactgcccaggctcaggagagggtaggcactgggagttaggtggccagtgatgcccaccaggattggggcacagttgaggtgggtgaggaggaagaaagggtgagttcactcctctggtagacattctcaggtactcacctcctagggacagaacatccatagcttagcagctaaaaaaggagaatttttttttttttttgagacggagtctctggctctgtcgcccaggctggagtgcagtggcatgatcttggctcactgcaacccgtttcccgggttcaagtgactctctcctgcttcagcctgccgagtagctgggactacaggtgtgcgccaccatgaccggctaatatttttttttttttttttttttgagacggtgtctcgctctgtcacccaggctggagtgcagccgcgcgatctgggctcactgcaactccgcctcccgggttcacgccattctcccccgggttcacgccattctccttcctcagcctcccgagtagtgagtagctgggactacagatgcctgccaccacgcccggctattttttgtatttttagtagagatggggtttcaccgtgttatccaggatggtctcaatctcctgacctcgtgatctgcccgcctcggcctcccaaagtgctgggattacaggcatgagtcaccgtgcccgggcaatttttgtattttttagtagagacaggtttcacccttttggccaggctggtcttgaactcctgacctcaagtgatccacccgcctcggcctcccaaaaggatttattttttgaaaccagttccacagctctcagcttggtccacttatctgtcctccccaagcttcagctgtcacttgttaacatgtataataatagtacttcacgccgggcacggtggcttgcacctgtaatcccagcactgtgggaagctgaggtgggtggatcacctaggtcgggagttcgagaccagcctggctaacatggtgaaaccctatctctactaaaaatacaaaaattagccaggtgtggtggagcgcgcctgtaattccagctactaacgagagaggctaaggcaggagaatcgcttgaacctggaaagcaggggttgccgtgagccaagatcatgccactgcactccagcctgggtgacagagacacactccatctcaaaaacacaaacaaacaaacaaaaaacatgtataataacagtacttcagccataggcattgtactcgaagatgctgagaaagaacagtggcgggcaaggctgttcacacctataatcccagcactttggaggccaaggcaggtggatcacctgaggtcaggagttcaagaccagcctagccaacatggtgaaacccccatctctactaaaaattgaaaaattagctgggcctggtggtggacgcctgtaatcccagctactagggaggctgaggcaggagaatcgcttgaacctgggaggcggaggttgcagtgagctgagatcgtaccactgcactccggcctgggcaacacagtgagactccatctcaaaaaaataagaaaggagatagtactggggaacgctcagcactgtgcgccaggtgctgaacaacaccactgcagtccttgttgtggtggattgtaccatctagttgctggctaatatggacagagatgctggccctttgattggggatggagcgtgggagctgtgaaagctcctctgggcttgagttcccacaggagggtgggcgtgtccacagaacacttccactcactccctgtctccctttctctcttctccccagctgacttcagggacctttataccaaagtgcttgaggaagaagctgcttctgtttcctctgcagatacaggtcaggcatgtggtttgcgccccagggatggggattgggcatggctgcccagccccctctccaccctacaataccattctcttatctctgtctctctgcagggctctgctctgaagcctgcctcttccgcctagcccgctgcccttcccccaagttgctacgtgcccggtcagccgagaaacggcgccctgtgcccaccttccaaaaagttcccctgccctcgggccctgcacctgcccactccctgggggacctaaagggcagctggccaggtcggggcctggtcactcgtttcctccagatatccaggaaagccccagaccccagtgggactggagctcatggacataagcaggtaggaattcggggagccaggaaagatgtttgggaaagcgtggagcttcagattgagccttattgatgatgccctttcttgtgtccctgtccaggtgccccggagcctgtggggccggcctggccgagagagcctccaccttcgcagctgcggagatctgagctctagctcttccctgcggcgtctcctgtctggccgcaggctggagcgtggtacccgcccccacagcctcagcctcaacgggggcagccgggagactgggctctgacctaggcttcttgtcacactgaacacatccagccacaggcaccagctggttgggaccagcagcccccagcatcctcttgcactggctggcacaaaaagaaacctgctgtataccccccaaagtgtccctttccctcctacctctggggtctcttgctgcttgcctctgctgctctggtctgggagagcttctgtcctgtgctgcatgggtatttagactgtgggggagatgccccttcttatagcactggaggaggaaaacaaattcttgtccccctcagaatgagagtggctctttctgatttgcaagggcactatggtcagggcaaaggcatggcccaggtgtttaagtacagggtgacgtgtgcctatgcaatggggtggtaaggcaggcacgaagagtccaaaaaatctaggtggcctctcagctctgccacctctagctgcatgaccttgggcaagctatgtaaccccaattgcctgctccattaaagactgtgaaggtagaatgtttgtaaagctcttaacagtatgtaagccttcaataaatttcagttttccccttgttttcttgatcattctctgtcaccagtgaaatttgttctagtgtctctcatatttaagaaaactctttcaggactgggtatggtggctcacacctataatcctagcactttgggaggccgaagcaagaggatcgcctgagcctaggaattcaagaccagcctgggcaacatagtgagaccctgtctctacaaaaaacaaaaaattagccaggcatggtgggacacgcctgtagtcccaactactcaggtggctaaggtgagaggatcacttgagcttgggaagtccaggctgcagtaagctgtgattgagccactgcactacagcctgggcaacagagcaagaccatgtctcaaaaaaaaaaaaaaaagaaaaaagaaactttcaagacactctttccaaccactaattgtaactctgctcctccttttcacagcaataggttttctttttcttccctccactgttaaacatccattctctcctcacccacccccatcagactccttcccctatctttccacagccactgctctgaccaaactttccagtgaccacagtggtgtcagacccagtgaccatttctctgcctgcatctcacttgacctcgaggcagcaattaatacccataatcagcatcttcttgaatttgtccctttgaaaagggaaatattggctcttctactttgtcctgctgaactgcttaacattggagggccccagggccctcacctaagccctctttcctacctccactctttctataggtggccctactactaaagtccatggctttaaataccatctttctatgtgttaatccatgactccagccttgacctcccatgagcgccatccaactcagcatgtctgcttggatgtctaatgggcatttcagattcaacatggccacaactgaactcttgattcccaccccagcaccggttatttttccactgttcccatctcaatggcacctccattacccatttgcacattccaaaagctcaggaaccatggtgacttcttttcccatatccaacacaaccaatcctatcctgaattcatccacatcccaccacctccccagctacctagctccagccatcctctctccacaacctctgaatcagtctttcacttttcccagcaatccattctccactcagcaaaatgatgataaagcacgtcacatcaaggctctgcctcaatttaatggcttcccattgtatttagaatcatctccaaactcccagagactatggtcgagctacaatctggcccaccttctgttccagccaaatttcctcacagcacaaggacgtttgcacctgctgttttgccaagcatgaaacccttggcccctatatctggtgctatcacctaatatcaggttttagctccattctcaccatttcagtgagcacccaatccccatcgcagtcattctatcacatagccatgtttttttttgtttgtttgtttcattttgtctttttttgagacagggtcttgctttgttacccaggctggagtgcagtggtgtgatttgggctcactgcaaccttccacctcctgggtcaagcaattctcctgcctcagcctcccgagtagctgggattacaggcgcccgtccccatgcccgcccagctaaattttgtatttttagaagagatagggtttcaccatgttggccaggcgggtctcaaactcctgacctcaagtaatccgcctgcctcggtctcccaaagtgctgggattacaggtgtgactcaccgcgcctggccacatacccatggtttcagcatgtatcactatctaaaattattatttttgtttatatatctgtgtcgtcccatagaaggttaaggtcccaagatcagaaacttgctcattgcagtgggtctaacactcagtaggtcctcaacaaacattcgttaagatactaaagtggcagggtggggccctgtaaacagcttcaggagcttcaggaccctgtgcttgtaggggcaacgtggtgccctccaaggaagacagggaggtgggaggagcactgcccagagatggcgtcaggctgcaagacttcttgaataattcagcatcataacaacccagcctcaggaagggatagggcacggccaggacgaaacattaggaggcgatggacaatgggattcccacggggcagcttctgcgcactggacgttccctaacctgaggctctctaaagaggaaggttaggaatcctctgagcttcggtgggctggactcactgtgggaattcaatcgcccccatccaccaacagtgtgctggcgggaaaacgccgacacgcatgcgtagttctcgcgccggctcctctctctctctctctctctctcgctcgctctctcgctctctcgctctctctcgctcgctctctcgctctcgctctctctctctctccggctcgccagcgacacttgttcgttcaacttgaccaatgagacttgaggaagggctctgagtcccgcctctgcatgagtgaccgtctcttttccaatccaggtccgcccgactccccagggctgcttttctcgcggctgcggtgatcggtcgggctgcatcctgccttcagagtcttactgcgcggggccccagtctccagtcccgcccaggcgcctttgcaggctgcggtgggatttcgttttgcctccggttggggctgctgtttctcttcgccgacggtaggcgtaatgaatatttcgacctttggatcttagctgtcccctccctgcgttcgcacttaacctttttcaccattattattattattgttattattattattttttgagggagtctcgccctgtcgcccaggctggagtgtaatggcgccttcttggctcactgcaacctccgcctcccgggttcaggcgattctccgacctcagcctcccaagtacgtgggattacaggcacccgccaccacgcacggctaattttttgtatcttttagtagagacggggtttcaccatgttggtcaggctggtctccaattcctgacctcgtgatccgcccgcctcggcctgccaaacagctgtgattataggcgtgagccaccgcgcccggccaaccatcattattatttttaacggtaaggatggtcagattttactaatgaagaagagattataaaatcttcaagtctttatatccacttgctttttgaggggtggagtgggaagaaggttatgtaattcatacgttcttcagagatgtgacaaacattcacggagccggacgacgtcgggttggattcgcactggagctgcagatgggtgccaggatggactggtccctaccctccgcttgaacctaggaggcggaggttgcagtgaaccgagatcgtgccactgcactccagcctgggtgacagagatactccgtctcaaaaaaaaaaacaaaacaaaaaacaagcggactgggcgcagtgcctcaccctgtaatcccagcactttgcaaagccaaggcgggaggatcctttgagtttaggagtttgagaccaacctgcgcaacacagtaagaccccgtctctacaaaaaatacagaaattagccaggtgtggtggtgtgcgcctatagtcccagctattctggaggctgaggtgggaggattgcttattctggaggcagaggttgcactgagccgaaatcaagctactacactccatccagggcaacatacggagaccctgtctcaaacaaacaaacaaaaaattgctcagtacctggccaaaaaagaagaggctcactatgcagaggggaagtggaaggagatgtttggacttctaaactcaatagagcaggagaggcaaatgtagaatgtgctcaggaaatatctgtgagatgaatgaacttgagggaagtaaggtactagatattacctgccctacccagaacaaatcctgtgcaatgtttccttgaaaagtgagaagtctggaaggggtggctactgacatagtgaagcaactagttcaattctacaacttgacagctaccctgtgccaggctatctacgaggatacttagaatgcataagacattccttcaaggaactccaggaacagaggcctgacatgttgcaatgtttagtgtcaagcagtgtactagagacacattatcacactcaaacctcacaacaattctgtgaggtaggagttatcactccccttttatagatgaaacagaggcttagagtgattgatttattgaaagtcaaacagccagtaaatggtgtagccaggattccaaacttgctgtctcactgagactgtacttaattactggagggaccgggtgtggtggctcattgctataatcccaacaccttgggaggctgaggctggtggatcacctgaggtcaggggttcgagaccagcctggccaacatggtgaaaccccatctctactaaaaatacaaaaattagctgggcatggtggtgggctcctgtaatcccagctactcaggaggctgaggcagggcaattgcttgagccgagatcacactgcactccagcctgggcaacagggcaagactctgtctcaaaaccaaaaaaaaaaaaattactggaggaacctagaagaagaaatgatcaattttgcttggagtgtatctagaaagacttcactgagatcatttaaagaacaaaaaggatggctggggtccaggcagtggctcatgcctgtaatcccagcactttcggataccaaggcagcagatcacctgaggtccagagtttcagaccagcctggccaacatagtgaaaccccatctctactaaaaataaaaaaattagctgagcatgttggagggcacctgtaatcccagctacttgggaggctgaggcaggagaatcactcgaacccaggaggtggaggttgcagtgagccaagatcacgccactgcactccagcctgggcaacagagtgagactctgtctcaaaaaacaacaacaacaaaaaatacaaacaagagacaagtagttcccaggtgcctaccaagtggtcaggcactgcacttacctcactgactgcagtaaccaccctttgaggttgtggcattgctccattttccaggcaaggaaatgggctgagagctgggattagtcaggtcatgactgtgtgtgccactcccgctaaatctcatttgatgtggttcatgaggccacaccatggacagcttcctccttgtgtccactgaggatatggctttgtacaacactttggtttttgaacgactttacaaacctccctgtcttgtgaggaaggaagaacagttattaccatctgcatctgatgatgaaacaagggacgctgcagaggagccgcactgaccactccctccctccagtcctgtcatcccactgccagtgtcccaccctcttgtgccctgcacttcactggctaataacccccctcactttttcctctgtgaagccatcctggataattccccacccacgaatggtccctcctcatctcagagagctctccatgcacacctgttaccgtttctgtctttatctgtaaatatctgtgtgtctgacttccatgcctcacacacctctatagggcaaagactgtcttaaacatcttggtagtgtcagtattttgcacagtgaagtttttttttttaaattatatcagctttatttgtacctttttgacatttctatcaaaaaagaagtgtgcctgctgtggttcccatcctctgggatttaggagcctctaccccattctccatgcaaatctgtgttctaggctcttcctaaagttgtcacccatacatgccctccagagttttatagggcatataatctgtaacagatgagaggaagccaattgccctttagaaatatggctgtgattgcctcacttcctgtgtcatgtgacgctcctagtcatcacatgacccatccacatcgggaagccggaattacttgcagggctaacctagtgcctatagctaaggcaggtacctgcatccttgtttttgtttagtggatcctctatccttcagagactctggaacccctgtggtcttctcttcatctaatgaccctgaggggatggagttttcaagtccttccagagaggtaagagagagagctcccaatcagcattgtcacagtgcttctggaatcctggcactggaatttaatgaatgacagactctctttgaatccagggccatcatggctctttgagcaaggcacagatggagggaggggtcgaagttgaaatgggtgggaagagtggtggggagcatcctgatttggggtgggcagagagttgtcatcagaagggttgcagggagagctgcacccaggtttctgtgggccttgtcctaatgaatgtgggagaccgggccatgggcacccaaaggcagctaagccctgcccaggagagtagttgaggggtggagaggggcttgcttttcagtcattcctcattctgtcctcaggaatgtcccaagcctttgagtagggtaagcatcatggctggcagcctcacaggattgcttctacttcaggcagtgtcgtgggcatcaggtgagtgagtcaaggcagtggggaggtagcacagagcctcccttctgcctcatagtcctttggtagccttccagtaagctggtggtagacttttagtaggtgctcaataaatccttttgagtgactgagaccaactttggggtgaggattttgttttttttcttttgaaacagagtcttactctgttgcctgggctggagtgcagtggtgcaattttggctcattccaacctctgcctcccagattcaagcgattctcttgcttcagcttcccaggtagctgggattacaggcggccaccactacgcccagctaatttttgtatttttagtagagacggggtttcaccatgctggcaaggcaggtctcaaactcctcacctcaggtgatccgcccacctcggcctcctaaagtgctaggattacaggtgtgagcccctgcgcccggccaaggggtgaggaattttgaaaccgtgttcagtctctcctagcagatgtgtccattctccatgtcttcatcagacctcactctgcttgtactccctccctcccaggtgcccgcccctgcatccctaaaagcttcggctacagctcggtggtgtgtgtctgcaatgccacatactgtgactcctttgaccccccgacctttcctgcccttggtaccttcagccgctatgagagtacacgcagtgggcgacggatggagctgagtatggggcccatccaggctaatcacacgggcacaggtaaccattacacccctcaccccctgggccaggctgggtcctcctagaggtaaatggtgtcagtgatcaccatggagtttcccgctgggtactgatacccttattccctgtggatgtcctcaggcctgctactgaccctgcagccagaacagaagttccagaaagtgaagggatttggaggggccatgacagatgctgctgctctcaacatccttgccctgtcaccccctgcccaaaatttgctacttaaatcgtacttctctgaagaaggtgaggaggaaggggacaagatgacatagagccattgaaacttttcgtttttcttttctttttttaaaatttttttgaggcagaatctcactctgcccattctgtcggcgagacaggagtgcagtggtgtgatctcccctcacagcaacctctgcctcccaggctatagtgattctcctgcctcagcctcctgagtagctggaattataggcgtgcgccactaccacctggctaatttttgtatttttagtagagacagggtttcatcatgttgaccaggctagtcttaaactcctgacctcaaatgatatacctgccttggcctcccgaagtgctggaattacaagtgtgagccaccgagcccagcagacacttttcttttttctttttttttttttgagacagagtctcgcactgtcacccaggctggagtgcagtggcacaatctcagctcactgcaacctccacctcccgggttcaggtgattctcctgtctcagcctctcgagtacctgggattacaggtgcctgccaccacgcccggctaattttttgtatttttagtagagacagggtttcactatgttggccaggatgattgcgaactcctgacctcgtgatctgcccacatcggcctcccaaagtgctgggattacatgcgtgagccactgacacttttctttgccctttctttggaccctgacttctgcccatccctgacatttggttcctgttttaatgccctgtgaaataagatttcgccgcctatcatctgctaactgctacggactcaggctcagaaaggcctgcgcttcacccaggtgccagcctccacaggttccaacccaggagcccaagttccctttggccctgactcagacactattaggactggcaagtgataagcagagtcccatactctcctattgactcggactaccatatcttgatcatccttttctgtaggaatcggatataacatcatccgggtacccatggccagctgtgacttctccatccgcacctacacctatgcagacacccctgatgatttccagttgcacaacttcagcctcccagaggaagataccaagctcaaggtaggcattctagctttttcaggccctgagggccctgatgtctgggggttgagaaactgtagggtaggtctgcttgtacagacattttgtcccctgctgttttgtcctgggggtgggagggtggaggctaatggctgaaccggatgcactggttgggctagtatgtgttccaactctgggtgcttctctcttcactacctttgtctctagatacccctgattcaccgagccctgcagttggcccagcgtcccgtttcactccttgccagcccctggacatcacccacttggctcaagaccaatggagcggtgaatgggaaggggtcactcaagggacagcccggagacatctaccaccagacctgggccagatactttgtgaagtaagggatcagcaaggatgtgggatcaggactggcctcccatttagccatgctgatctgtgtcccaaccctcaacctagttccacttccagatctgcctgtcctcagctcacctttctaccttctgggcctttcagccttgggcctgtcaatcttgcccactccatcaggcttcctgttctctcggtctggcccactttctttttatttttcttcttttttttttttttgagaaggagtctctctctctgtcacccaggctggagtgctgtggcgccatcttcactcactgtaacctctgcctcctgagttcaagcaattctcctgcctcagccttccaagtagctgggattataggcgcctgccaccaggcccagctgatttttctatttttagtagagacggggtttcgccaggctgttctcgaactcctgaactcaagtgatccacctgcctcggcttcccaaagtgctgggattacagtgtgagccaccacacccagctggtctggtccactttcttggccggatcattcatgacctttctcttgccaggttcctggatgcctatgctgagcacaagttacagttctgggcagtgacagctgaaaatgagccttctgctgggctgttgagtggataccccttccagtgcctgggcttcacccctgaacatcagcgagacttcattgcccgtgacctaggtcctaccctcgccaacagtactcaccacaatgtccgcctactcatgctggatgaccaacgcttgctgctgccccactgggcaaaggtggtaaggcctggacctccatggtgctccagtgaccttcaaatccagcatccaaatgactggctcccaaacttagagcgatttctctacccaactatggattcctagagcaccattcccctggacctccagggtgccatggatcccacagttgtcgcttgaaacctttctaggggctgggcgaggtggctcactcatgcaaacccagcactttgggaagccgaggcgggtgatcacctgaggtcaggagtttaagaccaccctggccaacgtgttgaaaccctgtgtctactaaaatacaaaaaaaaaaaattatctgggcatgatggtgggtgtctgtaatcccagctactcaggaggctgagaagggagaatcagttgaacccgggagatggtggttgcggtgagccgagatcgcgccactgcactccagcctgggaggctgagcgagactccatctcgaaacaaaacaaaacaaaactatctaggctgggggtggtggttcatgtatgtatgtgtatatacatatatatgtgtttatatgtatatatatatacacacacacacatacatacacacacatacacacacaaattagctgggtgtggcacccgtgtagtcccagctactcaggaggctaatgtgggaggatcagttgaccctaggaagtcaaggctgcagtgagtcgtgattgcgccactgtactccagcccgagtgacagagtgacatcctgtctcaaaaacaaaaaaaaatctccccaaacctctctagttgcattcttcccgtcacccaactccaggattcctacaacaggaactagaagttccagaagcctgtgtgcaaggtccaggatcagttgctcttcctttgcaggtactgacagacccagaagcagctaaatatgttcatggcattgctgtacattggtacctggactttctggctccagccaaagccaccctaggggagacacaccgcctgttccccaacaccatgctctttgcctcagaggcctgtgtgggctccaagttctgggagcagagtgtgcggctaggctcctgggatcgagggatgcagtacagccacagcatcatcacggtaagccaccccagtctcccttcctgcaaagcagacctcagacctcttactagtttcaccaaagactgacagaagcccttcctgtccagctttccccagctagcctgcccttttgagcaactctggggaaccatgattccctatcttccctttccttcacaggtctgcacacctcattgccccttttgcaactactgaggcacttgcagctgcctcagacttctcagctccccttgagatgcctggatcttcacacccccaactccttagctactaaggaatgtgcccctcacagggctgacctacccacagctgcctctcccacatgtgacccttacctacactctctggggacccccagtgttgagcctttgtctctttgcctttgtccttaccctagaacctcctgtaccatgtggtcggctggaccgactggaaccttgccctgaaccccgaaggaggacccaattgggtgcgtaactttgtcgacagtcccatcattgtagacatcaccaaggacacgttttacaaacagcccatgttctaccaccttggccacttcaggtgagtggagggcgggcacccccattccataccaggcctatcatctcctacatcggatggcttacatcactctacaccacgagggagcaggaaggtgttcagggtggaacctcggaagaggcacacccatccccttttgcaccatggaggcaggaagtgactaggtagcaacagaaaaccccaatgcctgaggctggactgcgatgcagaaaagcagggtcagtgcccagcagcatggctccaggcctagagagccagggcagagcctctgcaggagttatggggtgggtccgtgggtgggtgacttcttagatgagggtttcatgggaggtaccccgagggactctgaccatctgttcccacattcagcaagttcattcctgagggctcccagagagtggggctggttgccagtcagaagaacgacctggacgcagtggcactgatgcatcccgatggctctgctgttgtggtcgtgctaaaccggtgagggcaatggtgaggtctgggaagtgggctgaagacagcgttgggggccttggcaggatcacactctcagcttctcctccctgctccctagctcctctaaggatgtgcctcttaccatcaaggatcctgctgtgggcttcctggagacaatctcacctggctactccattcacacctacctgtggcgtcgccagtgatggagcagatactcaaggaggcactgggctcagcctgggcattaaagggacagagtcagctcacacgctgtctgtgactaaagagggcacagcagggccagtgtgagcttacagcgacgtaagcccaggggcaatggtttgggtgactcactttcccctctaggtggtgccaggggctggaggcccctagaaaaagatcagtaagccccagtgtccccccagcccccatgcttatgtgaacatgcgctgtgtgctgcttgctttggaaactgggcctgggtccaggcctagggtgagctcactgtccgtacaaacacaagatcagggctgagggtaaggaaaagaagagactaggaaagctgggcccaaaactggagactgtttgtctttcctggagatgcagaactgggcccgtggagcagcagtgtcagcatcagggcggaagccttaaagcagcagcgggtgtgcccaggcacccagatgattcctatggcaccagccaggaaaaatggcagctcttaaaggagaaaatgtttgagcccagtcagtgtgagtggctttattctgggtggcagcaccccgtgtccggctgtaccaacaacgaggaggcacgggggcctctggaatgcatgagagtagaaaaaccagtcttgggagcgtgaggacaaatcattcctcttcatcctcctcagccatgcccagggtccgggtgcctggggcccgagcaggcgttgcccgctggatggagacaatgccgctgagcaaggcgtagcccaccatggctgccagtcctgccagcacagataggatctggttccggcgccggtatggctcctcctcagtctctgggcctgctggtgtctggcgttgcggtggtacctcagctgagggtcaaggaaggaaggtgtgttaggagaactagttcttggatccctgcccactctccccagggctgcccctcccatctgccccttacctccatcccaggggaagtagagactgagaatgtgggtacaataggcacagaggttgtgcagcccacgcaggtggacctgcagcttcccactgggcagctttgcctgcagcagcagggccaagtagctgaagacgaaggcgtccaaggaggcagggctggagcagagagagaagggtgggatggaggagaaccactggggtagaaggggtaaagatggagctggaggaagagtcagccttgggaggtgggctctgggcagcaggcggccaccagggaaggacaggacacacagttctagacctggtatggggagagatccccaggtggcgccagctggccctgaatagggctctatcccagggctgcataaagggcacactcagtgccccacagctcttcaggcccttcctgtgcctggctgccctcccaccctacccttttgtacctctgagaaggctctggccccacgcacagccccactgtcaccagggccagtatctgtctcagggacctcctatccagagcctgagccagccccagccccagccccagctccagctgctccatctgaacctgtatcttcttccaagccacccattaccctcttggagtcagactcacgcatctccaaagaagaacttttgagagcccaggcgctgagagagcagggtcagacactcccgagcctctcggtacagctgtaggggcgacacaggtaggcttgcagctgcgggaacagtgccacctccgcacctaagcactcccattcctggccagcatccttggggctcatctcatacaatagcccccggtctcagagctacctccttctccagctcttcctcgtcctcaggcctgtgctccccagtcagcagctgtagccgttccatgtactgccgctgcatgcggccaggcaggaagaagttgaggggaaagggcatagcctctgcataccacttccgggtcacttctacgtagttcttggtgtctatccaaaaagtatgtacctggattgggtgggcaggaagaaacaggcaggtctgagccagtgcacctgtctgattcaaggtgggcttctgacctccatgctctcctgagtctctgtgtgggtctgtgtgttcccgtcccctccccggctggccatggatgctgggaggtctgggcacactcaccagcaccgggatcaacttctcctccaggagagacatgaaggccagggtgtctgccccttgctgagctgacagatcataatcagcattgtacttctgtggaggaaatatccatggcgtggacgctggggagctgcaagggcacttcaccagggaggaaggagtcctgtctggtacccccctcactggcctctgagtgcagtggaggtacagcaaggaacttttcctgccaaggcccccttgcctgggcccagccagtagcctgttgctgttggcaaaaagcctgggccttggagcccgctggccgtcaaggtcctgggcccattgagaagaaggaagaaaggttgggccgcaaactaggagcagctcccagaatttccatggaaagctggaacaatgcctgctgacagcaactttctaacagtaactttcccgacccagacaccacaaagctagcacaacggagctcagatgcaggctaggactcggtccatgcctcaggaaccagggaaagccatcctcacactccctggatccagggaacccacgcccagggccccccagcttgttccctcagtgcccagctcttggctatttctttcacttcattccatcgcccagacaccattaccacatacacattccatccatacccccaggtctcagcctgccctaccttcccaggctccagtccctgttcctcagcatcccccaccacatcctgagtaagctttgtccccagataacctcttcagcatgatccttaaatctccctaagcctcagtttctcccctgtggaatgggggtaagaatctctttctctgaatgcccctgtgttaggaaataatttagaatacttcggaaacaaaaagctctgttcacacctaagcaatcagggcagtggcctggccttgccaggaacttaggcttttatctggatcctctttccaggcctctcaattaattccccaggtccttaacctttgggaaattagaaattaggaagagtgtcccacttctgacactgtgttccctcttggaacctgaccgtcaatgctagaagaacccttggaaaacatgctggcccagccctctagttttacaaataagggagtgcacagccctgagaggttacatggcctgcccaagatcacgcagtcaatggcagagtaaagagcatagcctaggcctccccactcctctagtaatgctctttcatcttctccaacctggctctaagccttgtccatcctgagccccatatctagcccaacctagtccctgaaaacaagaagtggcccttagaaatctctctccagtcccactatcagaggccaactgctgtcttccagtctccttcagcctgtgctcctctccctccctgactgacaggcagaaggtaccgtgcctctggatatccccacagtgccctgagctgcatctcttgccgactgctttaatacatcacagtgacattgtgtgtgtctctgccaccagactattgctccttgatgctctgggtcacctgcatctagcatggcatatatctagtgctcaataaatgtgtattgtacggaattgactgaacttctctcactggcagccccctctatccaaatcacccacctctttttgaaggtgggtgatgatcttgtgtggtactgaggtgacctctccatgactggtccaaagggcaggcagggttcctgatactgagagaaaagtataccaaccaggaccttagctgcctatccatacgtagttgcaacacattcctgcctatctcctgcttctcctcttgtacacacccttcctcacccccaagggatactgggtacctgaagggctctgccaggggttgctgatcttgtgctatatggtgcacaagaaacttttaagaaaaaagaaactttcaagacacactttccaaccacgaattctatctctgctccttttcatagcaataggttttctttttcttccctccacacttaaacatccattctcttatcacccacccccatcagactccttcccctgtgtttcttcagccactgctctgaccaaaatttgagtgaccaaaagtggtgtcagacccagtgaccatttctctgcctgcatttcacttgaccttgaagcagcaattaatctccataatcagcatcttcttgaatttttccctttgaggacattgctcttctactttgtgctctggttatcctttacaaacttttacacctctcctgaactggttaacagtagagggccccaagggtctcacgtaagccttctttgtttttgttttttttcttttcttttattttttatatatttttttgagacggagtcttgctctgttgcccgggctggagtgcagttgcacgatctcggctcactgcaagctctgcctcccaggttcatgctattctcctgcctcagcctcccgagtagctgggactacaggtgcctgccaccatgcctggctaattttctgtatttttaacagagacagggatacaccatgttagccaggatggtctcgatctcctgacctcgtgatctgcccacctcagcctcccaaaatgctgggattacaggcgtgagccactgctcccagccgtcatttttattttattttatttatttttttgagatggagtcttgctcttttgccaggctggagtgcatggtgcgatctcggctcattgcaacccccgcctcccaggttcaagcgattctcctgcctcagcctcctgagtggctgggactacaggtgcctgtcaccatgcctggctaattttctgtattttagcttgagacacggttttcaccttgttagccaggatggtctcgatctgtgagcctcgtgatctgcctgcgtcggcctcccaaagtgctgggattagcaggcagtgagccactgcacccggccatcaattttttttttttttaaatggagtcttgctctgtcacccaggttggagtgtaacagtgcaatcttggctcattgcaacctccgcctcttgggttcaagcgattctccagcctcagcctcctgagtagctgggactacaggtgcatgccaccacacccggctagtttttgtatttttagtagagacggggtttcaccatgttgtccaggatggtctcaaactcctgacctcaaatgatgtgcctgccttgaccttccaaagtgctgggattagaggcgtgaaccacattgcccaccgtaagccctcttttctacttccactctttctgtaggtggccctactactaacgtccatggctttaagtaccatctttctatgtgttaatgcataagtccagccttgacctctcttgagcgccatccaactcagcatatctggttggatgtctaatgagtatttcaaattcaacatggccacaactgaactaactgaactcttttttttttttaggcagagttttgctcttgttgcccaggctggagtgcaatggcgagatcttggctcactgcaacctctgcctccagggttcaagcgattctcctgcctcagcctcccgagtagatgggattataggccccgctacccggctaatgtttttgtatttttagtagagacagggtgttgccatattgaccaggctggtctgcaaatcctgacctcaggtgatccccctgcctcggcctcccaaagtgctggaattacaggcgtgagtcactgccccggccacacaactgagctcttcattcccaccccagcaccggttatttttccactgttcccatctcaatggcacctccattacccatttgcacattccaaaagcccaggaaccatggtgacttcttttcccatatccaacacaaccaatcctatcttgaattcatccacgtcccaccacctccccagctacctagttccagccaccctctctccacaacctctgaatcaatctttcacttttcccagcaatccattctccactcagcaaaatgatgataaagcacgtcacatcaaggctctgcctcaatttaatggcttcccattgtatttagaatcatctccaagctctcagagactatggtcagctacaatctggcccaccttctgttccagccaaatttcctcacagcacaaggacgtttgcacctgctattttccaagcacgaaaccctcgggcagatatatctggtgctgtcacctaatttcaggttttaactccactctcaccatttcagtgaggacctaatccccatcgcagtcattctatcacatagctttattttattttattttatttttttttgagatacagtctggctctctcacccaggctggagtgcagtggtgtgatctgggctcactgcaaacttccatctcctgcgttcaagcgattctcctgcctcagcttcccgagtagctgggattacaggtgtctgccatcacgcctgactaagttttgtattttcagtagagacggggttttgccatgttagccaggctggtctcgaactccttgacctcaagtgatccacctgcctcagcctcccacaatgttggatttacaggcgtgagccactgctcccggccacatagccatgttttaagcatgtatcactatctaaaattattttttgtttatacgtttgtgtcgtcctgtagaatgtaaggtcacaagatcagggacttgctcattgcactgggtctaacacacagtgcttcaacaaacactcgttaagatactaacgtggcagagtggggccttgtaaacagtttcaggaccctgtgcttgtaagagcaacgtggtgccctcccaaggaagacagggaggatgcaggagcactgcccagagatggcgtcaggctgcaagacatcttgaataattcaccatcgtaacaacccagcctcaggaagagatggggcaaggccagaacgaaacattaggtaagaggcggtggacaatgggattcccacagggcagcttttgggcactggacgttccctaacctgaggctctctgaagaggaaggttaggaatcctctcagcttcggtgggctggactcactgtgggaattcaatcgcccccccccacccactaagggtgtgctggcgggaaagcgctgagacgcatgcgtagttctcgcgtctggcacccgctccctttccaatacgcttgcgccccgtctgtgctacggatggtcagggagagttgtccgtcttcaaatggaccaatgagacttgtggaggggctctgagtcccgcctctggatgagtgaccgtctcttttccaagtgaggcccgcccgcctccccagggctgcttttctcgcggcacgggtggtggggctgcttcttgacttccgcgcctagtgcgcagggccccattctccagtcccgcccacgcgcctttggaggctgcggtgggatttccttttgccttcggttggggctgctgtttctcttcgccgacggtaggcattataaatatttcgccctttgaattttagctctcccctcccggcgttcgcacttagcctttttcatcattatcattatttttaatggtaaggatggtcaaattttactaatgaagcgattataaaatcttcaagtctttgtatccacttgctttttgagggctggagtgggaagaaaggtatataattcattcattcttcggacatgtgacaaacgttcacggagcgcggcaacgagcgccggtgtcgcgatgcgcactggggctgcacatgggagccaggatggactggactggtccctgccctgcccgctgacgattggcaggccactgcctttgatgagctgggcgctataactgccattaagccatttgtacaattaatcacaacagtgataagagcgacaaaggagctattcgggtggctgaggcggaggatcttttgagcctaggagttcgagaccagcctggggaatagagcgagatcctgtctcaaaaaaagggggagaaaaagtgacaaagaagttgtgagggctatgagtttgcgttagaggaggtgtgtgaggtggggaggcggcagggggcgcggttgttcttagagaaagtgacatccgggctaattttgaaagaataagtgttaactaggctaagcggtgggaaagagtagtgtgtgctgaaggaagggaagaggaacctggcaagttcatggcaggcctgtaattggatgctggtctccctccacacttgactcctacagtctgatttctacacagcacccaaagtgatctcttaaaaatacacatgtgatcttgtcacttcccagcaccaaactctacagtgaatttccatcttagaacaaaattcagactccttaccatggccaccaagaccctacacaatctggcctcccaatttccttttccaaggtcaccttttaccactatccatctcactcacactgctccagcactctctatgcttttatttttctttcttcctctttctttctttctttctttttctttttctttctttctttccttccttctctctctctctctttcttttcttttctctttcttttttttttttttgagatgcagtcttgctctgtcacccaggtgtgtgatcttggctcactgtcaacccagagcagtgggggtgatcttggctcactgcagcctccgccttccaggttcaagcaattctgcctcagcctcctgagtagcagggattagcgccatcagtcccagctaatttttgtatttttagtagagatttcatcatgttgtccaggctggtctcgaactcctgacttcaagtgatctgcccatctcagcctcctaaagtgctgagattacaggcaggagccaccacacctggctcagtatttgttttatttttgttgtgtttatttatttagagacaaggtcttgctctgttgctcaggctggagtgctgtggcaggaacacagctcactgcagcctccactacctcaattcaggcgatcctcccacctcagctgagactacaggtgtgcatcaccatgcctggttaattttttcgttttaccatgttggccaggtttgtctcgaactcttgggctctgctgtcctcctaccttagcctcccaaagtgctaggattgtaggcgtgagccactgtgcccagctggtgttcagtatttgaatccatatttcctgtagccgcaaccaaagttccactgttaggtctcactttgactttaataattgtgttcaggctgggcacactggctcaagcctgtaatctcagcagtttgggaggccgaggtgggtggatcacatgaggtcaggtgtttgagaccagcctgtccaacatggcgaaaccctgtctctactaaaaatacaaaacattctccgatcgtagtggcgggcgcctgtaatcccagctacttgggaggctgaaggaggagaattgcttgaacctgggaggcagaggttgcagtgagcggagatcacgtcattgcactccagcctgggctacagagcgagactctgtctcaataagtaaataaataaataaataaataaataaataaataaataattgtgttcggagtcagcatcattcttcctgaagttcaccactcctttgccaagaacacttcctgaaacactgacaagcaggaccttgaataatggggtatggttggtaacaactcactcattcaacaaacattgagcacctattttgtgcttgcctctaaatgaagagctggttgtattatttatttttttaggtgacagggctttccctatgttgcccaggttcgtctcaaactcctgggctcaaaagatcctcatcttctcaagtggttgaatatacacgctccagcgaccatgcctggctgaatgaagagctttgagattttgaagaaacaggaaccatgaaatttgctttgcaactgtttgcaacctttaaggaagactgaaaaggcattcctgaagcatgtgagaagcagtctgtgtgacctgatgactcagaactgcttggaatttagattaggacagatatgagcttaggcttcactctgccacatatttaacttctctaagtcttagttttcttttctttttttttttttttgagatggagtctcgctctgtcacccaggctggagtgcagtggcacgatcttggctcactgcaagctccgcctcccgggttcacgccatcctcctgcctcagccacccgagtagcggggactacagtcgcacaccgccacgcctggctaaatttttgtatttttagtagagacgggtttcaccgtgttagccaggatggtctcgatctcctaaccttgtgatccgcccgcttcggcctcccaaagtgttgggattacaggtgtgagccatcgcgtctggcctctaagtcttaattttcttatctgtaatgtagagttgtcaggctagtgcatgtaataagcactcatgaaagactgactattatcttgcgaaaaattggaagagatcatatgaggtacaaggaccttccatctgcactgggctgtacattgaatgttgtggttactgttgaagcattggtaaatcacatgaatccaatggtaaaaccacaccctaaggtcagactcagtggctcacgcctgtaattccagcactttgggaaaccaaggcaagaggattgcttgagctcaggagttcgataccagtctaggcaacctgtttctataaaaagttaaaaaattagcttggtgtggtggtgtgcacttctggtcccagctactcaggaggctaaggtgggaggatcccttgagcccaggtggtcgaggctgcagtgagccaggatcacaccattgcattccagcctggatgacagtgtgaggccctgtcttaaaaaagacaaaaacaaaccaaaaaaacccacaccctagtgggtaaggggcagcagaggtcccacccaagagtgaaatcatttttggtgtcagtaatcagggagagtaatataccctcaggccagaaactagaggtgagtgatggctcacgcctataatcccagcaccttgggaggctgaggcaggtggattgcttgacctcaggaattcgagaccagcctgggcaacataggaagaccccatctctaaaaataaatttcaaaaattagttgggcatggtggcatgtacctgtagtcccagctactatggaggctgaggtgggaggatccaattgagcctgagaggtcaaagctgcagtgaattgtgattgtgccaagaccctgtctctaaaataaaataaaattacaattaaaaactagagctgaaaggacaggttctaggttaactggtagtagttgttcattcatctgtataaaaagtacttttttgagcacctactctgtgctgtgcatggaatgaacaaatgtctttatttgacttgaacacagaccatagaagtaactaacagtggaactgggagtggcactctccatgggacctaaagacctaggagcctgtgatatgatacctgtcagtgtgaaagggctggagtttgctatctgagccagacctacactccaagacaggtcttgctgggatgggatcaaaattgctgctgggtcagccgaactatttttgtacttctgcttttcacttatatttatgtcttccctaggtatatagctgtctttttttgtttgcttgtttttctgagtcagagtcttgctctgtcactcaggctggagtgcagtggcgcgtctcggctcactgcaacatccacctcgggttcaaacgattctcctgcctcagattcccgagtagctaggattacaggtgcccaccaccatgcccggctaattttttgtatttttaatagagatggggtttagtagagacagggttcactgtgttatccaggatggtctccatctcctgacctcgtgatctgcccgcctcagcttcccaaagtgctgggattacaggcatgagccactgcgcccggccactggagaccccttttctaccaaaaaaaataaaaataaataaataaatatatatatatatttgtaaagacggagttctctatgttgcccaggctggtcttgaactcctggcctcaagggatcctcttgtctcagcttcttaaaatgatggggttacaggcatgagccaccgtaccaggccttagcaaactctttttcaagtgctatacaaaggggacagaggaacgtgattgtggccacctagtatgcccctattggccactgcagtgaggcctaggtgtttgaagagaggcacctagggtagtggctctcaggcacaccctaggggcattttggaaatttgtggggcatctttaatagagacaatgattaggaggcactttgagaatttagtggatggagcccaggaaaggtagacattctgcaacatgtagtacattcatacacaaggaagaattcactcatttcacctgacttacaaatataaaatcaaatataaatcagtaggactttattataaaatattgcagaaaagtttcacaagaattttttgtagaaaaagcccaatcagggccgggcatggtggctcatgcctgtaatctcaggactttgggaggccgaggcgggtgaatcacctgaggtcaggagtttgggacaagcctggccaacatggtaaaaccccgtcttgactaaaaatacaaaaatcagccaggcatggtggtgtgcgtctgtaatcccaggtactcgggaggctgaggcaggagaatcgcttgaacccaggaggcggggtttgcagtgagccaagatcaagccactgtgctccagcctgggtgaaagagcaagactccgtcgaaagaaagaaaggaagggaggaagggaggaagggagggagggagggagggagggaaagaaagaaaaaagagaagagaggggaggggagggaagaggagaaaagaaggaaggaaggcaggaaggaaggaatccagtcgagatcgttaaatttgttgtaattttgtctttggcacaataaacattagtccttattaaaactaactttacttagaaaataaaatagaaaatcctcaaggacaaatcacattgtacaggaaatatgaaatgtgaaataatatccaccttggaaattttttttttttgaaacagagtgttactctgtctcccaggctggagtgcagtggcacaatcttgggtctctgcaacctctgactcctgggttcaagtgattctcgtacctcagcttcccaagtagctgggattacaggcgtgcaccaccacacccagctaatttttgtattttcatttcagatgggattttgccatgttggccatgaacacctgtcctcaagctatccactgcctcagcctcccaaagtgctgggattataggcatgagctaccgtgcccagccaccctggaaaaattttacaaaatgaagtataaaaagaagaaaagaggggcgggcatggtgccttgtgcgtgtaatcctagaactctgcaaagccgaggcaggagatcctttgggtttaggagtttgagaccaacctgcacaacatagcaagaccctatttctacaaaaaatacagacactaggctgggcgtggtggctcacgtgtaatcccagcactttgggaagctgaggccagcagatcacgaggtcaggagatggagaccatcctggctaacatagtgaaaccctgtctctactaaaaatacaaaaaattagccgggtgtggtggcaggcgcctgtagtcccagctactcaggaggctgaggcaggagaatggcgtgaatccgggaggcggagcttgcagtgagccgagatcgtgccactgcactccagcctgggagacagagcaagactccgtctcaaaaaaaaaaaaattttgctcagtacctggccaaaaaagaagcagctcactccctgtacacagaggggtaagagaaaggagatggttgaacttctaaactcgctaaagcaggagaggcaaatgtggaatgtgctcaggaaatatctgtgagatgaatgaatttgagggaagtaaggtactagataattacctgccctacccagaacaaatcctgtgcaacgtttccttgaagagcaggaagtcaggccgggtgctgtgctcacgcctgtaatcccagccctttgggaggccaaagtgtgcgaatcacctgaggtcaggagattgagaccagtctggctaacatggtgaaaccccatctctactaaaatacaaaaattagccgggcgtggtggtgcgtgcctgtagtcccaactacttgggaggctgaggcaggagaattgcttgaacctgggaggcagaggttgcggtgagctgagatcggccactgcactccagactgggtgacagagtgagacaacatctcaaaaaaacaaaaaaaaaagagaaaagcaggaagtctggaaggggtggctactgacatagtgaagcaactagttcaattctacaacttgacaactacccctgtgccaggctgtctacaaggatatttagaatgtgtaagacattccttcaaggaactccaggaacagaggcctgacatgttgcaatgtttagtgtcaagcagtgtactagagacacattatcacactcaaacctcacaacagttctatgaggtaggagttatcactccccttttatagatgaaatagaggcttagagtgattgatttactgaaggtcaaacagccagtaaatggtgtagcaaggattccaaccttgccgtctcactaaaactgtacaaaaaaagatacaaacaacagacaaatagttcccaggcgcctcccaagttgccaggcactgcatttacctcactgacccctttgaggttgtggcattgcctccattttctaggtgaggaaataggctgagagctggggttagtctggtcatgactgtgtgtgccactcccaccaaatctcatttgatgtggttcatgaggcaaatggcatggacaacttccttcacatgtccactaagcatatggccttttacaacactttctggtttctgaactactttaaaacctcactgtcctgtgaggaaggaagaacagttattacaatctgcatctggaagccaattgccctttagagatatggctgcaattgcctcactgcctgtgtcatgtgactctccgaggcccttaatgagtaaatgaggggtgctgcaggggagccaagctgaccactcccctccctccagtcctgccaccccactgccagtgtcccaccctccttgcgccctacacttcactggctaataacccccctcactttttcctgtgttgaaggcatcctggataattccccacccacgaatggtccctcctcatctcagagagctctccatgcacacctgttactgtttctgtttttacctgtaaatatctgtgtctgacttccatgcttcatgcacctctatagggcaaagactgtgtcttaaacatcacggtagcctcagcatgttgtgcaatgaaggtttttttgtttttgttctttgttttttttttggtattagctttatttgtatcattttgaaatttttatcaaaaaagcagcgtgcctgctgtggttcccatcctctgggatttaggaatctttacccgattctccatccaagtctgtctttcgtattctaggctcttcctaaagttgtcattcacatataccctccagaattttatagggtgtataatctgtaacaactcggaggaagccaattgccctttagaaatatggctgcaattgcctcacttcctgtgtcatgtgactctcctagtcatcacatgacccatccacattgggaagccagaattacttgcaggagtaacctagtgcctatagctatggcaggtatcctgcatccttgttttttgtttagtggatcctctatccttcagagactctggaacccctgtgctcttctcctcatctagtgaccctgaggtgatggagttttcaagtccttccagagaggtaagagagagagctcccaatcagcattgtcacagtgcttctggaatcctggcactggaatttaatgaatgacagactctctttgaatccagggccatcatggctctttgagcaaggcacagatggagggaggggtcgaagttgaaatgggtgggaagagtggtggggagcatcctgatttggggtgggcagagagttgtcatcagaagggttgcagggagagctgcacccaggtgtctgtgggccttgtcctaatgaatgtgggagaccaggccatgggcacccaaaggcagctaagccctgcccgggagagtagttgaggggtggagagggacttgcttttcagtcattcctcattctgtcctcaggaatgtcccaagccttcgggtagggtaagcatcatggctggcagcctcacaggattgcttctacttcaggcatgtcgtgggcagtcagatgagtgagtcaaggcagtggggaggtagcacagagcctcccttctgcctcatagtcctttggtagccttccagtaagctggtggtagacttttagtaggtgctcaataaatccttttgagtgactgagaccaactttggggtgaggatttttgaaaccgtcttcagtctctccaaacagctgtgtccgttctccacatccttgtcagacctcacctctgcttgtgctccctccctcccaggtggtgcccctgcatccctaaaagcttcagtacagctcggtggtctgtgtctgcaatgccacatactgtgactcttgaccccccgacctttcctgccctaggtgccttcagccgctacaagagcagaagcagtgggcattggatggagctgagtacaggaccatacaggctaattgcaccggcacaggtaaccattacacccttcaccccccgggccaggctgggtcctcctagaggtaaacggtgtcagtgatcaccatggagtttctccctgggcactgataaccctgtggatgtcctcaggcctgctactgatcctgcagccagaagttccagaaagtgaagggatttggaggggccgtgacagatgcaggtgccctcaacatccttgccctgtcaccccctgcccagaatttgctacttaaatggtacttctctgaagaagatgaggaggaaggggacaggatgacatagagccactgacacttttctttgccaattcttgtggaccctgacttctgcccatccctgacatttggttcctgtcttaatgccagtgaaataagatttcgccgcctatcatctgctaactgctacggactcaggctcagaaaggcctgcgcttcacccaggtgccagcctccacaggttccaacccaggagcccaagttccttttggccctgactcagacactattaggactggcaagtgataagcagagtcccatactctcctattgactcggactaccatatcttgatcatccttttctgtaggaatcggatataacatcatctgggtacccatggccagctgtgacttctccatccgcacctacacctatgcagacacccctgatgatttccagttgcacaacttcagcctcccagaggaagataccaagctcaaggtaggcattctagctttttcaggccctgagggccctgatgtctgggggttgagaaactgtagggtaggtctgcttgtacagacattttgtcccctgctgttttgtcctgggggtgggagggtgggggctaatggctgaaccggatgcactggttgggctagtatgtgttccaactctgggtgcttctctcttcactacctttgtctctagatacccctgattcaccgagccctgcagttggcccagcgtcccgtttcactccttgccagcccctggacatcacccacttggctcaagaccaagggagcggggaatgggaaggggccactcaagggacagcccagagacatctaccaccagacctgggccagatacattgtgaagtaagggatcagcaaggatgtgggatcaggactggcctcccctttggccatgctgatctgtgtcccaaccctcaacctggttccacttccagatctgcctgtcctcagctcacctttctaccttctgggcctttcaaacttggatctgtcagtcttgcccactccatcaggcttcctgttctctcggtctggcccactttcttggctggatcactcatgacctttctcttgccaggttcctggatgcctatgctgagcacaagttacagttctgggcagtgacagctgaaaatgagccttctgctgggctgttgagtggataccccttccagtgcctgggcttcacccctgaacatcagcgagacttcattgcccgtgacctaggtcctacccttgccaacggtactcaccacaatgtccgcctactcatgctggatgaccaacgcttgctgctgccccactgggcaaaggtggtaaggcctggacctccatggtgctccagtgaccttcaaatccagcatccaaatgattggctcccaaacttagagggatttttctacccaactatggatcctagagcaccattccccgggacctccagggtgccatggatcccacagttgggacttgaaacctctctaggctgggggtggtagctcatggctataattccagcactttgggaacccaaggtgggtggatcacttgaacctaaggagttcaagatgagcctgggaaacatggtgaaaccctaactctacaaaaaaaaaaatagaaaagttagccgggtgtggtggtggcacgcctatagtcccaagtattctggaggctaaggcgggaggtttagttgagcctagaatttcaggctgcagtgagctatgattgtgccactgtactccagcctgtgtgacagagggagaccctgtctcaaaaacaaaaacaaaaaatccctcccaaaacctctgtagttgcattcttcccaccacctaattcaggattcctacaagaggaactagaagttccagaagcctgtgggcagggtccagggtgacttgttcttcctttgcaggtactgacagacccagaagcagctaagtatgttcatggtattgctgtacattggtacctggactttctggctccagccaaagccaccctaagggagacacaccacctgttccccaacaccatgctctttgcctcagaggcctgtgtgggttccaagttctgggagcagagtgtgcggctaggctcctgggatcgagggatgcagtacagccacagcatcatcacagtaagccaccccagtctcccttcctgcaaaggaggacctcagacccattagtagtctcaccaaagactgatagaagcccttcctgtccagctttccccaggtagcctgcccttttgggcaactctggggaaccatgattccctgtcttgcctttccttcacaggtctgcacacctcattgccccttttgcaactactgaggcacttgcagctgcctcagacttctcagctccccttgagatgcctggatcttcacacccccaactccttagctactaaggaatgtgccctcacagggctgacctacccacagctgcctctcccacacgtgacccttacctacactctctggggacccccagtgttgcgcctttgtctctttgcctttgtccttaccctagaacctcctgtaccatgtggtcggctggaccgactggaacccatcattgtagacatcaccaagcacacgttttacaaacagcccatgttctaccaccttggccacttcaggtgagtggagggcggggcacccccattccataccaggcctatcatctcctacatcggatggcttacatcactctacaccacgagggagcaggaaggtgttcagggtggaacctcggaagaggcacacccatccccttttgcaccatggaggcaggaagtgactaggtagcaacagaaaaccccaatgcctgaggctggactgcgatgcagaaaagcagggtcagtgcccagcagcatggctccaggcctagagagccagggcagagcctttgcaggagttatggggtgggtccgtgggtgggcgacttcttagatgagggtttcatgggaggtaccccgagggactctgaccatctgttcccacattcagcaagttcattcctgagggctcccagagagtggggctggttgccagtcagaagaacgacccggacgcagtggcactgatgcatcccgatggctctcctgttgtggtcgtcctaaaccggtgagggcaatggtgaggtctgggaagtgggctgaagacagcgttgggggccttggcaggatcacactctcagcttctcctccctgctccctagctcctctaaggatgtgcctcttaccatcaaggatcctgctgtgggcttcctggagacaatctcacctggctactccattcacacctacctgtggcgtcgccagtgatggagcagatactcaaggaggcactgggctcagcctgggcattaaagggacagagtcagctcacacgctgtctgtgactaaagagggcacaacagggccagcgtgagcttacagcgacgtaagcccaggggcaatggtttgggtgactcactttcccctctaggtggtgccaggggctggaggcccctagaaaaagatcagtaagccccagtgtccccccagcccccatgcttatgtgaacatgcgctgtgtgctgcttgctttggaaactgggcctgggtccaggcctagggtgagctcactgtccgtacaaacacaagatcagggctgagggtaaggaaaagaagagactaggaaagctgggcccaaaactggagactgtttgtctttcctggagatgcagaactgggcccgtggagcagcagtgtcagcatcagggcggaagccttaaagcagcagcgggtgtgcccaggcacccagatgattcctatggcaccagccaggaaaaatggcagctcttaaaggagaaaatgtttgagcccagtcagtgtgagtggctttattctgggtggcagcaccccgtgtccggctgtaccaacaacgaggaggcacgggggcctctggaatgcatgagagtagaaaaaccagtcttgggagcgtgaggacaaatcattcctcttcatcctcctcagccatgcccagggtccgggtgcctggggcccgagcaggcgttgcccgctggatggagacaatgccgctgagcaaggcgtagcccaccatggctgccagtcctgccagcacagataggatctggttccggcgccggtatggctcctcctcagtctctgggcctgctggtgtctggcgttgcggtggtacctcagctgagggtcaaggaaggaaggtgtgttaggagaactagttcttggatccctgcccactctccccagggctgcccctcccatctgccccttacctccatcccaggggaagtagagactgagaatgtgggtacaataggcacagaggttgtgcagcccacgcaggtggacctgcagcttcccactgggcagctttgcctgcagcagcagggccaagtagctgaagacgaaggcgtccaaggaggcagggctggagcagagagagaagggtgggatggaggagaaccactggggtagaaggggtaaagatggagctggaggaagagtcagccttgggaggtgggctctgggcagcaggcggccaccagggaaggacaggacacacagttctagacctggtatggggagagatccccaggtggcgccagctggccctgaatagggctctatcccagggctgcataaagggcacattcagtgccccacagctcttcaggcccctcctgtgcctggctgccctcccaccctacccttttgtacctctgagaaggctctggcccccacacagtcacactgtcactagggccagtttctatcccagggacctcctatccagagcctgagccagccccagccccagccccagctccagctgctccatctgaacctgtatcttcttccaagccacccattaccctcttggagtcagactcacgcatctccaaagaagaacttttgagagcccaggcgctgagagagcagggtcagacactcccgagcctctcggtacagctgtaggggcgacacaggtaggcttgcagctgtgggaacagtgccacctccccacctaagcactcccattcctggccagcatccttggggctcatctcatacaatagcccccggtctcagagctacctccttctccagctcttcctcgtcctcaggcctgtgctccccagtcagcagctgtagccgttccatgtactgccgctgcatgcggccaggcaggaagaagttgaggggaaagggcatagcctctgcataccacttccgggtcacttccacgtagttcttggtgtctatccaaaaagtatgtacctggattgggtgggcaggaagaaacaggtaggtctgagccagtgcacctgtctgattcaaggtgggcttctgacccccatgctttcctgagcctgtgtgtgggtctgtgtgttcccgaaccctccccggctggccatggatgctgggaggtctgggcacactcaccagcaccgggagcaacttctcctccaggagagacatgaaggccagggtgtctgccccttgccgagctgacagatcataatcagcattgtacttctgtggaggaaatatccatggcgtggacactagggagctgcaagggcacttcaccagggaggaaggagtcctgtctggtacccccctcactggcctctgagtgcagtggaggtacagcaaggaacttttcctgccaaggcccccttgcctgggcccagccagtagcctgttgctgttggcgaaaagcctgggccttggagcctcctggccgtgaaggtccagcgcccaatgcagggaaggaaggaaggctccgccgcaaactaggagcagctcccagaatttccatggaaagctggaacaacgcccgctgacggcaactttctaacagtaacttccccgacccagacaccacaaagctagcacaacggagctcagatgcaggctaggactcggtccatgcctcaggaaccagagaaagccatcctcacactccctggatccagggaacccacgcccagggccccccagcttgttccctcagtgcccagctcttggctatttctttcacttcattccatcgctcagacaccattaccacatacacattccacccatacccccaggtctcagcctgccctaccttcccaggctccagtccctgttcctcagcatccccctccacatcctgagtaagctttgtccccagataacctcttcagcatgatccttaaatctccctaagcctcagtttctcccctgtggaatgggggtaagaatctctttctctgaatgcccctgtgttaggaaataatttagaatactttggaaactggaaaagctctgttcacacctaagcaatcagggcagtggcctcggctctgccaggaactttggcttttatctggatcctctctttccaggcctctcaattaattccccaggtcctcaacctttgggaagttagaaatgaggaagagtgtcctacttctgacactgttccctcttggaacctgaccgtcaatgctagaagaacccttggaaaacatgctggcccagccctctagttttacaaataagggagtgcacagccctgagaggttacatggcctgcccgagatcacatagtcaatggcagagtaaagagcatagcctaggcctccccactcctctagtaatgctctttcatcttctccaacctggctctaagccttgtccatcctgagccccatatctagcccaacctagtccctgaaaacaggaagtggcccttagaaatctctctccagtcccaccatcagaggccaactgctgtcttccactctccttcagcctgtgctcctctccctccctgcctcacagtgccctaagtttcatctcttgccgactgctttaatacatcacagtgacattgtgtgtgtctctgccacaagactgttgctccttgatgctctgggtcacctgcatctagcatggcatatatctggtgctcaataaatgtgtattgtatagaattgactgaacttctctcactggcagccccctctatccaagtcacctacctcttttcgaaggtgggtgatgatcttgtgtggaactgagatgacctctccatgactggtccgaagggcaggcagagttcctgatattgagagggaagtataccaaccagacccttagctgcctagtcatacatagttgcaacacattcctgcctatttcttgcttctccccttgtacacacccttccttacccccaagggatactgggtacctgaagggctctgccaggggttgctgatcttgtgtaccttcagtggagcaccagtaaatctggcataggtctgcagggaaggaagcagaagtcagagaggcagagccatgtcccccacagtggtatcaagaagagaaataacatttattgaataccttatgtgccattccctatacttagtatcttagtctcgaaaaaaaagggggagtcactaccatttctattttacaaatggacaacacagggctcagagagattccggacatgtctgtgattacaggacagccaggaaaatcctttcctctatctcctctcttgccatctacctggtgaacatctatcctcagaagcttttcctaaccagtatccctcttcttggaagcactgataatgcccttctctttggcagtatctgtggtctgttcctactttaacttatatgtgaatattttattatatttatttgcttacctatctgcctttctgtaaactcgaagggaggaaccaaattttattcatctttgcctggcaatgtttaatatttggaagaaatctaatagatcctctttaaagcaaggagtcaatgaataaatgaagcaaaggaagtctgattgctaagctctttatacaaagcctggctgtgagtcgtttggtctaacaaacaatagcctcagtaaatgctgttaagtgaggaggaagaggagaagggggctgaggagaaggcaggaattccaagctagagtaggtccctgagacagtccagcctagtaaacctccgaatggagaaaaaaaatgcccaaagagaaaggatctccgcaaggtcacacagccagtgaatggatgagcaaggactagaacccatcacctgaactcccaaccaggcgtcttttcattgctgcattaagcctagaaaactacagcatagggcactgaggccatatcggccacgtacgctctttgactgcctcagtttcccccactgcgcccgtgctgagtagccctggcaaggtttggatgcttggctagttcggccccctccccagtcatcagggcacagcagagggcgccggcgccacccctcaccagcacggccaggctgtccaggtccactgacggcagcccccagccccctgaccagcagaacagctccatgggcgccgccatcttgcccaccctctgtcccggaaacacttccttgtgtgcttctgccctcccctgcctgggcccgccccccgccaccgcccctccgatcgttgcggtcagggggcctggggagatccccggggaggcgaggcttcttctggcccgactggcagctgaactgcgggggactgggccgcgggcctcgggggagggcggccgccggcccatccagaggtggcccacgtagcgggacagcgctgtcggcccggcgcgcctcggagtgtcacggcgcctcgtccaagtggagccccgaacccctgaaggcgcggcaggctctggagagcggggtcttgtgcgcctgggccaggtctgggggctcttgccaaactgcacgtggcctgtactgctccagggccccttggggctcgtccccgagcggggactgcgggggggtcccccgagcagcatgttttccacagcgcgttatgtttggagcgggccctgcgccgcctgtcgccatggaaacaaaacaggggcggtggcggcggccggagcggaggccgggctggggcttgggtgggggaggggaagagaggctcgcaggctgtcgcttaggtgacgggaactcaggcgcccctctgcttcatccgggtcacggcccgtccgctagtacccacagtgttccacagtctggtccttggctcctcgcctgtacccctggtcttctgcgcctgtccctggtgtccctttcctcttttttggtttcttcactctgacctcactgaccactgctttagattctcccttcagttcccgtcagacgcttccagactcccaagctttcctacgaatgagggaaaatggagaaacaggcacttgtcaggggacccccaccctaataaagagcacttgctccgccagaacagcaaaattcatgccatgtgggcatccctgggcactatagcaagctagttgcggccactcccttggcatcctttcctgccagctgtggaataatgcccactgtctagcactgcccctgccaggggttcttgccttccacaatcgtggcttccagaaaacagtggcattcggtagcgctgtgtgccgagacccccaacaatgatgactgcggagagggaggcacctggggggaggatcattagggagaggtagaaagcagggaggcctccaggattctttcccagtgcccctggttcccagagctgatgatgcctccagggtgattggcagctctttgtttcagccccccctcacccgcctgctggccccccctccaattctgtccctccgccccccggctcctgctctctccgcctagccttttcccctcccagctgcctgcctgccaggggtagtgagccggctgagaggcatggagacgcaggaacttcggggggccctggctcttctcctcctttgctttttcacatctgccagtcaggatctgcagggtaagcctgtctccatcctcttagaccgctctctgcttcttccccatttgccctcagcccaagtagcagagaacatgtgggcaaggggagaggggaagagtccagaaattgagccagaggaaaacttaagactgcctagagttggtgaaattatggcctggtggagaggagtgggcaccggagagtagtgggggagctggaacaggacagggtcaggcatgaggccagggcagaggactcaggaactggatgctcaggctgcctggctggggtggttcctgagcatctgtaggcaccctagggtctgggagagcagcctgaaggtgggcgtactgtaggtccctgggcttcgtccccctgggctcctggctgcccaaggacagggcgggggtggggaccaagaagcctgggctctcccggaggtctggtggtgggatgggccgatggatgtgggagaggtagctggagcagatgacacaggcatagattctttactggctggagggaaaaccacagattggccaggacacaggaggcagaggagctgggtcctacattcccgtgggagatagcccagatggtgggagggttagagtcctcagtgggcagctgttcttatccagagcgagtgtgctgcgcccctaggatgggaggaggggaactagggtgtggaacgagccaaacccaggagtggaaagagaagctgccttccatttctacgttgtggacaccaggtgccactcctgtgggggatcagcacagcatctcctttgcgccacctggtgggggcatctcaaatttgtggggtgctgtttctgtgtttccaagtgagtctcaaacctgcaggttcctggaaggtagtaataggcaataatggggaaaggaaggcacagtgcctctgtcctctgagagcaacaagggttgaggtttttttttgttttcgttttgtctttttgagatggagtttcactcttgttgcccaggctggagtgcaatggcgcgatctcggctcactgcaacctccacctctcaggttcaagcgagtctcctgcctcagcctcctgagtagctgggattacaggtgcccgccaccacgcccggctaggtggtttttttttcttttttgttgttgtttttgtatttttagtagacacggggtttcaccgtgttggccaggctggtctcgaactcctgaccttaggcgatccacctgcctcaacctcccaaggtgttgggattacaggtgcgagccaccatgcccagccaagggttgaattttgaggtgactaacgctgcctggtggtgggggtagggggtgatgtgggctcggggagggcataccttagcatttgatcccattctctaaccttgataacccctgcctgaccagtaattgacctgctgactgtgggcgagtctcggcagatggtagctgtggcagagaagatccggacagccttgctcactgctggggacatctacctcttatccaccttccgcctgccccccaagcagggtggtgtcctctttggcctctattctcgccaagacaacactcgatggctggaggcctctgttgtaggcaagatcaacaaaggtgactggtgggcatctcctttcttgcaatggtgacctccttaagcactctccctcatccctacttcccaagtgcttcctcattctccttggcctccattagggaccaaggtcccatcaggctgtgcccagacatcaggggcacctggtatggggtgcttataaggtgctttaggagcccatgtaccaaacaatagggtgaggcttgagtcctgatatttatagggatgggaggttgtacttggggatgcctggaaggagggtgaggcatgtctctgtgcctcagcggtgatacagaaaggtctttcagatccctggaacagtcagtggccacaaaaccagctgtcaccctaggagaggatacagtcatctgataccaatgaagactaagaaagtatttgtctctaaaccaattatttttttaaatggagtcttgctttgtcacctaggctggagtgcagtggtacaatctcagctcactgcaacctctgcctcctgggttcaagcaattctcctatctcagcctcctgagtagctgggactacaggtgcccaccaccatgcctggctaacttttgtatttttagtagaaacagggttttgccatgttgaccaggctgttctcgaacttctgacctcaagtgatctgcccaccttggccttctaaagtgctgggattacaggtgtgagccaccgtgcctggcctctaaagcaatttcaaaaacatttattgtgtacctattaaatacaaggtgttgagagccacatagtagaattagggataggggccctagagatgtggtatctagcagagttgatccaaggctcagctgggaggcagggggtgggggatagcgcccatactgatctcccctcctgggcagtactggtgcgataccagcgggaggatggcaaagtccacgccgtgaacctacagcaagcgggcctggctgatgggcgcacacacacagttctcctgcgactccgaggtccctccagacccagccctgccctacatctctacgtggactgcaaactgggtgaccaacatgcaggccttccagcactggcccccattcctccagcggaggtcgatgggctggagattaggactggacagaaggcgtatttgaggatgcaggtgagccgggaggagcctctgagttctgtggaaatagagtttgcaccagctggggaaggggttggtagaccttcccaccttactctgctgctatccccccagggctttgtggaatctatgaaaattattctgggtgggtccatggcccgggtaggagccctgagtgagtgtccattccaaggggacgagtccatccacagtgcaggtaacacagagacttgtttgctgacattggaccacggatcctgtggcctttggtgactcctgtcttcttgatctccctctcccttaaaacccattcctttggctcacctgttcctagggtttctaaccctgttattccaaatctttcacctgactccacaatctccaatacacccatccgagaaaaaaagtgatctaagagaagaattggttaattgcttggccttggctgaccaagagatactggtctcgagtattttttttttttttggtgatggagtcttgtcctgttgcccaggccggagtgcagtggtgcaatctgggtcactgcagtctccactgagttcaagtgattctcctgcctcagcctcccaagcagctgggattacaggcggccctccaccatgcctagctaattttgcatttttagtagagatgggatttcaccacgttggccaggctggtctcaaacacctaatctcaagtgatgcacccacctcggcctctcaaagtgctgggattacaggcgtaagccaccgcgcccggcctggtctcgagtcttttatagttctcactggcagctgtcaccagcaatttctctgagtgttgcccatctgcctggtctctctgacagggatgttcagaagctctcacctaaataaaagacccacctttcccagatatttgagggagagctcttgaagaagggaatgggatggcgggtgtggtggctcacacctgtaatcccagcactttgggaggctgaggtgggctgatccctcaaggtccggagttcaagaccagcctggccaacactgtgaaacctcctctctactaaaaaatacaaaaaattagctgggcatggtggtgggcacctgtagtcccagctacttgggaggcggaggcaggagagttgcttgaacccaggaggtggaggttgtggtgagcagagatcacgccactgcattccagcctgggaaacagagcaagactccgactcaaaaaaaaaaaaaatggggatatactggggccctggccctgctttgggtccatcccttctgccactaccatgcctaggaaccaggaggatttgggttctaacttcctgtgaagcaactcccttagagggccttttgccccatagaaggagctggcactgcttgtctgccagctctgccctcccagcatccagcaccccatctttattctggggctccagccctgtccctgtcctcaccttccttcctccttctcaccaaccaggcctctcttcacttcacctcacccctctgactatgttttcttctcctctccagtgaccaatgcactgcactccattctaggtgagtaggccacactgaagcggaagcggggagcggggaggaggccccaggctctggcagctgcctgaaactaagtcctcttcagtcaggaatgtagtaggtttaaaggcaggggtgggcagccgtggcaggtactggcttattgcccatggagggcccaggactggtgctccagtactgaacccctcacaccctgggtcccgacaggggagcagaccaaggcgctggtcacccaactcaccctcttcaaccagatcctggtggagctgcgggatgatatacgagaccaggtttgggtgggctggcgaagggtggcactgattctggggtagggtggcagatgtcaagtgctgactcctccccatccttctccaggtgaaggaaatgtccctgatccgaaacaccattatggagtgtcaggtgtgcggtgagtgggagagcaggggaggctccacatgaccgtgccacgttcccaccattggctttggctttcccttctggtggcttaaatagtgaccaccgggtagctctgactgtgtccacccctcaggcttccatgagcagcgttcccactgcagccccaatccctgcttccgaggtgtggactgcatggaagtgtacgagtacccaggctaccgctgtgggccctgcccccctggcctgcagggcaacggcacccactgcagtgacatcaatgaggtgagggaggtcagagcccagaagggtacagaaaactggggtgaggatgtcaggaggcacccaagagggtgggataaatgctggtccggaggagaggaatctggagtttaggagaggtcagaggcaagagaaatgcaagatgggagagacagaaggcctggggcaaagactgaaggccatacagggaaggagctggggaaactgcaggggaggcttgagatggcgaccagtggcatggggagggagagagggaaccccgagggaagtggggtggggaccaggagcacaaggcagttgtgtggggagagctgcacaaaggggagacctggagcaatggttcctggatcacaggcagggacctgagtttcccagagggcggcctgacctctgccttctcatctggtccccagtgtgctcacgctgacccctgtttcccgggctccagctgcatcaacaccatgcccggcttccactgtgaggcctgtcctcgagggtacaagggcacacaggtgtctggtgtgggcattgactatgcccgggccagcaaacaggtcagactgggtagtgtgtgtggacaagggatcttggccttgtagaggccaggggcttctgggttggacatgggacccttgtgatgaatgggacatggatggctttgcatcggctttgggtctgggcttaatgttgatgttcacagataaggccataccagtgtcctctgctgtatctgaggagacccaccataggtctggttccacccaaagtctgccccttcaggtctgcaatgacatcgatgaatgcaacgatggcaacaatggtggctgtgacccaaactccatctgcaccaacactgtggtgagctgaatatcctgagtgtattctggggtggtgggaatggtaaaaccccaacccccgccccttcttaccttcaaatttcctgctgcctttcctcctccccagggcactacacagattaggtgttcacatggacttggtttggaatactggtttgcctcttgctagctctttagcaggttatttaacttttctgagcctcagcttcctcatctgaaaactgaggctgttatccaccctgaaaggttgtcatgataacctaaaggagatactgatatgcctggcataactgagtgcccagcccacactccgcaggtggagcagtgctggtcctgggtgcctggtgggctcaccctccttcctaagatgctgcctctccactcttagggctctttcaagtgtggtccctgccgcctgggtttcctgggcaaccagagccagggctgcctcccagcccggacctgccacagcccagcccacagcccctgccacatccatgctcactgtctctttgaacgcaatggtgcagtgtcctgccaggtgagctaggcttcaggcgtggaaggaaaagggagggtctggggaaaggagtagggctatgtttagggcctgggttgggggtcttcataggagagaaggtgggcctgggcccaggaactgtttggtggggagaataggacctgaagcagggaaaatatagggaggaggggagccagaccaaactgctagctcctaccctttgtgttgccctagtgtaacgtgggctgggctgggaatgggaacgtgtgtgggactgacacagacatcgatggctacccagaccaagcactgccctgcatggacaacaacaaacactgcaaacaggtgcagggagcaggcgggcaagggggcgtagtggggagcccaagctgggtcaggccagaactcatccatcctcttcccctgaactttaggacaactgccttttgacacccaactctgggcaggaagatgctgataatgatggtgtgggggaccagtgtgatgatgatgctgatggggatgggatcaagaatgttgaggtgactcccagactgccctgccccttgaagctcctctcccctcctcctgtcctctctgtgcctcacttacctcatctggcagctctctagtaagggccaaatactccaaatcagggaggcaaaaacctcgtgcccaggacaaggaggctgggtgggtgggactgtactgagcagtttgtccatcacaagggtgtgatcttagaaaaggatacagagacaaggtaggtgcaagatgacaagtgatttaggggagacctgacccttcccctcccaccctctgcccaggacaactgccggctgttccccaacaaagaccagcagaactcagatacagattcatttggtgatgcctgtgacaattgccccaacgttcccaacaatgaccagaaggacacagatggcaatggggaaggagatgcctgtgacaacgacgtggatggggatggtgcaggcctggggctgaaggggtggctgggggacctgtgagaatttggatcaggtggggatgaagcagggaagctaggaagtctctgtgaaatagggaggcaggcttgtggacgttggcctgggtgaggagagattacctgcagcagatgtcaataggaatgtgaggtagggcgtagtgttaggcagagtgtggactagagggtgagacaagaaacaggcagatttcctggccagttgtcctctgggtggggagacaaagttcgggactttcaccaacctagaagagagaatatggcatgttctagtaacaaccttgtgctacccatgtcttctaggcatccccaatggattggacaattgccctaaagtccccaacccactacagacagacagggatgaggacggggtgggagatgcttgcgacagctgccctgaaatgagcaatcctacccaggtacagggagatggtaaggacaggggagggatgagggtactgatggatgaagccccagccctttggatggaaagtggtcagatcaccctcttcagagttatcaagaggagatggtgagaacaggtccctctctctcagacagatgcagacagcgacctggtgggggatgtctgtgatactaatgaagacaggtaaggtcttggtcaagagacgcaaggtctttcttttttttgtctttctgagacggcttgctctgtcacctaggctggagtacagtggcacgatcttggctcactgcaacctccgtctcccagggtcaagtgattctcatgcctcaacctccctgagtggctaggattacaggcatgtgctaccaagcccagctaattcttgtattttcagtagagacagggtttcaccatgttggccaggctggtctcgaactccttacctcaggtgatccgccagcctctgcctcccaaagtgctgtgattacaggtgtgagccactgtgccagcgaaatgcaaggtcttataggggatattttactttcctctagtatatccttttttttttttttttgagacggagtcttgctctgtcgcccaggctggagtacagtggcatgatctcggctcactgcaagctccacctcccgagttcacgccattcttctgcctcagcctcccaagtagctgggactacaggcgcctgccaccacgcccggctaattttttgtgtttttagtagagacggggtttcactgtgttaaccaggatggtctcgatctcctgatctcgtgatttgcctgcctcagcctcccaaagtgctgggattacaggcgtgagccaccgtgcccggcctcctttttttttttgagatggagtcttgctctgtcactcaagctggagtgcagtgatatcggctcactgcgacctccacctccagggttcaagcgattttcctgcctcagcctcccagtagctggattacaggcgcgtgctaccaagctcagctaatttttgtgtttttagtagagacagggtttcatcgtgttggccaggctggtctcgaactcctgacctcaggtgatctgcccgccttggcctcccaaagtactgggaatacaggcatgagccactgtgcccaggccatagtatattctaaattccttctatgatttagccttaattctctattgctattcagcaggaatttattcttacagtcatccctccattcctactgccagaccttcacctcacctggctgactgccaggggtctgattgtatggagagcaggctccagagactcccaggcagaagcgaagggaaggacaaggagtacctttaaatcctttatttggtacctgttcttctgattagcgatggggatgggcatcaggacaccaaggacaactgcccacagctgccaaatagctcccagctggactctgataacgatggacttggagatgagtgtgatggggatgatgacaatgatggcatcccagattatgtgcctcctggtcccgataactgccgcctggtacccaatcccaatcagaaggactcagatggtaagcctgcggacccagagcacgttagactggtgttgcctttgcccaggtggaggcagcaagccctgttgggaagtgaggaagggcaaggtgggaaagatgtcaggaatgcaggcccaacagatggtattgttgcctaatggcagtggccagggccttcctgagcacccagcctcactctgcccaggcaatggcgttggtgatgtgtgtgaggatgactttgacaatgatgctgtggtcgaccccctggatgtgtgtcctgaaagtgcagaggtaacgcttacggattttcgggcctatcagaccgtcgtcctggatcc

SEQ ID NO: 2555 - protein, 499 aa, Homo sapiens
MPHPRRYHSSERGSRGSYREHYRSRKHKRRRSRSWSSSSDRTRRRRREDSYHVRSRSSYDDRSSDRRVYDRRYCGSYRRNDYSRDRGDAYYDTDYRHSYEYQRENSSYRSQRSSRRKHRRRRRRSRTFSRSSSQHSSRRAKSVEDDAEGHLIYHVGDWLQERYEIVSTLGEGTFGRVVQCVDHRRGGARVALKIIKNVEKYKEAARLEINVLEKINEKDPDNKNLCVQMFDWFDYHGHMCISFELLGLSTFDFLKDNNYLPYPIHQVRHMAFQLCQAVKFLHDNKLTHTDLKPENILFVNSDYELTYNLEKKRDERSVKSTAVRVVDFGSATFDHEHHSTIVSTRHYRAPEVILELGWSQPCDVWSIGCIIFEYYVGFTLFQTHDNREHLAMMERILGPIPSRMIRKTRKQKYFYRGRLDWDENTSAGRYVRENCKPLRRYLTSEAEEHHQLFDLIESMLEYEPAKRLTLGEALQHPFFARLRAEPPNKLWDSSRDISR

SEQ ID NO: 2556 - DNA, 195 bp, Homo sapiens
atttttaccatgtgcgtattcaaccaaatttatttttgaacattcagaacaccagattatcacagattaaaaagaaagcaccaaaaattactacacattaatacctgagcagagactgaaggcaaatattcatctattaaacctacaccataatgctcaaacacaggtaaaaacattcacaacacactctacaga

SEQ ID NO: 2557 - DNA, 1510 bp, Homo sapiens
atcctgctgctgccgccaccgctgctgctgctctgcaaaattcagctgctgcctctgtcttgaggaccccagcgcctttcccccggggccatgctgcctgcagccacagcctccctcctggggcccctcctcactgcctgcgccctgctgccttttgcccagggccagacccccaactacaccagacccgtgttcctgtgcggaggggatgtgaagggggaatcaggttacgtggcaagtgaggggttccccaactcctacccccctaataaggagtgcatctggaccataacggtccccgagggccagactgtgtccctctcattccgagtcttcgacctggagctgcaccccgcctgccgctacgatgctctggaggtcttcgctgggtctgggacttccggccagcggctcggacgcttttgtgggaccttccggcctgcgcccctagtcgcccccggcaaccaggtgaccctgaggatgacgacggatgagggcacaggaggacgaggcttcctgctctggtacagcgggcgggccacctcgggctctgagcaccaattttgcggggggcggctggagaaggcccagggaaccctgaccacgcccaactggcccgagtccgattaccccccgggcatcagctgttcctggcacatcatcgcgcccccggaccaggtcatcgcgctgaccttcgagaagtttgacctggagccggacacctactgccgctatgactcggtcagcgtcttcaacggagccgtgagcgacgactcccggaggctggggaagttctgcggcgacgcagtcccgggctccatctcctccgaagggaatgaactcctcgtccagttcgtctcagatctcagtgtcaccgctgatggcttctcagcctcctacaagaccctgccgcggggcactgccaaagaagggcaagggcccggccccaaacggggaactgagcctaaagtcaagctgccccccaagtcccaacctccggagaaaacagaggaatctccttcagcccctgatgcacccacctgcccaaagcagtgccgccggacaggcaccttgcagagcaacttctgtgccagcagccttgtggtgactgcgacagtgaagtccatggttcgggagccaggggagggccttgccgtgactgtcagtcttattggtgcttataaaactggaggactggacctgccaactccacccactggtgcctccctgaagttttacgtgccttgcaagcagtgcccccccatgaagaaaggagtcagttatctgctgatgggccaggtagaagagaacagaggccccgtccttcctccagagagctttgtggttctccaccggcccaaccaggaccagatcctcaccaacctaagcaagaggaagtgcccctctcaacctgtgcgggctgctgcgtcccaggactgagacgcaggccagccccggcccctagccctcaggcctctcttcttatccaaataaatgtttcttaatgaaa

SEQ ID NO: 2558 - protein, 449 aa, Homo sapiens
MLPAATASLLGPLLTACALLPFAQGQTPNYTRPVFLCGGDVKGESGYVASEGFPNSYPPNKECIWTITVPEGQTVSLSFRVFDLELHPACRYDALEVFAGSGTSGQRLGRFCGTFRPAPLVAPGNQVTLRMTTDEGTGGRGFLLWYSGRATSGSEHQFCGGRLEKAQGTLTTPNWPESDYPPGISCSWHIIAPPDQVIALTFEKFDLEPDTYCRYDSVSVFNGAVSDDSRRLGKFCGDAVPGSISSEGNELLVQFVSDLSVTADGFSASYKTLPRGTAKEGQGPGPKRGTEPKVKLPPKSQPPEKTEESPSAPDAPTCPKQCRRTGTLQSNFCASSLVVTATVKSMVREPGEGLAVTVSLIGAYKTGGLDLPTPPTGASLKFYVPCKQCPPMKKGVSYLLMGQVEENRGPVLPPESFVVLHRPNQDQILTNLSKRKCPSQPVRAAASQD

SEQ ID NO: 2559 - DNA, 727 bp, Homo sapiens
cgcgtccgcccacgcgtccgcggacgcgtgggcggaggcaatggccggcaaccagctgtaagcgaggcacggaagacatatgcttgtgagacaaaggtgtctctgaaactatggatggtacaagaacttcacttgacattgaagagtactcggatactgaggtacagaaaaaccaagtactaactctggaagaatggcaagacaagtgggtgaacggcaagactgcttttcatcaggaacaaggacatcagctattaaagaagcatttagatactttccttaaaggcaagagtggactgagggtatctattcctctttgcggaaaagcggtcgagcatgaaatggtttgcagaccggggacacagtgtagttgcgctgtggaaatcagctgaacttgggcatacaagaattcttttacagagcagaatctttcttactcagaagaaccaatcaccgaaattcctggaaccaaagtatctaagagttcttcggggaacatatcattgtactgttgcagtatttttgatcttcccaggacaaatatcggcaacattcgacatgattcgggatagaggagcattagttgccattaatccaggtgatcgcaaatgctatgcaagatacaatgtctcgcctcctgggacagaagttcagtatctcctgtgtgtcttcctcatgatccaactcaaaatccaggtccacattccatgtccaatgtgacattgat

SEQ ID NO: 2560 - DNA, 463 bp, Homo sapiens
tagaattcagcggccgcttaattctagaagtccaaatcactcattgtttgtgaaagctgagctcacagcaaaacaagccaccatgaagctgtcggtgtgtctcctgctggtcacgctggccctctgctgctaccaggccaatgccgagttctgcccagctcttgtttctgagctgttagacttcttcttcattagtgaacctctgttcaagttaagtcttgccaaatttgatgcccctccggaagctgttgcagccaagttaggagtgaagagatgcacggatcagatgtcccttcagaaacgaagcctcattgcggaagtcctggtgaaaatattgaagaaatgtagtgtgtgacatgtaaaaactttcatcctggtttccactgtctttcaatgacaccctgatcttcactgcagaatgtaaaggtttcaacgtcttgctttaataaatcacttgctctac

SEQ ID NO: 2561 - protein, 90 aa, Homo sapiens
MKLSVCLLLVTLALCCYQANAEFCPALVSELLDFFFISEPLFKLSLAKFDAPPEAVAAKLGVKRCTDQMSLQKRSLIAEVLVKILKKCSV

SEQ ID NO: 2562 - DNA, 646 bp, Homo sapiens
ccggctaggtacgaggccgggtgttagagcgtctcagcgcagcgccgcccgctgagagccagcacgaacgagcccagcaccggccggatggagcgtccgcaacccgacagcatgccccaggatttgtcagaggccctgaaggaggccaccaaggaggtgcacacccaggcagagaatgctgagttcatgaggaactttcagaagggccaggtgacccgagacggcttcaagctggtgatggcctccctgtaccacatctatgtggccctggaggaggagattgagcgcaacaaggagagcccagtcttcgcccctgtctacttcccagaagagctgcaccgcaaggctgccctggagcaggacctggccttctggtacgggccccgctggcaggaggtcatcccctacacaccagccatgcagcgctatgtgaagcggctccacgaggtggggcgcacagagcccgagctgctggtggcccacgcctacacccgctacctgggtgacctgtctgggggccaggtgctcaaaaagattgcccagaaagccctggacctgcccagctctggcgagggcctggccttcttcaccttccccaacattgccagtgccaccaagttcaagcagctctaccgctcccgcatga

SEQ ID NO: 2563 - DNA, 561 bp, Homo sapiens
tttttttttttgtagagagaaaaatttattgcaaggcagccaagcaaggacacaggagtctggcccaaatctgtctctccaagttggaggctggggcagattttatatacagagggtagtgaggcatgatatgattggatcttgtaatgaggggattcaggaggcttgatctgactggatcacgccagggctcaatctgattggatcaaggatcatgccacgtggtgtccacttcttaactcagtccctgttcctcagtctgagcacttaggttccacgtggatttgcacgcttcgttcatctggacatgcccagggtatgtaacttgcaacctgggggtccacgacaactgaaaaacaactcgccattttattacacaaagttgaaccagattgggctgaatctgcggttacaatgtttaccagtttattataaaggatacaactagaggggcggggcggtgcccgcaagatggctgcgcccgaaaaggtgacatttccagagaaaccaagccacaaaaagtacaggggccgccctgaagaaggagaaacgaaagaaacg

SEQ ID NO: 2564 - DNA, 765 bp, Homo sapiens
  misc_feature (512)..(512): n is a, c, g, or t
  misc_feature (555)..(555): n is a, c, g, or t
  misc_feature (583)..(583): n is a, c, g, or t
  misc_feature (692)..(692): n is a, c, g, or t
  misc_feature (762)..(762): n is a, c, g, or t
aggatccttaattaaattaatccccttccccccccccgggaggccgagctcggctgggcttggcgaggctgcggcgcggccaccagcgggagtgcagcggccactgtacccagagattcaaaaccccaaacccgggacttgggggcgctgagccgggccgggaagcagagcctggtcgtgaggaacagccgcccgttgctgtctgcccctttgcggacagcgtctccctcgactccgcttaggaagtggtgggggcggcgtggcccccgtcgggaggcgttcgaacgcccgctaggagagagaaaggattcccctgtgcttggagcccgcactcgggcgcggagggagcggcggcaggctctcgctttcggcaccatgggctgcacgctgagcgccgaggacaaggcggcggtggagcggagtaagatgatcgaccgcaacctccgtgaggacggcgagaaggcggcgcgcgaggtcaagctgctgctgctcggtgctggtgaatctggtanaagtacaattgtgaagcagatgaaaattatccatgaagctggntattcagaagaggagtgtaacaatacanagcagtggtctacagtaacaccatccagtcaattattgctatcattagggctattggggaggtgaaagatagactttgtgactcagccccgggcggatgatgcacgccnaactcttgtgctagcctgagctgctgaagaggcttatgactgcagaacttggctgagtaataaagagatngtg

SEQ ID NO: 2565 - DNA, 2242 bp, Homo sapiens
ccgggataaaacgaggtgcggagagcgggctggggcatttctccccgagatggcgggtctgacggcggcggccccgcggcccggagtcctcctgctcctgctgtccatcctccacccctctcggcctggaggggtccctggggccattcctggtggagttcctggaggagtcttttatccaggggctggtctcggagcccttggaggaggagcgctggggcctggaggcaaacctcttaagccagttcccggagggcttgcgggtgctggccttggggcagggctcggcgccttccccgcagttacctttccgggggctctggtgcctggtggagtggctgacgctgctgcagcctataaagctgctaaggctggcgctgggcttggtggtgtcccaggagttggtggcttaggagtgtctgcaggtgcggtggttcctcagcctggagccggagtgaagcctgggaaagtgccgggtgtggggctgccaggtgtatacccaggtggcgtgctcccaggagctcggttccccggtgtgggggtgctccctggagttcccactggagcaggagttaagcccaaggctccaggtgtaggtggagcttttgctggaatcccaggagttggaccctttgggggaccgcaacctggagtcccactggggtatcccatcaaggcccccaagctgcctggtggctatggactgccctacaccacagggaaactgccctatggctatgggcccggaggagtggctggtgcagcgggcaaggctggttacccaacagggacaggggttggcccccaggcagcagcagcagcggcagctaaagcagcagcaaagttcggtgctggagcagccggagtcctccctggtgttggaggggctggtgttcctggcgtgcctggggcaattcctggaattggaggcatcgcaggcgttgggactccagctgcagctgcagctgcagcagcagccgctaaggcagccaagtatggagctgctgcaggcttagtgcctggtgggccaggctttggcccgggagtagttggtgtcccaggagctggcgttccaggtgttggtgtcccaggagctgggattccagttgtcccaggtgctgggatcccaggtgctgcggttccaggggttgtgtcaccagaagcagctgctaaggcagctgcaaaggcagccaaatacggggccaggcccggagtcggagttggaggcattcctacttacggggttggagctgggggctttcccggctttggtgtcggagtcggaggtatccctggagtcgcaggtgtccctagtgtcggaggtgttcccggagtcggaggtgtcccgggagttggcatttcccccgaagctcaggcagcagctgccgccaaggctgccaagtacggagtggggaccccagcagctgcagctgctaaagcagccgccaaagccgcccagtttgctcttctcaatcttgcagggttagttcctggtgtcggcgtggctcctggagttggcgtggctcctggtgtcggtgtggctcctggagttggcttggctcctggagttggcgtggctcctggagttggtgtggctcctggcgttggcgtggctcccggcattggccctggtggagttgcagctgcagcaaaatccgctgccaaggtggctgccaaagcccagctccgagctgcagctgggcttggtgctggcatccctggacttggagttggtgtcggcgtccctggacttggagttggtgctggtgttcctggacttggagttggtgctggtgttcctggcttcggggcagtacctggagccctggctgccgctaaagcagccaaatatggagcagcagtgcctggggtccttggagggctcggggctctcggtggagtaggcatcccaggcggtgtggtgggagccggacccgccgccgccgctgccgcagccaaagctgctgccaaagccgcccagtttggcctagtgggagccgctgggctcggaggactcggagtcggagggcttggagttccaggtgttgggggccttggaggtatacctccagctgcagccgctaaagcagctaaatacggtgctgctggccttggaggtgtcctagggggtgccgggcagttcccacttggaggagtggcagcaagacctggcttcggattgtctcccattttcccaggtggggcctgcctggggaaagcttgtggccggaagagaaaatga

SEQ ID NO: 2566 - protein, 730 aa, Homo sapiens
MAGLTAAAPRPGVLLLLLSILHPSRPGGVPGAIPGGVPGGVFYPGAGLGALGGGALGPGGKPLKPVPGGLAGAGLGAGLGAFPAVTFPGALVPGGVADAAAAYKAAKAGAGLGGVPGVGGLGVSAGAVVPQPGAGVKPGKVPGVGLPGVYPGGVLPGARFPGVGVLPGVPTGAGVKPKAPGVGGAFAGIPGVGPFGGPQPGVPLGYPIKAPKLPGGYGLPYTTGKLPYGYGPGGVAGAAGKAGYPTGTGVGPQAAAAAAAKAAAKFGAGAAGVLPGVGGAGVPGVPGAIPGIGGIAGVGTPAAAAAAAAAAKAAKYGAAAGLVPGGPGFGPGVVGVPGAGVPGVGVPGAGIPVVPGAGIPGAAVPGVVSPEAAAKAAAKAAKYGARPGVGVGGIPTYGVGAGGFPGFGVGVGGIPGVAGVPSVGGVPGVGGVPGVGISPEAQAAAAAKAAKYGVGTPAAAAAKAAAKAAQFALLNLAGLVPGVGVAPGVGVAPGVGVAPGVGLAPGVGVAPGVGVAPGVGVAPGIGPGGVAAAAKSAAKVAAKAQLRAAAGLGAGIPGLGVGVGVPGLGVGAGVPGLGVGAGVPGFGAVPGALAAAKAAKYGAAVPGVLGGLGALGGVGIPGGVVGAGPAAAAAAAKAAAKAAQFGLVGAAGLGGLGVGGLGVPGVGGLGGIPPAAAAKAAKYGAAGLGGVLGGAGQFPLGGVAARPGFGLSPIFPGGACLGKACGRKRK

SEQ ID NO: 2567 - DNA, 12563 bp, Homo sapiens
cgcgccggggcctggtgctcggtcggcgggtgctgccgctttaagcgggggcgggactgcgcgcggccgagcggttgcgacgagggctcggctgggggtcgccggggtcgcgggccgggcctgcaggagccgggccgccgaggtcggggctggttgaactcatggacctgatacttttctcttgagaagcaaaccagcccaaaagaaaaatggcgtttgttgcaacacagggggccacggtggttgaccagaccactttgatgaaaaagtaccttcagtttgtggcagctctcacagatgtgaatacacctgatgaaacaaagttgaaaatgatgcaagaagttagtgaaaattttgagaatgtcacgtcatctcctcagtattctacattcctagaacatatcatccctcgattccttacatttctccaagatggagaagttcagtttcttcaggagaaaccagcacagcaactgcggaagctcgtacttgaaataattcatagaataccaaccaacgaacatcttcgtcctcacacaaaaaatgttttgtctgtgatgtttcgctttttagagacggaaaatgaagaaaatgttcttatttgtctaagaataattattgagctacacaaacagttcaggccaccgatcacacaagaaattcatcattttctggattttgtgaaacagatttacaaggagcttccaaaagtagtgaaccgctactttgagaaccctcaagtgatccccgagaacacagtgcctcccccagaaatggttggtatgataacaacgattgctgtgaaagtcaacccggagcgtgaggacagtgagactcgaacacattccatcattccgaggggatcactttctctgaaagtgttggcagaattgcccattattgttgttttaatgtatcagctctacaaactgaacatccacaatgttgttgctgagtttgtgcccttgatcatgaacaccattgccattcaggtgtctgcacaagcgaggcaacataagctttacaacaaggagttgtatgctgacttcattgctgctcagattaaaacattgtcatttttagcttacattatcaggatttaccaggagttggtgactaagtattctcagcagatggtgaaaggaatgctccagttactttcaaattgtccagcagagactgcacacctcagaaaggagcttctgattgctgccaaacacatcctcaccacagagctgagaaaccagttcattccttgcatggacaagctgtttgatgaatccatactaattggctcaggatatactgccagagagactctaaggcccctcgcctacagcacgctggccgacctcgtgcaccatgtccgccagcacctgcccctcagcgacctctccctcgccgtccagctcttcgccaagaacatcgacgatgagtccctgcccagcagcatccagaccatgtcctgcaagctcctgctgaacctggtggactgcatccgttccaagagcgagcaggagagtggcaatgggagagacgtcctgatgcggatgctggaggttttcgttctcaaattccacacaattgctcggtaccagctctctgccatttttaagaagtgtaagcctcagtcagaacttggagccgtggaagcagctctgcctggggtgcccactgcccctgcagctcctggccctgctccctccccagcccctgtccctgccccacctccacccccgcccccacccccacctgccacccctgtgaccccggcccccgtgcctcccttcgagaagcaaggagaaaaggacaaggaagacaagcagacattccaagtcacagactgtcgaagtttggtcaaaaccttggtgtgtggtgtcaagacaatcacgtggggcataacatcatgcaaagcacctggtgaagctcagttcattcccaacaagcagttacaacccaaagagacacagatttacatcaaacttgtgaaatatgcaatgcaagctttagatatttatcaggtccagatagcaggaaatggacagacatacatccgtgtggccaactgccagactgtgagaatgaaagaggagaaggaggtattggagcatttcgctggtgtgttcacaatgatgaaccccttaacgttcaaagaaatcttccaaactacggtcccttatatggtggagagaatctcaaaaaattatgctcttcagattgttgccaattccttcttggcaaatcctactacctctgctctgtttgctacgattctggtggaatatctccttgatcgcctgccagaaatgggctccaacgtggagctctccaacctgtacctcaagctgttcaagctggtctttggctctgtctccctctttgcagctgaaaatgaacaaatgctgaagcctcacttgcacaagattgtgaacagctctatggagctcgcgcagactgccaaggaaccctacaactacttcttgctgctacgggcgctgtttcgctctattggtggaggtagccacgatctcttgtatcaggagttcttgcctctccttccaaacctcctgcaagggctgaacatgcttcagagtggcctgcacaagcagcacatgaaggacctctttgtggagctgtgtctcaccgtccctgtgcggctgagctcgcttttgccgtacctgcccatgcttatggatcccttggtgtctgcactcaatgggtctcagacattggtcagccaaggcctcaggacgctggagctgtgtgtggacaacctgcagcccgacttcctctacgaccacatccagccggtgcgcgcagagcttatgcaggctctgtggcgcaccttacgcaaccctgctgacagcatctcccacgtggcctaccgtgtgctcggtaagtttggcggcagtaacaggaagatgctgaaggagtcgcagaagctgcactacgttgtgaccgaggttcagggccccagcatcactgtggagttttccgactgcaaagcttctctccagctccccatggagaaggccattgaaactgctctggactgcctgaaaagcgccaacactgagccctactaccggaggcaggcgtgggaagtgatcaaatgcttcctggtggccatgatgagcctggaggacaacaagcacgcactctaccagctcctggcacaccccaactttacagaaaagaccatccccaatgttatcatctcacatcgctacaaagcccaggacactccagcccggaagacttttgagcaggccctgacaggcgccttcatgtctgctgtcattaaggacctgcggcccagcgccctgccctttgtcgccagcttgatccgccactatacgatggtggcagtcgcccagcagtgtggccctttcttgctgccttgctaccaggtgggcagccagcccagcacagccatgtttcacagtgaagaaaatggctcgaaaggaatggatcctttggttctcattgatgcaattgctatttgtatggcatatgaagaaaaggagctttgcaaaatcggggaggtggccctagctgtgatatttgatgttgcaagtatcatcctgggctccaaggagagggcctgccagctgcccctgttttcttacatcgtggagcgcctgtgtgcatgttgttatgaacaggcgtggtatgcaaagctggggggtgtggtgtctattaagtttctcatggagcggctgcctctcacttgggttctccagaaccagcagacattcctgaaagcacttctctttgtcatgatggacttaactggagaggtttccaatggggcagtcgctatggcaaagaccacgctggagcagcttctgatgcggtgcgcaacgcctttaaaagacgaggagagagccgaagagatcgtggccgcccaggaaaagtctttccaccatgtgacacacgacttggttcgagaagtcacctctccaaactccactgtgaggaagcaggccatgcattcgctgcaggtgttggcccaggtcactgggaagagtgtcacggtgatcatggaaccccacaaagaggtcctgcaggatatggtcccccctaagaagcacctgctccgacaccagcctgccaacgcacagattggcctgatggaggggaacacgttctgtaccacgttgcagcccaggctcttcacaatggaccttaacgtggtggagcataaggtgttctacacagagctgttgaatttgtgtgaggctgaagattcagctttaacaaagctgccctgttataaaagccttccgtcactcgtacctttacgaattgcggcattaaatgcacttgctgcctgcaattaccttcctcagtccagggagaaaatcatcgctgcactcttcaaagccctgaattccaccaatagtgagctccaagaggccggagaagcctgtatgagaaagtttttagaaggtgctaccatagaagtcgatcaaatccacacacatatgcgacctttgctgatgatgctgggagattaccggagcttgacgctgaatgttgtgaatcgcctgacttcggtcacgaggctcttcccaaattccttcaatgataaattttgtgatcagatgatgcaacatctgcgcaagtggatggaagtggtggtgatcacccacaaagggggccagaggagcgacggaaacgaaatgaagatttgctcagcaattataaacctttttcatctgatcccggctgctcctcagacactggtgaagcctttgctagaggttgtcatgaaaacggagcgggcgatgctgatcgaggcggggagtccattccgagagcccctgatcaagttcctgactcgacatccctcgcagacagtggagctgttcatgatggaagccacactgaacgatccccagtggagcagaatgtttatgagttttttaaaacacaaagacgccagacctctgcgggatgtgctggctgccaaccccaacaggttcatcaccctgctgctgccggggggtgcccagacggctgtgcgccccggttcgcccagcaccagcaccatgcgcctggacctccagttccaggccatcaagatcataagcattatagtgaaaaacgatgactcctggctggccagccagcactctctggtgagccagttgcgacgtgtgtgggtgagtgagaacttccaagagaggcaccgcaaggagaacatggcagccaccaactggaaggagcccaagctgctggcctactgcctgctgaactactgcaaaaggaattacggagatatagaattgctgttccagctgctccgagcctttactggtcgttttctctgcaacatgacattcttaaaagagtatatggaggaagagattcccaaaaattacagcatcgctcagaaacgtgccctgttctttcgctttgtagacttcaacgaccccaacttcggagatgaattaaaagctaaagttctgcagcatatcttgaatcctgctttcttgtacagctttgagaagggggaaggagagcagctcttgggacctcccaatccagaaggagataacccagaaagcatcaccagtgtgtttattaccaaggtcctggaccccgagaagcaggcggacatgctggactcgctgcggatctacctgctgcagtacgccacgctgctggtggagcacgccccccaccacatccatgacaacaacaagaaccgcaacagcaagctgcgccgcctcatgaccttcgcctggccctgcctgctctccaaggcctgcgtggacccagcctgcaagtacagcggacacttgctcctggcgcacattatcgccaaattcgccatacacaagaagatcgtcctgcaggtttttcatagtctcctcaaggctcacgcaatggaagctcgagcgatcgtcagacaggcgatggccattctgaccccggcggtgccggccaggatggaggacgggcaccagatgctgacccactggacccggaagatcattgtggaggaggggcacaccgtcccgcagctggtccacattctgcacctgatagtgcaacacttcaaggtgtactacccggtacggcaccacttggtgcagcacatggtgagcgccatgcagaggctgggcttcacgcccagtgtcaccatcgagcagaggcggctggccgtggacctgtctgaagtcgtcatcaagtgggagctgcagaggatcaaggaccagcagccggattcagatatggacccaaattccagtggagaaggagtcaattctgtctcatcctccattaagagaggcctgtccgtggattctgcccaggaagtgaaacgctttaggacggccaccggagccatcagtgcagtctttgggaggagccagtcgctacctggagcagactctctcctcgccaagcccattgacaagcagcacacagacactgtggtgaacttccttatccgcgtggcctgtcaggttaatgacaacaccaacacagcggggtcccctggggaggtgctctctcgccggtgtgtgaaccttctgaagactgcgttgcggccagacatgtggcccaagtccgaactcaagctgcagtggttcgacaagctgctgatgactgtggagcagccaaaccaagtgaactatgggaatatctgcacgggcctagaagtgctgagcttcctgctaactgtcctccagtccccagccatcctcagtagcttcaaacctctgcagcgtggaattgccgcctgcatgacatgtggaaacaccaaggtgttgcgagccgtccacagccttctctcgcgcctgatgagcattttcccaacagagccgagtacttccagtgtggcctccaaatatgaagagctggagtgcctctacgcagccgtcggaaaggtcatctatgaagggctcaccaactacgagaaggccaccaatgccaatccctcccagctcttcgggacccttatgatcctcaagtctgcctgcagcaacaaccccagctacatagacaggctgatctccgtctttatgcgctccctgcagaagatggtccgggagcatttaaaccctcaggcagcgtcaggaagcaccgaagccacctcaggtacaagcgagctggtgatgctgagtctggagctggtgaagacgcgcctggcagtgatgagcatggagatgcggaagaacttcatccaggccatcctgacatccctcatcgaaaaatcaccagatgccaaaatcctccgggctgtggtcaaaatcgtggaagaatgggtcaagaataactccccaatggcagccaatcagacacctacactccgggagaagtccattttgcttgtgaagatgatgacttacatagaaaaacgctttccggaagaccttgaattaaatgcccagtttttagatcttgttaactatgtctacagggatgagaccctctctggcagcgagctgacggcgaaacttgagcctgcctttctctctgggctgcgctgtgcccagccactcatcagggcaaagtttttcgaggtttttgacaactccatgaaacgtcgtgtctacgagcgcttgctctatgtgacctgttcgcagaactgggaagccatggggaaccacttctggatcaagcagtgcattgagctgcttctggccgtgtgtgagaagagcacccccattggcaccagctgccaaggagccatgctcccgtccatcaccaacgtcatcaacctggccgatagccacgaccgtgccgccttcgccatggtcacacatgtcaagcaggagccccgggagcgggagaacagcgagtccaaagaggaggatgtagagatagacatcgaactagctcctggggatcagaccagcacgcccaaaaccaaagaactttcagaaaaggacattggaaaccagctgcacatgctaaccaacaggcacgacaagtttctggacactctccgagaggtgaagactggagcgctgctcagcgctttcgttcagctgtgccacatttccacgacgctggcagagaagacgtgggtccagcttttccccagattgtggaagatcctctctgacagacagcagcatgcactcgcgggtgagataagtccatttctgtgcagcggcagtcaccaggtgcagcgggactgccagcccagcgcgctgaactgctttgtggaagccatgtcccagtgcgtgccgccaatccccatccgaccctgcgtcctgaagtacctggggaagacacacaacctctggttccggtccacgctgatgttggagcaccaggcttttgaaaagggtctgagtcttcagattaagccgaagcaaacaacggagttttatgagcaggagagcatcaccccgccgcagcaggagatactggattcccttgcggagctttactccctgttacaagaggaagatatgtgggctggtctgtggcagaagcggtgcaagtactcggagacagcgactgcgattgcttacgagcagcacgggttctttgagcaggcacaagaatcctatgaaaaggcaatggataaagccaaaaaagaacatgagaggagtaacgcctcccctgctattttccctgaataccagctctgggaagaccactggattcgatgctccaaggaattgaaccagtgggaagccctgacggagtacggtcagtccaaaggccacatcaacccctacctcgtcctggagtgcgcctggcgggtgtccaactggactgccatgaaggaggcgctggtgcaggtggaagtgagctgtccgaaggagatggcctggaaggtgaacatgtaccgcggatacctggccatctgccaccccgaggagcagcagctcagcttcatcgagcgcctggtggagatggccagcagcctggccatccgcgagtggcggcggctgccccacgtagtgtcccacgtgcacacgcctctcctacaggcagcccagcaaatcatcgaactccaggaagctgcacaaatcaacgcaggcttacagccaaccaacctgggaaggaacaacagcctgcacgacatgaagacggtggtgaagacctggaggaaccgactgcccatcgtgtctgacgacttgtcccactggagcagcatcttcatgtggaggcagcatcattaccaggcgattgtaactgcctatgagaatagctctcagcatgatcccagttcaaataacgctatgcttggggttcatgcatcagcttcagcgatcatccagtatggaaaaatcgcccggaaacaaggactggtcaatgtagctctggatatattaagtcggattcatactattccaactgttcctatcgtggattgcttccagaagattcgacagcaagttaaatgctacctccagctggcaggcgtcatgggcaaaaacgagtgcatgcagggccttgaagttattgaatctacaaatttaaaatacttcacaaaagagatgacagccgaattttatgcactgaagggaatgttcttggctcagatcaacaagtccgaggaggcaaacaaagccttctctgcagctgtgcagatgcacgatgtgctggtgaaagcctgggccatgtggggcgactacctggagaacatctttgtgaaggagcggcagctgcacctgggcgtgtctgccatcacctgctacctgcacgcctgccggcatcagaacgagagcaaatcgaggaaatacttagccaaggtgctgtggcttttgagttttgatgatgacaaaaacactttggcagatgccgtcgacaagtactgcattggtgtgccacccatccagtggctggcctggatcccacagctgctcacctgcctggttggctcggagggaaagctgctcttgaacctcattagccaggttggacgcgtgtatccccaagcggtctactttcccatccggaccctgtacctgaccctgaaaatagaacagcgggaacgctacaagagcgatccagggcccataagagcaacagcacccatgtggcgctgcagccgaatcatgcacatgcagcgagagctccaccccacccttctgtcttccctggaaggcatcgtcgatcagatggtctggttcagagaaaattggcatgaagaggttctcaggcagctccaacagggcctggcgaaatgttactccgtggcgtttgagaaaagtggagcggtgtccgatgctaaaatcaccccccacactctcaattttgtgaagaagttggtgagcacgtttggggtgggcctggagaatgtgtccaacgtctcgaccatgttctccagcgcagcctctgagtctctggcccggcgggcgcaggccactgcacaagaccctgtctttcagaagctgaaaggccagttcacgacggattttgacttcagcgttccaggatccatgaagcttcataatcttatttctaagttgaaaaagtggatcaaaatcttggaggccaagaccaagcaactccccaaattcttcctcatagaggaaaagtgccggttcttgagcaatttctcggcacagacagctgaagtggaaattcctggggagtttctgatgccaaagccaacgcattattacatcaagattgcacggttcatgccccgggtagagattgtgcagaagcacaacaccgcagcccggcggctgtacatccggggacacaatggcaagatctacccatacctcgtcatgaacgacgcctgcctcacagagtcacggcgagaggagcgtgtgttgcagctgctgcgtctgctgaacccctgtttggagaagagaaaggagaccaccaagaggcacttgtttttcacagtgccccgggttgtggcagtttccccacagatgcgcctcgtggaggacaacccctcttcactttcccttgtggagatctacaagcagcgctgcgccaagaagggcatcgagcatgacaaccccatctcccgttactatgaccggctggctacggtgcaggcgcggggaacccaagccagccaccaggtcctccgcgacatcctcaaggaggttcagagtaacatggtgccgcgcagcatgctcaaggagtgggcgctgcacaccttccccaatgccacggactactggacgttccggaagatgttcaccatccagctggctctgataggcttcgcggaattcgtcctgcatttaaatagactcaaccccgagatgttacagatcgctcaggacactggcaaactgaatgttgcctactttcgatttgacataaacgacgcgactggagacctggatgccaaccgtcctgtcccatttcgactcacgcccaacatttctgagtttctgaccaccatcggggtctccggcccgttgacagcgtccatgattgcggtcgcccggtgcttcgcccagccaaactttaaggtggatggcattctgaaaacggttctccgggacgagatcattgcttggcacaaaaaaacacaagaggacacgtcctctcctctctcggccgccgggcagccagagaacatggacagccagcaactggtgtccctggttcagaaagccgtcaccgccatcatgacccgcctgcacaacctcgcccagttcgaaggcggggaaagcaaggtgaacaccctggtggccgcggcaaacagcctggacaatctgtgccgcatggaccccgcctggcacccctggctgtgactgtggccgccacggcacgcgggaatgtgaagggcgctccgggctctgagcccgcagcttttacgacttctccctgcgtcgttccttatattcacagaagccccatagtttcactgggttgcggttattttcctggtagtttgcgtgtaagaaagggagaatatagttttagaggaagctgaactatgacgatgctgggcgaacggtttgggaaatggcagagctgaaacttattccaagctttcaaaataatcttttaagaagccaggattctccggtctggaatttctgagtgagtcctttttttatggtgtcctccctctgtgaatgtacaggcggaactgtacgaacagctcccttccatccatttttaactctttcggaaataacacctcacagcagcttcgtgcttttgtacagacctttgtaacaagtgtacagaaaactcattttgtttgagaaacaggagttgatgaacccatcatgctggtttttctctgagcacaaagttttaggctgtacacagccagccttgggaatctcgttgagcgttcggcgtggatccacggggccaggccaccctgcgggaggccacacgcatccacttcggattcagtgggtgaagacagaactctgagagtctgcaggcggctcctgtgctttttatttctggctcttcggatgtcttctagacatttactatcactgcacctgaagaaaaaatcacttttaccttcctaatttaaaaagacaaaacagaaatgtacgttccttcgctagctttagtctttctgttcccatttttataaatctgagcattgataatgttctatctaaatttgtacagtgtgattttttttt

SEQ ID NO: 2568 - protein, 3830 aa, Homo sapiens
MAFVATQGATVVDQTTLMKKYLQFVAALTDVNTPDETKLKMMQEVSENFENVTSSPQYSTFLEHIIPRFLTFLQDGEVQFLQEKPAQQLRKLVLEIIHRIPTNEHLRPHTKNVLSVMFRFLETENEENVLICLRIIIELHKQFRPPITQEIHHFLDFVKQIYKELPKVVNRYFENPQVIPENTVPPPEMVGMITTIAVKVNPEREDSETRTHSIIPRGSLSLKVLAELPIIVVLMYQLYKLNIHNVVAEFVPLIMNTIAIQVSAQARQHKLYNKELYADFIAAQIKTLSFLAYIIRIYQELVTKYSQQMVKGMLQLLSNCPAETAHLRKELLIAAKHILTTELRNQFIPCMDKLFDESILIGSGYTARETLRPLAYSTLADLVHHVRQHLPLSDLSLAVQLFAKNIDDESLPSSIQTMSCKLLLNLVDCIRSKSEQESGNGRDVLMRMLEVFVLKFHTIARYQLSAIFKKCKPQSELGAVEAALPGVPTAPAAPGPAPSPAPVPAPPPPPPPPPPATPVTPAPVPPFEKQGEKDKEDKQTFQVTDCRSLVKTLVCGVKTITWGITSCKAPGEAQFIPNKQLQPKETQIYIKLVKYAMQALDIYQVQIAGNGQTYIRVANCQTVRMKEEKEVLEHFAGVFTMMNPLTFKEIFQTTVPYMVERISKNYALQIVANSFLANPTTSALFATILVEYLLDRLPEMGSNVELSNLYLKLFKLVFGSVSLFAAENEQMLKPHLHKIVNSSMELAQTAKEPYNYFLLLRALFRSIGGGSHDLLYQEFLPLLPNLLQGLNMLQSGLHKQHMKDLFVELCLTVPVRLSSLLPYLPMLMDPLVSALNGSQTLVSQGLRTLELCVDNLQPDFLYDHIQPVRAELMQALWRTLRNPADSISHVAYRVLGKFGGSNRKMLKESQKLHYVVTEVQGPSITVEFSDCKASLQLPMEKAIETALDCLKSANTEPYYRRQAWEVIKCFLVAMMSLEDNKHALYQLLAHPNFTEKTIPNVIISHRYKAQDTPARKTFEQALTGAFMSAVIKDLRPSALPFVASLIRHYTMVAVAQQCGPFLLPCYQVGSQPSTAMFHSEENGSKGMDPLVLIDAIAICMAYEEKELCKIGEVALAVIFDVASIILGSKERACQLPLFSYIVERLCACCYEQAWYAKLGGVVSIKFLMERLPLTWVLQNQQTFLKALLFVMMDLTGEVSNGAVAMAKTTLEQLLMRCATPLKDEERAEEIVAAQEKSFHHVTHDLVREVTSPNSTVRKQAMHSLQVLAQVTGKSVTVIMEPHKEVLQDMVPPKKHLLRHQPANAQIGLMEGNTFCTTLQPRLFTMDLNVVEHKVFYTELLNLCEAEDSALTKLPCYKSLPSLVPLRIAALNALAACNYLPQSREKIIAALFKALNSTNSELQEAGEACMRKFLEGATIEVDQIHTHMRPLLMMLGDYRSLTLNVVNRLTSVTRLFPNSFNDKFCDQMMQHLRKWMEVVVITHKGGQRSDGNEMKICSAIINLFHLIPAAPQTLVKPLLEVVMKTERAMLIEAGSPFREPLIKFLTRHPSQTVELFMMEATLNDPQWSRMFMSFLKHKDARPLRDVLAANPNRFITLLLPGGAQTAVRPGSPSTSTMRLDLQFQAIKIISIIVKNDDSWLASQHSLVSQLRRVWVSENFQERHRKENMAATNWKEPKLLAYCLLNYCKRNYGDIELLFQLLRAFTGRFLCNMTFLKEYMEEEIPKNYSIAQKRALFFRFVDFNDPNFGDELKAKVLQHILNPAFLYSFEKGEGEQLLGPPNPEGDNPESITSVFITKVLDPEKQADMLDSLRIYLLQYATLLVEHAPHHIHDNNKNRNSKLRRLMTFAWPCLLSKACVDPACKYSGHLLLAHIIAKFAIHKKIVLQVFHSLLKAHAMEARAIVRQAMAILTPAVPARMEDGHQMLTHWTRKIIVEEGHTVPQLVHILHLIVQHFKVYYPVRHHLVQHMVSAMQRLGFTPSVTIEQRRLAVDLSEVVIKWELQRIKDQQPDSDMDPNSSGEGVNSVSSSIKRGLSVDSAQEVKRFRTATGAISAVFGRSQSLPGADSLLAKPIDKQHTDTVVNFLIRVACQVNDNTNTAGSPGEVLSRRCVNLLKTALRPDMWPKSELKLQWFDKLLMTVEQPNQVNYGNICTGLEVLSFLLTVLQSPAILSSFKPLQRGIAACMTCGNTKVLRAVHSLLSRLMSIFPTEPSTSSVASKYEELECLYAAVGKVIYEGLTNYEKATNANPSQLFGTLMILKSACSNNPSYIDRLISVFMRSLQKMVREHLNPQAASGSTEATSGTSELVMLSLELVKTRLAVMSMEMRKNFIQAILTSLIEKSPDAKILRAVVKIVEEWVKNNSPMAANQTPTLREKSILLVKMMTYIEKRFPEDLELNAQFLDLVNYVYRDETLSGSELTAKLEPAFLSGLRCAQPLIRAKFFEVFDNSMKRRVYERLLYVTCSQNWEAMGNHFWIKQCIELLLAVCEKSTPIGTSCQGAMLPSITNVINLADSHDRAAFAMVTHVKQEPRERENSESKEEDVEIDIELAPGDQTSTPKTKELSEKDIGNQLHMLTNRHDKFLDTLREVKTGALLSAFVQLCHISTTLAEKTWVQLFPRLWKILSDRQQHALAGEISPFLCSGSHQVQRDCQPSALNCFVEAMSQCVPPIPIRPCVLKYLGKTHNLWFRSTLMLEHQAFEKGLSLQIKPKQTTEFYEQESITPPQQEILDSLAELYSLLQEEDMWAGLWQKRCKYSETATAIAYEQHGFFEQAQESYEKAMDKAKKEHERSNASPAIFPEYQLWEDHWIRCSKELNQWEALTEYGQSKGHINPYLVLECAWRVSNWTAMKEALVQVEVSCPKEMAWKVNMYRGYLAICHPEEQQLSFIERLVEMASSLAIREWRRLPHVVSHVHTPLLQAAQQIIELQEAAQINAGLQPTNLGRNNSLHDMKTVVKTWRNRLPIVSDDLSHWSSIFMWRQHHYQAIVTAYENSSQHDPSSNNAMLGVHASASAIIQYGKIARKQGLVNVALDILSRIHTIPTVPIVDCFQKIRQQVKCYLQLAGVMGKNECMQGLEVIESTNLKYFTKEMTAEFYALKGMFLAQINKSEEANKAFSAAVQMHDVLVKAWAMWGDYLENIFVKERQLHLGVSAITCYLHACRHQNESKSRKYLAKVLWLLSFDDDKNTLADAVDKYCIGVPPIQWLAWIPQLLTCLVGSEGKLLLNLISQVGRVYPQAVYFPIRTLYLTLKIEQRERYKSDPGPIRATAPMWRCSRIMHMQRELHPTLLSSLEGIVDQMVWFRENWHEEVLRQLQQGLAKCYSVAFEKSGAVSDAKITPHTLNFVKKLVSTFGVGLENVSNVSTMFSSAASESLARRAQATAQDPVFQKLKGQFTTDFDFSVPGSMKLHNLISKLKKWIKILEAKTKQLPKFFLIEEKCRFLSNFSAQTAEVEIPGEFLMPKPTHYYIKIARFMPRVEIVQKHNTAARRLYIRGHNGKIYPYLVMNDACLTESRREERVLQLLRLLNPCLEKRKETTKRHLFFTVPRVVAVSPQMRLVEDNPSSLSLVEIYKQRCAKKGIEHDNPISRYYDRLATVQARGTQASHQVLRDILKEVQSNMVPRSMLKEWALHTFPNATDYWTFRKMFTIQLALIGFAEFVLHLNRLNPEMLQIAQDTGKLNVAYFRFDINDATGDLDANRPVPFRLTPNISEFLTTIGVSGPLTASMIAVARCFAQPNFKVDGILKTVLRDEIIAWHKKTQEDTSSPLSAAGQPENMDSQQLVSLVQKAVTAIMTRLHNLAQFEGGESKVNTLVAAANSLDNLCRMDPAWHPWL

SEQ ID NO: 2569 - DNA, 2530 bp, Homo sapiens
ggaattccctgcagcatgggctggttaactaggattgtctgtcttttctggggagtattacttacagcaagagcaaactatcagaatgggaagaacaatgtgccaaggctgaaattatcctacaaagaaatgttggaatccaacaatgtgatcactttcaatggcttggccaacagctccagttatcataccttccttttggatgaggaacggagtaggctgtatgttggagcaaaggatcacatattttcattcgacctggttaatatcaaggattttcaaaagattgtgtggccagtatcttacaccagaagagatgaatgcaagtgggctggaaaagacatcctgaaagaatgtgctaatttcatcaaggtacttaaggcatataatcagactcacttgtacgcctgtggaacgggggcttttcatccaatttgcacctacattgaaattggacatcatcctgaggacaatatttttaagctggagaactcacattttgaaaacggccgtgggaagagtccatatgaccctaagctgctgacagcatcccttttaatagatggagaattatactctggaactgcagctgattttatggggcgagactttgctatcttccgaactcttgggcaccaccacccaatcaggacagagcagcatgattccaggtggctcaatgatccaaagttcattagtgcccacctcatctcagagagtgacaatcctgaagatgacaaagtatactttttcttccgtgaaaatgcaatagatggagaacactctggaaaagctactcacgctagaataggtcagatatgcaagaatgactttggagggcacagaagtctggtgaataaatggacaacattcctcaaagctcgtctgatttgctcagtgccaggtccaaatggcattgacactcattttgatgaactgcaggatgtattcctaatgaactttaaagatcctaaaaatccagttgtatatggagtgtttacgacttccagtaacattttcaagggatcagccgtgtgtatgtatagcatgagtgatgtgagaagggtgttccttggtccatatgcccacagggatggacccaactatcaatgggtgccttatcaaggaagagtcccctatccacggccaggaacttgtcccagcaaaacatttggtggttttgactctacaaaggaccttcctgatgatgttataacctttgcaagaagtcatccagccatgtacaatccagtgtttcctatgaacaatcgcccaatagtgatcaaaacggatgtaaattatcaatttacacaaattgtcgtagaccgagtggatgcagaagatggacagtatgatgttatgtttatcggaacagatgttgggaccgttcttaaagtagtttcaattcctaaggagacttggtatgatttagaagaggttctgctggaagaaatgacagtttttcgggaaccgactgctatttcagcaatggagctttccactaagcagcaacaactatatattggttcaacggctggggttgcccagctccctttacaccggtgtgatatttacgggaaagcgtgtgctgagtgttgcctcgcccgagacccttactgtgcttgggatggttctgcatgttctcgctattttcccactgcaaagagacgcacaagacgacaagatataagaaatggagacccactgactcactgttcagacttacaccatgataatcaccatggccacagccctgaagagagaatcatctatggtgtagagaatagtagcacatttttggaatgcagtccgaagtcgcagagagcgctggtctattggcaattccagaggcgaaatgaagagcgaaaagaagagatcagagtggatgatcatatcatcaggacagatcaaggccttctgctacgtagtctacaacagaaggattcaggcaattacctctgccatgcggtggaacatgggttcatacaaactcttcttaaggtaaccctggaagtcattgacacagagcatttggaagaacttcttcataaagatgatgatggagatggctctaagaccaaagaaatgtccaatagcatgacacctagccagaaggtctggtacagagacttcatgcagctcatcaaccaccccaatctcaacacgatggatgagttctgtgaacaagtttggaaaagggaccgaaaacaacgtcggcaaaggccaggacataccccagggaacagtaacaaatggaagcacttacaagaaaataagaaaggtagaaacaggaggacccacgaatttgagagggcacccaggagtgtctgagctgcattacctctagaaacctcaaacaagtagaaacttgcctagacaataactggaaaaacaaatgcaatatacatgaacttttttcatggcattatgtggatgtttacaatggtgggaaattcagctgagttccaccaattataaattaaatccatgagtaactttcctaataggcttttttttcctaataccaccg

SEQ ID NO: 2570 - protein, 771 aa, Homo sapiens [sequence omitted]

SEQ ID NO: 2571 - DNA, 232 bp, Homo sapiens
ggagatataaatacacgaagctttattgcagctgttgggcttacctagtagaagtggccagtcattttaatttgcagttctatttacattcccaaggtaaccacgttcagtaactctctagaggctaagctgttaaaatttccatttttatacaaatagcaaagatatttctttccctttctttctttctttctttctttctttctttcttttctttctctctttccttcct

SEQ ID NO: 2572 - DNA, 444 bp, Homo sapiens
cgttccacaaacactggaacatcgatccagtgaaggtgtatttcacatggttggcacccagtgacgaagacaaagccaggcaggagacacagaaaggttttcgagaggagttataaatcagggtgacctgtgcgcctagccctgctcagggaatgaactggagactgtggcctcatcccactgtgctgtgctcacaacacttgtgtctgccacatggcattgggtgcttcctgactttagggggagattttatgtatggtattttttgacagaggaagaaaaggggtcacaggagaaacatttttttttctgggaaaaatcacttgcttttgacttatgcagttgttttaacacttaagttgattgactgtgtattctccaagctgtgatacagcagtttttttttattgtcccagggaaataaatggtaccagaagtcccctt

SEQ ID NO: 2573 - DNA, 620 bp, Homo sapiens
ctttttttttttttttttcttttttgatcaaaatattttaataaagattctttctgacatagatacacatacaaatggtcgtacatagctgtcatagtctgattgacctatttaatatatatatcattctttacacatccaaaacccgccaacagatccatcacagctcccaactcaccatccaacctgacaaactgaatttgtattatctgcaaggagtggaaaatagcaggactccatttttaaaaaagattttcttgattttcatagggcggaaaggcagtcaaacagccatgcaaaactaaaactgaaagctcactttgggtaaatagcttcttgttcttccttagttttctttctttttaaattttatttttttagaaaaataacaaaggatttcacaccataggcaaatcaaaccagtcttttaacttaaataattctccacagttaaaataacatatatgtacatatatattaaaagcaattaaattagaccttttaaaaatgcacagcacagcctggaaaaatatttgcttagcatgttcttacgtatagcaactattgctgtgatgtttttcccttttggaatgtaaaggagtccctttcaaaaagagatc

SEQ ID NO: 2574 - DNA, 7560 bp, Homo sapiens
accggccacagcctgcctactgtcacccgcctctcccgcgcgcagatacacgcccccgcctccgtgggcacaaaggcagcgctgctggggaactcgggggaacgcgcacgtgggaaccgccgcagctccacactccaggtacttcttccaaggacctaggtctctcgcccatcggaaagaaaataattctttcaagaagatcagggacaactgatttgaagtctactctgtgcttctaaatccccaattctgctgaaagtgaatccctagagccctagagccccagcagcacccagccaaacccacctccaccatgggggccatgactcagctgttggcaggtgtctttcttgctttccttgccctcgctaccgaaggtggggtcctcaagaaagtcatccggcacaagcgacagagtggggtgaacgccaccctgccagaagagaaccagccagtggtgtttaaccacgtttacaacatcaagctgccagtgggatcccagtgttcggtggatctggagtcagccagtggggagaaagacctggcaccgccttcagagcccagcgaaagctttcaggagcacacagtagatggggaaaaccagattgtcttcacacatcgcatcaacatcccccgccgggcctgtggctgtgccgcagcccctgatgttaaggagctgctgagcagactggaggagctggagaacctggtgtcttccctgagggagcaatgtactgcaggagcaggctgctgtctccagcctgccacaggccgcttggacaccaggcccttctgtagcggtcggggcaacttcagcactgaaggatgtggctgtgtctgcgaacctggctggaaaggccccaactgctctgagcccgaatgtccaggcaactgtcaccttcgaggccggtgcattgatgggcagtgcatctgtgacgacggcttcacgggcgaggactgcagccagctggcttgccccagcgactgcaatgaccagggcaagtgcgtgaatggagtctgcatctgtttcgaaggctacgccggggctgactgcagccgtgaaatctgcccagtgccctgcagtgaggagcacggcacatgtgtagatggcttgtgtgtgtgccacgatggctttgcaggcgatgactgcaacaagcctctgtgtctcaacaattgctacaaccgtggacgatgcgtggagaatgagtgcgtgtgtgatgagggtttcacgggcgaagactgcagtgagctcatctgccccaatgactgcttcgaccggggccgctgcatcaatggcacctgctactgcgaagaaggcttcacaggtgaagactgcgggaaacccacctgcccacatgcctgccacacccagggccggtgtgaggaggggcagtgtgtatgtgatgagggctttgccggtttggactgcagcgagaagaggtgtcctgctgactgtcacaatcgtggccgctgtgtagacgggcggtgtgagtgtgatgatggtttcactggagctgactgtggggagctcaagtgtcccaatggctgcagtggccatggccgctgtgtcaatgggcagtgtgtgtgtgatgagggctatactggggaggactgcagccagctacggtgccccaatgactgtcacagtcggggccgctgtgtcgagggcaaatgtgtatgtgagcaaggcttcaagggctatgactgcagtgacatgagctgccctaatgactgtcaccagcacggccgctgtgtgaatggcatgtgtgtttgtgatgacggctacacaggggaagactgccgggatcgccaatgccccagggactgcagcaacaggggcctctgtgtggacggacagtgcgtctgtgaggacggcttcaccggccctgactgtgcagaactctcctgtccaaatgactgccatggccagggtcgctgtgtgaatgggcagtgcgtgtgccatgaaggatttatgggcaaagactgcaaggagcaaagatgtcccagtgactgtcatggccagggccgctgcgtggacggccagtgcatctgccacgagggcttcacaggcctggactgtggccagcactcctgccccagtgactgcaacaacttaggacaatgcgtctcgggccgctgcatctgcaacgagggctacagcggagaagactgctcagaggtgtctcctcccaaagacctcgttgtgacagaagtgacggaagagacggtcaacctggcctgggacaatgagatgcgggtcacagagtaccttgtcgtgtacacgcccacccacgagggtggtctggaaatgcagttccgtgtgcctggggaccagacgtccaccatcatccaggagctggagcctggtgtggagtactttatccgtgtatttgccatcctggagaacaagaagagcattcctgtcagcgccagggtggccacgtacttacctgcacctgaaggcctgaaattcaagtccatcaaggagacatctgtggaagtggagtgggatcctctagacattgcttttgaaacctgggagatcatcttccggaatatgaataaagaagatgagggagagatcaccaaaagcctgaggaggccagagacctcttaccggcaaactggtctagctcctgggcaagagtatgagatatctctgcacatagtgaaaaacaatacccggggccctggcctgaagagggtgaccaccacacgcttggatgcccccagccagatcgaggtgaaagatgtcacagacaccactgccttgatcacctggttcaagcccctggctgagatcgatggcattgagctgacctacggcatcaaagacgtgccaggagaccgtaccaccatcgatctcacagaggacgagaaccagtactccatcgggaacctgaagcctgacactgagtacgaggtgtccctcatctcccgcagaggtgacatgtcaagcaacccagccaaagagaccttcacaacaggcctcgatgctcccaggaatcttcgacgtgtttcccagacagataacagcatcaccctggaatggaggaatggcaaggcagctattgacagttacagaattaagtatgcccccatctctggaggggaccacgctgaggttgatgttccaaagagccaacaagccacaaccaaaaccacactcacaggtctgaggccgggaactgaatatgggattggagtttctgctgtgaaggaagacaaggagagcaatccagcgaccatcaacgcagccacagagttggacacgcccaaggaccttcaggtttctgaaactgcagagaccagcctgaccctgctctggaagacaccgttggccaaatttgaccgctaccgcctcaattacagtctccccacaggccagtgggtgggagtgcagcttccaagaaacaccacttcctatgtcctgagaggcctggaaccaggacaggagtacaatgtcctcctgacagccgagaaaggcagacacaagagcaagcccgcacgtgtgaaggcatccactgaacaagcccctgagctggaaaacctcaccgtgactgaggttggctgggatggcctcagactcaactggaccgcggctgaccaggcctatgagcactttatcattcaggtgcaggaggccaacaaggtggaggcagctcggaacctcaccgtgcctggcagccttcgggctgtggacataccgggcctcaaggctgctacgccttatacagtctccatctatggggtgatccagggctatagaacaccagtgctctctgctgaggcctccacaggggaaactcccaatttgggagaggtcgtggtggccgaggtgggctgggatgccctcaaactcaactggactgctccagaaggggcctatgagtactttttcattcaggtgcaggaggctgacacagtagaggcagcccagaacctcaccgtcccaggaggactgaggtccacagacctgcctgggctcaaagcagccactcattataccatcaccatccgcggggtcactcaggacttcagcacaacccctctctctgttgaagtcttgacagaggaggttccagatatgggaaacctcacagtgaccgaggttagctgggatgctctcagactgaactggaccacgccagatggaacctatgaccagtttactattcaggtccaggaggctgaccaggtggaagaggctcacaatctcacggttcctggcagcctgcgttccatggaaatcccaggcctcagggctggcactccttacacagtcaccctgcacggcgaggtcaggggccacagcactcgaccccttgctgtagaggtcgtcacagaggatctcccacagctgggagatttagccgtgtctgaggttggctgggatggcctcagactcaactggaccgcagctgacaatgcctatgagcactttgtcattcaggtgcaggaggtcaacaaagtggaggcagcccagaacctcacgttgcctggcagcctcagggctgtggacatcccgggcctcgaggctgccacgccttatagagtctccatctatggggtgatccggggctatagaacaccagtactctctgctgaggcctccacagccaaagaacctgaaattggaaacttaaatgtttctgacataactcccgagagcttcaatctctcctggatggctaccgatgggatcttcgagacctttaccattgaaattattgattccaataggttgctggagactgtggaatataatatctctggtgctgaacgaactgcccatatctcagggctaccccctagtactgattttattgtctacctctctggacttgctcccagcatccggaccaaaaccatcagtgccacagccacgacagaggccctgccccttctggaaaacctaaccatttccgacattaatccctacgggttcacagtttcctggatggcatcggagaatgcctttgacagctttctagtaacggtggtggattctgggaagctgctggacccccaggaattcacactttcaggaacccagaggaagctggagcttagaggcctcataactggcattggctatgaggttatggtctctggcttcacccaagggcatcaaaccaagcccttgagggctgagattgttacagaagccgaaccggaagttgacaaccttctggtttcagatgccaccccagacggtttccgtctgtcctggacagctgatgaaggggtcttcgacaattttgttctcaaaatcagagataccaaaaagcagtctgagccactggaaataaccctacttgcccccgaacgtaccagggacttaacaggtctcagagaggctactgaatacgaaattgaactctatggaataagcaaaggaaggcgatcccagacagtcagtgctatagcaacaacagccatgggctccccaaaggaagtcattttctcagacatcactgaaaattcggctactgtcagctggagggcacccacggcccaagtggagagcttccggattacctatgtgcccattacaggaggtacaccctccatggtaactgtggacggaaccaagactcagaccaggctggtgaaactcatacctggcgtggagtaccttgtcagcatcatcgccatgaagggctttgaggaaagtgaacctgtctcagggtcattcaccacagctctggatggcccatctggcctggtgacagccaacatcactgactcagaagccttggccaggtggcagccagccattgccactgtggacagttatgtcatctcctacacaggcgagaaagtgccagaaattacacgcacggtgtccgggaacacagtggagtatgctctgaccgacctcgagcctgccacggaatacacactgagaatctttgcagagaaagggccccagaagagctcaaccatcactgccaagttcacaacagacctcgattctccaagagacttgactgctactgaggttcagtcggaaactgccctccttacctggcgacccccccgggcatcagtcaccggttacctgctggtctatgaatcagtggatggcacagtcaaggaagtcattgtgggtccagataccacctcctacagcctggcagacctgagcccatccacccactacacagccaagatccaggcactcaatgggcccctgaggagcaatatgatccagaccatcttcaccacaattggactcctgtaccccttccccaaggactgctcccaagcaatgctgaatggagacacgacctctggcctctacaccatttatctgaatggtgataaggctcaggcgctggaagtcttctgtgacatgacctctgatgggggtggatggattgtgttcctgagacgcaaaaacggacgcgagaacttctaccaaaactggaaggcatatgctgctggatttggggaccgcagagaagaattctggcttgggctggacaacctgaacaaaatcacagcccaggggcagtacgagctccgggtggacctgcgggaccatggggagacagcctttgctgtctatgacaagttcagcgtgggagatgccaagactcgctacaagctgaaggtggaggggtacagtgggacagcaggtgactccatggcctaccacaatggcagatccttctccacctttgacaaggacacagattcagccatcaccaactgtgctctgtcctacaaaggggctttctggtacaggaactgtcaccgtgtcaacctgatggggagatatggggacaataaccacagtcagggcgttaactggttccactggaagggccacgaacactcaatccagtttgctgagatgaagctgagaccaagcaacttcagaaatcttgaaggcaggcgcaaacgggcataaattggagggaccactgggtgagagaggaataaggcggcccagagcgaggaaaggattttaccaaagcatcaatacaaccagcccaaccatcggtccacacctgggcatttggtgagaatcaaagctgaccatggatccctggggccaacggcaacagcatgggcctcacctcctctgtgatttctttctttgcaccaaagacatcagtctccaacatgtttctgttttgttgtttgattcagcaaaaatctcccagtgacaacatcgcaatagttttttacttctcttaggtggctctgggatgggagaggggtaggatgtacaggggtagtttgttttagaaccagccgtattttacatgaagctgtataattaattgtcattatttttgttagcaaagattaaatgtgtcattggaagccatccctttttttacatttcatacaacagaaaccagaaaagcaatactgtttccattttaaggatatgattaatattattaatataataatgatgatgatgatgatgaaaactaaggatttttcaagagatctttctttccaaaacatttctggacagtacctgattgtattttttttttaaataaaagcacaagtacttttgaaaaaaaaccggaattc

SEQ ID NO: 2575 - protein, 2201 aa, Homo sapiens
MGAMTQLLAGVFLAFLALATEGGVLKKVIRHKRQSGVNATLPEENQPVVFNHVYNIKLPVGSQCSVDLESASGEKDLAPPSEPSESFQEHTVDGENQIVFTHRINIPRRACGCAAAPDVKELLSRLEELENLVSSLREQCTAGAGCCLQPATGRLDTRPFCSGRGNFSTEGCGCVCEPGWKGPNCSEPECPGNCHLRGRCIDGQCICDDGFTGEDCSQLACPSDCNDQGKCVNGVCICFEGYAGADCSREICPVPCSEEHGTCVDGLCVCHDGFAGDDCNKPLCLNNCYNRGRCVENECVCDEGFTGEDCSELICPNDCFDRGRCINGTCYCEEGFTGEDCGKPTCPHACHTQGRCEEGQCVCDEGFAGLDCSEKRCPADCHNRGRCVDGRCECDDGFTGADCGELKCPNGCSGHGRCVNGQCVCDEGYTGEDCSQLRCPNDCHSRGRCVEGKCVCEQGFKGYDCSDMSCPNDCHQHGRCVNGMCVCDDGYTGEDCRDRQCPRDCSNRGLCVDGQCVCEDGFTGPDCAELSCPNDCHGQGRCVNGQCVCHEGFMGKDCKEQRCPSDCHGQGRCVDGQCICHEGFTGLDCGQHSCPSDCNNLGQCVSGRCICNEGYSGEDCSEVSPPKDLVVTEVTEETVNLAWDNEMRVTEYLVVYTPTHEGGLEMQFRVPGDQTSTIIQELEPGVEYFIRVFAILENKKSIPVSARVATYLPAPEGLKFKSIKETSVEVEWDPLDIAFETWEIIFRNMNKEDEGEITKSLRRPETSYRQTGLAPGQEYEISLHIVKNNTRGPGLKRVTTTRLDAPSQIEVKDVTDTTALITWFKPLAEIDGIELTYGIKDVPGDRTTIDLTEDENQYSIGNLKPDTEYEVSLISRRGDMSSNPAKETFTTGLDAPRNLRRVSQTDNSITLEWRNGKAAIDSYRIKYAPISGGDHAEVDVPKSQQATTKTTLTGLRPGTEYGIGVSAVKEDKESNPATINAATELDTPKDLQVSETAETSLTLLWKTPLAKFDRYRLNYSLPTGQWVGVQLPRNTTSYVLRGLEPGQEYNVLLTAEKGRHKSKPARVKASTEQAPELENLTVTEVGWDGLRLNWTAADQAYEHFIIQVQEANKVEAARNLTVPGSLRAVDIPGLKAATPYTVSIYGVIQGYRTPVLSAEASTGETPNLGEVVVAEVGWDALKLNWTAPEGAYEYFFIQVQEADTVEAAQNLTVPGGLRSTDLPGLKAATHYTITIRGVTQDFSTTPLSVEVLTEEVPDMGNLTVTEVSWDALRLNWTTPDGTYDQFTIQVQEADQVEEAHNLTVPGSLRSMEIPGLRAGTPYTVTLHGEVRGHSTRPLAVEVVTEDLPQLGDLAVSEVGWDGLRLNWTAADNAYEHFVIQVQEVNKVEAAQNLTLPGSLRAVDIPGLEAATPYRVSIYGVIRGYRTPVLSAEASTAKEPEIGNLNVSDITPESFNLSWMATDGIFETFTIEIIDSNRLLETVEYNISGAERTAHISGLPPSTDFIVYLSGLAPSIRTKTISATATTEALPLLENLTISDINPYGFTVSWMASENAFDSFLVTVVDSGKLLDPQEFTLSGTQRKLELRGLITGIGYEVMVSGFTQGHQTKPLRAEIVTEAEPEVDNLLVSDATPDGFRLSWTADEGVFDNFVLKIRDTKKQSEPLEITLLAPERTRDLTGLREATEYEIELYGISKGRRSQTVSAIATTAMGSPKEVIFSDITENSATVSWRAPTAQVESFRITYVPITGGTPSMVTVDGTKTQTRLVKLIPGVEYLVSIIAMKGFEESEPVSGSFTTALDGPSGLVTANITDSEALARWQPAIATVDSYVISYTGEKVPEITRTVSGNTVEYALTDLEPATEYTLRIFAEKGPQKSSTITAKFTTDLDSPRDLTATEVQSETALLTWRPPRASVTGYLLVYESVDGTVKEVIVGPDTTSYSLADLSPSTHYTAKIQALNGPLRSNMIQTIFTTIGLLYPFPKDCSQAMLNGDTTSGLYTIYLNGDKAQALEVFCDMTSDGGGWIVFLRRKNGRENFYQNWKAYAAGFGDRREEFWLGLDNLNKITAQGQYELRVDLRDHGETAFAVYDKFSVGDAKTRYKLKVEGYSGTAGDSMAYHNGRSFSTFDKDTDSAITNCALSYKGAFWYRNCHRVNLMGRYGDNNHSQGVNWFHWKGHEHSIQFAEMKLRPSNFRNLEGRRKRA

SEQ ID NO: 2576 - DNA, 378 bp, Homo sapiens
gtgggcacgtggaagaaaggggatgcatagtggccagtcttcctcctgggcagtctccctgaacagagccaggagtgaagcattagtagaactggttgccgaaagtctatcaaattccaaaacattccaccatcttccagttcacagtacaactttatgggatggaggtgatatgaaaataataaaacaaaacaaaacaaaaagcaagaaaacgacaacccaggtctctttctggtgtggttccagggagggtggactgcaggttcagatggctcatgcagtcactatggctgtggcgctgtcatttcagagctatctacctcctgatgtgagggagaaaggctggagaagccacaggaagctctgtgaggcatgggg

SEQ ID NO: 2577 - DNA, 5217 bp, Homo sapiens
ggaggctgagggatgggaagagctggaacagcaggaggcggaggtgcaggggccgcccgaggcgttggaggagactggggagggccggcggggcgcggaggaggaggatctgggggaagaggaggaggagggccgatcgtcctgggcccgaggaaaagagagaagaaggggacacggagcctctcctgaaacaagaggggccggtggaagccgcgcagcctccggtggagaggaaagaagccgccgcccttgaacaaggccgcaaggtggaggagctgcggtggcaggaggtggacgagagacagaccatgccccggccctacacgttccaggtgtcctccggagggaagcagattctctttcccaaagtcaacctgagccccgtgacgcccgcaaaggacacggggctcaccgctgctccccaggaaccaaaggcccccaaagccagcccagtccagcacgccctaccgtcgtccctgagcgttccccacaccgccattctggtcacgggcgcgcagctctgtggcccggcagtcaacctgagccagatcaaggacaccgcgtgcaagtccctcctgggcttggaggagaagaagcacgcggaagccccagctggggagaaccctccccgaggccccggcgacgcgagggcgggcagcgggaaggctaagcccccccaggagtctcccagcagcgcgtccgcactcgcagaatgggcttccattcggtccagaatcctgaagaacgcagagagtgacccgcgcagcagcgagagggaccagttgaggcccggtgatgagtccactcccaggggccggtgtgattcccgcgggaaccaacggaagactccgccagtcaatgcaaagttctctattatgcctgcctggcagaaattttccgatggtggcacggagacctccaaacagagcacggaagctgaaagcatacgaaaaagacccatgctgggacccagcgaagagacagccccccagcctcctcctgctggtgttcgcgagctcgggaagggtccggagaagtcggagatgcaccgggagcccgcagacaccaccgagggatgcaaatttgccaaagacctcccgtctttccttgtcccaagccttccttaccctccgcagaaagtggtggcccacacagagttcacgacctcgtcggacagcgagactgcaaacgggatagcaaagccagaccctgtgatgccaggtggagaggaaaaagcctcaccgtttggaataaaattgagaaggaccaactattccttgcgcttcaactgcgaccaacaggcagaacagaagaagaagaagaggcacagcagcaccggagacagcgcggatgcagggccgcctgcagcggggagcgctcgtggagagaaagagatggagggtgtggccctcaagcatggtccatccctcccccaagagcggaagcaagccccttccacccggagggactccgctgaaccttccagcagccgctctgttcctgtggcccaccctgggcctccaccggccagcagccagaccccggctccggagcacgacaaggcagcaaacaaaatgccactggcacaaaagccagcactggctcccaagcccaccagtcagaccccaccagcatccccactttccaaactgagcaggccctacttggtagagctgctgtctcgccgagcggggaggccggacccagagccaagtgagccgtccaaggaggaccaggagagcagtgaccgccggccaccctcgcccccaggccccgaggaaaggaagggacagaagagggacgaggaggaagaggcgacagagaggaaacctgcttccccacctctgcctgccactcagcaagagaaaccttctcaaacacccgaggccgggaggaaagagaagccgatgcttcagagcagacactccttagatggctccaaacttacagagaaagtggaaactgctcagccgctgtggataacgttagcactgcaaaagcaaaaggggtttcgggagcagcaggcgacgcgggaggagagaaagcaagccagagaggccaaacaggcagaaaagctctccaaagaaaatgtcagtgtcagcgtgcagcctggaagcagcagtgtcagcagagcaggttccctgcacaagtccactgctctgccagaagagaagagacccgagactgcagtgtccaggcttgagcgcagagaacagctgaaaaaggccaatactcttcctacgtctgtgacagtggagatctccgactcggctcccccagcgccgctggtaaaagaagtcaccaagaggttttccaccccggatgctgcccccgtgtcaacagaaccagcctggctggctttggccaaaaggaaagcaaaggcttggagcgactgtccacagattattaagtaaagagtgactctcacccatccctactgccagttattggctcctctcttgccctttttatttatttattttttatatggggtaaagaaatcaagctagggaaaagaagcatgttttataggctccaaaataatgtttagaaactgaactggtggtgttcattgtaaagagtggatttgcacaaccctaggtcctggtgcctcgagctcctcctagttctcaagagaaaattccgtccacaggaccacatgaagcaaaatctctaagctaagaactcgtgagagcctgccatgcccatttcatggccttgcacacacacccacccacacaccattcagaacatgtacttttgccaaccttttgtaatggttttttgattctatgcactaattttctttgtccaaaacatttactctaccatatgtctgggaatgtttatcctttctacagtaatggtgaaaggatcatatctagctaaaagcaagaacacccgttctcctgaatgcagtgagtaattgggaatcacaaggaacattctggcacccaactgtgcccatgttagttttcatgagttttccccactctgaagctgtaacccagaaggcacatccattcacatttttaccgcactgtggattcatagtgtggggccctgttattccaataccctccttaaggacatgtgaagcatttggcccagttggctcccagggaacattttaatttaatgtagtgaagaaagaccattctagatcagagctacaagttcactttctgtctctgagaatctccatctagggcagtagttcttatgatgtgtaggctccctcctagggcctactcaatcagagcctgtggggactgggccaggaatatgtattctggcaaaaactcttcaggtcagttctgatagatcccaaaggttaagaactgtgagaaacactgatcctaatgcaatctagtttttcagacttcgaaggggaggctcattcactcaaaaagcaacagtgagacaggaaaaataataaaacaaccccccaagccagccatttattacaagaagcaacaggttattgacattacatgtttgaaaattccctttggtctttagggaaaataaacaggaagccaagatttggagcctttgtaataaggacttcctgcagaaagtcttttctttactataattgagtaattcatatttagagtcacatgtccagtagcatttctaattttgagcattcaccttgctacctttaaaaaacatctgagttttaagtggcctttttatcatcatacacatgtgcatacaaagaagggacttggcagtttaaaagccacatatattcacttttattgccctaaatttacatgaaacagacatactggcaaactcacatattgctggtgctaaccttatatttcatagtgttggcatattccccttttcttagattcttactccgaaatataggtacacatcctttgctctgtgcagagggaattacatcctttttcctctcctacaaaaacatgctttattaagtatccatcattactttcctttatgctcgctcaatatgcaatgtgctgttattctaccatgtaccttaaataaaggatgatggcaaagttatttaccatgtagaaaccattttctttctagaaacaatagctcagcctcactgtagcagctggcatgtgtggtcaagtggatagttgtactcttgcaagttggatttaatatcatatatactggaccttcagactgttaaaaatcaatgtaacctttttttattgctatggcaagcaattagtatttcactgcacgtcttccatactaatgttcatttctaaatcttatatgtaggcatttgttagttccaatgatttcctcactaatataacactttttaatgggaatctttccacctacagccctggaatgataatgctacagtaattcttctgaattgactttttctttcatcctgtcagctttggacaatatcccaattatggcagggaacaggtggggaactaagatcagttacaaaaagttgtagatgtgtcaactttgtattggctgggatatcactgtgcccaaacaaaacaggcgaaatacctcagttaaaatttttccatcaaagtctttaaaagaagagtatactgaagaaagggcagtcataatacttacttctaacagcttctaaagggtacatgtttaacatttcatttcaaaatcaccccaaatttgcactaaataccaatgaagtgttattttgctttagtagtcttctgagcaacaaactatggggaattctgtaaaaacatataaaaagttcaagactttttttttaaatgaatgattactatgttaaatgcaaactttttttttttttatttaaacaaacatacacttctcctggcaaggttatagatgattaacctctgttcatagacttatatataaaactagagggttttttgtttacttttttaatttttcaagtgcaattgtttcttacacagacattattactattaaattatcatttagccagttatctgcaaatatatagtatgtattgtctcttcttgtgacgtttagtttaattgcttattttaaagcagaaacattagttacaagtgtcttacaatatttttaccaacagtaaagtagagacttaatgaaaataccttagtgtgattttaatataatttgcatattttagttgtataaagttttaatgtaaaatgtccattattgaagggaaaagatctttcaataaaaaatacccacgag

SEQ ID NO: 2578 - protein, 803 aa, Homo sapiens
RLRDGKSWNSRRRRCRGRPRRWRRLGRAGGARRRRIWGKRRRRADRPGPEEKREEGDTEPLLKQEGPVEAAQPPVERKEAAALEQGRKVEELRWQEVDERQTMPRPYTFQVSSGGKQILFPKVNLSPVTPAKDTGLTAAPQEPKAPKASPVQHALPSSLSVPHTAILVTGAQLCGPAVNLSQIKDTACKSLLGLEEKKHAEAPAGENPPRGPGDARAGSGKAKPPQESPSSASALAEWASIRSRILKNAESDPRSSERDQLRPGDESTPRGRCDSRGNQRKTPPVNAKFSIMPAWQKFSDGGTETSKQSTEAESIRKRPMLGPSEETAPQPPPAGVRELGKGPEKSEMHREPADTTEGCKFAKDLPSFLVPSLPYPPQKVVAHTEFTTSSDSETANGIAKPDPVMPGGEEKASPFGIKLRRTNYSLRFNCDQQAEQKKKKRHSSTGDSADAGPPAAGSARGEKEMEGVALKHGPSLPQERKQAPSTRRDSAEPSSSRSVPVAHPGPPPASSQTPAPEHDKAANKMPLAQKPALAPKPTSQTPPASPLSKLSRPYLVELLSRRAGRPDPEPSEPSKEDQESSDRRPPSPPGPEERKGQKRDEEEEATERKPASPPLPATQQEKPSQTPEAGRKEKPMLQSRHSLDGSKLTEKVETAQPLWITLALQKQKGFREQQATREERKQAREAKQAEKLSKENVSVSVQPGSSSVSRAGSLHKSTALPEEKRPETAVSRLERREQLKKANTLPTSVTVEISDSAPPAPLVKEVTKRFSTPDAAPVSTEPAWLALAKRKAKAWSDCPQIIK

SEQ ID NO: 2579 - DNA, 438 bp, Homo sapiens
  misc_feature (417)..(417): n is a, c, g, or t
gcggccgccgtcgggatcgggcttggccgcgggcgcggggccgctgcagttggcgtggcagaaggcctcgctgtcgcgcaggagccggtgcagccgcagcgccgcctccaggtagcgcgcgctctcgcgccagctctctccctcgtactgctccagagcgtgcccgtacgccgcggccagcggcatcaggtcctcgggcgggaagccccggaagctgtacttctcgtactgcgccccggcgctgcccagcagcaaccacagcagcccccacgccacccgagccatgcccgccgcgccgccggctctccggagctgagctggctgccccgcggacggaaggggacagggccgggccccgggcgggcggcgcgcccgctgggtcttagcgccgggcacgaggcggcaaggtggggcggngcctgggtcacgacgtctccc

SEQ ID NO: 2580 - DNA, 704 bp, Homo sapiens
ggctaggtcgggctgggtggtgaatcggccgagggcgcccgcaggagcacggttggtcctgcggctgtgatgtcggtgttgaggcccctggacaagctgcccggcctgaacacggccaccatcttgctggtgggcacggaggatgctcttctgcagcagctggcggactcgatgctcaaagaggactgcgcctccgagctgaaggtccacttggcaaagtccctccctttgccctccagtgtgaatcggccccgaattgacctgatcgtgtttgtggttaatcttcacagcaaatacagtctccagaacacagaggagtccctgcgccatgtggatgccagcttcttcttggggaaggtgtgtttcctcgccacaggtgctgggcgggagagccactgcagcattcaccggcacaccgtggtgaagctggcccacacctatcaaagccccctgctctactgtgacctggaggtggaaggctttaggggccaccatggcgcagcgcctggtgcgcgtgctgcagatctgtgctggccacgtgcccggtgtctcagctctgaacctgctgtccctgctgagaagctctgagggcccctccctggaggacctgtgagggtggctggcccctgggctgccccttctcatggcttcgtgctgactccataaacattctctgttgaggatgtccagtcagggcttgacag

SEQ ID NO: 2581 - DNA, 1522 bp, Homo sapiens
cgcgggggagaagcgggagcgggagcgggagcgagctggcggcgccgtcgggcgccgggccgggccatggagctgtggccgtgtctggccgcggcgctgctgttgctgctgctgctggtgcagctgagccgcgcggccgagttctacgccaaggtcgccctgtactgcgcgctgtgcttcacggtgtccgccgtggcctcgctcgtctgcctgctgcgccacggcggccggacggtggagaacatgagcatcatcggctggttcgtgcgaagcttcaagtacttttacgggctccgcttcgaggtgcgggacccgcgcaggctgcaggaggcccgtccctgtgtcatcgtctccaaccaccagagcatcctggacatgatgggcctcatggaggtccttccggagcgctgcgtgcagatcgccaagcgggagctgctcttcctggggcccgtgggcctcatcatgtacctcgggggcgtcttcttcatcaaccggcagcgctctagcactgccatgacagtgatggccgacctgggcgagcgcatggtcagggagaacctcaaagtgtggatctatcccgagggtactcgcaacgacaatggggacctgctgccttttaagaagggcgccttctacctggcagtccaggcacaggtgcccatcgtccccgtggtgtactcttccttctcctccttctacaacaccaagaagaagttcttcacttcaggaacagtcacagtgcaggtgctggaagccatccccaccagcggcctcactgcggcggacgtccctgcgctcgtggacacctgccaccgggccatgaggaccaccttcctccacatctccaagaccccccaggagaacggggccactgcggggtctggcgtgcagccggcccagtagcccagaccacggcagggcatgacctggggagggcaggtggaagccgatggctggaggatgggcagaggggactcctcccggcttccaaataccactctgtccggctcccccagctctcactcagcccgggaagcaggaagccccttctgtcactggtctcagacacaggcccctggtgtcccctgcagggggctcagctggaccctccccgggctcgagggcagggactcgcgcccacggcacctctgggagctgggatgataaagatgaggcttgcggctgtggcccgctggtgggctgagccacaaggcccccgatggcccaggagcagatgggaggaccccgaggccagacgcacactgtccgagccctctgctcagccgcctgggacccaccagggtgcagctgggctccagggtccagcccacaagctgcatcagggtctctgggagaggaggggcctccagggccaggagtcccagactcacgcaccctgggccacagggagccgggaatcggggcctgctgctcctgctggcctggaagactctgtggggtcagcactgtactccgttgctgtttttttataaacacactcttggaagtggaaaaaaaaaaa

SEQ ID NO: 2582 - protein, 278 aa, Homo sapiens
MELWPCLAAALLLLLLLVQLSRAAEFYAKVALYCALCFTVSAVASLVCLLRHGGRTVENMSIIGWFVRSFKYFYGLRFEVRDPRRLQEARPCVIVSNHQSILDMMGLMEVLPERCVQIAKRELLFLGPVGLIMYLGGVFFINRQRSSTAMTVMADLGERMVRENLKVWIYPEGTRNDNGDLLPFKKGAFYLAVQAQVPIVPVVYSSFSSFYNTKKKFFTSGTVTVQVLEAIPTSGLTAADVPALVDTCHRAMRTTFLHISKTPQENGATAGSGVQPAQ

SEQ ID NO: 2583 - DNA, 425 bp, Homo sapiens
ttttttttttctttttctttttttttttttttttgagtatatgtgacaactgtgaaagaaaaatagattcttgggaccccaaacttactatactaaagggaaagttaactgcctttcttttgttcccaaacagaagctgtgatttcacatgtgcactttatccgatgtaaaatgtagatttactgagcgcgagatgaatgcatgattgactttctctccacgcctttcttttcacatttaacacatagattcactgagtgctggtcagagccttacacgagggtgacctctgcctcattgcctcattgcctaccctccttccttctttcttccccacctgctcgctctttcctttttaaatactgaagttcccctaaaccctcttaggaaaagcacaggtcacagatagcactggaacttgtatt

SEQ ID NO: 2584 - DNA, 7642 bp, Homo sapiens
cggaccctgcgcgcccccgtcccggctcccggccggctcgggggagaaggcgcccgaggggaggcgccggacagatcgcgtttcggaggcggcgcaggtgctgtaaactgcaaaccataatcctgtcttaatactgcaaacaaatcatagtggaactaaggggaacttaatttactgtttccaggttaactaaggtctcagctgtaaaccaaaagtgagaggagacattaagattttcattcttaccgggttgtcttcttcctgaagagcaatggagccgcttttacttggaagaggactaatcgtatatctaatgttcctcctgttaaaattctcaaaagcaattgaaataccatcttcagttcaacaggttccaacaatcataaaacagtcaaaagtccaagttgcctttcccttcgatgagtattttcaaattgaatgtgaagctaaaggaaatccagaaccaacattttcgtggactaaggatggcaaccctttttatttcactgaccatcggataattccatcgaacaattcaggaacattcaggatcccaaacgaggggcacatatctcactttcaagggaaataccgctgctttgcttcaaataaactgggaatcgctatgtcagaagaaatagaatttatagttccaagtgttccaaaattcccaaaagaaaaaattgaccctcttgaagtggaggagggagatccaattgtcctcccatgcaatcctcccaaaggcctcccacctttacacatttattggatgaatattgaattagaacacatcgaacaagatgaaagagtatacatgagccaaaagggagatctatacttcgcaaacgtggaagaaaaggacagtcgcaatgactactgttgctttgctgcatttccaagattaaggactattgtacagaaaatgccaatgaaactaacagttaacagtttaaagcatgctaatgactcaagttcatccacagaaattggttccaaggcaaattccatcaagcaaagaaaacccaaactgctgttgcctcccactgagagtggcagtgagtcttcaattaccatcctcaaaggggaaatcttgctgcttgagtgttttgctgaaggcttgccaactccacaggttgattggaacaaaattggtggtgacttaccaaaggggagagaagcaaaagaaaattatggcaagactttgaagatagagaatgtctcctaccaggacaaaggaaattatcgctgcacagccagcaatttcttgggaacagccactcacgattttcacgttatagtagaagagcctcctcgctggacaaagaagcctcagagtgctgtgtatagcaccggaagcaatggcatcttgttatgtgaggctgaaggagaacctcaacccacaatcaagtggagagtcaatggctccccagttgacaatcatccatttgctggtgatgttgtcttccccagggaaatcagttttaccaaccttcaaccaaatcatactgctgtgtaccagtgtgaagcctcaaatgtccatggaactatccttgccaatgccaatattgatgttgtggatgtccgtccattgatacaaaccaaagatggagaaaattacgctacagtggttgggtacagtgctttcttacattgcgagttctttgcttcacctgaggcagtcgtgtcctggcagaaggtggaagaagtgaaacccctggagggcaggcggtatcatatctatgaaaatggcacattgcagatcaacagaaccaccgaagaagatgctgggtcttactcatgttgggtagaaaatgctataggaaaaactgcagtcacagccaatttggatattagaaatgctacaaaacttagagtttctcctaagaatcctcgtatccccaaattgcatatgcttgaattacattgtgaaagcaaatgtgactcacatttgaaacacagtttgaagttgtcctggagtaaagatggagaagcctttgaaattaatggcacagaagatggcaggataattattgatggagctaatttgaccatatctaatgtaactttagaggaccaaggtatttactgctgttcagctcatactgctctagacagtgctgccgatataactcaagtaactgttcttgatgttccggatccaccagaaaaccttcacttgtctgaaagacagaacaggagtgttcggctgacctgggaagctggagctgaccacaacagcaatattagcgagtatattgttgaatttgaaggaaacaaagaagagcctggaaggtgggaggaactgaccagagtccaaggaaagaaaaccacagttatcttacctttggctccatttgtgagataccagttcagggtcatagccgtgaacgaagtagggagaagtcagcctagccagccgtcagaccatcatgaaacaccaccagcagctccagataggaatccacaaaacataagggttcaagcctctcaacccaaggaaatgattataaagtgggagcctttgaaatccatggagcagaatggaccaggcctagagtacagagtgacctggaagccacagggagccccagtggagtgggaagaagaaacagtcacaaaccacacattgcgggtgatgacgcctgctgtctatgccccttatgatgtcaaggtccaggctatcaatcaactaggatctgggcctgaccctcagtcagtgactctctattctggagaagactatcctgatacagctccagtgatccatggggtggacgttataaacagtacattagttaaagttacctggtcaacagttccaaaggacagagtacatggacgtctgaaaggctatcagataaattggtggaaaacaaaaagtctgttggatggaagaacacatcccaaagaagtgaacattctaagattttcaggacaaagaaactctggaatggttccttccttagatgcctttagtgaatttcatttaacagtcttagcctataactctaaaggagctggtcctgaaagtgagccttatatatttcaaacaccagaaggagtacctgaacagccaacttttctaaaggtcatcaaagttgataaagacactgccactttatcttggggactacctaagaaattaaatggaaacttaactggctatcttttgcaatatcagataataaatgacacctacgagattggagaattaaatgatattaacattacaactccatcaaagcccagctggcacctctcaaacctgaatgcaactaccaagtacaaattctacttgagggcttgcacttcacagggctgtggaaaaccgatcacggaggaaagctccaccttaggagaagggagtaaaggtatcgggaagatatcaggagtaaatcttactcaaaagactcacccagtagaggtatttgagccgggagctgaacatatagttcgcctaatgactaagaattggggcgataacgatagcatttttcaagatgtaattgagacaagagggagagaatatgctggtttatatgatgacatctccactcaaggctggtttattggactgatgtgtgcgattgctcttctcacactactattattaactgtttgctttgtgaagaggaatagaggtggaaagtactcagttaaagaaaaggaagatttgcatccagacccagaaattcagtcagtaaaagatgaaacctttggtgaatacagtgacagtgatgaaaagcctctcaaaggaagccttcggtcccttaatagggatatgcagcctactgaaagtgctgacagcttagtcgaatacggagagggagaccatggtctcttcagtgaagatggatcatttattggtgcctacgctggatctaaggagaagggatctgttgaaagcaatggaagttctacagcaacttttccccttcgggcataaacacaacatatgtaagcaacgctactggttcaccccaaccttccatatttatctgttcaaaggagcaagaactttcatataggaatagaaacatgctggccgaagatttcatccagaagtcaacatcctgcaattatgttgaaaagagtagtactttcttcaaaatataaaatgccaagcacttcaggcctatgttttgcttatattgttttcaggtgctcaaaatgcaaaacacaaaacaaatcctgcatttagatacacctcaactaaatccaaagtccccattcagtatattccatatttgcctgattttactattcggtgtgtttgcatagatgttgctacttggtgggtttttctccgtatgcacattggtatacagtctctgagaactggcttggtgactttgcttcactacaggttaaaagaccataagcaaactggttatttaaaatgtaaaaaggaatatgaaagtcttattaaaacacttcattgaaaatatacagtctaaatttattatttaaattttactagcaaaagtcttaggtgaacaatcaactagtatttgttgagctcctatttgcccagagatggtcatatttaaacagaagtatacgtttttcagtttcaacatgaatttttttatttctgtcagttatgacatccacgagcatcactttttgtgtctgtttttttttttttcttggactaaattcaactgcatggaagcggtggtcagaaggttgttttatacgagaacaggcagaaagtgcccattgttcaggattctaatagctacatctacttaatatcttcatttctaaattgactgcttttacctttttctcatgtttatataatggtatgcttgcatatatttcatgaatacattgtacatattatgttaatatttacacaatttaaaatatagatgtgttttattttgaagtgagaaaatgaacattaacaggcatgtttgtacagctagaatatattagtaagatactgtttttcgtcattccagagctacaactaataacacgaggttccaaagctgaagactttgtataaagtatttgggttttgttcttgtattgctttctttcaacagtttcaaaataaaatatcatacaaatattgagggaaatgttttcatatttttcaaaataggtttttattgttgaatgtacatctaccccagcccctcaaaagaaaaactgtttacatagaaattcctacacatacgtttgcgtatatgttattttaaacatctttgtggtgagaattttttccccgatattctccttctgtcaaagtcagaacaaattcagggaatttattttctggcagttgtgctccagtccttttaaaattgtacatgaacatgttttagaaacaatatggaggatgatgcatacatgtcggtcaagttcagcgctcgacattttatggaaagatttttttaaccttaccacgaaatacttaactactgtttaagtgaattgacttatttcactttagtttttgaactgtgattattggtatactgttatatcctcaacttggatttatggtaaccccttttagttcatggagaccaaaatttggggtatttataatagtcagcgcaggaatgcacatggaatatctacttgtccttttgaacctcacgagtcatccagaatgtatagacaggaaaagcatgtcttatttaaaactgtaatttatgggctcaggatctgaccgcagtcccgggagtaagcatttcaaagggggaaggcagtgtggtccctaccctgtgtgaatgtgaggatgtagacatccatcagtgcaactcgagctccatcctcctccgatttctaaggttccagttttctggagggacagtcatcatgttttgatttatctgggagaaaactgtggtgcacagcttgtgaggagggcaaggttgtgacgttcgagcttagttctggtgttattctgtctcctcttctttgtcatcagccaaaacgtggtttttaaagagagtcatgcaggttagaaataatgtcaaaaatatttaggaatttaataacctttaagtcagaaactaaaacaaatactgaaatattagctcttcctacacttcgtgttcccctttagctgcctgaaaatcaagattgctcctactcagatcttctgagtggctaaaacttatggatatgaaaaatgagattgaatgatgactatgctttgctatcattgttacctttcctcaatactatttggcaactactgggactcttcagcacaaaaggaatagatctatgattgaccctgattttaattgtgaaattatatgattcatatattttatgaatcagaataaccttcaaataaaataaatctaagtcggttaaaatggatttcatgattttccctcagaaaatgagtaacggagtcccacggcgtgcaatggtaattataaattggtgatgcttgtttgcaaattgcccactcgtgataagtcaacagccaatatttaaaactttgttcgttactggctttaccctaactttctctagtctactgtcaatatcattttaatgtaattgattgtatatagtctcaagaatggttggtgggcatgagttcctagagaactgtccaagggttgggaaaatccaaattctcttcctggctccagcactgattttgtacataaacattaggcaggttgcttaacctttttatttcaaactctctcaactctaaagtgctaataataatctcagttaccttatctttgtcacagggtgttcttttttatgaagaaaaatttgaaaatgataaaagctaagatgccttctaacttcataagcaaacctttaactaattatgtatctgaaagtcacccccacataccaactcaacttttttcctgtgaacacataaatatatttttatagaaaaacaaatctacataaaataaatctactgtttagtgagcagtatgacttgtacatgccattgaaaattattaatcagaagaaaattaagcagggtctttgctatacaaaagtgttttccactaattttgcatgcgtatttataagaaaaatgtgaatttggtggttttattctatcggtataaaggcatcgatattttagatgcacccgtgtttgtaaaaatgtagagcacaatggaattatgctggaagtctcaaataatatttttttcctattttatactcatggaagagataagctaaagaggggacaataatgagaaatgttggtgtgcttttctaagcatttaaaacataattgccaattgaaaccctaaatatgtttacataccattaagatatgattcatgtaacaatgttaaattaattataatgggattgggtttgttatctgtggtagtatatatcctagtgttcctatagtgaaataagtagggttcagccaaagctttctttgttttgtaccttaaattgttcgattacgtcatcaaaagagatgaaaggtatgtagaacaggttcacgtgattacctttttcttttggcttggattaatattcatagtagaactttataaaacgtgtttgtattgtaggtggtgtttgtattatgcttatgactatgtatggtttgaaaatattttcattatacatgaaattcaactttccaaataaaagttctacttcatgt

SEQ ID NO: 2585 - protein, 1224 aa, Homo sapiens
MEPLLLGRGLIVYLMFLLLKFSKAIEIPSSVQQVPTIIKQSKVQVAFPFDEYFQIECEAKGNPEPTFSWTKDGNPFYFTDHRIIPSNNSGTFRIPNEGHISHFQGKYRCFASNKLGIAMSEEIEFIVPSVPKFPKEKIDPLEVEEGDPIVLPCNPPKGLPPLHIYWMNIELEHIEQDERVYMSQKGDLYFANVEEKDSRNDYCCFAAFPRLRTIVQKMPMKLTVNSLKHANDSSSSTEIGSKANSIKQRKPKLLLPPTESGSESSITILKGEILLLECFAEGLPTPQVDWNKIGGDLPKGREAKENYGKTLKIENVSYQDKGNYRCTASNFLGTATHDFHVIVEEPPRWTKKPQSAVYSTGSNGILLCEAEGEPQPTIKWRVNGSPVDNHPFAGDVVFPREISFTNLQPNHTAVYQCEASNVHGTILANANIDVVDVRPLIQTKDGENYATVVGYSAFLHCEFFASPEAVVSWQKVEEVKPLEGRRYHIYENGTLQINRTTEEDAGSYSCWVENAIGKTAVTANLDIRNATKLRVSPKNPRIPKLHMLELHCESKCDSHLKHSLKLSWSKDGEAFEINGTEDGRIIIDGANLTISNVTLEDQGIYCCSAHTALDSAADITQVTVLDVPDPPENLHLSERQNRSVRLTWEAGADHNSNISEYIVEFEGNKEEPGRWEELTRVQGKKTTVILPLAPFVRYQFRVIAVNEVGRSQPSQPSDHHETPPAAPDRNPQNIRVQASQPKEMIIKWEPLKSMEQNGPGLEYRVTWKPQGAPVEWEEETVTNHTLRVMTPAVYAPYDVKVQAINQLGSGPDPQSVTLYSGEDYPDTAPVIHGVDVINSTLVKVTWSTVPKDRVHGRLKGYQINWWKTKSLLDGRTHPKEVNILRFSGQRNSGMVPSLDAFSEFHLTVLAYNSKGAGPESEPYIFQTPEGVPEQPTFLKVIKVDKDTATLSWGLPKKLNGNLTGYLLQYQIINDTYEIGELNDINITTPSKPSWHLSNLNATTKYKFYLRACTSQGCGKPITEESSTLGEGSKGIGKISGVNLTQKTHPVEVFEPGAEHIVRLMTKNWGDNDSIFQDVIETRGREYAGLYDDISTQGWFIGLMCAIALLTLLLLTVCFVKRNRGGKYSVKEKEDLHPDPEIQSVKDETFGEYSDSDEKPLKGSLRSLNRDMQPTESADSLVEYGEGDHGLFSEDGSFIGAYAGSKEKGSVESNGSSTATFPLRA

SEQ ID NO: 2586 - DNA, 733 bp, Homo sapiens
caggagtgcgccgcgtccgttcaccgcggcctcagatgaatgcggctgttaagacctgcaataatccagaatggctactctgatctttgttgataaggaaaatgaagaaccaggcacccgtgtggttgctaaggatgggctgaagctggggtctggaccttcaatcaaagccttagatgggagatctcaagtttcaacaccacgttttggcaaaacgttcggtgccccagccttacctaaagctagcagaaaggctttgggaactgtcaacagagttacagaaaagcctgttaagtccaagggacccctccaatcaaaacagcccacgctttgtgccaaaaagataactgagaagagtgttaagtcaaaaggctctgttcctgcctcagatgatgcctatccagaaatagaaaaattctttcccttcaatcctctagactttgagagttttgacctgcctgaagagcaccagattgcgcacctccccttgagtggagtgcctctcatgatccttgacgaggagagagagcttgaaaagctgtttcagctgggccccccttcacctgtgaagatgccctttccaccatgggaatccgatctgttgcagtctccttcaagcattctgtcgaccctggatgttgaattgccacctgtttggtgtgaaatagatatttaaattttttagtgcttcagagtttgtgtgtatttgtattaataaagcattctttaactg

SEQ ID NO: 2587 - protein, 201 aa, Homo sapiens [sequence omitted]

SEQ ID NO: 2588 - DNA, 489 bp, Homo sapiens
ttttttggttatgaaaacttagggactaaaattaatataaaaattggcataatgttggattgaatctacattttggcagaagttaaacattcccacataatgtcaaaattatacatcatgcagttctgtttttttgtttgttttattttgttttgtttttgagtctggctctgtcacccaggctggagtgcagtggcgtgatctgcaacctctgccccccgggttcaagcgattctcctgcctcagcctcccgagtagctgagattacaggtgcgcgccaccacacttggctaatttttgtattattagtagagacggggtttcagcatgttggctaggccggtctctcctgacctcagggtgatcagcccacctcggcctcacaaagtgctgggattacaggcgtgagccaccttgcccagcccacatcatacagtttgaaatgaaactttgccacaaccagcctttgctgtagcacacacatatatc

SEQ ID NO: 2589 - DNA, 4522 bp, Homo sapiens
  misc_feature (660)..(660): n is a, c, g, or t
  misc_feature (685)..(686): n is a, c, g, or t
cgggtctcagtctggtactgaatgcaggaatggcttaaggtgaaatcgtggtcctctggtgaactcagcgaagaccccctcgccttgtttatgacaagagaacttctgggggcgggaggaagagtccctgttacgatgctgatcatcattgagcttttgctgagaaaactctttagtactaaggtcgagagtctctgtggtctgcctggcaccagcaccttcctacaaccctagttttccaaaaggaaaagcctggggccaggcgacgtcctagctcgcattatgacagggccgcgggccaccagagatgcgcgatgcccaactctttccaagagcacctcgcgtcccgaaccggtgccttcaactcggagaagtcaagagacccgcaagaaacttgcacgactgcacccgccgccgcgctgctgggggctgggcaggggcagctgggctggctcccggggagacgcgacccccccgcgccccgcagaccggctgtctcccatggacccctcggcacctgcagctccgaggaagggtcagcgcgcgtgtccgcaccccgcccccaccgcgcgcccagagccgggggtcgccgtggcccttcgccacctccccaggagggcgtccggggcgtcccctctgggcgacgcgaggcccgggggnctgcggtggccgcggcgcggagccnnactccggcggcggcggcggcgcggctccccctgctctgtgcagctgccgcccgggcttgcgctgggccaggcgcgcggcggccccgggctttgtgtgtgtgtatgtgtgtgtgtgtgtgtgtgtgtgtgtgtgagagtgtgtgcgtgtgagagtgcgagtgtctgtgcgcgagtgagtgagcggcgggcgggcgcgagtgtggccggccggagcgcgagcatgacccggcgggcgcgctccccagcctccgtctccccgccggaaccatgtcgggcaggtcggttcgagccgagacgaggagccgggccaaagatgatatcaagagggtcatggcggcgatcgagaaagtgcgcaaatgggagaagaaatgggtgaccgttggtgacacatccctacgaatctacaaatgggtccctgtgacggagcccaaggttgatgacaaaaacaagaataagaaaaaaggcaaggacgagaagtgtggctcagaggtgaccactccggagaacagttcctccccagggatgatggacatgcatgacgataacagcaaccagagctccatcgcagatgcctcccccatcaaacaggagaacagcagcaactccagccccgctccagagcccaactcggctgtgcccagcgacggcaccgaggccaaggtggatgaggcccaggctgatgggaaggagcacccaggagctgaagatgcttctgatgagcagaattcacagtcctctatggaacattcgatgaacagctcagagaaagtagatcggcagccgtctggagactcgggtctggccgcagagacgtctgcaatctctcaggtacctcgctcgaggtctcagaggggcagccagatcggccgggagcccattgggttgtcgggggatctggaaggagtgccaccctctaaaaagatgaaactggaggcctctcaacaaaactccgaagagatgtagacgatgctttaagcctccgataactgttccatggaaggtacatcagcaattaattctagagcaactttgccccagcgattcctcttgggtgcgaacagaactactaacgtttcaagtttaccaagtgcaaatccaagaagacccagacggcgtcacttctcagacactgaagaactctgctgtgaagcaaaacactcaaacctttaagggactgtccttggggaggcaggcggggctgacagctcaggagtgtctgcacactgtctcggaagccaggattccatttgtgttgctgctgtatttccccccacttctctatgtaacgatataagctatcggagggtggtaccgatcaggaacgctttttggcggggctttccactgttcaaccgattccttccgctttctttttttgtgccttgtgcccttgaggtgacctctggcatgtatcctggtggttcttacatccccctctgcaaagtgccctcttggtttggttcgggcggcggctgccaccctactcaccgctctcctccctgccccaggacttcatcggagcaggcagggtggagcgaaggagctccttagcccacctggtttgcaggtgcagggggaccttaggcacgccccaagcaccaggcaccagggcccaaggacgcgcaggtgttggggcacagtccccaagggctcggccccttggatcaggctgggcactcgctgtgctctcccctccttggggcgtttaggactgggcgtctccaagcccaccatggcccagatggacgtgcaaagcccttggaattttctggcacttcctctctattgcccccaccaccaccacccccatcactgctttctcccagacctccgaatacgaaatggcttctctggctgactgcaaggctgtctccttaaggcactgagtgggccggggaggctgggagccggcggcaggattagctggtgctgaactttctctcataggacgtcgcttggatttcaaatccacggtcacctgctgccctttgcctcccccgacgccccagcctgtgccccggagaggcaggatcgcagtggtcagaatccacgtgctttcctattctcaggctgttctgactctgagccaacagctggaccgtgtctcatccccagaacatgccgtctgtccaccggggagtggccttgatggccggcctcgaaggccacaaacaaggcgtcgaggaattggaaagatttgcacaccctccagaaaggagagacgcaatctcccctccctcccatcccccaccttcgctggaacagcttcctctcactgaacggagacgcccccttggacgaactgcctaatcgtttggttctgaggcctggtttgctcttaattaatatatgaactcctcagaccttaaaccttttcctaagctttctttactgcactggagttctgactccctttgagttgtgtgttactgggggtggggtggggtcatgggttttgttgtttttgggggctaattggtgcatattcaggtaccacctttgacgtgtggctctttctcctgaccatcatgggaagtgtctgctggattccattttctaagagtttctgagggtgaggctcttattttttttttaagggatcctgtctatttcctgcacttcgagaagaatcaaaatgttcctgaatttcaaatacctcatgcaaaatgtgtctcctgaaataagggaaaaaaaaaaaaaaccacaactttgaaaatcttaatgttgaagttagcaatgccgaaaggtttctgtcttaaaaaaaaaaaatccttgtacttatcaattttgccccttaggcagtcagttttgttgagaactgtgtcctgcatcctggcgcagaacctcctgatgcggttcctctccacgcatctcgaggcggcgttacctccagattccgtagagttagagtcacatttttctttgcagcgaaactccgtcttggtgagagatgaatttggatatttatttccttctctgtttttgggaaacgagaggctacaaccaagacagctgaaggagaatgaaacacacatccacagaaacagagaggcgtaggtggccctgccgttgaccgcagcctctctggacaggcaaggggagttggcgcaggtgaggactcagacgacgtccaccgtcccaaggctgtcactagtatttctctgaagtgcctgaaggtaggaatgggccggcgattgggaccagctgggccccaccacggccacgccaggcaaagcgccagcagccctgcactccacgctggccaagaaggccttccacgcagaatgacaagactgcaaaaatccgatgtgcttccttccctggcgcagtcgctcctcgagccgctgccccccacccaccctgcacccctcgccctcccccccaccacagaatctaagacctttcagcttcgagccagggggcgggggatcccgagcaaaagccttccatggacatcaggccccgtggcctcaagggctcccagggcaaacctaattcccccaaaacgtgaagtcggggaagctgcggctacacattccacaaagtgctggcacttacacccacaacccggaaggctgtggaccgattcctctagggtggtgacctcccattagcaaacggtgtcatggtttggaatgttcattatcgccaagaacctggttagaggcataaagaccttttttcaccgttacctaattttttcccctttcaagaattttttttttttttggtgtgttgtacagcagtataatttttcacttatttattcctacagtagatatggtttgtacaatgtacaattgtttcatttcagaaaataaaaatttcaaatcatg

SEQ ID NO: 2590 - protein, 231 aa, Homo sapiens
MSGRSVRAETRSRAKDDIKRVMAAIEKVRKWEKKWVTVGDTSLRIYKWVPVTEPKVDDKNKNKKKGKDEKCGSEVTTPENSSSPGMMDMHDDNSNQSSIADASPIKQENSSNSSPAPEPNSAVPSDGTEAKVDEAQADGKEHPGAEDASDEQNSQSSMEHSMNSSEKVDRQPSGDSGLAAETSAISQVPRSRSQRGSQIGREPIGLSGDLEGVPPSKKMKLEASQQNSEEM

SEQ ID NO: 2591 - DNA, 2557 bp, Homo sapiens
cagagggaggaagaagcggcggcgcggcggcggcggctcctctttgcagagggggaaactcttgggctgagagcaggaacaacgcggtaggcaaggcgggctgctggctcccccggctccggcagcagcggcggcagcccgagcagcggcagcagcagcggcagcaccccaggcgctgacagccccgccggccggctccgttgctgaccgccgactgtcaatggagctggaaaacatcgtggccaacacggtcttgctgaaagccagggaagggggcggaggaaagcgcaaagggaaaagcaagaagtggaaagaaatcctgaagttccctcacattagccagtgtgaagacctccgaaggaccatagacagagattactgcagtttatgtgacaagcagccaatcgggaggctgcttttccggcagttttgtgaaaccaggcctgggctggagtgttacattcagttcctggactccgtggcagaatatgaagttactccagatgaaaaactgggagagaaagggaaggaaattatgaccaagtacctcaccccaaagtcccctgttttcatagcccaagttggccaagacctggtctcccagacggaggagaagctcctacagaagccgtgcaaagaactcttttctgcctgtgcacagtctgtccacgagtacctgaggggagaaccattccacgaatatctggacagcatgttttttgaccgctttctccagtggaagtggttggaaaggcaaccggtgaccaaaaacactttcaggcagtatcgagtgctaggaaaagggggcttcggggaggtctgtgcctgccaggttcgggccacgggtaaaatgtatgcctgcaagcgcttggagaagaagaggatcaaaaagaggaaaggggagtccatggccctcaatgagaagcagatcctcgagaaggtcaacagtcagtttgtggtcaacctggcctatgcctacgagaccaaggatgcactgtgcttggtcctgaccatcatgaatgggggtgacctgaagttccacatctacaacatgggcaaccctggcttcgaggaggagcgggccttgttttatgcggcagagatcctctgcggcttagaagacctccaccgtgagaacaccgtctaccgagatctgaaacctgaaaacatcctgttagatgattatggccacattaggatctcagacctgggcttggctgtgaagatccccgagggagacctgatccgcggccgggtgggcactgttggctacatggcccccgaagtcctgaacaaccagaggtacggcctgagccccgactactggggccttggctgcctcatctatgagatgatcgagggccagtcgccgttccgcggccgtaaggagaaggtgaagcgggaggaggtggaccgccgggtcctggagacggaggaggtgtactcccacaagttctccgaggaggccaagtccatctgcaagatgctgctcacgaaagatgcgaagcagaggctgggctgccaggaggagggggctgcagaggtcaagagacaccccttcttcaggaacatgaacttcaagcgcttagaagccgggatgttggaccctcccttcgttccagacccccgcgctgtgtactgtaaggacgtgctggacatcgagcagttctccactgtgaagggcgtcaatctggaccacacagacgacgacttctactccaagttctccacgggctctgtgtccatcccatggcaaaacgagatgatagaaacagaatgctttaaggagctgaacgtgtttggacctaatggtaccctcccgccagatctgaacagaaaccaccctccggaaccgcccaagaaagggctgctccagagactcttcaagcggcagcatcagaacaattccaagagttcgcccagctccaagaccagttttaaccaccacataaactcaaaccatgtcagctcgaactccaccggaagcagctagtttcggctctggcctccaagtccacagtggaaccagcccagacccttctccttagaagtggaagtagtggagcccctgctctggtggggctgccaggggagaccccgggagccggaaggaggccgtccatcccgtcgacgtagaacctcgaggtttctcaaagaaatttccactcaggtctgttttccgaggcggccccgggcgggtggattggatttgtctttggtgaacattgcaatagaaatccaattggatacgacaacttgcacgtattttaatagcgtcataactagaactgaattttgtctttatgatttttaaagaaaagttttgtaaatttctctactgtctcagtttacattttcggtatatttgtatttaaatgaagtgagactttgagggtgtatattttctgtgcagccactgttaagccatgtgttccaaggcattttagcggggagggggttatcaaaaaaaaaaaaaatgtgactcaagacttccagagcctcaaatgagaaaatgtctttattaaatgtagaaagtgatccatacttcaaaaaaaaa

SEQ ID NO: 2592 - protein, 590 aa, Homo sapiens
MELENIVANTVLLKAREGGGGKRKGKSKKWKEILKFPHISQCEDLRRTIDRDYCSLCDKQPIGRLLFRQFCETRPGLECYIQFLDSVAEYEVTPDEKLGEKGKEIMTKYLTPKSPVFIAQVGQDLVSQTEEKLLQKPCKELFSACAQSVHEYLRGEPFHEYLDSMFFDRFLQWKWLERQPVTKNTFRQYRVLGKGGFGEVCACQVRATGKMYACKRLEKKRIKKRKGESMALNEKQILEKVNSQFVVNLAYAYETKDALCLVLTIMNGGDLKFHIYNMGNPGFEEERALFYAAEILCGLEDLHRENTVYRDLKPENILLDDYGHIRISDLGLAVKIPEGDLIRGRVGTVGYMAPEVLNNQRYGLSPDYWGLGCLIYEMIEGQSPFRGRKEKVKREEVDRRVLETEEVYSHKFSEEAKSICKMLLTKDAKQRLGCQEEGAAEVKRHPFFRNMNFKRLEAGMLDPPFVPDPRAVYCKDVLDIEQFSTVKGVNLDHTDDDFYSKFSTGSVSIPWQNEMIETECFKELNVFGPNGTLPPDLNRNHPPEPPKKGLLQRLFKRQHQNNSKSSPSSKTSFNHHINSNHVSSNSTGSS

SEQ ID NO: 2593 - DNA, 1086 bp, Homo sapiens
cggggcggcggcggcggcgtgaagtcactgctgctctgggttcgggttggcgactgaaggcggtaccggcctcccggaacagcccgggggagggcttaggtgcagaagggcaggctggccgcggccggtttggtctggggaccacgggctggagcaggtggaaatttaaaattgtttacagtcaacactgtttccagccatgggtttgtctccatctgctcctgctgttgcagttcaggcctcaaatgcttcagcgtccccaccttcaggatgcccgatgcatgaagggaaaatgaaaggctgtccagtgaatacagagccatctggcccaacctgtgagaagaaaacatactctgtgcctgcccaccaggaacgcgcctatgagtacgtggagtgtcccattaggggcactgcggctgagaataaggagaacctagatccttcaaatctgatgccaccaccaaatcaaacaccagctccagatcagccatttgcattgtctactgtcagagaagagtcatccattccgagagcagattcagagaaaaagtgggtttacccttctgagcagatgttctggaatgcaatgttaaagaaagggtggaagtggaaggatgaggatatcagtcagaaggatatgtataatatcattagaattcacaatcagaataacgagcaggcttggaaggagattttgaagtgggaagcccttcatgctgcagagtgtccttgtggtccatcattgatccggtttggagggaaagcaaaagagtattcaccaagggcacgaattcgttcctggatggggtatgagttgccttttgataggcacgattggatcataaaccgttgcgggacagaagttagatatgtgattgattattatgatggtggtgaagtcaacaaggactaccagttcaccatcctggacgtccgtcctgccttagattcactttcggcagtatgggacagaatgaaagtcgcttggtggcgttggacctcgtaaagcactgtttcagatggaaaaatataaactatttttttctgagcgatacattaaactattttccccagaaaaaaaaaaaa

SEQ ID NO: 2594 - protein, 268 aa, Homo sapiens
MGLSPSAPAVAVQASNASASPPSGCPMHEGKMKGCPVNTEPSGPTCEKKTYSVPAHQERAYEYVECPIRGTAAENKENLDPSNLMPPPNQTPAPDQPFALSTVREESSIPRADSEKKWVYPSEQMFWNAMLKKGWKWKDEDISQKDMYNIIRIHNQNNEQAWKEILKWEALHAAECPCGPSLIRFGGKAKEYSPRARIRSWMGYELPFDRHDWIINRCGTEVRYVIDYYDGGEVNKDYQFTILDVRPALDSLSAVWDRMKVAWWRWTS

SEQ ID NO: 2595 - DNA, 309 bp, Homo sapiens
tgctttctttttatctgttttggtaggaataagcttttgttctcttttctgttttgcaagaacttcatcatataatgtttctttcatgaaaagccagaagaagaggaaaattactgtaataactattgaaggaataagaacaataaaatatgctgactcataaaactccatggtacttttgtcaatgtgatcctataaaaccctgtgcggccgggaaaggagaccgggaagacgcggcggcgccggcactacagcccgggccgcccgctccgaggcgccgccgccgccgccgccgccgccgcagtcgct

SEQ ID NO: 2596 - DNA, 2149 bp, Homo sapiens
cagctgactcaggcaggctccatgctgaacggtcacacagagaggaaacaataaatctcagctactatgcaataaatatctcaagttttaacgaagaaaaacatcattgcagtgaaataaaaaattttaaaattttagaacaaagctaacaaatggctagttttctatgattcttcttcaaacgctttctttgagggggaaagagtcaaacaaacaagcagttttacctgaaataaagaactagttttagaggtcagaagaaaggagcaagttttgcgagaggcacggaaggagtgtgctggcagtacaatgacagttttcctttcctttgctttcctcgctgccattctgactcacatagggtgcagcaatcagcgccgaagtccagaaaacagtgggagaagatataaccggattcaacatgggcaatgtgcctacactttcattcttccagaacacgatggcaactgtcgtgagagtacgacagaccagtacaacacaaacgctctgcagagagatgctccacacgtggaaccggatttctcttcccagaaacttcaacatctggaacatgtgatggaaaattatactcagtggctgcaaaaacttgagaattacattgtggaaaacatgaagtcggagatggcccagatacagcagaatgcagttcagaaccacacggctaccatgctggagataggaaccagcctcctctctcagactgcagagcagaccagaaagctgacagatgttgagacccaggtactaaatcaaacttctcgacttgagatacagctgctggagaattcattatccacctacaagctagagaagcaacttcttcaacagacaaatgaaatcttgaagatccatgaaaaaaacagtttattagaacataaaatcttagaaatggaaggaaaacacaaggaagagttggacaccttaaaggaagagaaagagaaccttcaaggcttggttactcgtcaaacatatataatccaggagctggaaaagcaattaaacagagctaccaccaacaacagtgtccttcagaagcagcaactggagctgatggacacagtccacaaccttgtcaatctttgcactaaagaaggtgttttactaaagggaggaaaaagagaggaagagaaaccatttagagactgtgcagatgtatatcaagctggttttaataaaagtggaatctacactatttatattaataatatgccagaacccaaaaaggtgttttgcaatatggatgtcaatgggggaggttggactgtaatacaacatcgtgaagatggaagtctagatttccaaagaggctggaaggaatataaaatgggttttggaaatccctccggtgaatattggctggggaatgagtttatttttgccattaccagtcagaggcagtacatgctaagaattgagttaatggactgggaagggaaccgagcctattcacagtatgacagattccacataggaaatgaaaagcaaaactataggttgtatttaaaaggtcacactgggacagcaggaaaacagagcagcctgatcttacacggtgctgatttcagcactaaagatgctgataatgacaactgtatgtgcaaatgtgccctcatgttaacaggaggatggtggtttgatgcttgtggcccctccaatctaaatggaatgttctatactgcgggacaaaaccatggaaaactgaatgggataaagtggcactacttcaaagggcccagttactccttacgttccacaactatgatgattcgacctttagatttttgaaagcgcaatgtcagaagcgattatgaaagcaacaaagaaatccggagaagctgccaggtgagaaactgtttgaaaacttcagaagcaaacaatattgtctcccttccagcaataagtggtagttatgtgaagtcaccaaggttcttgaccgtgaatctggagccgtttgagttcacaagagtctctacttggggtgacagtgctcacgtggctcgactatagaaaactccactgactgtcgggctttaaaaagggaagaaactgctgagcttgctgtgcttcaaactactactggaccttattttggaactatggtagccagatgataaatatggttaatttc

SEQ ID NO: 2597 - protein, 498 aa, Homo sapiens
MTVFLSFAFLAAILTHIGCSNQRRSPENSGRRYNRIQHGQCAYTFILPEHDGNCRESTTDQYNTNALQRDAPHVEPDFSSQKLQHLEHVMENYTQWLQKLENYIVENMKSEMAQIQQNAVQNHTATMLEIGTSLLSQTAEQTRKLTDVETQVLNQTSRLEIQLLENSLSTYKLEKQLLQQTNEILKIHEKNSLLEHKILEMEGKHKEELDTLKEEKENLQGLVTRQTYIIQELEKQLNRATTNNSVLQKQQLELMDTVHNLVNLCTKEGVLLKGGKREEEKPFRDCADVYQAGFNKSGIYTIYINNMPEPKKVFCNMDVNGGGWTVIQHREDGSLDFQRGWKEYKMGFGNPSGEYWLGNEFIFAITSQRQYMLRIELMDWEGNRAYSQYDRFHIGNEKQNYRLYLKGHTGTAGKQSSLILHGADFSTKDADNDNCMCKCALMLTGGWWFDACGPSNLNGMFYTAGQNHGKLNGIKWHYFKGPSYSLRSTTMMIRPLDF

SEQ ID NO: 2598 - DNA, 4682 bp, Homo sapiens
aaggatccaagtgtcacggggtctgggcaatgcaggacgggaggggctgcgtgagtgagtacagaagggaaatgagtgagggggcatgggatctcagagaaaatcagggacctctgagcaaagtggaaaggacgaccgccgcagctcctcgggccgtagctcgaccccgccttcccttttccgcagaatcctcgccttggctgcagcagcgcgctgcccccactggccggcgtgccgtgatcgatcgcaggctgcgtcaggacctcccggcgtataaataggggtggcagaacggcgccgagccgcacacagccatccatcctcccccttccctctctcccctgtcctctctctccgggctcccaccgccgccggggagcaccggccgccaaccaatgagttccttcagctacgagccgtactactcgacctcctacaagcggcgctacgtggagacgccccgggtgcatatcagcgtgcgcagcggctacagcaccgcacgctcagcttactcaagctactcggcgccggtgtcttcctcgctgtccgtgcgccgcagctactcctccagctctggatcgttgatgcccagtctggagaacctcgacctgagccaggtagccgccatcagcaacgacctcaagtccatccgcacgcaggagaaggcgcagctccaggacctcaatgaccgcttcgccagcttcatcgagcgcgtgcacgagctggagcagcagaacaaggtcctggaagccgagctgctggtgctgcgccagaagcactccgagccatcccgcttccgggcgctgtacgagcaggagatccgcgacctgcgcctagcggcggaagatgccaccaccaacgagaagcaagcgctccgaggcgagcgcgaagaagggctggaggagaccctgcgcaacctgcaggcgcgctatgaagaggaggtgctgagccgcgaggacgccgagggccggctgatggaacgccgcaaaggcgccgacgaggcggcgctcgctcgcgccgagctcgagaagcgcatcgacagcttgatggacgaaatctcttttctgaagaaagtgcacgaagaggagatcgccgaactgcaggcgcagatccagtacgcgcagatctccgtggagatggacgtgaccaagcccgacctttccgccgcgctcaaggacatccgcgcgcagtacgagaagctggccgccaagaacatgcagaacgctgaggaatggttcaagagccgcttcacggtgctgaccgagagcgccgccaagaacaccgacgccgtgcgcgccgccaaggacgaggtgtcggagagccgtcgtctgctcaaggccaagaccctggaaatcgaagcatgccggggcatgaatgaagcgctggagaagcagctgcaggagctggaggacaagcagaacgccgacatcagcgctatgcaggtgcggcacggccagaaacacaggggggcggggaactcgagcaagggggggagttggtgcgcccagaaagcgaaaccaggggtggtgcggctgcccagctcttagggatagggcttggctccttggccactgtgtggaggggtggggctcttgaggggcgtgagtgcgggcgccactgtagtccgggagtgactgctccgcgtgctgcaccggcgttccgcattaaagctgcccgacccttgttgggtggggaggggaagacgtgggaattgggcgttgcctccgactgcagtgagatcagctctctactgacctgcgttgaccacgagttactttgcagcgactatcggatcgtctagttaataaatagtacgagtgaactaactctcaattaattctgaaggattactgtgaccagcatgctttatgactagttttaccaaccacctcccttcctttatttagtaggtagacaggaaaatagtcaacattgttttaggtagttaactagtgatgttcatagtaaaccatttccttttaccttttttttttctttttttctttatgtgtaaaatcttctacaacatttctgtttaaacatctccatcttctggggagtagaaaaaatacaattttaaaaagatctccattttaaaacatctccgtcttctggggagtagaaatttttttcttcttctggggagtagaaaaaataatttagatacataggaaatatttcatagaaaataatttttttcttttttttgtttacatctggtattttcttctcataaagaaaggcattagtttcctggcatgtaacccagctaaagaagagtaatcagtgaatgagagacacagtttttctatcaacttagtctgtttttctatcaacttagtctgtttgcatgcattttatgatgatcattaaacagtattaagtaaagaaacagaagaacagaattttcgtccatcttttttttcatctcaggcttcatgaacttgggtattttaggcatgaaggtttttcaaaagatacaggaagttattctaggagagattttatcaaagtgtgcaccttgattttaatcgaaactaggcctttgcaactacactacagtaaaataatagaagggatttatgctcggattttttttttgttttatttttgtcttcaaacaggacacgatcaacaaattagaaaatgaattgaggaccacaaagagtgaaatggcacgatacctaaaagaataccaagacctcctcaacgtgaagatggctttggatattgagattgctgcttacaggtgaaaatagaggggcaaagacagcagccattaaaccttaggaagaaaatcagatcccatttaaagttatgttggatcagaaaccttcaataatagtccttttgaaataatgaagtgttagtttttggcttcttccaagaagagggtatttagatatataagaatttaaccctgtaattagagtcctgtttttatcttgtcattacactttaaatctaataggagtgatttatttatattttttctggtctccatcaaaagatccccaggcattaagtattgataaatcccagccctgctcctgcttgcctttgtgtttagggtactcagagcaagttgtgaaacacaggtgttttttaacctcaccttgcacctgcatccccaggaaactcttggaaggcgaggagacccgactcagtttcaccagcgtgggaagcataaccagtggctactcccagagctcccaggtctttggccgatctgcctacggcggtttacagaccagctcctatctgatgtccacccgctccttcccgtcctactacaccagccatgtccaagaggagcagaccgaagtggaggaaaccattgaggcgtctaaggctgaggaagccaaggatgagcccccctctgaaggagaagccgaggaggaggagaaggacaaggaagaggccgaggaagaggaggcagctgaagaggaagaaggtatgataagaaaaaacccctgcaacttcaagtgtaaactgggtgtggagatttgttaggaggtggataagacaaatgaagccttgctcatttattcatatatgacattagaatcataaataaattttctgtttgtttagcaaaactttcctaaggcatctactctgaatgaggtgattggtcaaaattttcattttttaatataatcatttaacacagcaggttggtgtcctaaagaacaaaaatagataccagacacataatgaaagaaatattgaggttaagtcttggagaggagcagagcttcccatacctagaagtgatctcattcgatttaaatatgtgttcagtggcaaattattcatggcaagctttgtctgttacatgtgcttttggagagagtggagctgggaggttttggtagcattctgacagttgtgtttgcaaataaaacctttgcagacatgttttgactggacttaccctggatttgcattttgtacattttctttttatgttaaagctgccaaggaagagtctgaagaagcaaaagaagaagaagaaggaggtgaaggtgaagaaggagaggaaaccaaagaagctgaagaggaggagaagaaagttgaaggtgctggggaggaacaagcagctaagaagaaagattgaacccccatttccttaattatttcaggaataattctcccgaaatcaggtcaaccccatcaccaaccaaccaaccagttgagttccagattctatgtgaattaaaaagtcaatatatgtataattctgagatgacttaggttggacattcaatgttgtgctatgaatttcctctttatgcagagtatctgtttgcttgcagagtggctttcggcttgctgccagcctgtgcatggtccacgcttatgagttcaggatctacggcaatgtgaatcattcagatgtttacaataaaaaacaccacatgagtaaatgaattcactaatgttaatgttaaacttcatggaaaagtagtcctttgaaccttcggtggttagcaattaaagaccctgagttatgtgcaataaatagtaaataaagttataccgaatgatgtattttttgccgtggttgttacctaattaaaataccttaaagatggcaccaatataaagtgtgtgccagtgaactattgacctccaattttttaaaaagccgaaattttaacaattaccaatactttttt

SEQ ID NO: 2599 - protein, 544 aa, Homo sapiens
MSSFSYEPYYSTSYKRRYVETPRVHISVRSGYSTARSAYSSYSAPVSSSLSVRRSYSSSSGSLMPSLENLDLSQVAAISNDLKSIRTQEKAQLQDLNDRFASFIERVHELEQQNKVLEAELLVLRQKHSEPSRFRALYEQEIRDLRLAAEDATTNEKQALRGEREEGLEETLRNLQARYEEEVLSREDAEGRLMERRKGADEAALARAELEKRIDSLMDEISFLKKVHEEEIAELQAQIQYAQISVEMDVTKPDLSAALKDIRAQYEKLAAKNMQNAEEWFKSRFTVLTESAAKNTDAVRAAKDEVSESRRLLKAKTLEIEACRGMNEALEKQLQELEDKQNADISAMQDTINKLENELRTTKSEMARYLKEYQDLLNVKMALDIEIAAYRKLLEGEETRLSFTSVGSITSGYSQSSQVFGRSAYGGLQTSSYLMSTRSFPSYYTSHVQEEQTEVEETIEASKAEEAKDEPPSEGEAEEEEKDKEEAEEEEAAEEEEAAKEESEEAKEEEEGGEGEEGEETKEAEEEEKKVEGAGEEQAAKKKD

SEQ ID NO: 2600 - DNA, 3824 bp, Homo sapiens
gcggggctagagctgtcggagaagcgggaccgcgaggccggcgcgcggcgctctgcgcggtcagagggagcgcctggcagcagcaggagcagcagcagcagcccgcggcggggccgccgccagccgccgcgaccgccgcggctgcagcctccgaagggaggccgggtgagccggcgtacgcactttcccgcggactttcggagtgtttgtggatatacatgccaagccgccacgatgatgtccatgaacagcaagcagcctcactttgccatgcatcccaccctccctgagcacaagtacccgtcgctgcactccagctccgaggccatccggcgggcctgcctgcccacgccgccgctgcagagcaacctcttcgccagcctggacgagacgctgctggcgcgggccgaggcgctggcggccgtggacatcgccgtgtcccagggcaagagccatcctttcaagccggacgccacgtaccacacgatgaacagcgtgccgtgcacgtccacttccacggtgcctctggcgcaccaccaccaccaccaccaccaccaccaggcgctcgaacccggcgatctgctggaccacatctcctcgccgtcgctcgcgctcatggccggcgcgggcggcgcgggcgcggcggccggcggcggcggcgcccacgacggcccggggggcggtggcggcccgggcggcggcggcggcccgggcggcggcggccccgggggaggcggcggtggcggcccggggggcggcggcggcggcccgggcggcgggctcctgggcggctccgcgcaccctcacccgcatatgcacagcctgggccacctgtcgcaccccgcggcggcggccgccatgaacatgccgtccgggctgccgcaccccgggctggtggcggcggcggcgcaccacggcgcggcagcggcagcggcggcggcgtcggccgggcaggtggcagcggcatcggcggcggcggccgtggtgggcgcagcgggcctggcgtccatctgcgactcggacacggacccgcgcgagctcgaggcgttcgcggagcgcttcaagcagcggcgcatcaagctgggcgtgacgcaggccgacgtgggctcggcgctggccaacctcaagatcccgggcgtgggctcactcagccagagcaccatctgcaggttcgagtcgctcacgctctcgcacaacaacatgatcgcgctcaagcccatcctgcaggcgtggctcgaggaggccgagggcgcccagcgcgagaaaatgaacaagcctgagctcttcaacggcggcgagaagaagcgcaagcggacttccatcgccgcgcccgagaagcgctccctcgaggcctacttcgccgtgcagccccggccctcgtccgagaagatcgccgccatcgccgagaaactggacctcaaaaagaacgtggtgcgggtgtggttttgcaaccagagacagaagcagaagcggatgaaattctctgccacttactgagggggctgggaggtgtcgggcgggacagaatggggagctgaggaggcatttttggggggctttcctctgcttgcctcccctcggatttggagtgtccgttatcctgcctgcatttggggagtcccttctcgctctctttcctccacccattctctgattttcctgcctttgctgtcccctagccttgaggactggggtgctgggtgtggggattggagtatagggtaggggagaagggggggagcattcgggggagtggggagtggggggaaggaaagcggagacccgagcaggggttttaaggagcaggatggttctggggtttgggtggggggagacgcgggaagggtaggaaaatggactgtttctgaccagagacacttacctaaatatcctggggaccaaggaactatgtacaaaaacaaacctaccaaccaccaaaaactagacaaataaagacaaactaaaacaaaacagaacaaaagcaaaggaaaatgctttagaaattttaactccggggagccataatctgcaacttcattttcccccatagaagagaaaaaagagcaccaccattattaccacctccccaaccctacacgcacgaactgagtcgaaaaacgaaaaccaaacgagcgagaagttgaagttctgggtatcaaagctagttgttctgtctgcgtgtttaatttttccctctctcacctccaccccatccatatcctctttatttcctccgttccaatgagaggcctatggctgctctccaatcccgggaagtgagtgggagcacagctgaaaagagagggtcagggggaggctggctgcttgcttaggtggaatccaacttttcccgtggccctgcctatactctggtggcctggtcctgttggggtgggggtctttggagagaagggcatagtctttgagctactaaaaagcagaattccggagcttcgagatatcttattctaggaaaatgaaacaattttaacaacagttttttttcctcttatgtcgaagatctagttttagacaatttcaaaataagcttttcccactcatagaactttaacttgccctttcagttttatcttttttttagagagaggtttaaactactgatttttcctgttgattcaaatagactaatggggtgaaagttattaggagagatactctctcctgttttctccactgaacgagactcatcttgctcttctaggtcccgtttcttcctctcttggaggacatgaaattatagaaatgttgagaagttcctgctttcttttgcggtaggacttggctgtgagaaaatcacctaaatcccagaaaagaggaagacagatttaaagtgcccccacccccatttgtttcaaagaggtctgcatgttgggcgaaaacagaacaactgtgtttccttttacttgttcttattattcaagagtcatttattacaggggataaatgttgggtagcaagaactttaatttgcactaccagtctcccaaatagaaaatcatgtatagtatttcatagtaataatcaggtaccttacaagctgctggtggattttaaaaaattaagatagttgaaggtggttaggtaaaatgcctgctttgtgtacaagatactctttggatctctcgtagagatggtttgttaccatcctttaatcataactaaaacattgaaaacagaacaaatgagaaaagaaaaaaaacctgccgattaacaagactgaaatcatgcatgatctgaaaggtgtggaaagaaacacaattaggtctcactctggttaggcattatttatttaattatgttgtatatcattgtttgcagggcaaacattctatgcatttgaaactgagcactaaactgggctagctttctggtagaccgttttgtggctagtgcgatttcacagtctactgcctgtttccactgaaaacatttttgtcatattcttgtattcaaagaaaacaggaaaaaagttattgtaaatattttatttaatgcacacattcacacagtggtaacagactgccagtgttcatcctgaaatgtctcacggattgatctacctgtctatgtatgtctgctgagctttctccttggttatgttttttctcttttacctttctcctcccttacttctatcagaaccaattctatgcgccaaatacaacagggggatgtgtcccagtacacttacaaaataaaacataactgaaagaagagcagttttatgatttgggtgcgtttttgtgtttatactgggccaggtcctggtagaacctttcaacaaacaaccaaacaaaaaaaaa

SEQ ID NO: 2601 - protein, 420 aa, Homo sapiens
MMSMNSKQPHFAMHPTLPEHKYPSLHSSSEAIRRACLPTPPLQSNLFASLDETLLARAEALAAVDIAVSQGKSHPFKPDATYHTMNSVPCTSTSTVPLAHHHHHHHHHQALEPGDLLDHISSPSLALMAGAGGAGAAAGGGGAHDGPGGGGGPGGGGGPGGGGPGGGGGGGPGGGGGGPGGGLLGGSAHPHPHMHSLGHLSHPAAAAAMNMPSGLPHPGLVAAAAHHGAAAAAAAASAGQVAAASAAAAVVGAAGLASICDSDTDPRELEAFAERFKQRRIKLGVTQADVGSALANLKIPGVGSLSQSTICRFESLTLSHNNMIALKPILQAWLEEAEGAQREKMNKPELFNGGEKKRKRTSIAAPEKRSLEAYFAVQPRPSSEKIAAIAEKLDLKKNVVRVWFCNQRQKQKRMKFSATY

SEQ ID NO: 2602 - DNA, 2754 bp, Homo sapiens
gaattccgccagccccgccagtccccgcgcagtccccgcgcagtcccagcgccaccgggcagcagcggcgccgtgctcgctccagggcgcaaccatgtcgccatttcttcggattggcttgtccaactttgactgcgggtcctgccagtcttgtcagggcgaggctgttaacccttactgtgctgtgctcgtcaaagagtatgtcgaatcagagaacgggcagatgtatatccagaaaaagcctaccatgtacccaccctgggacagcacttttgatgcccatatcaacaagggaagagtcatgcagatcattgtgaaaggcaaaaacgtggacctcatctctgaaaccaccgtggagctctactcgctggctgagaggtgcaggaagaacaacgggaagacagaaatatggttagagctgaaacctcaaggccgaatgctaatgaatgcaagatactttctggaaatgagtgacacaaaggacatgaatgaatttgagacggaaggcttctttgctttgcatcagcgccggggtgccatcaagcaggcaaaggtccaccacgtcaagtgccacgagttcactgccaccttcttcccacagcccacattttgctctgtctgccacgagtttgtctggggcctgaacaaacagggctaccagtgccgacaatgcaatgcagcaattcacaagaagtgtattgataaagttatagcaaagtgcacaggatcagctatcaatagccgagaaaccatgttccacaaggagagattcaaaattgacatgccacacagatttaaagtctacaattacaagagcccgaccttctgtgaacactgtgggaccctgctgtggggactggcacggcaaggactcaagtgtgatgcatgtggcatgaatgtgcatcatagatgccagacaaaggtggccaacctttgtggcataaaccagaagctaatggctgaagcgctggccatgattgagagcactcaacaggctcgctgcttaagagatactgaacagatcttcagagaaggtccggttgaaattggtctcccatgctccatcaaaaatgaagcaaggctgccatgtttaccgacaccgggaaaaagagagcctcagggcatttcctgggagtctccgttggatgaggtggataaaatgtgccatcttccagaacctgaactgaacaaagaaagaccatctctgcagattaaactaaaaattgaggattttatcttgcacaaaatgttggggaaaggaagttttggcaaggtcttcctggcagaattcaagaaaaccaatcaatttttcgcaataaaggccttaaagaaagatgtggtcttgatggacgatgatgttgagtgcacgatggtagagaagagagttctttccttggcctgggagcatccgtttctgacgcacatgttttgtacatttcagaccaaggaaaacctcttttttgtgatggagtacctcaacggaggggacttaatgtaccacatccaaagctgccacaagttcgacctttccagagcgacgttttatgctgctgaaatcattcttggtctgcagttccttcattccaaaggaatagtctacagggacctgaagctagataacatcctgttagacaaagatggacatatcaagatcgcggattttggaatgtgcaaggagaacatgttaggagatgccaagacgaataccttctgtgggacacctgactacatcgccccagagatcttgctgggtcagaaatacaaccactctgtggactggtggtccttcggggttctcctttatgaaatgctgattggtcagtcgcctttccacgggcaggatgaggaggagctcttccactccatccgcatggacaatcccttttacccacggtggctggagaaggaagcaaaggaccttctggtgaagctcttcgtgcgagaacctgagaagaggctgggcgtgaggggagacatccgccagcaccctttgtttcgggagatcaactgggaggaacttgaacggaaggagattgacccaccgttccggccgaaagtgaaatcaccatttgactgcagcaatttcgacaaagaattcttaaacgagaagccccggctgtcatttgccgacagagcactgatcaacagcatggaccagaatatgttcaggaacttttccttcatgaacccccggatggagcggctgatatcctgaatcttgcccctccagagacaggaaagaatttgccttgtccctgggaactggttcaagagacactgcttgggttcctttttcaacttggaaaaagaaagaaacactcaacaataaagactgagacccgttcgcccccatgtgacttttatctgtagcagaaaccaagtctacttcactaatgacgatgccgtgtgtctcgtctcctgacatgtctcacagacgctcctgaagttaggtcattactaaccatagttatttacttgaaagatgggtctccgcacttggaaaggtttcaagacttgatactgcaataaattatggctcttcacctgggcgccaactgctgatcaacgaaatgcttgttgaatcaggggcaaacggagtacagacgtctcaagactgaaacggccccattgcctggtctagtagcggatctcactcagccgcagacaagtaatcactaacccgttttattctattcctatctgtggatgggtaaatgctgggggccagccctggataggtttttatgggaattc

SEQ ID NO: 2603 - protein, 706 aa, Homo sapiens [sequence omitted]

SEQ ID NO: 2604 - DNA, 404 bp, Homo sapiens
tactgattattcttggtttaaatttgcatgtaacaatttttagaaaataatatactgcaaaagaaagattggaaacatgcgtgacatgattaatctttatgagcaccaaataggcattaataatttaatggtaaaaaatctaatgccatcttatggtctttggattttttattttttcttaaataatgaaaatcaaactatgataaaagttaggaaacgtgcagaaccaccaggaaaacagcaatttgctttcagcgtacctttgcaaggatgttccaaagcctcatgtacgagtgagatttctgggccacttgcacaagtagataaaccctcttctcaggccagttataaagggctgagatgagccacagaagcccaagatctgctctgattgtctcctagct

SEQ ID NO: 2605 - DNA, 590 bp, Homo sapiens
gcggccgccacccccttccccgctgccagcactcaccctctctccgctcctgctcgcaacctcgcggttcctggggtgcttgtgcccactgtgtggacagcgcgggcggacttttgggccggggccgggcggcgggggaggctctctaaggcctccgcctctgcctctcccgcccccttacccgccccggagcgggaagcggcggaggctccgccatggcctcgggagccggaggagtcggagggggcggtggcggcaagatccggacgcggcgttgccaccaggggccaattaagccttaccagcaggggcgacaacagcatcagggcattcttagcagggttacagaatctgttaagaatattgtgccagggtggctacaaagatacttcaacaagaatgaagatgtatgcagctgttcaacagacacaagcgaggttccacgctggccagaaaataaagaggaccatctggtatatgccgatgaggagagctctaatattactgatgggagaatcacacctgagccagcagtcagtaatacagaagaaccttcaacaactagtactgcttcaaattattcagatgtg

SEQ ID NO: 2606 - DNA, 419 bp, Homo sapiens
  misc_feature (163)..(163): n is a, c, g, or t
  misc_feature (167)..(167): n is a, c, g, or t
  misc_feature (253)..(253): n is a, c, g, or t
  misc_feature (288)..(288): n is a, c, g, or t
  misc_feature (303)..(303): n is a, c, g, or t
gacaagcgagtactgggtcctgggccccacgcgctacagctggaagaaaggcgtgtggctcacggacctggtgcacgtggcggcccacgagatcggccacgcgctgggcctgatgcactcacaacacggccgggcgctcatgcacctgaacgccacgctgcgngctnggaaggcgttgtcccaggacgagctgtgggggctgcaccggctctacggatgcctcgacaggctgttcgtgtgcgcgtcctgggcnggaaggggcttctgcgacgctcgccggcggctcantgaagaggctctgcnccaagcagcttgcgacttctgctacgaattccccttccccacagtggccaccaccccaccgccccccaggaccaaaaccaggcttggtgcccgatggaaggaacgtgaccttccgc

SEQ ID NO: 2607 - DNA, 444 bp, Homo sapiens
acgcgtgggcggacgcgtgggcgggagcccgcggcgagcgtagcgcaagtccgctccctaggcatcgctgcgctggcagcgattcgctgtctcttgtgagtcaggggacaacgcttcggggcaactgtgagtgcgcgtgtgggggacctcgattctcttcagatctcgaggattcggtccggggacgtctcctgatcccctactaaagcgcctgctaactttgaaaaggagcactgtgtcctgcaaagtttgacacataaaggataggaaaagagaggagagaaaagcaactgagttgaaggagaaggagctgatgcgggcctcctgatcaattaagaggagagttaaaccgccgagatcccggcgggaccaaggaggtgcggggcaagaaggaacggaagcggtgcgatccacagggctgggttttcttgcaccttgggtcac

SEQ ID NO: 2608 - DNA, 373 bp, Homo sapiens
  misc_feature (18)..(19): n is a, c, g, or t
  misc_feature (42)..(42): n is a, c, g, or t
  misc_feature (110)..(110): n is a, c, g, or t
  misc_feature (139)..(139): n is a, c, g, or t
  misc_feature (151)..(151): n is a, c, g, or t
  misc_feature (153)..(153): n is a, c, g, or t
  misc_feature (155)..(155): n is a, c, g, or t
  misc_feature (333)..(333): n is a, c, g, or t
ccctccgctcgcattgcnnatggctcagcgacttcttctgangaggttcctggcctctgtcatctccaggaagccctctcagggtcagtggccacccctcacttccaganccctgcagaccccacaatgcagtcctggnggcctgactgtnananccaacccagcccggacaatatacaccacgaggatctccttgacaacctttaatatccaggatggacctgactttcaagaccgagtggtcaacagtgagacaccagtggttgtggatttccacgcacagtggtgtggaccctgcaagatcctggggccgaggttagagaagatggtggncaagcagcacgggaaggtggtgatggccaaggtggatatt

SEQ ID NO: 2609 - DNA, 402 bp, Homo sapiens
  misc_feature (73)..(73): n is a, c, g, or t
  misc_feature (120)..(120): n is a, c, g, or t
  misc_feature (122)..(122): n is a, c, g, or t
  misc_feature (227)..(227): n is a, c, g, or t
  misc_feature (229)..(229): n is a, c, g, or t
  misc_feature (243)..(243): n is a, c, g, or t
  misc_feature (291)..(291): n is a, c, g, or t
  misc_feature (324)..(324): n is a, c, g, or t
  misc_feature (376)..(376): n is a, c, g, or t
  misc_feature (385)..(385): n is a, c, g, or t
  misc_feature (399)..(399): n is a, c, g, or t
aagtagcacggcattgctcatccgatccgtgccgccgcaggagtgtgtcaagttacagaggcgccggaatcgncccctgcgctcctcgccagccgccacgacccacctctgcccatgggncnctccatgtgcgccccttcgcccggggactgaaactgactggcccgggagacacgaggcgcccagaaggactgacagcgcggcaccaactgctctgcagacacttnangggaaagactgggncggagagaaggagagccggtcagattcccctaactttcctgggacttnggaacgttcttcgaaataactttttttcttcanctagggtgttaccccaatttaccgctggttgtgctttttttcgggcaatttnctctcctantgttaatttttttnccg

SEQ ID NO: 2610 - DNA, 2032 bp, Homo sapiens
ctggttcggcccacctctgaaggttccagaatcgatagtgaattcgtggaagagaccatatttgttcgcagaggaagccgttgctttctgggatctggctacggcagaaaagacatcggctccaacaggggtgttccacagggtagctgggagttggaagagccaagaacgcctccgagctctggatttgagcttctctgcccatgggtgaagcgcccatgctcagcttgtgagcttcttcccgggagagcagccatggcactgaggaatgtgccctttcgctcagaggtcctgggctgggaccccgacagccttgctgactatttcaagaagctcaactataaggactgtgagaaggcagtgaagaagtaccacatcgatggggctcgcttcttgaacctgacagaaaatgacatccagaagttccccaagctccgggtgccgattctcagtaagttaagtcaggaaatcaacaagaacgaagagaggaggagcatcttcacacgcaaaccccaagtcccgcggtttcctgaagagacagaaagccacgaagaggacaatgggggttggtcgtcctttgaagaagacgattatgaaagtcccaatgatgaccaggatggggaggatgatggagactatgagtcccccaatgaggaggaagaggcacccgtggaagatgacgcggattatgagccgccaccctccaatgacgaggaagctctgcagaactccatcctgcctgccaagcctttccccaactccaactccatgtacatcgaccggcccccctctgggaaaaccccccagcagcctcctgtgcccccccagagaccgatggccgccctcccgcccccaccagccggccggaatcactcgccactgcccccaccccagaccaaccacgaagaacccagcagaagcagaaaccacaaaacggcaaagctccctgctccttcaatagacagaagcacgaaacctcccctagatcgttcattagctccgtttgatagagaacccttcacactaggaaagaaaccaccattttctgacaagccctcgattccagcgggaaggtcactcggggagcatttacccaagattcaaaagcctcctttaccaccgaccacggaaagacatgaaaggagcagccccctgccagggaagaagccacctgtgccaaagcatggatggggaccagacagaagagagaatgatgaagatgatgtgcatcagagacctttgccccagccagcactacttcctatgagctccaacactttcccttcaagatctactaagccaagtcccatgaaccctctcccatcctctcacatgcctggagcattctcagaaagtaacagcagttttccacagagtgcctccctgccaccatacttctctcaaggccctagcaacagaccacctatcagagccgaaggcagaaacttccccttgccacttccaaacaaacctcggcccccatcccccgcggaggaagagaattcattaaatgaagagtggtacgtttcttatattacccgaccagaggcagaagctgctcttagaaagataaaccaggatggcacatttctggtcagagacagctctaaaaaaacaacaaccaatccatatgtcctcatggtgttgtacaaagataaagtttacaacatccagatccgttatcagaaggaaagtcaagtttacttgttgggaactggactccgagggaaagaggactttctgtctgtgtcagatattattgactacttcaggaaaatgccacttctgctcattgatgggaaaaaccgaggttccagataccagtgcacattaacgcatgctgcagggtacccatagcaagttatagccgagcaaatgaaccgtcctcctgcctctgttgccaacacgagatcaatcagccttggtcaatggacaaacacttaggactgaactgaacccctccccatgaacacaagggttttatcctttcctttaaaaacagtgtttgaaatgaagactgtcaactatcccc

SEQ ID NO: 2611 - protein, 533 aa, Homo sapiens
MALRNVPFRSEVLGWDPDSLADYFKKLNYKDCEKAVKKYHIDGARFLNLTENDIQKFPKLRVPILSKLSQEINKNEERRSIFTRKPQVPRFPEETESHEEDNGGWSSFEEDDYESPNDDQDGEDDGDYESPNEEEEAPVEDDADYEPPPSNDEEALQNSILPAKPFPNSNSMYIDRPPSGKTPQQPPVPPQRPMAALPPPPAGRNHSPLPPPQTNHEEPSRSRNHKTAKLPAPSIDRSTKPPLDRSLAPFDREPFTLGKKPPFSDKPSIPAGRSLGEHLPKIQKPPLPPTTERHERSSPLPGKKPPVPKHGWGPDRRENDEDDVHQRPLPQPALLPMSSNTFPSRSTKPSPMNPLPSSHMPGAFSESNSSFPQSASLPPYFSQGPSNRPPIRAEGRNFPLPLPNKPRPPSPAEEENSLNEEWYVSYITRPEAEAALRKINQDGTFLVRDSSKKTTTNPYVLMVLYKDKVYNIQIRYQKESQVYLLGTGLRGKEDFLSVSDIIDYFRKMPLLLIDGKNRGSRYQCTLTHAAGYP

SEQ ID NO: 2612 - DNA, 404 bp, Homo sapiens
  misc_feature (21)..(21): n is a, c, g, or t
  misc_feature (25)..(25): n is a, c, g, or t
  misc_feature (36)..(37): n is a, c, g, or t
  misc_feature (39)..(39): n is a, c, g, or t
  misc_feature (49)..(49): n is a, c, g, or t
  misc_feature (72)..(72): n is a, c, g, or t
  misc_feature (89)..(89): n is a, c, g, or t
  misc_feature (98)..(98): n is a, c, g, or t
  misc_feature (384)..(384): n is a, c, g, or t
  misc_feature (391)..(391): n is a, c, g, or t
ggcccagaaatagcagcggcngcgnttcccctcggnncngcagagcgancgggcagaggcgagagacgccgncggggccagggccggcnggccccggnaggatgctgctgagccccggcactgcctggctgcgagcacatgatggcgatacgggagctcaaagtgtgccttctcggggacactggggttgggaaatcaagcatcgtgtgtcgatttgtccaggatcactttgaccacaacatcagccctactattggggcatcttttatgaccaaaactgtgccttgtggaaatgaacttcacaagttcctcatctgggacactgctggtcaggaacggtttcattcattggctcccattgtactatcgaggctcagtgcagtnttatcgngtatggatattac

SEQ ID NO: 2613 - DNA, 417 bp, Homo sapiens
tgacaacagtcaaactggtctaacgcaatgtttttcaaactgtagggtaatccattagtgggttgtaaaataaatccagtgcactgaaagcagcgtttttatgaagatgaaacagactgttcagtggtttattctgcttcactaaaagtatctccgtttcttccattttcctctcagctgttacagggtgttatcaattatctctggtaaattggcaggtctgagctcagatcagcaaggcagagaaactccagatggcaaattatcccaactcttctaactcgtaaaagcattaataaaatgccccagggctgaacgcacgctgctttagctccttgcctcgttccttcctcccgggcgcgacgcgaggtgaaaatgatgcgcacgtagattttgtagagcgtattcttgagaatt

SEQ ID NO: 2614 - DNA, 4949 bp, Homo sapiens
cggacagattccagtctgctgttagatgattattcatccaagttgagccccaaaccaaagagagccaagcacagcctactgtctggagaagagaaagaaaatttgcccagtgactacatggtacccattttctcaggacgtcaaaagcatgtcagtggaattactgatacggaagaagaaagaattaaggaagctgctgcttatatagcccagaggaatcttcttgctagtgaggaaggaatcacaacacctaaacagtccacggcatccaagcagaccacggcatctaagcagtccacggcatccaagcagtccacagcatccaagcagtccacggcatccaggcagtccacggcatccaggcagtctgtggtttccaaacaggccacatccgctcttcaacaggaagaaacttctgaaaagaagtcaaggaaagttgtgattcgaggaaaggcagaacgcctgtccctgaggaaaacattagaagaaaccgagacatatcatgccaagctgaatgaagaccatcttctccatgctcctgagtttatcattaaacctcgctcccacacggtttgggagaaggagaatgtaaaattgcattgctccatagcaggatggccagaacctcgtgtcacgtggtataaaaaccaggtgccaataaatgtccatgcaaaccctggaaagtatattattgagagtcgatatggaatgcacactctggagattaatgcatgtgattttgaagatacagctcagtaccgggcctcggcgatgaatgttaaaggagagctttcggcatatgcttcagttgtggtaaaaaggtataagggagagtttgatgagactcgcttccatgctggggcttccaccatgcccctcagctttggtgtgaccccatatggttatgcatcccggtttgagatccactttgatgacaaatttgatgtgtcttttgggagagagggagagacaatgagtctaggctgtcgtgttgtcatcactcctgaaattaaacatttccagccagagatccggtggtacagaaatggagtacctctttctccatcaaaatgggtgcaaacactttggagtggagagcgggcaacgctgacattttcccatctcaacaaagaagatgaaggcctctatacaatccgtgtacggatgggagaatattatgaacaatatagtgcttatgtctttgttcgagatgctgatgcagagattgaaggagccccagctgctcccttggatgtgaagtgcttggaggccaacaaagattatatcatcatctcctggaaacagccagctgtcgatggagggagtcctattctcggatattttattgataagtgtgaggtgggcacagatagctggtcgcagtgcaatgacacacctgtgaagtttgctcgttttcctgtcactggattgatcgaaggtcgttcctatatcttccgagttcgagctgtgaataaaatgggaataggtttcccatctcgagtttccgaggccgtggctgctctggatccggctgagaaagctagactaaagtcgcccctcagcaccctggactggacagtcattgttactgaagaggaaccttcagagggtattgtgcctggccccccgacagacctctctgtcactgaggccacccggagctatgtggtgctcagctggaagccccctggccagcgtggtcatgagggcattatgtactttgtggaaaagtgtgaggcaggaacagaaaactggcagcgagtgaacacggagctccctgtgaagtctccccgctttgctctgtttgacttggccgaggggaaatcctactgtttccgtgtccgctgttctaattctgcaggagttggtgagccctcagaggcaacggaggtgactgtggtaggggacaaacttgatatccccaaggctcctggcaaaatcatcccaagcagaaacacagacacctcagtggtagtttcgtgggaggagtccaaagatgccaaagagctggtcgggtactacatagaggcaaacgttgctggctctggcaagtgggagccctgtaacaacaaccccgtgaaaactcaccgattcacttgtcatggattagtgactggtcagagttatatattccgggtcagagcagtcaatgcagctggacttagtgaatattcccaggattcagaagctattgaagtcaaagctgctattgcaccaccatctccaccctgtgatatcacctgtcttgaaagttttcgtgactcaatggttcttggatggaagcaaccagataagactggaggggcagaaattactggctattatgtgaactatcgcgaggtcattgatggggtaccaggaaaatggagagaagccaatgtcaaggctgtcagagaggaggcatacaagattagcaacttgaaggaaaacatggtgtatcagttccaagtggcagccatgaacatggctgggctgggcgcgccctccgcagtaagcgaatgcttcaaatgtgaagagtggaccatcgccgtcccaggaccaccgcacagtctcaagtgtagtgaagtcaggaaagactcactggttctccagtggaagccgccagtccactccgggcggactccggtcactggttacttcgtggacttgaaggagaaggccaaagaagaccagtggcgagggctcaatgaggcggctattaaaaacgtatacctgaaggttcgaggcctcaaggagggcgtcagctacgtgttccgtgttcgagccataaaccaggcgggagttgggaagccatctgaccttgctggccctgttgtggcagagacccgtccaggaaggaaagaggttgttgtaaatgtggatgatgatggagtcatttcattgaacttcgagtgtgataagatgactccaaagtccgagttctcctggtccaaagattatgtatccactgaggactctccacgattggaagtcgaaagcaagggcaacaagacgaaaatgaccttcaaagaccttgggatggatgacttgggtatttactcttgcgatgtaacagacactgatggaatagcatcaagctacttaatagatgaggaagaattgaaacgtttacttgctctcagccatgaacacaagttcccaactgtcccagttaaatcagagttggcagttgaaattttggagaaaggccaggtccggttttggatgcaggctgagaaactgtctggcaatgccaaagtcaactacatatttaacgagaaggaaatttttgaaggcccgaaatataaaatgcatattgaccgaaacactggcatcatcgaaatgttcatggaaaagctacaggatgaggatgagggaacgtacactttccagcttcaagatggaaaagcaactaaccattctactgttgttctcgttggagatgttttcaaaaagctccagaaagaagctgaattccagcggcaagaatggatcaggaaacaaggtcctcactttgttgagtatttgagctgggaagtgactggtgaatgtaatgtactattgaaatgcaaggtggcaaatattaagaaggagactcatattgtgtggtacaaagatgagagggagatatcagtggatgaaaagcatgactttaaggatggtatatgtaccctgcttataacagagttttccaagaaagatgctgggatttatgaagttatcctgaaagatgaccgaggaaaagataagagcagactgaagcttgtggatgaagcctttaaggaactgatgatggaagtatgcaaaaaaatagctttgtctgctacagacctgaaaatccagagcacagccgagggcatccaactgtactcttttgtaacttactatgtggaggatttgaaagttaactggtcccacaatgggtccgccattaggtactcagacagagttaagaccggggtcactggagagcagatctggctacaaatcaacgagcccaccccgaatgacaaagggaagtatgtcatggagctctttgatggcaaaactggacatcagaagacagtggatctctctggacaagcatacgatgaggcctatgctgaattccagaggttgaaacaagctgccattgccgagaaaaatcgtgcccgggtgttgggaggtctcccagacgtggtcaccatccaggaggggaaggcccttaatctcacttgcaacgtgtggggagacccgcctccggaggtgtcgtggttgaagaacgagaaggccctggctcagacggaccactgcaacctcaagttcgaggctgggaggaccgcgtacttcaccatcaacggtgtgagcaccgctgactcgggcaaatacgggctggttgtgaagaacaagtatggctcggagaccagcgacttcaccgtcagcgtgttcatcccagaggaggaggcgaggatggccgccttggagtccctgaaaggtggcaagaaggccaagtgaccggaggtgcgaggagagcagccggcctgtgtgacttgggtgtgaatggtttgggttaaggatgagacgtccttcatgcttctcctccctattatttctggcttgagggaaataatgtcaggtctttcactcatataaaaaagcaccaactaatgacactttaattgtttttctttatctacaaaattatgtgttaagaaaataccattcatagcatgaagattaggaaacagttttaaggagaagacttgaatgaagttggagggacattgaatgatggtcagagggcagacgaatgtgtcgtggggcggaattgggatttgctgcagctgtgaagccatggccgtgtctcgtgtgttgttacagaggtgatgtgcttttcgacgggccctcgtggcttggaacctcctctgtatgaataaacagttttcacgtctgtcctcttccccgaaaaaaaaaaaaaaaaaaaaaaaaaa

SEQ ID NO: 2615 - protein, 1451 aa, Homo sapiens
MVPIFSGRQKHVSGITDTEEERIKEAAAYIAQRNLLASEEGITTPKQSTASKQTTASKQSTASKQSTASKQSTASRQSTASRQSVVSKQATSALQQEETSEKKSRKVVIRGKAERLSLRKTLEETETYHAKLNEDHLLHAPEFIIKPRSHTVWEKENVKLHCSIAGWPEPRVTWYKNQVPINVHANPGKYIIESRYGMHTLEINACDFEDTAQYRASAMNVKGELSAYASVVVKRYKGEFDETRFHAGASTMPLSFGVTPYGYASRFEIHFDDKFDVSFGREGETMSLGCRVVITPEIKHFQPEIRWYRNGVPLSPSKWVQTLWSGERATLTFSHLNKEDEGLYTIRVRMGEYYEQYSAYVFVRDADAEIEGAPAAPLDVKCLEANKDYIIISWKQPAVDGGSPILGYFIDKCEVGTDSWSQCNDTPVKFARFPVTGLIEGRSYIFRVRAVNKMGIGFPSRVSEAVAALDPAEKARLKSPLSTLDWTVIVTEEEPSEGIVPGPPTDLSVTEATRSYVVLSWKPPGQRGHEGIMYFVEKCEAGTENWQRVNTELPVKSPRFALFDLAEGKSYCFRVRCSNSAGVGEPSEATEVTVVGDKLDIPKAPGKIIPSRNTDTSVVVSWEESKDAKELVGYYIEANVAGSGKWEPCNNNPVKTHRFTCHGLVTGQSYIFRVRAVNAAGLSEYSQDSEAIEVKAAIAPPSPPCDITCLESFRDSMVLGWKQPDKTGGAEITGYYVNYREVIDGVPGKWREANVKAVREEAYKISNLKENMVYQFQVAAMNMAGLGAPSAVSECFKCEEWTIAVPGPPHSLKCSEVRKDSLVLQWKPPVHSGRTPVTGYFVDLKEKAKEDQWRGLNEAAIKNVYLKVRGLKEGVSYVFRVRAINQAGVGKPSDLAGPVVAETRPGRKEVVVNVDDDGVISLNFECDKMTPKSEFSWSKDYVSTEDSPRLEVESKGNKTKMTFKDLGMDDLGIYSCDVTDTDGIASSYLIDEEELKRLLALSHEHKFPTVPVKSELAVEILEKGQVRFWMQAEKLSGNAKVNYIFNEKEIFEGPKYKMHIDRNTGIIEMFMEKLQDEDEGTYTFQLQDGKATNHSTVVLVGDVFKKLQKEAEFQRQEWIRKQGPHFVEYLSWEVTGECNVLLKCKVANIKKETHIVWYKDEREISVDEKHDFKDGICTLLITEFSKKDAGIYEVILKDDRGKDKSRLKLVDEAFKELMMEVCKKIALSATDLKIQSTAEGIQLYSFVTYYVEDLKVNWSHNGSAIRYSDRVKTGVTGEQIWLQINEPTPNDKGKYVMELFDGKTGHQKTVDLSGQAYDEAYAEFQRLKQAAIAEKNRARVLGGLPDVVTIQEGKALNLTCNVWGDPPPEVSWLKNEKALAQTDHCNLKFEAGRTAYFTINGVSTADSGKYGLVVKNKYGSETSDFTVSVFIPEEEARMAALESLKGGKKAK

SEQ ID NO: 2616 - DNA, 566 bp, Homo sapiens
tttttttttttttttttcttttttttggatggtcagtgcattttattgaatcagcacagtacaaaaataaataaaaataagggaaggggaattaaattacagccaaactgagcttcatgactttgtcagattataaaccacacatactcacaaacacactacacatacatacaaaatgagacaaatataaattaatattaacaatacccacagtttggtcaaagaatagctacagaagaaattgcactaaaaaaccaacatacatcacacgtgtgtaattagcagtttcaaatatacagctatgaataattctgagtgaaaaaaatggcacattttcttttcattgcaagtttaactgttggaacaaaactaagttctaataactgcatggaaagaatatatcaaccctccaggtttacaagaaaaagagaaaaaccaaatcctgaactattattcctgtggcttgttctgtgcatgggtgtaattttcacagccatctgttctaagattatttttcttaagacacaaaatgctcctggtttgcatgcacaatatcaccgtaaaag

SEQ ID NO: 2617 - DNA, 1790 bp, Homo sapiens
tactaaccatgctgaccactgttcggaacgggattgaatcacagaaaaacagcaaatggctctctcttacagagtgtctgaacttcaaagcacaattcctgagcacattttgcagagcacctttgttcacgttatctcttctaactggtctggattacagacagaatcaataccagaggaaatgaaacagattgttgaggaacagggaaataaactgcactgggcagctcttctgatactcatggtgataatacccacaattggtggaaatacccttgttattctggctgtttcactggagaagaagctgcagtatgctactaattactttctaatgtccttggcggtggctgatttgctggttggattgtttgtgatgccaattgccctcttgacaataatgtttgaggctatgtggcccctcccacttgttctatgtcctgcctggttatttcttgacgttctcttttcaaccgcatccatcatgcatctctgtgccatttcagtggatcgttacatagccatcaaaaagccaatccaggccaatcaatataactcacgggctacagcattcatcaagattacagtggtgtggttaatttcaataggcattgccattccagtccctattaaagggatagagactgatgtggacaacccaaacaatatcacttgtgtgctgacaaaggaacgttttggcgatttcatgctctttggctcactggctgccttcttcacacctcttgcaattatgattgtcacctactttctcactatccatgctttacagaagaaggcttacttagtcaaaaacaagccacctcaacgcctaacatggttgactgtgtctacagttttccaaagggatgaaacaccttgctcgtcaccggaaaaggtggcaatgctggatggttctcgaaaggacaaggctctgcccaactcaggtgatgaaacacttatgcgaagaacatccacaattgggaaaaagtcagtgcagaccatttccaacgaacagagagcctcaaaggtcctagggattgtgtttttcctctttttgcttatgtggtgtcccttctttattacaaatataactttagttttatgtgattcctgtaaccaaactactctccaaatgctcctggagatatttgtgtggataggctatgtttcctcaggagtgaatcctttggtctacaccctcttcaataagacatttcgggatgcatttggccgatatatcacctgcaattaccgggccacaaagtcagtaaaaactctcagaaaacgctccagtaagatctacttccggaatccaatggcagagaactctaagtttttcaagaaacatggaattcgaaatgggattaaccctgccatgtaccagagtccaatgaggctccgaagttcaaccattcagtcttcatcaatcattctactagatacgcttctcctcactgaaaatgaaggtgacaaaactgaagagcaagttagttatgtatagcagaactggcagttgtcatcaaacataatgatgagtaagatgatgaatgagatgtaaatgtgcccagaatatattatataaagaattttatgtcatatatcaaatcatctctttaacctaagatgtaagtattaagaatatctaattttcctaatttggacaagattattccatgaggaaaataattttatatagctacaaatgaaaacaatccagcactctggttaaattttaaggtattcgaatgaaataaagtcaaatcaataaatttcaggctttaaaaaaaaaa

SEQ ID NO: 2618 - protein, 481 aa, Homo sapiens
MALSYRVSELQSTIPEHILQSTFVHVISSNWSGLQTESIPEEMKQIVEEQGNKLHWAALLILMVIIPTIGGNTLVILAVSLEKKLQYATNYFLMSLAVADLLVGLFVMPIALLTIMFEAMWPLPLVLCPAWLFLDVLFSTASIMHLCAISVDRYIAIKKPIQANQYNSRATAFIKITVVWLISIGIAIPVPIKGIETDVDNPNNITCVLTKERFGDFMLFGSLAAFFTPLAIMIVTYFLTIHALQKKAYLVKNKPPQRLTWLTVSTVFQRDETPCSSPEKVAMLDGSRKDKALPNSGDETLMRRTSTIGKKSVQTISNEQRASKVLGIVFFLFLLMWCPFFITNITLVLCDSCNQTTLQMLLEIFVWIGYVSSGVNPLVYTLFNKTFRDAFGRYITCNYRATKSVKTLRKRSSKIYFRNPMAENSKFFKKHGIRNGINPAMYQSPMRLRSSTIQSSSIILLDTLLLTENEGDKTEEQVSYV

SEQ ID NO: 2619 - DNA, 420 bp, Homo sapiens
ttttttttttttttaacaaaaataatttttattataattttcattgaaaaaatacagaaaatcaataaaaatgagcagaggtaaatagtcaatattaaaacacttcaagcaaaagtaaatatacagaaaacagtaaaagtgaatgtaagtccatagtcaatattaaacagttcaataaaaaaattaaactattgatccaacctaggcatttaggccacatacggaaaggaggtgcaactagacattcttgaagcagtcttttctttctcaaaggtgctgcttagatccaaggtgctgttttagactaacatctgaaggaaggagagggcagaggagggagagaaaagggaacaggagagaaaatagaaagaggggaaggaagaaaaactaatatttcatgagcttttaaaaaatatgatg

SEQ ID NO: 2620 - DNA, 569 bp, Homo sapiens
tttttttttttttttttttttagccaagacttgagtttatttattggattcatatctcccttcttaaaaggacatttacaaactcgatttcaaaaataaaagaaattctttatgacaaatttcactttttaatttcaatattacaggtatgttcttttgtcataaattatcagttgaaactgttccagtgaaatctggtatcaattaatttaacactttatataagaaataaaacatttattttcaagtcttacatatattacttaaaatagatacaaaattcagtttttaatttttaaattggattgctatttcaagctaccttaaagtaaataccttagtggaaaaaaaagtttagattttcctgaatgacttaaaacaaatactcttaataacagtccaccatatggtattcatttagcaattaggtaggtcaaatgagttatcaaattatcctgaaaaggaaaaagtaataattgtatgggcaagtaaaataaatttcgagaccggtataatatggcacctagaagccgattccaggaacgtggttggtatgaaattctaccatg

SEQ ID NO: 2621 - DNA, 79528 bp, Homo sapiens
ctccaggagctcagctccctgaaaggaaaatgatgccaagccaggcgcagtggctcacacctttaatcttagcaatttgggaggctgaggcaggtggatcacttgaggtcagaagttcaagaccagcctggccaatatggtgaaaccccatctctactaaaaatacaaaacttaggccgggcacagtggctcacacctgtaatcccagcactttgggaggccgacgtgggcggatcacctgaggtcgggagttcaagaccagcctgaccaacatggtgaaaccccatctctactaaaaatacaaaaattagccaggcgtggtggtgcatgcctgtaatcccagctacttgggaggctgaggcaggagaatcgcttgaacctgggaggcagaggttgcagtgagccgcgatcgagattgcgccattgcactccagcctggatgacagatccagactctatctcaaaaaaaaaaaaaaaaaaaaaaaaagaagaggaaagaaagaaaaaggaaatgacgccagagtgggcaggtccaacaggactttcagcccaaaccacacatggcacctgtgtccctcaccaatgcctggcctctggcactgagcttgggtcacctgtccacatctacttcccatggagtgagttatttcctttgaggcatgagtgtcctctctgccagctggacaggactgtcctgatgggtcagatagcagctaatcctatcaggagagaggaactggggcccaatctcatttctcttggcggtccccagactagccacaaatttgcccacctcctgccaggttaagagaaaggcagttttgagagttgattaagagcatggagtttcctgtaatcccagaactttgggaggccaagctgggaggaccacttgaggccaggagttcaagaccagcctgggcaatatagtgaggccccatctctacagaaattttaaaaattagctgaacgtggtgatgcgcacctgtggtcccagctacttgggaggctgaagcaggaggatcacttgagcccaggagttcaaggttgcagtgagccatgatttgtgtttcagccttagtgacagagtgacaccctgtgtcacaaacaaataaacaacaacaacaacaaaaggccaggcttggtggttcacacttgtaatctcagcactttgggagatagaggcgggtggatcacctgaggtgaggagttcggaaccagcctggccaatatggtgaaaccccgtctctactaaaaatacaaaaattagctgggcgtggtggtgggtgcctgtaatcccagctacttgggaggctgagacaggaggatcacttgaacgtgggaagtggaggttgcagtgggctgagactgcaccattgtactccagcctgggcaacaagagcgaaactccgtctccaaaaaaaaaaaaacaaaacaaaaaaaagagcatggaattggactgctttaggtaagttccttccccacctgtcaaatgaagtgataacaacagcaaaagaccgaatgttaatacctacggatagatcacttagcacagtgtgggcagatagtaactgctcaataaatgggaactactgttacatacctgtatgtagttctctaatatccctattttataaaaatgaggtccccccatatttttcttagcttccttttgtcaattaatatatcatagacatttttccaggtctgcacatgtagcctcctctatgtgagagccgcatggccttccaaaggacgccgtccatgcaagaggctaaactatgtctgtgggttcaaaaccctcagtctgtgccatggtgctttaaaacttggaaatggctcatacctgtaatcccaacactttgggaggccaaggtgggaggatcgcttgagcccaagagtttgagacaaacctgggcaacatgtgaaacactgtctctacagaaaataccaaaattagtatttttggtgtggtggcatgtgcctgtagtcccagctatttgggaggctgaggtaagaggatcgattgagccctggagttcaaagctgcaatagccataattgcactccagcctgggctacagagaagacctgtcttaagaaacacaaacaggctgggcgcggtggctcacgcctgtaatcccagcactttgggaggcccaggcgaggggatcacgaggtcagtagatcgagaccatcttgcactccagcctgggagacagcgagactccatctcagaaaaaaaaaaaaaaagaaaaagaaacacaaacaaaaacaaacttggaaattagttaaggtttagttcagttagatcagttaaagtttaactgttaaactgtcacctgcatttttatttctttgtctggaaatgtgtgtttgtctttctgttcatttgacttctaacccacatgggatgggttttcctaacttgggagaagcaggtgagaggtcagcctccacagggtgaggctgtcaaggaggaggggggaaccaggacagccagtggccagggcaggacaaaagaaggccggccatctttgttttgttttgttttgttttgttttgttttgttttgttttgttacgaggcagagtcttgctgtgcctcacccaggctggagtgcaataatgagatcacagctcattgcagcctccatctcccgggttcaagtgattctcctatctcagtttcccgagtagctggggctacaggcgtgcgtgtgccatcacacctggctaattttgtatttttaaaaattattttattttattttattttattttattttgaaacggagtctcgctctgtcacccagtctggagttcagtggcacgatctcggctcagtgcaagctccgcctcccgggttcatgccattctcctgcctcagcctcctgagtagctgggactataaccgcctgccacgacgcccagctaattgttttgtatttttagtagagacggggtttcaccttgttagccaggatggtctcgatctactgacctcgtgatccacccgtcttagcctcccaaagtgctgggattacaggcgtgagccaccgcgcccggcctattttgtatatttttagtagagatggggtttcaccatgtctgctgggctggtctcgaactcctgacctcaggtgatcgtctaccttggtctcccaaagtgctgggattacaggcgtgagccactgtgcccgcctttttttttttcttctttttgttgttgttggttttatttatttatttggacagagtctcactctgttgtctgggctggagtgcagtggtgcaatctcagctcactgtaacctctgcctcccaggttcaaacgattctcctgcctcagcttccagggtagctgggattacaggcgcccaccaccacacccagcttatttttgtgtttttggtagagacagggtttcaccatattgaccaagctggtctcaaactcctgatctcaagtgatctgcccacctcggcctcccaaagtgctgggattacaggcgtgagccaccgtgccgggccatgcgccatctttgtttctgttccagatgcctgggagtccttccatctcttccctcaccccccacagccaaccctttagcaaggacttttcctcaatatttctcatatctgcctcttccttccacccccacggccaccactttaattcagaacttggatcactgagatggcccctaatggtttcactgccttcttctgcccttccctagtccattgtccatatggcaacccggggcaggtgcagtttggaaaggaggtggcactacctggtaatgctgaagctgtgtatacttctagctccttcccctttgcaccagggcacttgcagtaggaaagtcacagcgacattgtctgcaaagcaagaaactggaaatgtccaggcacagcagctcacgcctataatcgcagcactctgggaggccaaggtgggtggatcacttgagcccaggagtttgagaccagcctgggcaacatagtgagacgcccatctctataaaaaaagaagaaagtggaaacaactcaaatctccatcaacaacagtggattcttttcctgttgctgctctaaccagttaccccaaactcagcggctgaaacacacacatttattatcttacagagctggaggtcaggagtccaaaatgattttactgaactaaaatcaacaagtcagcaggtatgcatttcttctgcaggctctaagggagaatctggtttttgcctttttttctggctttcagaagctgcctgctttcctgggttcatgggtccttccatcctaacgtcagcagtagtgggcaggcctttctcaggacactgtctctgattctgactcttctgcctccctctctcccatttaaggatccttggccgggcacggtggctcacgcctgtaatcccagcagtttgggaggctgaggcaggcagatcacctgaggtcaggagttcgagaccagcctgaccaacatggagaaaccccgtctcttctaaaaatataaaattagtcagacgtggtggcgcatgcctgtaatcccagctactcgggaggctgaggcaggggaatagcttgaacccaggagatggaggttgcagtgagctgaaattgtgccattgcactccagcctgggcaacaagagcaaaactccgtctcaaaaaaaaaaaaaaaattccttgtgattccactgggcccaccaggataatccaggatcatctcccatctccaggccgggtgattagcaacctttgttctcccttgccgttaaaggaacatttttgaaagtttcagagattaggatgtggtcatatttacaggccatttttctgcctccccacacagttacccacacagttacccatcgcataatagggctggggctgggggatgtgagcagaatccctccatacccaacatataaccacgcgaggcccccagctgagggcccggtgtgttgggcagagagctgaaggcaggggaacactgtccagtcgctgcacagcagtgtgaggaaaggaagaggagtcgtctgtaaaaacccattgactgtgctcatttcacactgcgtgcctctatcaaaacatctctagccaggcgcggtggctcatgcctgtaatcccagcattttgcaagggtgaggcaagcagaccacctgaggtcaggagttcgagaccagtctggccaacatggcaaaaccccgtctctactaaaaatcctaaaattagccagggcctggtggcgcgtgcctgtaatcccagctgctcaggaggctgaggcaggagaatcgcttgacccgggaggcagaggttgcagtgagccgagatcatgccactgccctctagcctgggcaacagagcaagactccatctcaaaaacaaaacaaaacaaaacaaaatctcatgtatcccatacatatatacatctattatatacccacaaaaattaaaattaaaaaaaagaaaaaaacaaaaaatccccattgactgtactctctgttatattcctggggccctcaaatgttgattacttttcagttttgagaatctaagtgacacctagcctggacaggaggaggggagagcccctgtttctggcaggtttctaagaggaatcacaggactgggctgagaggaggggacccagcacccaggctagagcagccacccctccatccctgagtgaggggccatctgctgccccccgcctctccctcgcccccacccccgcctctatctcaagccttgctcctttcccctcgggtgcctccacctgccgtttgccccgtcctcacagagtgtgaatcttgactcaaagtgtggacgtcaaagccccttggaagtgggaaaggcccaggcgggtgcagattgtttatttgcttgctgggtgctgggtgtgaaaggaacagacacgtgcttgcctcgtggggctcagtctctagtggggaagatgggcactgctgtcattgtaaagtgtgattttgtgaaaagtgctaagaaggaaaggacaggggctatgagagggggttgtggagtcctaattaggaaggaggagttgaactggtgagattgagggaaagcaaaaagcgaaagcaggtaagctctaagtgtgcctttcttcatgctccagaacacatgccctcctgcacaaataattcacaatcttcctgcaaccagccatcaccagacgctcagctgacagaaaattgcaaattagctcactgcaacctcggcactatcagtactgcgtaaagccctctccagcatacagcacgagcaccatcctgtcccgtccctagcaagcctctgtctccttgcagacagccccttctctgctgtgctgcctgttgcaaatttgcaacgcattttctttttctttttttctttctttttttgttttttgagacggagtctcgctctgtcgcccaggctggagtgcagtggcgcgatctcgcctcactgcaagctccgcctcccgggttcacgccattctcttgcctcagcctcccaagtagctgggactacaggtacgtgccaccactcccggctaatttttttgtatttttaatagagatggggtttcactgtgttagccaggatggtcttgatctcctgacctcgtgatccacctgcctcagcctcccaaagtgctgggattacaggcgtgagccaccgtacccggccttttctattttttttttttttttgagacaagttttcaccgtgtcacccaggctggagtgcaatggcgcaatcttgactcactgcaatctctgcctcccagactcaagggattctcctgcctcagcctcccaagtaaatgggactacaagcatgtgccaccacgcccggctaatttctgtatttttagtagagatggagtttgccatgttggccaggctggtgttgaactcctgacctcaggtgatctgtacgcctcagcctcccaaagtgctgggattacaggcgtgagccatcactcccggctgcaacatattttcataccttctctaataaatgtgcctttctttacctataactgtcttggtaaattcttcttactcctgggctactggcctcagatagttgccgctcacctgagacaggggtgacaagacggcttattcatagaaagcataatgaccaaattagaagaactgggatatccatcaccttaaacatttatcttttctttatgctgggagcatgcaaattattctcctgtagctatttttgaagtatacagtgggttatggttaactgcagtcaccctactgatctatggaacactatgtcttatttcttctagctaactgtatattgtacccattgatcagcttctcttcttcctcccctccttgctatccttcctggcctctggtaaccaccaatttactctccatctttgtgagatccacttttttttttttttttgagtcggggttttttagtagagacggggtttcaccatgtgagccaggatggtctccatctcctgaccgcgtgatccgcccatctcggcctcccaaagtgttgggattacaggcgtaagccaccacgcccagcctttttttttttttttttttgagacggaattttactcgttacccaggctggagtgcaatggcacgatctcagctcaccacaacctccgcctcccgggttcaagcaattctcctgcctcagcctcccaagtagctgggattacaggcatgcgccaccacgcccagctaattttgtatttttagtagagacggggtttctccatgttggtcagactggtctcgaactcccgacctcaggtgatcctcccgcctcggcctcccaaagtgttgggattagaggtgtgagccactgcgccaggccgagatcccccttttttttttttttttttttgagatgaagtctcgctctgttgcccaggctggagagtgcaatggcgcaatctgggctcaccgcaacctccacctcctgggttcaagtgattcttctgcctcagcctcctgagtaactggaattacaggcgcctggcaccacgcccggctaatttttgtatttttaggagagatggggtttcaccacggtgaccaggctggcaaagatccacttttttagtgttcatgtatgagtgaaaacatgcaatatttgtctttctctgcctggcttatttcagttaatatgatgaccttcagttccatctgtgttgttgcaaatgacaggatttccttcttattggtggctgaataatattccctttgtttatataccacattttcttcatccattcatccattgatgtgcgcttgggttgactccatattttggctattgtgaatggtgctgcaattaccatgggagtgcagatatctcttcaatatgctgatctccttccttttggatatataccgagtagtgggattcatctgaaccattttttttttagactagtcaagttcagtagtgagaagggagcaaaaagtagaacaaggggccaggcgtggtggctcatgcctgtaatcccagcactttgggaggctgaggtgggtggatcacttgaggtcaggagtttgagaccagcctggccaacatagtgaaaccccgttccactaaaaatacaaaaattagctgggcgtggtggtgggagcctctaatcccagctactcgggaggctgaggcatgagaattgcctgaacccaggaggcagaggttgcagtgaaccgagatcgcggcactgcactccagcctgggtgacagagtgagactccatctcaaaaaaaaaaaaaaaagttagccgggcgtggtggcgcacacctgtaaccccagctactcaggaggctgaggcaggagaaccgcttgaatccaggaggcggagattgcagcaaactgagatcacggcactgcactccagcctgggcaacagagtgagactccgtctcaaaaaacaacaacgaacaacaaaaaatacaattgcaaaccaccaccatttgacactgcctatatccacccccaaccctgctccagttgtttctttgcaattgccactttccagcatactatataatttacttttttttttttttttgagatggagttttgttcttgtcgcccaggctggagtgcaatggcgtggtctcagctcattgcaacctccgcctccctagttcaaacgattctcctgcctcattctcccaagtagctaggattacaggggccccccaccacgcccggctaatttttgtattttcagtaaagacagggtttcaccatgttggccaggctggtcgcaaactcctgacctcaggtgatccacccacttcggcctcccaaagtgccgggattacaggcgtgagccaccgcacctggcctaatttacttctttatgtagtctattgtgtatctatcttttccagggaacctcagctccacaagggcagggctctcttgtcactttggtttatggccatatcacagagcccatcccagtgcctggcacatattaaggaatgcattaggattccaaaaccagccaggagcggtggctcatgcctgtaatcccagcactttgggaggccgaggcgagtggatcacgaggataggagttcaagaccagtccggccaagatggtgaaaccccgtctctactaaaaatacaaaaaattagttgggcgtggttgtggacacctgtaatcctatctattcgggaggctgaggcagagaattgcttgaacccgggaggcagaggttgcagtgagccgagatcgcgccactgcactctggcctgggcgacagagcaagacgccatctcaaaaaaaaaaaaaaaaaaaaaaaaagattacaaagcccagaatgccacaagaccacaggtggtgcagtgaacagggcattgccttgagagtctatcatccctgggcaagtcattaaacataggggtgggggtgggagcctcctgtctgtaacgtggaggtgtcacgtgccaagggctcaggcacacgcgcgcgcacgcacaaacacacccattagtaaggacacgacccctggcattctaatgcgatttatacttttccatgaaggaattcatttccccctctcactaaccccagagacaggtagagccgacaggtggaagaactgaggcccgagagagacagcgggggaccctccccgcgccacggcacagcagctgtccgaccccctcctcacgcccggggggcgcgacggctgccgagggtcgcgggcagggggcgcggcgccggggactacatttcccaggagcagttgccgcggttccgccgttcctggggtttcaagagcctcgcgttaaagggggcgggggaggttgcgcagtccgccagctggaagatggctctgcgcccggtggggacccgagagccgcctgcctgggtgcccaggcggggtccggctgcagtgaagaagccccccagctctgcagtgtccctgaggggaggcgaggcgaggcgaggcgaggcgaggccaagccaattggaggccgtctttcctcgtcttgcccgcctcggcttcggcctctgcgcccaagccccagggaaccccctcccttcccctccaactccccggaacaggggaaggggcggtgaacctcgccgcctggcgggagaaggggtgtccactagctggaagcccctgcaacccgaggcaacccctttccccaattctggcttcagttccgggaatttacaggtcgctgggatgggcggggagaagggacaggagagatacaaaatgaaatgaacgcccaggtgtcagggagctgagccttacagtaccccgcccccaatccatccttctaagtcccgggcctccgcggtaaaataggggtgatggggatagtgatcaaaggcaggaggcgcaaaggatccagaaaccggtggggagcactgtgcaaactgtaaagcgctgtgcaaataaaattattgatcgtcgtgtcattggattcatccagtctttaagacatgcacggatctggggcgggggatggggtgacatggttctgggctctcagggtggaacatctcggatacggggagggggggctatttgggtgcgtattaacccaaccaggtcttaatgggaacccgagttgtctttgaaaataaccaaaacaaagccaccagaatgttgtgttttcaaatgacgaaacttaagagaaattgacaccatcaaaagacgaaccttgaccttttgaactaacctgaccccccattgcttcccttccccgcctgtgccacggagataagcccagagagaaggcatctgacaccgagtcttgcgctccccctcccccttcctcccctaatcatttggattaatccatcccttggcgtgcgggggaaacccattaatttgtcctggcttcagagactcccaggtccagtaggagccctcccacacccacgcagctacgatcccgtccccaacatcaaaaccctcgaacccctcccctttacccctccccagtagcccactgtgtctgcaaacagctcttggaccataccgggatgcgttcatcattttgaccagcaacaaactcccactcccagggtattgtttaagtgaacagtgaccggcctctatgcttagggaataaaagcggggttgtgggagaggggcccagggagcaaacgtcgcagaatctcagcccagggccgctgccaagcggacccggcacgtgagtaggaggtcggccgcagacaaggggtcctagggtctctgaggtctctcctgctggcctctgggcccctaaagcccctcgagcttcagaactccctacagacagtggcgccccgtgtccgcctcgtctacacctgccaagcagcacgggaaaatctgtgtgcattttaacaaagacatcgcatcttcccagcaaaatggcggtggtcgcggccacggctctctaaacaactccacactttccgaggacaggtcacaacccaagggacataaccccctcctcgacctctaccctagcgccccgctttcccaagtccccaaagcactcagggcctctcctcattacaggggccccccggaccgtccctggttagagcttctggggcagcttctccattgtggaccgccctcccccgcccccacattgccttcaaggagccttgggacggggactgaacccccaggctgggcctcacggatggggggcagcgagttctgtctctgacaccccaaaacttccaggctaagagaagcacacaaatgaattcccgattagggtatatgggagatgtaggggtctttgaggagaagaggccacccgggaggccctcctcatctctcagagggtccgggcagcactgggggttcggcctcaggagggaacctcaaggcagaggtcggggggcgcgctgggggagagacggcagaggagggggaagggacaaagtttgaaagtacccttccaactctttcagggaaagtttccttgggggccccatggacagagggggtagaggtgtggagggaccggtggcggggtgacccccgagaggtgaccggaccccgggggagcgacccctcccccctgtcccggctcggcccggctgggagtcgcccagctcggggccgcgtgtgttagttggggccgctttccggcagctccaccgggctaggggaccccgcagcgggccgggagcagagcccccggtagcctcaggggagagctttgctacggggggtttcccgcaccgaggctccctagccccgcagagccagccccccgcaaaggggaaatgtgccggcacaccagcggtcctcggcgccgtttggggtgcgtggcgggcgcggggggcggcggccgggccagcgggccgcccggcggggaagcccagggagccaggcagcggcccagggcggcggcggggagcaggaaggcccgggccggggggaaaggtcggatttgctcggcggaagaaacacagatggcggcggcgcagcgccattccgggccgggagcaggcagccagcagccctgtcctcaccgcggtccgcccgccgccgctaaatacccggatgcgccgcccaagcgccagacgcggagctgggaaaagggaggcagaggaggcggaggcagaggcagaggcagaggcagagcccgagcccggtgccgagaccaagcgacagaccggcggggctgggcctcgcaaagccggctcggcgagctctcccgacacccgagccggggaggaaaagcagcgactcctcgctcgcatccccgggagccgcactccagactggcccggtagtcaggggctcaggagcagatcccgaggcaggctttgctcagcctccgacgagggctggccctttggaaggcgccttcaacagccggaccagacaggccaccatgaccgagaattccacgtccgcccctgcggccaagcccaagcgggccaaggcctccaagaagtccacagaccaccccaagtattcagacatgatcgtggctgccatccaggccgagaagaaccgcgctggctcctcgcgccagtccattcagaagtatatcaagagccactacaaggtgggtgagaacgctgactcgcagatcaagttgtccatcaagcgcctggtcaccaccggtgtcctcaagcagaccaaaggggtgggggcctcggggtccttccggctagccaagagcgacgaacccaagaagtcagtggccttcaagaagaccaagaaggaaatcaagaaggtagccacgccaaagaaggcatccaagcccaagaaggctgcctccaaagccccaaccaagaaacccaaagccaccccggtcaagaaggccaagaagaagctggctgccacgcccaagaaagccaaaaaacccaagactgtcaaagccaagccggtcaaggcatccaagcccaaaaaggccaaaccagtgaaacccaaagcaaagtccagtgccaagagggccggcaagaagaagtgacaatgaagtcttttcttgcggacactccctcctgtctcctattttctgtaaataattttctccttttttctctcttgatgctcaccaccaccttttgcccccttctgttctgactttataagagacaggatttggattcttcagaaattacagaataattcatttttccttaaccagttgtgcaaggacagcaacaaccaatctaatgatgagaatgtacttatattttgttttgctattaacctacttacggggttagggatttgcggggggggcttgtgtgttttgttggcttgtttgccatgaaggtagatgtgggtggggagaagacacaaggcagtttgttctggctagatgagagggaacccaggaattgtgaggttagcaggaatatctttagggtgagtgagttttctttgagttgggcacccgttgtgagagtttcagaacctttggccagcaggagagaggtggtagggagcagccagccggcaaaggaaggagggggaaaaaaaccgccaccgggctgacttccacctcccagtggtgagcagtgggggcccaaacccagtttccttctcatttttgttagtttgcgctttcggcctccctattttcttagggaaggggagtggggtccaagtgacagctggatgggagaagccatagtttctcccagtcagctaggatgtagccattgggggatctttgtggcttcagcaaattctcttgttaaaccggagtgaaaacttcaggggaagggtggggagtcagccaagtgcctcagtgtgccctgttgaaacttaggtttttccacgcaatcgatggattgtgtcctaggaagacttttcttttcctctggatttttgttcctcctgtacaagaggtgtctttgcttggtttggtggggctgcggccacttaaaacctcccgatctctttttgagtcctttattataagtagttgtagctgcgggagggggagggggagtgggcgggcagtggatagtaagacttactgcagtcgatttgggatttgctaagtagttttacagagctagatctgtgtgcatgtgtgtgtttgtgtatatatacatatctagggctagtacttagtttcacacccgggagctgggagaaaaaacctgtacagttgtctttctcttatttttaataaaatagaaaaatcgcgcacttgcgcgtcccccccccacccccttttttaaacaagtgttacttgtgccgggaaaattttgctgtctttgtaattttaaaactttaaaataaattggaaaagggagaaactgagcggtgtatttttcctcactttgaagactggagaatgaatgcggagcggttaggcgggcaggcagtggggacatctggggcgtttgcacctgagaatggcgggggagggttcaggagctggacagaagccaggaatccttagtcccggaggctgcggaacgtgccttagccggcttctaggcttctgcctttggggtccagagggtaccccatttccggccgagaggtgagtacgtgggaatgcggtggggagtctggtgggcttggccctgacgcgacttcctccgcccccttccctcccctctgccatccggacttcggcagtctcaacttacaagtcaagcctctcggtccctggcggatcccgccaggccccgcccacccgtcctaggcccgcctccccgcctttttaagcgagcccccctagctccgattggctgctggagcccggcccccggccacgcgaccaggctgcgtccgcgatgcgcacggctcccaggcaggcaggcgcgctcgggcgaggtaggagcgatgtggcctgggaacgcctggcgcgccgcactcttctgggtgccccgcggccgccgcgcacagtcagcgctggcccagctgcgtggcattctggagggggagctggaaggcatccgcggagctggcacttggaagagtgagcgggtcatcacgtcccgtcaggggccgcacatccgcgtggacggcgtctccggaggtaacgctccgttccgggagtcgttccaagacctttcccgagcttgcgctggaatggaggtcctggaggtgggggtgggcggctcctacactcttagctactgttccccttcgcatctctcagggcgactttatggcttcctaatattgactcttgcctggttaaacccttttgacggagggaggcgatttgcccagcaagaaaacccgcatttcttgagcggctcctttgtgaaggtctctaccaattgttgctgcacgtgaactcctgctaacttctagacgcaggaatgactaattccactttacaaacgaagaggctgaaatccacagatgtgaaatggcttgcccaaaagcccccagctagctgcaggcagcgctggaatattggagctggaacattgcctgactggccagagaggacagcttgctgggtaaactcatagcaagcaaggggtcccagggctgccacagaaatcacatgatgagttggccctgccaggtctccctcatttctttctttccttttttttttctgagatggagtctcgtcttgctctgtcgcccaggctggagtgcagtggcgagatctcggttcactgcaacctctgcctcccgggttcaagcgattttcatgcctcagcctcccaagtagctgggactacaggcacgtgccagcacacccggctaatttttgtatttttagtggagactgggtttcaccatgttggccaggctggtctcgaactcctgacctcaagtgatcctcccgcctcagcctcccaaagtgttgggattacaggcgtgagccaccactcccagccctccctcatttcactctaaccagtggttacacctgacttattcgtgtcaggcctcaggtgagtggtaatcatcaacaagctcccaaagctgccttctgcccaggaaataggcatagaacccttggtgctgttgcactcatttgtaaaacagaggtcccaggtaatcccttctctccctcaggggaagcttagagccggtcaaaagatgggaaattaggagacccaagttctcatcctgtttttgcctttcccaggctgtgtgaactttcccctctggctgtttgctcctaaggtcagctgtgttcactctgggctttagaattcggggactggtatctcaggcacctacctttgggggtgtgattctggcagcaaagtaaactgtggagttccaggactgcagcaggcgtctgatccagccctcttctttaaccctcaaggaaaccaaggggtcagataaggagtcagtggtggtcttcaggcacaggagaagcctgtgaggaagggctgagttcctccttgggtagaatgtgattcaaagccagagtttaggctgggcacagtggcttgtgcctgaaatcgtagcactttgggaggccaaggcaggaggattgcttgaggctaggagttcgagaccagcacggacaacataatgagaccccatctctacaaaaaataaaaaaatttaatcgggcatggtggcacgcacctgtagtcccagctactcaggaggttaagtgggaggattgcttgagcctgggaggttggggctacagtgaaccatgattgcaccactgtactccaacctgggcgacagagctagaccctgtctcaaaaaaaaaaaagtttaaacttcttgctcttcaagatgtgtagcactgacgctccttctgtagctgttgaatttggtgcctcctcaatggtgactccaggtctgtttcctttctggaccatttccccagggcctggcactgtcatctttccaggcctgcccttgccccacctgagctgctgtatccatctcctctccttcacctcaggaatccttaacttctgtgccaacaactacctgggcctgagcagccaccctgaggtgatccaggcaggtctgcaggctctggaggagtttggagctggcctcagctctgtccgctttatctgtggaacccaggtacacagtgagtggtggggggttgtggggactgaccccagctgcctgcttcccacagtcagcaaggctggtttagccagctcagctcagccacagccctgggcctactgttggcctcagagctgtgcagcagaaaggctgagtgcaggcctctgttttgctgaaaagctttggccaaggaactttatatatatattttttctttttgagacagagtcttgctctgtcacccaggctggagtgcagtggcacaatcttggctccctgtaaccttcgcctaccagactcaagggattctccatgcctcagcctcctgagtagctgcgattacaggcatgctaccacacccagctaattttttttttttttttttttttgagatggagtctcgctctgtcgctgaggctggagtgcggtggcatgatcttggctactgcaagctgcgcctcccaggttcacgccattctcctgcctcaacctcccgagtagctgggactacaggcgcctaccaccactcccggctaattttttgtatttttagtagagacggggtttcactgtgttagccaggatggtctcgatctcctgacctcgtgatccacccaccttggcctcccaaagtgctgggattacaggcgtgagccaccgcactcggcctaatttttatatgtttagtagagatggggtttcaccatgttggccaggctggtcttgaactcctggcctcaagtgatctcctccaccttggccttccaaagtggaaactgcctttttgagcattcattttcccacctgcaaaacagagtccctcacacctgaccttctataagaaaagaggagtaggcggcaggaactgagactaagggctctggggctgttctgacgggagcacagttgccagtgctgccctttagtgtccctgttcctgtgggcaagtatcttaacttttctctgtctcaattacttcatagggaaaatgaagataatagcacttaataggatcattacaaattaaagacttaatacatgtaatgcttagaataggccgggcgcagtggctcatgcctgtaatcccagcactttgggaggctgatgcaggcggatcacctgaggtcaggagttcaagaccagcctggccaacatggcgaaaccctttctctacaaaaatataaaaattagctggcatgatggtgggtgcctgtaatcgcagccacttgggaggctgaggcaggagaatcgcttgaacctaggaggtggaggttgcagtgagctgagatcacgccactgcactccagcctgagcaacagagtgagactctgtctcaaaaaaaaaaaaaaaaaaaaaaagcatagaacagcctggcacatagtactgctcaatgaatgttggctattatttattttccaaatgttacaaaataaatttatataagtatgaaacttaaatagtacttattatgtgccaggaattcttttaagaaaattacaactattggccaggcgtggtggcttatgcctgtaatccaggcactttgggaggccgaggtgggtggattactgagttcaagaccagcctggccaacatggtgaaaccctgtctgtgctaaaaatacaaaaattagctggccgggctcgcttgaacccatgaggcaggggttgcagtgagccacgacggtgcgaccacactccagcctgggtgacagagggaaactctgtctcaaaaaaaaaaaaaaaagaacattacaagtattaactcattaatcctaagtgatagttgctattcttattcccgctattgagatgaggacactgagatccagagaggttaagtgacttgcccagaggcacacagcctgttgtgggatttgaaccctggctcaagagtccatgctggctgggcatggtagttcacacctgtaatcccaatacttttggagcccaaagcagaaggatcacttgatgcctggagtttgagaccagcctgggcaacatagcaagaccctctctctaaaaaaaaaaaaatgtttttaattagctgggtgtggtggtgcgcacctgtagtcccagctactagggaggggaggctgagttgggaggatcacttgagcccaggagttcaaggctacagtaagctatggtctcactactgcactccagcctgagtgacagagaatccctgtctcatttgccaaaaaaaagaaagagtctgtgctcctgactacttgtgattatcattaactgccctctcagaaaggtgagagtgaaatgaatgtcagaggcagaactcctgactcgcatccagtcacttcccagcaaagccctcacccagacccaacagttttcaaatttacaaattagaggcccaggtgaacccagaattacctctgtgatctttttcttcaccattaggcgaccaaaaaagacactcagtatggtgttaggaagacacatctttcttctccacgagtgcccgtaattccaccattagactgccactgtaaaaccaaagtctgcccagggagggaacctaacaggtccccagttcctcagtgggaactgtctgtcagattcctggcagctctgggatagcccatgtgtggcagaaagtaaggagactgaggctgcaggctttctgggttgggtctctgtggtcctccaagcctctgtcccctcgaacttgtcccacatgaccccacaggcatcaacacgtgtctcactcattttcttcagagcatccacaagaatctagaagcaaaaatagcccgcttccaccagcgggaggatgccatcctctatcccagctgttatgacgccaacgccggcctctttgaggtgtgtggaagctgtcctgcgggtgagggttggtggggcctgttaggctgaggaaggcttgggtgtgggcagtcgggagaacctagcaggattcagtgccatgcctagaggctccagagcccgcttctggaggtcaaggttgggccaggtaggtgctccaggaggaatcctggggcttgcagggagcctgagttccagagcctttgggggataagctacatcagctggaaggctgggggaggcgggggcctggtactcaccaaatatattctcacctcctcttactagagcagggcgctggtccagcccggcactgagacacgggggccccagagagaagcacagaacaccttgcctctctacccagaggagcgccctggctggcagtacagttttttgatttgctggagtcccggtcaagggagaagcccagggtggttaaatgatggctctacgctcactgcctccctccaggccctgctgaccccagaggacgcagtcctgtcggacgagctgaaccatgcctccatcatcgacggcatccggctgtgcaaggcccacaagtaccgctatcgccacctggacatggccgacctagaagccaagctgcaggaggcccaggtggggcgacgcctgggtccaccctcagcctccgcctggggaaggaagtgaggcttagagaggccaactcctcactcacagagatagcctgaaagtttgaaacagcagagatttgtccaagatgtgaacccagatccctcacacccagagcattattcttttttttttttccctgagacagagtttcactctgtcgccaaggctggagtatagtggtgtgatctcggctcactgcaacctccacctcctgggttcaagtgattctcctgcctcagcctcccaagtagctgggattacaggcatccgccaccccacctggctaatttttgtatttttagtaaagacggggtttcatcatgttgtccaggctggtctcgaactcctgacctcagttgatttcacccacctaggcctcccaaagtgctgggattatagacgtgagccactgtgcctggcaccagagcattattccattgtgccatggtgccttgaggtttttccctgtgtatgtgtgacagtctcactctgttgcccaggctgtattgcaatggtgcagtcatagctcactgcagcctcaatcttctggactcgagcgatcctcccacctcagtctcctgagtagctgggactaccggtgcccaccacacccagttttttatttatttgttttttagatggaatttcactctttttgcccaggctggagtgcaatggcgtgatctcagctcactgaaacctctgcctcccaggttcaattgattctcctgcctcagcctctggagtagctgggattacaggcacacaccaccgtgctcagctaattttctatttttagtagagatggggtttagccatgttggccaggctggtttcgaactcctgacctcaggtgatctacctgtctcagcctcccaaagtgttgggattacaggcatgagccaccgcacccagcctgtttgtttgtttttgagacagggtctcactataatgctcaggctagtcttgaactcctgggctcccaaagttacaggcatgagccaccatacccagccagtttttaaaatttttagtagagacagggtctcactatgttgcccaggtgggtctcgaacccgtaagctcccaaagtcctgggattacaggtgtgagccactgtgcccggcctgccttgagtattagcaagcaccttctgtgtggcaggcccttgctaggcataaggatagaatgtacatgttggtgagacctggtcccagcctagcctgccctctgggaccttacacaggagactgagatgtgagcccattctcactgtccagagctcagggtggagatgggtgacgctgagaggcacagatgagggagaggatgttccagcccccaagatggtggtacctctgtgcccacctctgtgctgggcactgggcaggatgagctctcagagctccaagcagcacaagagacgggtggtttggcccaacttgacaccacccaccatctgctcatgtctttcctgcagaagcatcggctgcgcctggtggccactgatggggccttttccatggatggcgacatcgcacccctgcaggagatctgctgcctcgcctctagatatggtgccctggtcttcatggatgaatgccatgccactggcttcctggggcccacaggacggtgggaccatgtggcacctgaggcctggggtggggcttctgagggtggctgggaaacgaggaggccagtccccagcatgatccataatccctgggctctcaggaggccagtgacagcagcggtggcttcccttgcaggggcacagatgagctgctgggtgtgatggaccaggtcaccatcatcaactccaccctggggaaggccctgggtggagcatcaggtacctgcaaggttgtgtccctggggtccccttgtccttttgaagggccctggaggggctcagggaagtggggagggcagcatggactgtactttcaggagggggttgggtaggctctggcccctgaccaacccctccccccacctcttcccttcttctcagggggctacacgacagggcctgggcccctggtgtccctgctgcggcagcgcgcccggccatacctcttctccaacagtctgccacctgctgtcgttggctgcgcctccaaggccctagatctgctgatggggagtaacaccattgtccagtctatggctgccaagacccagaggtgcgactcccagcagggcaggctcgggggcggagagacgtggtgagagccagcctcatgtgtctgcccaggcccacagacagctctgtgcccaccgggtctgcttctgcctgttcccctcccttctctctgtccctgcctctcccctctagcttctgtgtctccttcttatccctcctgtctttccacctcccttgttgttctccctgccccctgcctggctcccctctgcctcttagagcttgtaactgtctttgttgatccttcttgcagacttgggcatagacctcgggcctggtccctgcaaggagcgggtgtgaatgctccacggccccttagctacctgtgacaccttgtgcccacaggttccgtagtaagatggaagctgctggcttcactatctcgggagccagtcaccccatctgccctgtgatgctgggtgatgcccggctggcctctcgcatggcggatgacatgctgaagagaggtaagggtgctgagacaagggaactggtggtgggtcctgagagaagagaaagggaaacccctagactgtgacccagccccgtacccagccacgctgcggcctcttaggccagctgtctgtctaagcttgaacaccccaagccatgaggcagtcccgaatctgagacctggggcagttcccttgccctctgtgttctgcccccaagcctgttggttctggcacgcccttgctttctaccctcccaggcatctttgtcatcgggttcagctaccccgtggtccccaagggcaaggcccggatccgggtacagatctcagcagtgcatagcgaggaagacattgaccgctgcgtggaggccttcgtggaagtggggcgactgcacggggcactgccctgagctctgggtaaggacgagaagagccaaggtccgcctactgccacagggtcaaaggaggttttcgatcagcccagaccagaggctctgagccctgaaccaaagtcccagagctgggctgggacgtgacctgtgctgagggctgtgagaatgtgaaacaacagtgtgaaaattggctgtgacactctggtctgctttattgtctctgggcaggcccagtcctgtggccggttgaagaatcaggcaggagccagggctctgaggggaggcgcctgaggactgcagatctccactgacctctttccctagattaagatgggacccagtggccgggcacggtggctcaggcctgtaatcccagcactttgggaggccaaggtaggcggatcacctgaggtcgggagtttgagaccagcctgaccaacatggagaaaccccgtctctactaaaaatacgaaattagccaggcgtggtggcgtatgcctgtaatcccagctgctcaggaggctgaggcaggagaatcgcttgaacccgggaggtggaggttgcggtgagccgagatcatgccattgcactccagcctgagcaacaagagcagaagtctgtctcaaaaaaaaaaaaaaaaaaaagctggcacccaggcctttgggagataggcccagtccaccgtttgtctcgggtagtttctgtgctgctgtggagggctgctgagaactagccccacaggccttttaccctgccactgcccgctactctgcagcccctgagtctagtcttagagtctagcttcttccttctccccactggaagatgtcctgtagctgcccagataggaggaggctgggtgtccatgtttggaaggagaggcagaggattcaggcccaaaagaaaagaatgaggatcacccctggggaagctccagacagtctggaaccctgtgttcgcgcccactctctccctgccttactctggctttcggcaagctccagtccctgtgtgtgcctcagtcctcctgccactatgccttgaggtctgaggtccttccatctcgctcattccaaggcctacgatgatcagccaccagggggtgctgcgagcacgggccgcggccgccggctcgccccgcccctccagactgggggccttgggccgcggctgttcaggctgcccagcagtcaaggccaggagaggcgatttgctgctgccaaggccccatcctcccttgtgccccacaacggctcgccgctttcctgttggaggggcctgcgggaggagggcggtctctccctggcgaccttgtggaccccttgtggggtggggagtggggtccccgcagctccaccctcagcgtggtgtgaccttgggaagctcttagtttgcttgggacagaggacgaaaaggccctttatcattaacgacatgaaactagccctacgtctctctctgacgtcctgcacctccagcccacccatttgcctgttatcttgggatgaacaatgtaatatgagctgggctctggcccagccctgcaggatctgaaagctgggattcagggaatcccagcctgcgatccggaggaccttgctgctggggtccaggagctgggggagggggggtgtggggggtcggtgtgagggtggaaggcagcctggctggggtagctgtggccacattagcggcaggaacatttgcagcccaccaccaccggctagggcacgtggcaccaggcgcgctgctgcaggggatgtgcacaagggctcaaccagtaatgtcgagccagcagctggatgagcatggtctgctctagccagcagctcatgttaagcgccacgggcagctgcggggtgacgtgtggcagtcggtgtgctgcacccggcggggccagaacagagggcccaggtccacccagaccgacgtgaggcggcacgaggcgagatccagacagcggcgcagaaagtgcgtcgccgcccctgtggctcccaggagccgccgctggcgttgccctgctgcgctggcagcgccgcgaccccctgggctagccgatcgcggtagggctccacgccgttggccaacccgcggctcagcgtgtcctgctgcaccagcccgggtccgccgccgcgcttcttccgcagtcatccagaaggtgtctgtaggaggcgcagcagccgctctgggtgcacgtgtttcggcttgggcgcctaccggtagtcgccggccgcccacgacaagctgtagggccacgcggggcgggagggccggccgtggaccagctgcaagtctgcgttctgcagaatcagaggctctgaggaccgccccaagggcgcaatgtccttgttctctgcgtcgcgcacggggttcagggccgcgggctaccagaagcggcagtaggagtggatggaggtggcaccgggcgcacccaaggtctaggctcacggccgcgctctttatggccgcctgttccttcctccttccctccacctccgctctcatatcagcttagccttgccgctgctgggagctcatcgccctaggccaagaaggaccttgtgggcagggggctcccaagggccaggagtgcgaagtcatgaatctcagatgctttccagcccgttccagggttcaggcatgcacattcgtccaggcttctgggagtctaagggtgcgttactttcacgcagtggttgcaggtctgtcaaagtttctaaaatcccaccaagctgagtctcgccattcagggatcataagagtctacaattcctttgcgcaattcaattctgaattcaattcagaattaattcaattctggccgggcgcggtggctcatgcctgtaatcccagcactttgggaggccgaggcgggcggatcacgaggtcaggagatcgagaccatcctggctaaaacggtgaaaccccgtctctactaaaaatacaaaaacaaaacattagccgggtgtggtgggcgcctgtagtcccaactactcgggaggctgaggtgggagaatggcgtgaacctgggaggcggagcttgcacttgcagtgagctgagatcgcaccactgtactccagcctgggcaacagagcgagactgtctcaaaaatatatatatatattaattcaattctgaagcttctgaattcaggtttggcaagtctagattagattcctaatagtttcaattccgtgagactctgcttccaaaaattgaggaatttctgcatctaaagaaggtgacatcaggctctatagaggcacctctgagccctcgtgaaaaccccggggcctttgaggagctggttcttttcttttctttttttttttttttgagtcttgctctgttgcccaggctggagtgcagtggcacagtctccgctcactgcaacctccgcctcccgggctcaagccattctcctgcctcggtctcccaagtagctgggattacaggtgtgcaccaccatacctggctaatttttagtagagatgggtttcaccatgttggccaggctggtcttgaactcctgacctcaagtgatccaactgccttggcctcccaaagtgctaggattacagacatgagccaccacgcctggccttaaggagctagttctgagcatctaccccagctcctccggcctgggatgcgagtcctggctccatcagcgcccctcacactgttttctctccccttacgcacttccccttgatgctccccaaccccagccccagcttctaaaaacactacactcagcccctccacctctcccctcccttccttaactcactgcagactgccttttgccctcaaaacacctgtccagtttaccagcagcctcctcattgctgaatccagtgtaccttgctccccaggtgctagcctccctaaccctctggaggcatttggccatgtggcccctcctccacacagttcaggacagaactccatgaccaaatcacacagccgttcaccaagacctattctcctctttggctcttgcctagacgagaggctcctaacaggtcactcatcaaatctctcccactctgtccatccttttcaccccgggcaataatagacttttttttttttttttttttgagacagagtcgctctgttgcccagtctggagtgcgagcgatctcggctcactgcaaccaccacctcccaggttcaagcgattctcgtgcctcagcctcctgagtagctgggattataggtgtgagccaccatgcccagctaatttttgtatttttagtagaggcagggttttgccatgttggccagtctggtctcgaactcttgacctcagatgatccgcccacctcagcctcccaaagtgctaggattacaggtgtgagccgctgcgcctggcccataacaaactttttacaaaagataatgtggggggaaaaaaagaaagaaagaaagaaaatgtgcgggtcatgtctctgctgtagaatcttagtagttccccgttgctatcaggtaaagccagactttttggacaggtacctaaaccatctgggctccagctggactaaggctctggaaagagcttccggagaaggatctcaggatttgcagagcctgagggaggagtctctggagtctgccgaaaggagactcaagtcctggtttcccactccaggaaaccccagtcaagactaggaatcctttttttttttttttttttttttttttttgagacggaatctcgctctgtcgcccaggctggagtgcagtggcacgatcttggctcactgcaacctccaacccctggcttcaagcaattctctgcctcagcctcccgagcagctgggattacaggtgcccgccaccacacccagctaatttttgtatttttagtagacatggggtttcatcatcttggccaggctggtcttgaactcctgacctcatgatccacctgtcttggcctcccaaagtgctgggattacaggcatgagccaccgcgcccagcctcttctttttttttttttttttttttttgagacaatgtctcactccatcacctgggctggagtgcagtggcgtcatctcggctcattgcaacctccacctcccaggttcaagcgattctcctgcctcagcctccagagtagctgggattacaggcgcccgccacgacgctcagttaatttttgtatttttagtagagacaaggtttcgccacattggccaggctggtctcgaattcctggcctcaagtgatctgcctgcctcagcctcccaaagtgctgggattacagacgtgagccaccatgcccggcctaggaaccttttctaaacatggattggagcaagaaggtgcagggataggggatggagtcacatcaggctgggccacaggaggtgggagtgccagagactggctgggccctgggcacagaggggttaactacaaagcaaatcacagagagcgagatcaatgggttactggctgcagagagaggaaaaggcagcagcaacgcagagaggcagagaagagccaggcagaagagcctgccacctgggggaaatcagggactgaggaggaagtggccagtggctactccagagggagtgcccaactccggctcagcagagggggcagaggagaggaggggccttaaaggcaaagggggagaagtagaaggcagaccagtacctgcagggaggcaccaaggggcagccgctgaatcaggaggcccacccagcccggccattccacccaggatcaagcccactgcccaaggcggaggtgggtgttgcccatcctgggctttggggacctactgcatgctgggtgctgggatgggggcagacattgcctttcttccctactccctgcctgacccccctttcccctactttgtcccaccaccccagtggtctcaagcctgcaaggagatccacaggcagtaggagacatgggctgtagagtgggatgggggtgagcatgggtgcggtgtgcacacacacaagttgtcagaggcaccacctgttacaagctctcagatgagcactctagcttaagaggcaggataccagggtggcaacagccccagagctgccatttcgagtgtgatattatcctcccatgtcccctctctgggcctcaatttccctatgtgcagagaggaagcagtgacctacacggtcttcccagttttgccattgtgatgatctcactatactggaccctccaatgactcagggatgttacccgtgttttgctaaggctacagcttgtagccagagaaagccctaaacccatgtcccagggtctcccctgagcttcagatccccattgagaaggaaaacataccagtttctgggtttggcccctccccccatcgccatatcttcatcctacttcgcttgtgccttccccagcctcgtgggttgaaagtgtccctcaaatacctaggtagtcctccaggcaggactccaggggtgttccttaggaaactgaggaactctcaccccttgaacaccacgagcttgctcacacagtgacactcagcgatgactttggctctgctctcccctcctccatctcccacgagcttccagcccagaacacctggccagacccaggtcgggggagttagatcccggggtcaagcaaccagaactgggggctcttgcctgaggattccagcttctcttcccaggtgcccgtctgatggggagatggctgatgcccagaacatttcactggacagcccagggagtgtgggggccgtggcagtgcctgtggtctttgccctaatcttcctgctgggcacagtgggcaatgggctggtgctggcagtgctcctgcagcctggcccgagtgcctggcaggagcctggcagcaccacggacctgttcatcctcaacctggcggtggctgacctctgcttcatcctgtgctgcgtgcccttccaggccaccatctacacgctggatgcctggctctttggggccctcgtctgcaaggccgtgcacctgctcatctacctcaccatgtacgccagcagctttacgctggctgctgtctccgtggacaggtgcgctgtgcctggggcctggctgggcagggctgtgggggcgggggttgggggaggagtcctgaacagatcctcactggccttaggaaggagagagtgggggaccagaaagggaggtgggtgggaggaaacaaaagctccctgacccctcgcaagcagcctctgggcacctgcagggcgtgcttgaggggactgtcctgcccttcccctcctccactgtgaacttccagaggacgcctctgagtctcaagtggcagcacagggtctggcacatagtaagtgctctgtaagcgcgaaatgaatcgcaaaagaagctcacgaatgcgttcatcagtttttttgttttgttttgttttgttgttttttttttttggatcttggctcactgcaacctctgcctcctgggttccagcgattctcctgccacagcctcctgagtagctgggattacaggccaccacacctggctaattttttgtatttttagtagaaacggggttttgccatgttggacaggctggtctcgaacccctgacctcaagtgatccgcccgcctcggcctcccaagtgctgggattacaggcgtgagccaccgcgcccagcccagctattttctaactgcccacacctggccaagctgtgcacacatctgcttccacagcttgaaacttggggtcaaatccaggctcactccagctgatgaccctgggcaagtcacttctctctggacctcatctgacgcatccataaaataatcctagaaataacaagtcaccgggatcgggcccttgctaggtgcaagggcctaagcaccttgcgcgttcacacccttaatccccgccacgtcccccacggttcacaggaggcgcactgggccgcagggcccgggcgcgggacgtggcgcgggcccctgcgggagggcacctgcccgccccgctgaccaggcgccctccgcaggtacctggccgtgcggcacccgctgcgctcgcgcgccctgcgcacgccgcgtaacgcccgcgccgcagtggggctggtgtggctgctggcggcgctcttctcggcgccctacctcagctactacggcaccgtgcgctacggcgcgctggagctctgcgtgcccgcctgggaggacgcgcgccgccgcgccctggacgtggccaccttcgctgccggctacctgctgcccgtggctgtggtgagcctggcctacgggcgcacgctgcgcttcctgtgggccgccgtgggtcccgcgggcgcggcggcggccgaggcgcggcggagggcgacgggccgcgcggggcgcgccatgctggcggtggccgcgctctacgcgctctgctggggtccgcaccacgcgctcatcctgtgcttctggtacggccgcttcgccttcagcccggccacctacgcctgccgcctggcctcacactgcctggcctacgccaactcctgcctcaacccgctcgtctacgcgctcgcctcgcgccacttccgcgcgcgcttccgccgcctgtggccgtgcggccgccgacgccgccaccgtgcccgccgcgccttgcgtcgcgtccgccccgcgtcctcgggcccacccggctgccccggagacgcccggcctagcgggaggctgctggctggtggcggccagggcccggagcccagggagggacccgtccacggcggagaggctgcccgaggaccggaataaaccctgccgcctggactccgcctgtgtccgtctgtctcactcccgttctccgaaggcgggacgccaccgggccagggatggggcaatgccacgagctctctgaggggcgttgagtggagcgacttgtccccgctccacagcggagcaccagcccagtggacacccctgggtgtgaatatgaacagcacagcccgcccccagcagggcagcccccagagcctgcccagagccagcctggcagtccctctgcccattcttccaactgggtgacacctaggccctgcttcctccaccacctcttaactatctccttcttggttccaagctcagtcctaggtaatttaacatcaacagctaataaatggctaatatttaagtgggaccaggcgcttggctcatgcctgtaatctcagcgttttgggaggtcgaggcgggaggatcgcttgaggcagcagttcaaggctgcagtgagccatgatcacgctactgcattccagcctagacagcaaagcaagaccttgtctctaaaaacatttattaagcaggtaccatatgcctcatgctacattctttgtcaaaacagctttgcaaatagatatgattaacctttcctttttttttttttttttttttgtcttttagagacagagttttgtctcccaggttggactacagtggcgccatctcggctcactgcaacctccgtcccccgggttcaagcaattctcctgcctcagcctccagagtagctgggattacaggcgcccaccaccacatccgactaatttttttttttaatagagatggggtttcaccattttggacaggctggtcttgaactcctgaccgcagatgatccgtccgcctcggcctcccaaagtgctgggataacaggcgtgaaccactgtgcccggctgtttagccccattttacagatgtagaaatcaaggatcatagagatttagtgatttgccacaccgctggtgtttggcagaggttggatacaaacccatggctgtgtaactttttctttttttttctattattattattattattatttttgagagagagagagagattgttatccaggctgcagtgcagtggcacaatcttggctcaagacaacctccgcctcccaggttcaagcgattctcctgcctcagcctcccgactagctgcaactataggcgtatgccaccacacccggctaatttttgtatttttttattatttttattttttggtagagatggggtttcaccgtgttggccaggctggtcttgaactcctgacctcaagcgatccgccggcattggcctcccaaagtgctgggattacaggcgtgagccaccgcgcccggcccagaggtaacatttgacatgtattttcttggacaaaggtggggaggggcatgccaggtagagcaacagcctgtgcaaggcaggggacgtgcagggcagtaagtggctcctgcagctgaggcagggagagattggggcaggggaggcctggagggcaggagcttcatccttcaggcagatggtgatgccactgaaggttttcaggagaggagggggcctatcagatgtgcagttcagaaagctcccagggctgctgtgtacaagctggaatggaggcctagacttggcagaggactccgatcaggtgggttctcctgggcccttcttggaagtgaggagactggtaaagagtctgctccgtgagctctgttgaggaaagccaacgaggcctggcctaggactgggaagatatttttgccgtggacttggcaggaagatggatggcctgctgccaggcttgggcttggttcccgaggctccgaggtttgcttcagggggctaatgaaacacttggaagagcagatggtcgtaataataataactcaggagagaattgtgtgtccagtagagcccaaggcaggcaagagggtcggagcggaggctgaattgagtcctggccactgctccccagggcctgagagaaccctcctgatctgagccctctgtcaagtgtagggctgagcctggggcagccctggggacctggaaaggcacttttcttagttggaaggaggtttggattctacaaccttcttaccttcctgtttgtgcaaacctcttaagaagaggcctggccggatcacgaggtcaggagatcgagaccatcctggctaacacagtgaaacaccatatctactaaaaatacaaaaaattagctgggcgtggtggcaggtgcctgtagtcccagctactcgggaggctgagacaggaaaatggcgtgaacccgggagacagagcttccagtgagccgagatcacgccactgcactccagcctgggggacagagcgagactccgtctcaaaaaaaaaaaaaaattactctttagggggcctggcgcagtagctcacgcctgtaatcctagcactttgggaggctgagacgggtggatactaggtcaggagttcaagaccagcttggccaagatgctgaaaccccatctctactaaaaatacaaaaaaaaaattggtcggccttggtggtacacacctgtaatcccagctactcgggaggctgaggcaggagaatcgcttgaacccaggcagcagaggttgcagtgagccaagatcgcgccactgcactccagcctgggtgacagagcaagactctgtctcaaaaaagaaaaaaaagatttactctttagggagctctttctggctgcccaggcaggctttcatagggaggaagtacagagtgtgctgactggagcagagaggtcagtcaggaggctcgtgtgagaatccagagagaaagacatagaggtattggaagtggtggggagacatggacagatgggtcagccacttaggaggtacaattgctaggacttggtgactgttggagggtaaggaggagagacgtgtcccagatgacaccccagacttctggcttgggctatttgggggtggcagtggggataactgagggggacagttttggtggtcatggtgggggtgcccgcagaatagcggtgtactctgagtacgtgccacgtttcacaaccactgtttgcaggtgggcaagggcagggagcttgtcctttcattccctgctgtcctcccacctagaacactgcctagcacatagcaagcactaagtcaataagtcaatatttatttttatttttatttttattttttgagatggagtctcactcttttgcccgggctggggtgaagtggctgaatcttggctcactgcaacctccacctcctgggttcaagtgattctccggcctcagcctcccaagtagctgggattacaggtgggcgccaccacgtctggctaatttttgtatttttggtagagatggggtttcgtcgtgttggccaggctggtcttgaactcctgacctcaggtgatccacctgccttggcctcccaaagtgttaggattacacgtgtgagccactgcgcctagcccaatatttctaacatgaaagaaacacgaagtataaggcaaaggatcttaacccgcaaggtgaaatcaccaaatgtttcttcttcctgccatcttctaagccttcctccgcacctccccgactcttcagtaattcgcagagcagccagcaaccagcaaaactcacccctgtgagtacaacctcagctgagctctctttcctgccctggcccatggccagctcagggaccactgagctctctatcctgcccagtccagccagctcagggaccactgagctctctatcctgcccagtccagccagctcagggaccacttgggtgttttgtgactcactccagtgtctgaggccgacttcatctggctggctcttcagacacaattggggttacaggaaatatcctggctggaaatggggtgaggcagattggctgtctacatggctgtctggcaagtgtttgatgactgacctataagccaccttcagtcaagcctttggttcactgtctacatggccagggagggagtcaacaatagacactccacctccgcaacggccagttctcctggatccatggctccagggatggaggatgctgcaggagacacaggccttgcttcccagctaaggactgtgggtcatctcagggcgatttcacagtcccagcatgccccagctctcagctctgcaaataccaagcagcctgcctaggggacagtgggctcaggagtgcccttggcaggtcctcacctatctgctcccacagctctgtagcaagggttctaaccttttttgagtgtgaagcctgctgagaatgagaatgagagctgtggacctgtttcccagaaacgcatgtgtgtactctccacacaaaaccttgcaccgtttcgggggctcacacctccctaagggctcgctaattgaaccccttgggcctgaggttgagaaaccttgcctcaattcttccccaggtgatcaggccagggtgagagaggacagacctggcaagcaggacccatgagaaagcccccttcctggactttgaggcccgctccctcctgcccctgcctcccctctgccctggactcctctctgctctgccccattcccagggccatggccatgggggggctgtgtttggatacaatggcaaccctgggcccagaaagtgggcaggctcacctggaggggatcagagtaacatggcaggaagcgagtgaaaagctaccccagaaccgcacctctgctctccatgtgactggggtgccatcctcccttacctacctcaggcagtggcctgagttccacgggcgcgccccacagctccctctgccgcctctcttcaggcttggggccactgcactttcccttccccagccctgccaacctggtggggcactgggcttccctctcacagggtcctggggacaggcctaccctacatctcatacccacagacagacccttttttcctccaaggcctggcctaggttctatgagttcaatgcagatctgagccataccaagctgggtttggggaacacactctcctcctctgaaaggtagacagggattccaacttggtgaaggggagagtagggcagagccaggcgggacacggactgatcacctggagaaagtcaccatcagcagccttggggcaggggcgggcccagcagtgccatcccctgggttttccctgagcaggcctccgctaggagcgcacgcttccttctgcctgtccatggcccacagcaaaggactggtgctcctgcagcggggagcggggctgctgacaggactgaacctcaaggtgagtttttggggcttcactacaatactagtttctggttgctgctgcaataaattaccacacacttagtgacttaaaacaacacaaatttattcccttagagttctaaaatcagccagaattataaaattagcctcactgagccagtccaggtgggagcagggctggggccttccagggctctgtgggaggatgcatttcctggctctgaggtggcctggactctgtggcttgagctgccctcctcaactccagtttcctgctccatcgctacacctccaacctcctctcccgtcacctgctcttctgttatacagacccgggtgaggacatcaagccctcctgaacaagctgggataatcttcctggcgaaagatccttaacttcattacatctgcaaagcccctttggccatacaaggtaattttgacaggttcctgggattaggacatgggcatcttgggaggccactactggcctaccacaactgggcagcaaaactattacaccctccggtataatagttttggtgtttcaatgactgggaggaaaagggttggaattttttgctttggggtccctcttaaccttgtatttttaaggtctgggactcaccaaccctccccttccaaccagagaaactcactgcagtatctccttgaaagtctggtgacgtgtctgtctaagtgctggtgagaggcacaggaccaactgagggcctcacgcagtacccctggccacagggtgcccgcctaagcccacacctgctgactgcaacaagcccatggccaggacggaacacagagaagggtctgaggcctggagcgcgccatgaaggccatggggcaagtgaggtctgctgagatagcgcaggtctgcggagctgaagtgcagctgcagaggctggtctggtgctgcgagaactggaagaagctgggagctgtggtccctgtccacagagatgctggaaactgtggctgggagtggctctgaggccgtggagagagagcatctctgccccacggcatctgcgggtgagggcaaggtcctcaccagacaagtgcagctccaagtcccagatgttgggctttttcttggtactgagacagcagtggggcagggtggggcagtggcaggaaggcagggagcctctcttgctacctcttctccatgctctgcatctgcagactgagggaggtgaagctggccaggaggtcagtcacttcatccacctgcaggacggaacagaggctctgttatgggacacggggtgtgccagggctcctgggtctcttccacaatcccacaggcacagaacacaggcacggtctctcctcccagggcgtgtggtggcttctgactacgcagcagttgaccaagggtcaatctttgacaccaggtggcctagcgctgtcctagagggcagggccatgaacacacactagccactggcaacttcaaaggaagtgaacggaggctttgaagcctgcaaccccacaatcataggctctttcccccactttttttgtttgagacagggccttgctctggtttttttttttgttgtttttataatttttgcctttttccacatgttctgagaggaccttgctttgtcactcaggctggagttcagtggcaatcacagctcactgcagcctcgaactcctagcctcaagtgatcctcccacttcagcctcccatagcgttgggattacaggtgtgagcccctgcggctggccccagcccacagcctctttctgatacgagtgtctggtggcatcggagcagggtggactggccctgaggctcctgccaggccctgggtctgggcctgtggctgcagctcacctgctctttggtactggtcatctgcaggcgggtgcagaggtcatccaggcgttctcgctgctcatgttgccctaggcgctccagatactccctcagcatatggatgatctggaacaagagggtgagctgagctgcctgggttcctagggaggcagacaggctgatgctgcttccaaaaagcacagtggagcaggtgccaactggggtcagtgtgaaacaacccaggagccctgggaccagaggcaggtgtgtctgtggttagggcagcatctgtccagtgctgccttggtgccgtggtctccacacagaaggggtactcacctgcttcacctccagacgcacagcctctaggcactgggcatggccctcctgcaggatattcagctttgacttggccaggtgcaggggtgtgcgaccagctcggtccagggcatctacacgggcccctgcaggtaccagctgaggtgagcattctgggggtgagggggagaaagaggacagagaggggaagaaaccacatacctcctcgtagcagtgtggtgatgacaggaacgtggttggtgcaggccgctgaggaagaacaacagagacttaagaatccaggaccaccagagcctggctctgcgtggccactggagggagcagggctgtgtctcccagacgcctgtgccaagttatgcctactgagaaggtatcgccaaggcacagctaggtaggactcagaagtcaagttcaactccctccctgtacagcagaggaaactgaggcctggagataggatctgcctcagtgtgagccacagtgctgagtgctgctgggctagcctaggttgctaaattggctctgccgagggcacagccaactgctaaatgattggaaggcccatgggacacaggctgctgggcagtgcagccctgggagtgcaggcctaggatcttccctgacactcacagtttctgccaggagcatgccgggccccaccctcttcatctaaagagcctttctttgctgcaaatgagttgtcttagtgacttctgacatgcttacccaggtgcagtggcgtgttccccagcccatctcgctggttaggatcagcaccatggtccaggagcagctgcactggaaacaggcaaacccaagaggagttgtcggaggcttccattgcctgcaccctgaacccctaacctagctagagaggctggctcagagtaggggacacggaatgcaagcatggatggctgtgttacttcattcattcactcactcactcacttacttaccagagttcatgggcaaagccctgagggccaggaactgaggatttggggagggcctcttggcctatgcaggtgtaggaatgagatttgaagggttaagtaaagttcttccaatagcagctgctcctggtgaaggctgtccagggcattttctgcttctcccacagccaagcaccatggtaggaattaagtcaataaatgatgctgagctccatggataacctctccctcctggcagtcttgggatcacctcaggggtgtgctgtattatcaccagggtctgccaatacccagaaggatgcataggcaggtagcctggatcccagacatcatacagggaggtcaggctgagcctcacaccatgtacaaaaactaattcaagagggaccatagacataagtgtgaatgctaaaacaggcttccagaagaacatgaacatcttgggcaggcaaagatttcttaaataggtcacaaaaatactaaccataggaaagaaaaggccaggcatgggagctcaggcctgttaatcccagcactttgggatgccgaggcaggtggatcatttgagctcaggagttcaagaccagcctgggcaacatggagaaaccctttctctatactaaaaacacaaaaattagctgggcatagtgatggcagacttgtagtcccagctacttgagaggctgaggtggcagggcggcttgagcccagaaggtcgaggttgcagtcagccgagatggtgccagtgcactccagcctaggcaacagagacagaccctgtctcaaaaaaaaaaaaaaaaaaaaaaaaaaaaaaagagaaaggaaagaaatattgataaattggattcattaaaattaagaacatggctgggcacggtggctcatgcctgtaatcccagcactttgggaggccaaggcagccagatcatctgaggtcaggagttcaagaccaggctgttcaacatgttgaaactgtctgtactaaaaacacaaaaattagctgggtgtggtggcatacccctgtagtctcagctacttgggaggctgaggcaggagaattgctggaacctaggaggtggaggttccagggagccaagatcatgccactgaactccagcctgggtgacagagcgagactctgtctccaaaaaataaaaaataaaataggccagggcacaggagctcacgcctgtaatcccagcactttgggaggccaaggcgggtggatcatcggaggtcaggagttcgagaccagcctgaccaacatggtgaaatcccatctctactaaaaataaaaaattaggtgggtgtggtgacacgcatctgtaatcccagctactcaggaggctgaggtgggagaatagcttgaacctggggagcagagcttgcagtgagccaagatcacaccactgcactccagcctaggcaacagagtgagactctgtctcaaataaataaataaataaataaaaataaaattaggaacttgtgttcatcaaagtataccactcagaaaatgaaacagcaagctcagaaaatcaagtcatttatatttgataaatgatttctaaccagaatatacaaagaattcttacaaatcaataagaaaaaggccaggcgcagtggctcatgcttgtaatcccaatactttgggaggccaaggtgacaggatcgcctgagcccaagagttagagaacagctgggtaacatagcaggaccacgtctctacaagatgttttaaaattagctgggcttggtggtgtgcacctgtcgtcccagctacttgggaggctgaggcaggaggattgcttgagcctaggagattgaggctgcagtgggcagtgatcaggccactgcacgtaagcctggatgacagagtgagactttgtctcaaaaaaagaaaaagacagaaaactagttttttttgtttgtttgtttgtttttgagacagagtcttgctttctctcccagtctggagtgcagtcacgcgatctcggctcactgtaagctccgcctcccggcttcacaccattctcctgcctcagcgagtagctggaactacaggcacccgccaccacacccggctaagtttttgtatatttagtagagatggggtttcaccgtgttagccaggatggtctcgatctcctgacctcatgatccacccgcctcggcctcccaaagtgctgggattacaggcgtgagataccgcgcccaggcaaaacttgtttttaaaaaaatggacaaaagaggccaggtgcggtggctcacgcctgtaatcccagcgctatgggaggccgaggcgggtggatcacctgaggtcaggagttcgagaccagcctgaccaacatggagaaacccggtctccactaaaaatacaaaattagccgggcgtagtggcgcatgcctgtaatcccagctacttgggaggatgaggcaggagaatcactttaacccgggaggcagaggttgtggttagccgagatcacgccattgcactccagcctgggcaacaaagagtgaaactctgtctcaaaaaaaaaaaaaaaaaaaaaaaaaggacaaaagatttgaacatatagttcataaaagaggatgtaaaaatggtcaataattggacacagggaggggaacatcacataccagggcctgtcggggggtgggggccaaggggagggagagcattaggacaaatacctaatgcatgaggggcttaaaacctagatgacgggttgatgggtacagaaaaccaccacggcacaggtgtacctatgtaacgaacctgcacgttctgcacatgcatcccagaacttaaagtttaaaaaaaaaaatggcccgggcatggtggctcacacctgtaatcccagcactttgggaggccgagacaggtggatctcctgaggtcaggagtttgtgactagcctggccaacatggtgaaaccctgtctctactaaaaatacaaaaattaactgggtgtgatgatgcgtgcctataatcccagctacccgggaggctgaagcaggagaattactcaaacccaggaggtggaggttgcaatgagccgagatcacgccattgcactccagcctgggcgacaggcaagactccgtctcaaaaaaaaaaaaaaaaggccaataaacacatgaagaggtgctcaacgttactggccatcagagaaatgcaaattaaaccactatgagacaccaaaagggttaagattaaagagagacaacagcaagcactggcagggacgtagggaaaggtggaactcttacactgctggtggggagtgggagtgtgtgtcagtacatcccttttgggaaaaggtttagtagtacctactaaagctaaatacatgtgtaccctagtgacccaacaatgccattcctaggtttatagaggatagatgagtgtttacagccacaaatcacatatacaagaatgttcacaacacttcattcataaagctaaaacctggaaacaccacaaatgtccgtcaatagtagaatggataaatggggtatatcacaatgaaatacaaaccagcataagaaagtactaactacagtccaccctccctaactgtgaatactgtgtccacagattcaatgaaccctggactcagaacccgaggatatggagggccaacttcaaaggacttgagcatccatggagtttggtatctgagtggggtcctggaaccaatcccaagaacactgagggaagactgtactgatataggcagtattcatgggtgaatctcatggagataactttgagtaaaagtatgcaaggctggtgcagtggctcacgcctgtaatcccagcactttgggaggccaaggcaggtggatcacgaggtcaggagttcaagaccagcctggccaacatggtgaaaccccatctctactaaaaaatacaaaaaaattaaccggtgtggccgggtgcagtctctcatgcctgtaatcccagcactttgggaagccgaggcgggtggatcacgaggtcaggagatcgagaccatactggctaatacagtgaaaccccgtctctactaaaaacatataaaaaattagccaggcatggtggcgggtgcctgtagtcccagctacttgggaggctgaggcaggagaatggcgtgaacccgggaggcagagcttacagtgaaccgagatggcaccactgcactccagcctgggcgacagagcgagactccatctcaaaaaaaaaaaagactcctataaaaagagaaaagctgtcctgctgctgtggttggcactgagtaaatgttacctgaaagtcttgaaggcctgggccctgcactctccagtggtctcttagttggagatatcccttcatcctcagtcaatcatattatctcccccaggtttaccctgccccagtctaacattgccagttccacaggctaacagagggagaagggcagggcactgcagtgccaagtcttccttatatccagaacaactgggcatcccaaggctgtgcagacagcagcgcctcccccaaggcctgtgcagagacactacttgcctagccctactccctcctccctccccaggactcaccaatctggtcattgccattgcatgaggcaaagtgtagagctgtgcggcccttgtcatcagctgcacagggatccgcgccatcttccagcagctgctgcactgacaccaccaagacagagggaggaagggggagaaagcggcgatgttagctaagctgcagacccgagcgatggagagggaggctcaggggtgcctctagacaagacatcgacaatgcataggaaagcagcccttcctagatgctggtcctatgggaacaagcaacttgttcttctgagggcacaactgaaggccatggattctgagtgctcaaactacacgtctagtgatagaacatcgtaggaggttcaaggccctcagggtcagaaattttagggtcacaggaatccctagcatagacagtggtccccctcccgtgacctcggcttggatacacatccattctggctggaaacagctgcccaagctattggcctatgctatgctcccagcaggcagcaatcccccagctacttggggcctcccaagtagcccccagctaatttttgtatttttagtagagacggggtttcaccatattggtcaggctggtctcgacctcctgaccttaggtgatccgcccacttcagcctcccaaagtgctgggattacaggcgtgagccaccacacccggcccgaaaaaatgtttatgatacacaaaaaattatgcaggctacagcatgtgtatatagcagtttgcaagccagcccataaagaaaattccagtgtataggaaagaagccttgaaggatattcatcaaaatattaacagattagttcctttgcggacatggattttttcttatatatttctctaatttccacaacatttttaaaaaatttttttcttatgttatttatttatttgagacagaatttcgctctgtcgcgcaggctagagtgcagtggcgtcatctccgctcactgcaagctctgtctcccaggttcacaccattctcctgccgcagcctcccaagtagctggcactacaggcgcccaccaccacgtccggctaattttttgtattttcagtagagatggggtttcacagtgttagccaggatggtctcgatctcctaacctcgtgatctgcccagctcggcctcccaaagtgctgggattacaggcgtgagccaccgcgcccagctaacatttactttttgtagagacgaggtctccctatgttgtccaggctggtctcaaactcctgagcccaagtgatcctcttgccttagcctcccaaagtgctgggattacaggcatgagccacctcacctggccgtggcagctaagttgagtattcactcccattaaccacaagttccaaagttagtgcctactctttgcagaagactgtgctggctgccagggatacaaaagtatacatggtctccaccatcaaggagtccacagggtggtaaatgctatgacatcaggaagttcaaagtgacaggggagcatggggagagtgagtgtctaagccagacttaccttcagcaagatgactgcacagtcagacaataaatacagtgagcctgctccaagggcgtgagtttgcagactgccttcccacatattgattacctggccttttccttccccaaccagcccatgggaccctgtagctggacctactgtgcacactcacctgtttccacatcattggcattggccgagtccctcagtctcttcagagctgtaaagagagtaacggatgccagtttaaaaaaacagccatggctgggtgcggtggctcatgcctataatcccagcactctgggaggccaaggcaggcagatcacaaggtcaggagatcgagaccatcctggctaacatggtgaaaccccatctctactaaaaatacaaaaaaattagccgggcgtggtggcaggtgcctgtagtcccagctactcgggaggctgaggcgggtgaatggcgtgaacctgggaggtggagcttgcagtgagcagagatcgcgccactgcactccagcctgggtgacagagtgagactccgtctcaaaacaaacaaacaaacaaacacacacaaaaaaaacacagccattggctgggcatgatggctcacgtctgtaatcccagcactttgggaggccgaggcaggtggatcacttgaggccaggagttcaaaaccagcctggacaacatggtgaaaccccatctctactaaaaatacaaaaaaattagccgggtgtggtgcacatgcctgtaatcccagctactctggaggctgaggtaggagaatcacttgaacccaggacatggaggttgcagtaagccaaaatcgcgccactgcactccagcctgggtgacagagtgagacgctgtctcagaaaaaaacaaaaacaacaaaaaccaacaaaaaaaacccagccatctagctgggtgtggtggtgtgcacgtgtaacaccagctacttaggaggccgaggtaggagaatgggttgaagccggaaggcggaggctacagtgagatgagatcacgccactgcattccagcctgggcaacaaagtgagactgtctcaggaaaaaaaaaaaaaaaaaaagccacaatggctgggcgcagtggctcatgcctataatcccggtactttgggaggccaaggcaggtggatcacttgaggccaggagttcaagaccagcctggccaacatgctgaaaccccatctctactaaaaatacaaaactagccatacgtggtgactcacgcctgtaatcccagaacgttggaaagctgaggtgggcagattgcctgtgctctggagtttgaaaccaccctgggcaacatggtgaaaccttgtctatactaaaatacaaaaaattagttgggcatgggggtgcacgcctacaatcccagctacttgggaggctcaggcaggagaatcgcttaagcccaggaggcagaggttgcagtgagccaagactgtgccactgtactccagctcgggcaacagagtgagactctgtctcacacaaacacacacacacacacacacacacacaaaaaacataggccgggcacagtggctcacgcctgtaatcccaacactttgagaggccaaggtgggtggatcacgaggtcaggagtttgagaccagcctggccaataaggtgaaatcccttctctactaaaaatacaaaaattagccaggcatggtggtgcatgcctgttatcccaactactcaggaggctaaggcaggagaatcacttgaacttgagagccggaggttgcagtgagccaagatcgcgccactgcactccagcctgggcaatagagcaagactctgtctcaaaataaataaataaataaataaataaataaataaataaataaataaataaaataaaaacacaaaaattagccgggtgtggtggtgcatgcctgtaatcccagctacttgggaggctgagacacgagaatcacttgagcccaaaatcacaccatggcactccagcctgggtggcagagcaacactccatctcaaaaaaaaagaaagaaaaaatatttctcaatcttaggttaagttctaacttaaatcaatctaacatggtaaaaccccatctctactaaaaatacaaaaactagctgggtgtggtggtgcgggcctgtagtcccagctacttgggaggctgaggcagtgagccgagattgcaccacctgcactgcagcctgggtggtaaagcgagactctcgtctcaaaaaaagaaaagaaagacagtgccctgggaacaaggagaaacttgaaatgaggcggagctagtacaaaggccacatcctcctgcaaatcctccaagacttttggagccagatttcctctctatcacttgtagtcacagggtgaccttgagcaagctagttaacccagctgggcctcaggtctatcatctgcaaaacaaggctgagttgttctgccagccccgagttattgcaaatgatttacacagaagctctttgtgagctggttacacagataatcttatattctccttcaaagcaggtcgttcccaaatgatttgcctaaatttggtatttcctaagcagattttccccctccaatggctaatggaaagcaatgtctttgtcatcggagatatggtcaaaaattgcaattcagatacatgacaattccttgctttcatacagcactttatggtcaatacaacgcttccaaattcttatttcatcttcgtgacatcactaaaatatggctagagtcatagccagtcctggaagaaatccccaaagtccccattcttaatctctcagtgcctgggtttccatgtcacccatgcattgtagaagacaatatggtagatataccagaggagaagtttgagtcgggctgacccggattctaataccagcaacagccacttgctatgtgacctggaataagacaatttctctgagcctcagtttcctcttcagtaaagtgggaacaatttctatgtctcaaagagttcttgtgaggacagatgatcatgtatcagcagtgtttggggcacagcaaaggcagcataacagctaaacatccattaccttacttaactcatcccattttacagatgagaaaactagggctgaggccgggccagtggctcatgcctgttatgccagtactttgggaggccgaggtgggtggatcacctgagatcagaagttcgagaccagcctggcaaacatggtgaaaccccatctttactaaaattacaataattagccgggcttggtagtgggcgcctgtaaccccagctactcgggaggctgaggcaggagaatcgcttgaacccggggggcggaggttgcagtgaaccaagatggcgccactgcactccagcctgggcaacagagcgagactccgtctccaaaaagataataataataaataaataaaaataaaaaaatttaaaaagaaaactaaggttgaaagggtctatcatttgccctaaggtctaactgtggtaaaggagtccaagtccgtgcatttaaacaagctggtacgacttggctgcaggctctggcctcccctctccatgataataaaagtgttccccagtacctcattttattattcaccaataagcgttccgagtcatgggaagtttccattcagaaattacccagtgagagaagactggggtgactggctcagagcaggaagactttctaaaaaaaccatcatcaccatcgttactgaaaggagactcaagggtcagtgtggccctcagcgcagacgtcgggggaccccggctgagggtcgggggcgaccaaagcgcggccactggtcctctgaggccccgcccctcgcccgggctgccccgccccgggcccccgcgccgctcgcgccgctcaccgtgcacctccttgcccgtgggcccgagccgccggtggggcctggcagcgcgcctcagccggccagcgggtatcttgcagcgcagctcgtcgcgcggctccgcatcctgctgccacaggacgtgcaagtagcgcagcggcgactgggccccgccggacgcccggcccgagaggcccgcgccgccgccgcccagcgcagacccgaagtcagcgaaggagaagaggccctcagcgtcagtcagcggctccggcgccaccgcgcactcgccctccgagctcgagtggcctgagcgcggctcgtcgtccgcgtccccggcggcggctgccatggcaacggctccgcgcgggcctggccgcctgagcctcgttcccgaccgaccaacggacctacttccctccgccctgagtcgtgctgtcagcgagctggcgggcgggcagggcccgcaaccacggcaaccgagcgggggcgggctcaggccgagacagagcggcgaaccaatgactacccttccagcttaaaccggtcccaaaaccaatcggaaagggagggcacagtacaagcaggataattggacagggtttccggcaacgtgactgacagacattgtaaccaattacaaacttgaagtgaccttggctttcgctgtacgtcgctaccggagccagtaaaacagcatttcagacgctttttttttgcgacggagtctcgctctgccgccaggctcgcgatctcggctcactgcaacctccgcctccttgaagcaattctcctgcctcagcctcccgagtagctgggactacaggcgcgcgccaccacgcccagctaatttttgtatttttagtagagacggggtttcaccatgttggccaggatggtctcgatctcttgatctcgagatgtgccggcctcggcctcccaaagtgctgggattacaggcgtgagccaccgcgcccggcctttttttttctttttcctctccatttcccagtctaatgagaaaacaagcagataccttagcaaatcagattaagatgatttgcaggcactcacaaaggaaaatgaagaagccacgccatccatgtagatatagatgttgtaaatcaatgaacgcaaaaaaaaaaaaaaaaaagaacttcccacaaatgcataatgtacgtgggaaagggaaaatgtgttgaaatttggagataccactacaaactgtgagtaatagtgtctaaatgcaatggatttcctttagtcagagttctctaggtaaccccgacgtagatgactgatctacaaagatttgtaatacaaagtgattacattagagcaatagtttagttcgacagccagtcactgagccaggtaactgctaggtcctggacacaggatcagacttggtgcccctgagatgctcacaatccaatgggagaagaccaggaaacaaataagtgttcctcaagcaacatttcatgggtgcacgttttcataaaacttctcacaatcccgtaccccacaagcacttctataaagtagacaagaaggaccatccctattttataggtgaggagttgaaaagcagagggaagagactcattcacagttgcccagctctcaccggaccaggtcttgtgtcctggcaaaagttctttccatatataaaccctcccactcaacccagttaaaatgtaatctttccgcacggtgggtcacgcctgtaatcccagcactttgggaggccaaaatgggcagatgacaaggtcgggagttcaagacaagcctggccaacatgatgaaacctcgtttctactaaaaatacaaaaattagctgggtgtggtggcgcacgcctgtaatcccagctattcaggacactgaggcaggagagtagcttgaacctgggaggcagaggttgcggtgagctgagatcgcaccatggcactccagcctgggtgacagagcgagactccatctcagaaagaaacaaaaacaaaaaaaaggcctggcgctgtggctcacgcctgtaatcccagcattttgggaggctgaggcaggcagatcacgaggtcaggagattgagaccattctggctaacatggtgaaaccccgtctctactaaaaatacaaaaaaattagcctggtgtggtggtgggcacctttagtcccagctactcaggaggctgaggcaggagaatggcgtgaacccaggaggcagagcttgcggtgagccgagatcgcaccactgcactccagtctgggcgacagagaaagactccatctcaaaaagaaaaaaaaaagtaatctttctcttacaattggaaaagcacttccagaattttcagtgtttgcagtcgccattgtgaggtttatcattgtactatatggaaaaaaatgctatgtttatttgtactctcctcgtctgccccataatggatacagtgctgagacaggatctctcactgtcactcaggctggagtgcagtggtgtgatcacagctcactgcactcaagctttcctcccacctcagcctcctgagtagctggggccacagatgtgtaccaccgtgcctggctaattatttttttgattttttgtagacatggtctcacttttttgttcaggctggtcttgaactcctcgcctcaagggatcctcctgcctccacatcccaaaatgctgagattacaggagtgagccacagtgcctgggccccaatttttttttaagatggggtctcactatattgcccaggctgatcttgagctcctgagctcaagtgatcctcccaccttggcctcccaaagtgctggcatgagccaccacatccagccccatgaaaatcttctgacttcacaactccttctcaaatgtcatgaacattttgagaattgttgtcaaattggagcaacctgtatcaaattcctgtcatatatggactataagatttcaggtaatttcttttcttttttttttttttgagacggagtctcgctctgtcgcccaggctggagtgcagtggcaggatctcggctcactgcaagctccgcctcccgggttcacgccattctcctgcctcagcctcccaagtagctgggactacaggcgcccgccactacgcccggctaattttttgtatttttagtagagacggggtttcaccattttagccgggatggtctcgatctcctgacctcatgatccacccgcctcggcctcccaaagtgctgggattacaggcgtgagccaccgcgcccggccaatttcttttcttttttctttttttttttgaggcagttttgctcttgttgcccaggctggagtgcagtggtgcaatcttggctcaccacaacctccgcctcctaggttcaagtgattctcctgcctcagcctcccgagtagctgggactacaggcatatgccaccatgcccggctaattttatatttttagtagagacggggtttcactatgttggccaggctggtctcgaactcctgacctcaggtgatccatctgccttggcctcccaaagtgctgggattacaggtgtgaaccactgtgccaggcctcggagaagggttattatttaaactagaaactaaatgtctcccaaagttagctcggttcgagccaggaatgattaagggcagtctgaagattaaatggaagatgagggttggttagatcagatctctttcactgtcattattttctcactgttacaatttttgcaaaggtggtttcagcaataaaaatatttcacaaattttacaaaagcaaaggaccatgaggacattgttggggaccctccctgaaccaaggaagagactgtgactcttccttggttcagggaaggtcctgaaccaaatcgagggtcggtaaagcttaagctccattatttccaaatttgtgtcacctctggtgacagcacaaggaagaaacacaaaacaagaacgcagcatagggagttggggctgggcattgcaattctcaataggatgttgagtggatggcatcagagcagacacctgaaggtgccatgcagataccgatggggaagggaatgggagtgggggtgccactgcattcgattctagacttggataacagtgagtgcaaaatcccagaggtggagcgtgcctcagtgggaaaagcaaggagggcggcgtgacaaagggacccagagagtcctggtcacacagcaaatcagtggcggagtagggactggaactcggatttccactaggtgttgtgtatgggcagatggctaaactaaggcctctccttgactcatacaccggtttttattggtttgctttataaccccatctctaccttgagggtttcccctggcctcgaacccggtgtactcaagagctgcccatgtcccaggcttcgcgacacagctggcctcatctttgcctgctccaactttaatgtccaaagttgggtggctcctgttctccattccctcttactgcatgggaccaaatctcaatttttttttttctttttttttttagacggagtcttgctctgtcgcccaggctggagtgcagtggcgcgatctcggctcactacagcctctgcctctcaggttccaccgattctcctgcttcagcctcctgagtagctgggattacaggcggacgctaccactcccggctaatttttgtatttttaatagagacggggtttcgccatttcggccaggctggtctcgaactcctgatctcagatcatccacccgcctcggcctcccaaagtgtagggattacaggcgtgagccatcgcgcccggccaaatctcaatttttatccccagtaagtttagtcttgtgaagtccgaacgtttgaataatttactcgctgcaggcaaaccgcctacaactaaatccatcaggcccccgtatccgaatcttccttcacgcgagaagccggccatcttttgtgtagcattctttctggttcctctaactttgcctctcctttacgccaaatacgtgtccttatatctgaatctacaccactattatagattcaccttctttgagaagtccctatttgaagagaggaaaattcaggctacttgtaaccctcttattctttttagacggagttttccctcttgttgcccaggctagagtgcaatggcgcgatctcggctcaccgcaacctccgcctcccgggttcaagcgactctcctgcctcagcctcccgagtagctggaattacaggcatgcgccaccactcccggctaattttgtatttttagtagagacggggtttctccatattggtcaggctggtctcaaacccccggcctcagcctcaggtgatccgcccgcctcggcctcccaaactggtggggttacaggtgtgagccacggaacgcggctcctcttccttctggatatggctgtctcagatggccagaggcctcggaaaggcttccggtttcccggcaggcccgagtggggctgaacttccggcctcaggacgcaggcgcgggccgctcatttcgctctttccggcggtgctcgcaagcgaggcagccatgtcttatcccgctgatgattatgagtctgaggtaaggtggccgtaagggcgcggtgggctccacgacggggtgatctctgggaccactggatgtgggtcccggcgcgaggcagcttccgggtcgcggccagctccggccgacctcccgcccggccctcaggctgctcccacagttcccggtccctagacaaccctggctctgcccgcccacttcgcgtgttcgattggcttgtccttcccctttctaagaccggagactaaggcctgttagacgtttctgtgtttctgcacctgagtttttttggtctaggctccgtctggtcaaatctcgctgattcccacagcctcttgtcctttgctccacctcattgcacccgtaatgttgtattgtcattgtctgtttactgtcccttttctctaaggcgtgtgagttcctcaaaggcaggcacagtgtcttattcgcctctgtatccttagctctctgcttggcatctagactctaggatgagcgttttgaattcacgacttggcggctgtccttgactgtgtctctttccttctaggcggcttatgacccctacgcttatcccagcgactatgatatgcacacaggtgagaccacgggttaggctggctgagtactcgtagggatcagttcctttggaatgtcttagaaccagctctgacaggcatcaaaaattgctctttgatggtccaggtttggagtcagtcattagctgccagtgcgaggggttttataaagcctaataaaccaggctttttatcatagtccacctcagtcttggaagagaaggattacttacctggctatggttttcttgtgtaaactattagccaaataagaaaagcttttttgtttttgtttttgtttttgtttttgagatggagtttccctctgtcccccaggctggagtgcagtggtgcgatctcggctcactgcaacctccgcgtccctcgttcaagcagtagttctcttgtctcagcctcctgagtagctgggattacaggcgcccaccaccattcccagctaatttttaaatttttttaatagagacgaggtttcgccgtgttgtccaggctggtcttgaactcctgacctcaggtgatccacccgccccaacctcccaaagtgctgggattacaggcgtgagccaccgcgcctgccccaaggaagaaaatcttgatgtgaaaaatttaagtaattcaaaccaagcccgaatgaaatctttttaggaggtgtctgaggtttcctgaaacgttatagtgacttgacttagtagtcagtgttatccattgttctaagtactttgtatgaaatattttgtttaatccttacagcagttctgtatgttaatgtctcctaaagaatagaaaatatagcagagaggtttattagtagtaacttggcacagtcatatatttaaaaggtgacagttattcattcaagaaatattaagtacctgttaccacttactttccaacagtcttgcctctctcccctccaacgcacacttttctaggccctgagggtatgtctgagtacaagacagacgagattcctgacttcctagacttgggagaagggtgcaaaacagataataagtgaaaaataactttaagtcatggtaatatttttgaagaaacagggacaacgagattgggagtgacttgagatgtttgtatctctgagtattcaaaagggaattttacgcagacctgagtttagtttctggggtggtcttgccatttcgttctatcatatatgtgggtttgagcatactctgtatttgttgtatccaacctccaggagatccaaagcaggaccttgcttatgaacgtcagtatgaacagcaaacctatcaggtgatccctgaggtgatcaaaaacttcatccagtatttccacaaaactgtctcagatttgattgaccagaaagtgtatgagctacaggccagtcgtgtctccagtgatgtcattgaccagaaggtgtatgagatccaggacatctatgagaacaggtatgggctactggctgaaagggcctctttctgggtgggactggcctggtaatatagttcctacaaatgaggtgagcactctgtaaacagtactttcgggggggttggggggtgggggtctttgtgagtccttgaggctagggacattttattttgttagactttattttatttatgcatttgtttattttttgaaacggagtgtcactctgtcgcccaggctggagtgcagtggcaagatctcggctcactgcaacctccgcctcctgggttcaagtgattctccagcctcagcttcccgagtagctgggactacaggcatgtgccaccatgcctagttaatttttttgtatttttagtagagacagaatttcaccatgttggccaggcgtgtgttgaacccctgacctcaagtgatccacccgcctcagcctcccaaagcactgggattacaggtgggagccaccatgcctggcctaatttttgtatttttagtagagacggggtttcatcatgttggccaggctggtcttgaacttctgacctcaagtgatgtacccccgttggcctcccagagtgctaggattacaagcgtgagccaccatgcccggcctgttggactttatatcctcagaaatttatacaaagcctaaaataatatcactattaacaattataataataatgattagcatttgtttttattaccaggatagatccatcaatgttcagtgtgttgtttgtgtttttactcatttacccttcacagtaagcccatgaagtagcagtttttctcattttacagatgaggaaacagcacagaaataagtcatgtagctagtttaatggatgtgctgagatttgaacctgcagtgtctggcaccaaagcctaatttctaaactgtgctatgcagcccttcagtacatatcagagcaagctgaactccgcaggttttgaggggctgccgttgtgtaatgagcgttagagataagataggtcagtcaaagctgggatagtcaggagtgacttcaccaaggaaatagaatttaagcaagtcagaaggatgagggagagaaaacaaatagccaaaggcctattgatcaatgaataggatctctgacatgtgttttctttttttgttgttttgaaagagctgattgtagttgaaaagcagaggaaacctcagacattgcatggttttaggcctcacccctgccactctcgtgagcctaagttctacttggtgtggactccaaggtccttcccgcccctgcaagccacccattaggttgagctgagagatcagccaatgggaacagagtcacttatgaccaagaagaattgatctgggggttagttagtgaggagagagaaagggagaaaaccttgttcggaggttgaacacctccagccgaagaaggtgcagcatcgaggtctttcaccactagcaaatggatccaagtcatgcggcaccaaaagaggttagcagctgaagggtgttgaagtgacacaacaccaaaacatgctaccaatgatgaatccgtatctgtacaggtctccagcagcctcagttcttgcctcctcaaaagaaagaattcgactgaggggtaaaatgctaccgatgatgagtccgtatctgtacaggtctacagcagcctcagttcttgcctcctcacaagaaagaattacactgagggctaaaatgctactgatgatgagtctgtatctgtacgggtcgacagcatcctcagttcttgactcctaacaagaaagaattcgactgaggggcacaaggcagaagaagagagggaggcaagtttgagagcaggagtgaaagtttattaaaaagctttagaacaggaatgaaagaaaggaaaggacagttggaagagggccaggtgggtgacctgaaaggcaagtgtgctgaactgtgttttctttattccccgggtcttttctgattagaagtatataaatcagcgcctacaaaaattagctggggcatggtggcagcatgcctatagtcccagctagttgggaggctgaggtgggaggatcacttgagcctgggaggttgaggctgcagtgagctgcacaatggagcgagaccctctctcaaaattaaaaaatggacctgatgttcaatagaaatgtagctagacattaattttaatttttcagccaagcgaagtggagatttatttaaaatattatttctatatgtaatcagtatttaaaaattaaggggatatttgcccttttttttctttatacttaaagtttcctaaatccagtgtgtatcagaaatacttgctttgtgtttagattttatagagtttatgactggaaaagtaattcaaatttgaaatttgaatcttcaaatagtagagtaattccaaatagacctaaaagttttccaatactgagttaagtgttggtttttaaacttaaatggcaactaactgaaatttaaaatttaactctttgcttatatagtagccacatgtagctagtggctattgcattgggcagtgcccgcagatacagatgacagttgaagccaagcatcttgtaagtctttctctaggagaatgtgagaagaaatgctggtgccttaagaagtatgtttctttagggatgggtgggcaggcaaagaaaggatctagtaaaggaggcagaaagaaaagtgaaaagtagatagtaaattggcaaagaaatgtcacaggaaccaaaaagtctgcagaagaaactgaggaagagagtatcaccaaatgttttagtgaggtccagatgagaaaaaaagccagttgaatttggtaacttggagggccttgataaccttagcaaggtcaatgtcagtagagtgatggaagcaacagccagagagcagtggggtgagaaaggggaattggtaagtatcggggacataaagggtcactgagtggctttgtgttttgtttctgtgttttttctgtttttgttttttgttttttgagacaggatttcgctcttgttgcccaggctagagtgcaatggcgcaatctcagctcatcgcaacctccgcctcctggctccaagcgattctcctgcctcagcttcccaagtagttgggattataggtgtgcaccaccatgcctggctaattttgtatttttagtggagacggggtttcaccgtgttggtcaggctggtctggaactcctaacctcaagtgatccacccgcctcagcctcccaaagtgttgagattacgggtgtgagccagcgcgcctggcctgtttcagtgtttcttttctgttctgtttctgtgtttctccccaacccccatcccgtagagacagggccttcctatattgtccaggcttgtcttgaattcctgggttcaagcgatacccctatcttgtcctcccaaagtgttgagattacaggcgtgagccatcatgcctggcctgttcagtgttttttaggggaacttgagcatgtttatatgttggactaaaagagccagagaagcaggaggggtggggcttgaggagattggaggaaagtattaatagctgctgagggcatcaggagaagaaaattaaacaacctgttgcaggtttgtcaagtagcagtgtttggattggataggcagcagtgtttaaattggatgctgtaggtctgttgtggccttggactgcagcagactgatttgcttctgtgtttagagacgtttggatgtgctccaggagatggaaacgctgtgttaaagaatggtggccaaaaaagtagttcttatagcagaaaacagcaagcagttaaatatggctatagttaatgatacagaggcaggagattatcctgaaaagcttgatgggtccctaactgatacaaaaacaatattttcttgtgttgagaaagattgaagtgtggagttgggttgaggacagttgtgggcttgaagggctttggcctcagctctgtttatttgacatcttcccctttctaagcctgggtcctcatctgtaaaatgttaggattggcattctccagtccttttggaattttagagatttttttcttgatttttagctggaccaagctgactgaaagattcttcaagaatacaccttggcccgaggctgaagccattgctccacaggttggcaatggtaggtgtgagctctttatatcttgtgcactgagtggaatccagtggctgagtcattagacaggaagctcaagagggtctgtgtctgttttgctcaccattttgtttccttggtgcttggtatgtagtaggtccttggcaaaataacttgtcgaaggctggatgatttaagagaggacagagatctctcatatatggtgaaatttagatctttgtactgacttgtttctatttccttctataatttgggggtcattacagtcactctggaataagctctctagcttcccacctttgactttcttagatgatgtcctttatatatgggtgaggtaggcaaatccaacttcattattttgcttgtggatattcagctaccctggcaccaatttatttatttatttattttattttattattattattttttttgagatggagtctcgttctgtctcccaggctgaagtacagtggcacaatcttggctcactgcaacctccgcctcccaggttcaagcgattctcctaggttcaagcaattctcctacctcagcctcccgcgtagctgggattacaggcgcccgccaccacgcccagctaatttttgtatttttagtagagacggggtttcaccgtgttggccaggctggtctcgaactgctgacgtcaggtgattcgcccacctcagcctcccaaagtgctaggattataggcatgagccaccgcacccagcctgcccagctaatttttaaaaattttttgtagataccgggtcacactttgttgacctggctgatcttgaactcctgacctcaagtgatcttcccagagtgctgagattacaggcatgcaccactgtgcccagccacattgtcttgattactatatttttgtagtaagttttgaaatggggaattgtaggccgggcgcagtggctcacgcctgtaatccaagcactttgggaggccgaggcgggtggatcacctgaggtcgggagttcgagaccagcctgattaacgtggagaaaccccatctctactaaaaatacaaaatcagccgggcatggtgacacatgcctgtaatcccagctacttgggaggtggaggcaggagaatcacttgaacccggaaggcagaggttgcggtgagccgagatcgcgccattgcactccagcctgggcaacaagagcgaaactccgcctcaaaaaaaaaaaaagaaagaaagaaattgggaattggtaagtcctccaactttgttctttttttttttttccccaagattgttttgactattctgggtctcttggatttgcttattgattttaggatggacttgtcaatttctgcaaagtagccagctgggattttgagaggaattgcctagaatctgaagatcactttggggagtattgccgtcttaacagtattaagtcctccaggccaggcgcggtggctcatgcctgtaatcccagcactttgggaggtgaaggtggacggatcacgaggtcaggagatcgagaccatcctggctaacacggtgaaaccccgtctctactaaaaatgcaaaaaagttatctgggcaggccggcatggtggcgggcacctgtagtcccagctactcgggaggctgagacaggagaatggcgtgaacccgggaggcagaacttgcagtgagctgagattgcgccactggactccagcctgggcgacagagcaagactgcgtcccaaaaaaaaaaaaaaaaaaaaaaaccaatattaagtcctccaatctatggacatgggatgtctttgatttatttaggtctttggttgcgttcaccagtgttttgtgttttcagtgtacaagtctctcatttgttttgttatagctaacgtttttttgaacacttaactccttttttttttccccctaagatggagtcacggagtcttgctgtcttgcccaggctggagtgcagtggcgcgatctctgctcgctgcaacctctgcctcctgggctcaagcaattctcctgcctcagcctcccgagtagctgggattacaggcacctggcggattttttgtatttttagtagagatggtgtttcaccatcttggccaggctgattttgaactcctgacctcaaatgatccacccgcctcagcctcccaaagtgctgggattacaggcatgagccactgcacctggcctgaacatttactctcaattgactaaacacagaatgagttcaaaactcattctgtggctgggtgtcgtagctcacggctgtaattctggtactttgggaagctgaggtgggaggatttcttgaggctgggagatttagactagcctgagcaacatagggagacccccttctctacaaaaaattttttaaaaaaattatccaggcatggtggcacatgcctgtagtcccacctactcgggaggctgaggtggaaggatcacttgagccctggaagtcgaggctgcagtgagccatgatcatatcactgcactccaaccttggcaacagagcgagaccctgtcttcaaacaaacaaacaacattctgaaattaatattttctttcttcctttttttttttttttttttttttttgacatgggggtctcactgtgttgcccatgctggagtgtagtgtgataatggctgactgcaacctgtgcctgctgggctcaagcgatcctcccaccttagcctgccgagtagctgggaccatgggtgcgcaccaccacgcttgtctaattactcttgtgtgctggtttttttatgcacttggatggcagaagtctctaaatggtgaaaggaaatagatctgaatgagatcttaatctcatcgacagagattgaggttgatggagtcaaatgagaagtggattttctcattgcatgtattcttggggcatatgcatagcaatttagatgttgtttagtcttcagaattacctttattcctccccaccaaagagctaaagctgccaggataccccagttttatggttagtgaagcacccttctgccatctctttcagatgctgtcttcctgattttatacaaagaattatactacaggcacatatatgccaaagtcagtgtaagtatttaagtgtcgcagttttttttttgtttttgtttttttaactctgtgctgtttttgtccctagaacacagtcatttgtttatattggttcagtgtctgggcatgattggcatgtttttgagttttaagaagcggtggaaggaacagtttaacccagaaagctgttcagacacactaacgctatataacctatgcattcttttaaatttctctgtccccacaattctcctggactgggcaatcacccatgcactggttataggctgccagcctcataggatatttccaggtacctgctgctgcttctgcttggggttctttttcccttcagagcattgagcctctgtttctctgagatgtacataacactgtcactgtatgccaagcacaatgctaggcacttagcacacatcttcacatatctaattctactatcaatcgtgcaaagttggtacccgaggtgccaagaggttaccttttctcaaatttatccagctagtaagtgacaaaactccttgaatctagaccagcttgttataacaccagtattctacacattatcccaactttgagcacttgctagattctgttcttcccgacttctaaattatagagtacgtgaagtttctttttttttttttttttttttgagagagagtgagtctcgctctgtcgcccaggctggagtacagtggcgcgatctcagctcactgcaggctccacctcccaggttcacgccattctcctgcctcagcctcctgagtagctgggattgcaggtgcctgccaccacacctggctaatttttttgtatttttagtagagacggggtttcactgtgttagccaggatggtctccatctcctgacctcgtgttccgcccgccttggcctcccaaagtgctgggatgacaggcgtgagccaccacgcccggcctagagtgcctaaagtttcttaaaatgccatctgtactatttaaggctgggcgcggtggctcacgcctataatcccagcactttgggaggctaagggcaggtcacctgaggtcaggaatttgagaccagcctggccaacatggagaaacctcgtctctattaaaaatatgaaactacaaaaataagctgggcgtggtggcgggtgcctgtaatcccagctacttggaaggctgaggcaggagaatcgcttgaacccgggaagcggaggttgcagtgagccgagatcgtaccactgcactccagcctgggtgacagagtgagactcttgtctcaaaaagaaaagaaaaatgccatctgtattatttatatacaccaatgacttaatctctatctttagcctcagttgccccactgaagtccagacttgtatattcagctgtcagcatctgcacttggctgtctgagtcatctgaagcttaacacatctaaaactgaattcttattttccctctaaactagtttttctcatggtaatcatctcaataaatgctaccgtttattaccaagttaattggactaaaagccttggcattattcttgacttttctctgacatgatatccagcaaatcctgttaagctctgtcttcaacatacttctttttgttgttttgttttattttgttttgtttttgagacggagtctcgctctgtcatccaggctggaatgcagtggcgccgtctcggctcactccaacctctgtctcctgggctcaagcaattctccaggctcaaacgattctccttcctcagcctcctgagtagctgggattacaggcatgcaccaccacgcctggctaatttttgtatttttagtagagacagggtttcgctatgttgcccaggctggtctcgaactcctgacctcaggtaatccgcccgcctcggcttcccaaagtgctaagattacaggcgtgagccactgtgcctggccttcagcatacttcttgaatcagccacttttcactgccacactgctgctcacctagttgaagtcattatcatctcttccctgaattactgcaggagctgcttacctggtgtcagtttccactcttggctgtttattctcaacataataaccagcatgatccttttgctacatagtttcatcaggtcacttccaatcctaccatgacttcccatcacacttactaattccaggttttagccctgtttcccttctcactcatttcctgaaactttccccctccctccctgggctcctggcaatattcgtggcacttcagagcacttatctcttgtacgttgtatttgtttatttaggggagggagtttcttaatctactggaaggttaactccaccggggtatgtgcttgtcttgttcaccaatataatccagtgcctagaataatgtctggtcataatggtgttaattgagcatgtgtgtgcttgcatgcatgtgtaagtgaaggaaattggcaccaagatctccacctaaggaggtcctagtttctcacagttactcacccctcttctccttgaggaccgcttgatatggctagaactcctgccttggccacaggagccactgtcagtagtggtaggtggaaaagttcttgctgccagagtaaggggccatgtttttccggcatcccagcgggatctctgactactttatctgatagaaagtaaagattcctggccaggcgctgtggcttacgcctgtaatcccagaactttgagaggctaaggcgggtggatcacgaggtcaggagttcgagaccagcctgaccaatatggtgaaaccccgtctctactaaaaatacaaaaattagccaggcgtggtggcgtgtgcctgtaatcccagctactcgggaggctgagacggaagaatcacttgaccccaggaggcagaggttgcagtgagctgagattgcaccgctgcactccagcctaggcaccagagcgagactccgtctcaaaaaaaaaaaaaagtaaagattccctactaccattgatgctaaagttcaggtactttgtggatatgctaagaatctagccattatgtgtacactgcttttttgggaacaccatgacaccatagcccatagtatagctggttttaccacctctaatctctctgtttggtctgtagatgaagattcagcagaagcttattgatgctgttatctttttattagctaccaggactcctacataaatgaccagttttaagcccttgggaagcagtttttcattgaatgtgcttagattgtgcttaatgtattaagcaccttacataacttttattaaacagagacggggtcttgccatgttgcccagcctgttctcaaactcctggcctcaggtgatcagcccacttcagcctcccagagtgttgagattacaggcgtgagccactgcgcccagctatataatcttacttcattgtgactagtcaacaatcttttgcccacattttacagagattaaataccttgtgagaaccccacagttaataagaggtgggactgactccaaagttgtgtttcttctccatcacaaatacattgctcatggtatggttccccagctcagaaactatcagtggttctcagatgcaagcaacataaagaccagaccaggggtcagccaccttctctgtggagggtcagataataagtattttagtctcgagggccatgatggtttctgtcagatctgttcagctatgtctttgtggcagttatcaacaatatgtaatgagtgggcatggctgtgttccagtaaaacttctttatttacaaaacaggtggcggaatagatttgcaggccccctgacctagatgcttgtttggcgttggaagactgcaacattcctggcccgtagtctagtgatgcccggtgcagcattatcttctcttaactccctagccttcaagtgccacgatttaacttcttcgcctttgctagtgtggtttttttctgaaacacttttccttctctctgctttgccagatcatcatccctgctctgagggtcatttaaggtctgttgctgtagaacctaaccacgtgttgcagtattcagtgcgtcagctgctataggactttctatcttccctctcacttgcatatttacatagtaagaaagagaggacagataccaattctcttgtatttgttcacagctgtcacagtataccatgggtaaaacacattaaaattaaatatctgtatcttgatatctcttgttttctttacaggggggaccttccttggagcagaggtttgaatcctattacaactactgcaatctcttcaactacattcttagtgagtctgagatttggccaagagggtgtgtgtggttatgatgaggttcagcattggcctccagcttttttttttttttttttaaattagcaggatcttaatgtgtaggtgggaagaggggaggtcttgtgattcatggtccttttaagagagaaattacaaagcattctgcagcctacagaatgggcagagtcattgctttgaatctgacttttctgtgatctcctgcacagatgccgatggtcctgctccccttgaactacccaaccagtggctctgggatattatcgatgagttcatctaccaggtatctggtcagcttcagcctaatttgaaataactggtccatgccaggaatagctgttactattgtttgtgtaaaaaagctgcagggtgtaaaaatatccccattgtagtgtaaaataccccatggcagtagactccagtttcagctggctttcggaagaggcagggaagcctaagcactccagataggaagctggaagtcggataagttcagctcctgaccttcatcaagctcttactagaccttgttaggtggtctggtggtaagaacacaggcttcacaggctttggagcgaggtggaagtggattctaacttgggtgctgccacctgctggtagctctgtaacagtgatgtgctatttaaactcagagcctcactttctttacccacacaatggaaatgttctattatctttttttttttaagagtcagggtcaggccgggcgcggtgactcacgcctgtaatcctagcactttgggaggcagaggcgggcagatcacgaggtcaggagatcaagaccatcctggctaacacggtgaaaccccgtctctactgaaagtacaaaaaattagccgggcgtggtggcaggcgcctgtagtcccagctactcagtaggctgaggcaggagaatggcgtgaacctaggaggcggagcttgcagtgagccaagatcgtgccactgcactccagcctggtaacagtgcaagactccatctcaaaaaaaaaaaagaaagagtcagggtctcactctgttgctcaggctagagtgcagtgataatagcttactgcagcctagaactcctgggttcaagtgattttcccacctcagccacctgagtagctgccactacaaggcccacaccaacttacgtggatatttatattactgtagagacgagggtcttgctgtgttgcccatgctggtgttgaactcctggcctcaagtgagcctcttgacttggcctcccaaagtgagccaccatgcctagccatctatatcttgattgtggtggtggttacttaagtgtatgctcgatcagaatacaatagaacattttcatcacaacaagaatatcacctacctcaggagttgctgttcaaggtcgaatgagaactgtgccaaatgcaaataaagtacagcagctgtgtagcctgggggtaaaagtccaggttttgctgttgctgtttactggctttttttttttttttggagatggagtctgactctgttacccaggctggagtgcagtggcattatcccggctcactgcaacctctgcctcccgggttcaagcgattctcttgtctcagcctccccagtagctgggattacaggtgcccaccaccacgcccagctaatttttgtatttttagtagagacggggtttctccatgttgaccaggctggtctcgaactcccaacttcaggtgatccgccctccttggcctcccaaagtgctgggattacaggtgtgagccaccgcgcctggcctactggcccattttaaaatggtaacatgttctgttgtgggcacattacttaaccacactgtgcattggtttccccatctctaaaacggattgctgcgaatgttgctgagatactacgtatagagtgtttagcatagtgcctgtcacagaataattaatacacgttgcctgttgattgtgatgatgttcaatgtcatcattattcttttccatcttatttagcccagtccttctatttaaaaatacagattgctcacaactgtaatcccagcatttttggggtccaaggcagtaggatcgcttcagtccaggagttcgagaaatagagactacaaaacataaaataggctgggcgtggtggctcacgcctgtaatcccaacactttgggaggcctaggtgggcagatcacgaggtctggagatggagaccatcctggccacaatggtgaaaccccatctctactaaaaaaaaaacagctgggcgtggtggtgtgcgcttgtaatcctagctactcgggaggctgaggcaggggaatcgctcgaacccgagaggcagagcttgcagtgagccaaaatcgtgccactgcactccagcctggcgacagagtgagactctgtctcaaaaaaaaaaccaaaaaaaataaaatatataatttgacaaaatataattcttttccccctttttgtgctgtctatagctctaactgattatttcaggataaattggtatcttaataaagatgttattagaactccgtgaaccagggagacgttgtgtatacaaagtgctgaaccgttacgagtggtgagctgagaaaccttcatagtgctccttgagaaggaggcttcctgctcaagattaggcttcagtgcctttcatagcaaaggccacaaaccgtactggccttgtttgccctctggctccttggcttgtgtcatccttttatttggaatatttatagatgaatagcagtctttttgacttagagcaagtgaagaaggatcatccgtgctgattttctttatccctcttaagataatcataattccctgggcttagccagtgttgttgttaaggggcttacggtgctttctaacaaagactgtccagtgagggtcagtaagtggctggtgtatttcgtcctggccaggtagatgccacatggggtaggtggctcttcctcgccaccctgttttatttatttgtttttgttttttcaaactacagatatagtgaaagtgcctgccttgcttgcttttgcagaggtatcaattactgtctggaaggaaaggcaccttgttgatgtttctcaggcacttacataaacatgactgtataaagagagatcacttcaaaaatggttacgtactctattgtgccatttactgtgacttgttaacacacttaaaccatattttcatagacctgacttgctcttttgctgcagtgtgcgtgatatggatataccatgcctctgatgatgaacctttgggttgtcagtttccacaattacaggcagtgaatcagtgaatatccatatatatgttgtacacaggcatatttttagggatcactacctagaagtagaattgtggattgaacgatacttgctttttaagtttttttaaatcagcttactgaggtatagtttatttttttaagtagagatgagccaccagctcgcgcctgttaatcccagctctttgggaagccaaggcgggtggatcacgaggtcaggagttcgagaccagcctgaccaacatggtgaaaccccgtctctactaaaaatacaaaaaaatcagccgggcgtggtggcaggtacctgtaatcccagctatttaggaggctgaggcaggagaatcgcttgaacctgggaggtggaggttgcagtgagctgagattgcgccactgcactccagcctgggtgacaaagcaagactctgtctcaaaaaaaacaaaaaacaaaaaacaggtgtgaaccaccatgcccagccatgaggtgtagtttaatatacaataaaatgtaccagaatcagtgtacagtggatgagattcaacaaatgtgtacagtgccacaatcaagataaaagaacgtttcaatcactttgaattataataaatagtaatatattgtcccaccaatgggctgtatcaaattgtgttactaccagcggtgtttgagagcaactgttggtttttttgtttctttgtttaagagatgggggtcttgcctttatggtccaggctggagtgcagtggtgtgatcatagctcattgcagccttgacctcctgggctcaagcaatccccccaccttagcctcctgagtagctcggactacaggtgcacccagctgatttttaatttgttgcagagatggggtcttgaaatcctgggataaagcaattctccctgctcagcctccaaaagtgctgggattacaggcgtgagccaccatgcctagccaagaccaactgttttctgtactggatattatcagtctgtctaatttttgtcagttcaatgggaaagaaattctggccgggcgcagtggctcacgcctgtaatcttagcactctgggaggccaaggcgggcagatcacttgaggccaggagttcgagaccagcctggccaacatggtgaaaccccgtctctactaaaaatacaaaaattacccagacttggtggtgcatgtctgtaatcccagctactcagcagctgagggatgagaatcacttgaaccgagaggcagaggttgcagtgagctgagatcacaccaccgcactccaccctgggcagtagagtgagattccgtctcaaaaaaaaaaaaaaaaaaatcagcgcggtggttcacacctgtaatcccagcactttgggaggccgaggcaggcggatcatgaggtcaagagattgagaccatcctggctaacacggtgaaaccccgtctctactaaaaatacaaaaaaatttgccaggcatggtggtgggcgcctgtagtcccagctactcaggaggctgaggcaggagaatggcgtgaacccaggaggcggagcttgcagagagccgagattgcaccactgcactccagcctcggagacagagcgagactccatctcaaaaaaaaaaaaaaaagaaaaagaaaaaaaaatcatacttttctgatttcccatattaattgtcaattttgttttctttgaagtgatcatcactattctttgcctgttttctatttgattgcttttttaattgcattacgagaattctttgtaggattttttttttttttttttttttgagacagagtctcgctctttcgcccaggctggagtgcagtggcatgatctctgctcactgcagtctccacctcctgtgttcaagcgattttcctgcctcagcttcccaagtatctggattacaggtgtgcaccaccacgccctgctaattttttttttttttttgcatttttagtagagacggggtttcaccatgttggccaggctggttttgaactcctgacctcaagggatccacccatctcggcctcccaaagtgcttggataacaggtgtaagcgccaccgcacccagcctgagaattctttatatattctggatattctttttttttcccccctaaggcggagtcttgctctgtcacctaggctggagtgcagtggcgtgatctcagctcactgcaacctctgcctcccaggttcaagggattctcctgcctcagcctcccgagtagctgggattacaggcatgtgccaccacacctggctatttttgttttggtgctttttttttttttttttttttttttgagacggagttttgctcttgttgcccaggctggagtgcaatggtgcgatcttggctcaccgcaacctctgcctcccaggttcaagcgattcacctgcctcagcctcccgagtagctgggattacaggcatgtatcactgtacctggctagttttgcattttttgtacagatggggtttctccatgttggtcaggctggtgtcaaactcccgacctcaggtaatccgcctgcatcggcctcccaaagtgctgggattacaggcatgagccaccgcacccggcctgtttttgtatttttagtagagatggggtttcaccatgttggccaagctgttctcgaactcttgatctcatgatccatccaccttggcttcccaaagtgctgggattataggcgtgagccaccgtgcctggcatattctttgtttttatattacaaaattagcattttgtcccacagtctagaagaagataattttttgtgttttgagacagagttttactctgtcactcacactggaatgcagtggcacaacctcacctcactgtagcctccgcctcctgggctcaggcaaagcccgtacctcagcctccttagtagcggagactgcaggtgcctgccaccattcctggctaattcgtttgtgttttttatagcgatagggttttgccatgtttcccaggctggtcttgagctcctggacccaagtgatctgcccacctcagtttcccaaagtgctgggtttacaggggtgagcctctgatctctgctggaagagttgaagaacagtcttagatcttctaagacctaggttttaggtctgtgatttccaaacctgatgcacaccagattcaaccagagaactttaaaaaattgagtaggtaggtctgttgtgttccatctgtgtgactgctggagccaggccaggagtgcttccaggttctacttctgtcccaaacagattcctgtggcatatcttctctgtgttcgttgtgcttggccagacgactctggttgagagtggtagagaggtgacatagtctgggaactgatggtcagctgtggtagggaaggctcacacgtgcagatacctattaccacatcactgcccataacccagggcgtaccacagtctagctgcatctgaatagatggtacaagagcccctgtggtgtttctggtggcccggtcaactgcattgtgaggcccagagacaggaagtgactttgggttgtgtttgactccagattggatgtttttaccacagactacctctaatcctagagatttttacttcactgtgtagtaagtaacattcagtaatgaacagaattcacagtttagtcaagatggctttgaaaaacagtgtacggaatggtttagaatgagaagtggtcatctcaccctcaccttgccccatccagagccagagcattgcctcgttttcagcattgtggacatggatgatcactttgggcttataccactactgcatgtttcttttcttcctcaacagtttcagtcattcagtcagtaccgctgtaagactgccaagaagtcagaggaggagattgactttcttcgttccaatcccaaaatctggaatgttcatagtgtcctcaatgtccttcattccctggtagacaaatccaacatcaaccgacagttggaggtatacacaagcggaggtgagtgcagcaggccgacagccgtggcctgcgaatttccagctgcttgccatctgttccaaatgaatagatcactgcaaggagagcagatgagtcaccatgtcttaggtggtggtctgttgactctttgtaggtgcttgagtacaaacagtagcagagtatttgtgctgggggctctggggcttgggagtccattggccaacagactgaaccagcacattgagatttgcgtttgtaaacacttctgtgtctccagtgcttttgtttagataagcacttctcacacgtgttggtgtcagagccactttaccctgttaaaatattgagaaccacaaaatgtatctattttaaaaaatttttttctttttttttcagtgaagagtggcatttttgcagatctctctgtctggctgagatagctggcttctcatttctgcttctgcattcaatctgttgcaatgtgttcttttgtttgaagcacataaagaaaatctggcccaggcactgtggctcacacctgtaatcccagcactttgggaggcttaggcagaaggatcgcttgagtccaggagtttgagaccagcctgggcaatatagtgagactttgtctcaaaaaaaatgtttaaattgactgagcatggtgggtggggtgcccctgtagtcccagctactcgggaggctgaggtgggaggattgcttgagcccaggaagcaaagattgcagtgaactgagatcacaccactgtactctagcctgggccacagagcgagaacttgtctgaaaaaaaaaaagaaggaaaatctggcttcacacggttataggaagtttttttgttgtttgtttttgagacagggtgtcgctgtgtcacccagtctggtcttggactcctgggctcaagcagtcctgccttggcctcccaaaagtgccaggattattggagaggattttctttgatactacaccatgtagtagtatgtatgggttgaatattcctgacttgaaaatttgaaatctgaaatgctccaaaatctgactttttgagcaccaacatgacgccgtaagtagaaaattctacacccaacctcatatgagcagttgcagtcagaacttcgtctcatgcacaaaagtatttaaaagattataataaagttactttcaggctgtgtgtataagacatatatgaaaaataaatgaattttatgtttagatttggatcctatccttaagatactcattagggccgggtgccatggctcacgcctattatcctggcattttgggaggctgaggcgggcagatcacctgaggtcag

SEQ ID NO: 2622 - protein, 194 aa, Homo sapiens
MTENSTSAPAAKPKRAKASKKSTDHPKYSDMIVAAIQAEKNRAGSSRQSIQKYIKSHYKVGENADSQIKLSIKRLVTTGVLKQTKGVGASGSFRLAKSDEPKKSVAFKKTKKEIKKVATPKKASKPKKAASKAPTKKPKATPVKKAKKKLAATPKKAKKPKTVKAKPVKASKPKKAKPVKPKAKSSAKRAGKKK

SEQ ID NO: 2623 - DNA, 446 bp, Homo sapiens
tttttttttttattccaatgaataataatcacactttaatataataacaaacatacaatacattaaagttagaacactactttgataagacaatcatactcaagctaagatacaaggtacagacatactgaaattgtaaagtgaccattttaatgtttgatatttacttctcttattggcacaagactaataagatagatgggttgtattactcttaaaatctaagacttctcctctagctcagggaaaatactggtggaaacctgttttacccaaaagcagctttaatatctgtttaaccaggttattctataataagaactccattttaatgcacgttatccattacaaatgtgtgagatattctataaaacacatatttaaaggtccctatcctcatataaaacattggttagtgaatatgctacagctttatttctatgttt

SEQ ID NO: 2624 - DNA, 757 bp, Homo sapiens
ttttttttttttttttgaggtggagtttcactcttgtcgcccaggctggagtgcagtagtatgatcttggctcactgcaacttctacctccagggttcaagtgattctcctgtctcagcctcctgagtagctgagactacaggcacataccaccacacccagctaatttttgtatttttaatagagacggggtttcactatgttggccaggctggtctcaaatgcctgaccttgagtgatccacccgcctcggcctcccaaagagctgggattacaggtgtgagccaccaggcccggcctcctagattaattcttgacattttttggatcaagtaagaaccactggagcctttcctggaaaaaagaacacatactcagtctcacacacaatttctgggggctcacagaccctcttgaagcctatccataaaccccctggtgaagtccccctgcccgatagcctgagggaagacatgtgagtggatatatgtgcactaacaggggcgaagacagacctggatggtctgcaatcccagagagcatgaggcaccatgtcccaaagcttggtatgtggccctgggctcctcccccaattttatctctctgaagaagctgagttttttttttttttttttgagacggagtctcactctgtcaccaggctggagtgcagtggcacgatctcagcttactgcaatctctgcctcccgggttcaagcgattctcctgcctcagcctcctgagcagctgggattac

SEQ ID NO: 2625 - DNA, 416 bp, Homo sapiens
ttgtatttttttagtagagacggggtttcaccgtgttagccaggatggtctcgatgtcctgaccttgtgatccacccgtcttggcctcccaaagtgctgggattacaggcgtgacacccgtgcccgaccaatgaattcttattaaattactttatcatctgtcttgttagccttactctttcctattaacttctttgccccctgctccctttttgaattgagtggctaaattttagaggtttgtagcttttgtgtgtgtgtgtgtgtgttttatagatggtaagtgatgcttgtacattttgtacatgaatgaatacgtattttagcagacttaaaacattaacagtaattgaccttatacattttgggaaagaaaaattaaatcttcatgctactacgatttttttaaatgtggc

SEQ ID NO: 2626 - DNA, 925 bp, Homo sapiens
cgtttcataatatgtttcttcacatgtttcaatcatcataaataaaaatagccaccatgccgccctacaccgtggtctatttcccagttcgaggccgctgcgcggcctttaataaggagcaaaagtactgcgcatgctgctggcagatcagggccagagctggaaggagggagtggtgaccgtggacagtaaagggtggaataggtaggaacgtgccaggagggctcactcaaagcctcctgcctatacggggagctccccaagttccagtcgggaactggggtgctgagacggagacctcaccctgtaccagtccaataccatcctgcgtcacctgggccgcacccttagattgataggagtgtagggctctatgggaaggaccagcaggaggcagccctggtggacatggtgaatgacggcgtggtgagggaaaaaataaagagtagaggacctccgctgcaaatacatctccctcatctacaccaactatgaggcgggcaaggatgaagctttatgaagagtagactatgtgaaggcactgcccgggcaactgaagccttttgagaccctgctgtcccagaacataaagggtgagtacagggaggcaagaccttcattgtgggagaccagatctccttcgctgactacaacctgctggggtagagaaatagtagacttgctgctgatccatgaggtcctagcccctggctgcctggatgcgttccccctgctcagaaagcaaagtatcagcatatgtggggcgcctcagtgcccggcccaagctcaaggccttcgtggcgtcccctaatagagaaagaaaaagtccagagtacgtgaacctccccatcaatggcaacgggaaacagtgagggttggggggactctgagcggagtaaagagggtaggaataaaatttctaaga

SEQ ID NO: 2627 - DNA, 672 bp, Homo sapiens
ttttttttttttttttttttttttttttttttttttttaaaaggggggtcatttctttattattttatttgtatggttaacaatgatcagccatgcaagaataaatgattattgtaaaatctgcaaacaatgtagatatgtagagagtcccttccttggagcttgaccttgtcagacaggtatagatgagtgttccggggcagccgtaaaaactgccagagactgggctgcttataacagaaacgcatggtctcccagaagcccacattcaaggggtccaaaggcctggctcctggaggctctggaggagagcctgttccctgtctctcagcttctgccggttgccagcaagtgttgccgttcattcactccagccactgcgtccatctgcacacagcaaaacagcgtatcctgaagtgctcaaccttatagccattattttaaaatatccggaacacacaggaccgtgggagtggcaaggtgtgtaatgtcatccacggcccagtgcaaaggaacacaggtgctgccgtcagactgccagggtccgatcccgcctcctcactcaccccgggagatccctttaagccaggagtcaacagtgaggatggaaacatgagtgctttttaaagtcctacaaacccccatcatcagatatgctctccacaatcaaat

SEQ ID NO: 2628 - DNA, 391 bp, Homo sapiens
ttttttttttttttttttttttttttttttacaattgcaaagattttatttagcggctttctgtgcttggcacttaaaaacagagttccgggcataagggcaaatttttggacaccttttcttcatacatattttacatacccttttattgccccctttttcatattcataatattggattccccactaggcacataaatacatttatttacaacacctcaaaaccagaaactttaataatatctgtattattttacttggtattatttgcatttccacaccatttaaaaattttagcttgcaccaagcttcacttgctttcttaccattaaaagatttgaagggaaagggaaagatgaaggacaaaacccaaaacttcaaaatgcaatgt

SEQ ID NO: 2629 - DNA, 187 bp, Homo sapiens
gacagactgacgtgtgagctgcatcgcgggaggcgcatggcggggatggcgctggcgggggcctggaagcagatgtcctggttctactaccagtacctgctggtcacggcgctctacatgctggagccctgggagcggacggtgttcaattccatgctggtttccattgtggggatggcactttgca

SEQ ID NO: 2630 - DNA, 2174 bp, Homo sapiens
gttgacactttgtggtgatatccaactaatgctggcccagaatgcaaataatagagcagcacaccttgaagagtttcattaccaaacaaaagaagaccaggagatcctgcatagccttcacagagagtccagttgccaaggatttgcatgggcaactgatttgtctacagacttagaaagtcaactctctgttagttgtaaatgttatgaggctgctaatgaaatcttgcagtttagtgacttgaaaagccaaaatccagaacactatgtacaagtattaaagagaatgggtaacattagaaatgaaattggtgtgttttacatgaatcaggctgctgcattacagagtgagagactagtgagcaaatctgtgtctgctgccgagcaacagttgtggaaaaaaagcttttcttgttttgaaaagggaattcacaactttgaatcaattgaggatgccaccaatgccgcccttttattatgtaacacgggaaggctcatgcggatttgtgcgcaggcccactgtggtgcaggggatgaactgaaacgtgaattttcaccagaagaaggcttgtattataataaggctattgattactatttgaaagcgctaaggtcattgggaacacgagacatacacccagctgtttgggattcagtgaactgggaattgtccactacttactttactatggcaactctacagcaagattatgctccgttatctagaaaagctcaggagcagattgagaaagaagtcagtgaggccatgatgaagtccctaaaatactgcgatgtggattcagtgtctgctcgacagcccctttgtcagtatcgagctgcaaccatccatcacaggctggcctccatgtaccacagctgtctgaggaatcaggttggtgatgaacaccttaggaaacaacaccgggtgctggcagatcttcattacagcaaggccgcaaagctgtttcagctgctgaaagatgctccctgcgaactgcttagagtacagctagagagagtagcatttgctgaatttcagatgaccagtcagaatagcaatgttggaaagttgaaaacactatctggggctcttgatataatggtgagaactgagcacgcattccagcttatccagaaggagcttatagaagaatttggccagcctaagagtggtgacgccgctgcagctgctgatgcttctcctagtctcaatcgagaagaagtgatgaaactcctcagtatatttgagtctcggttgtcatttcttctccttcagtccattaaactgctatcttcaactaaaaagaaaacaagcaataacatcgaagatgacacaattctcaaaaccaacaagcacatttactcccagcttttgagagcaactgcaaataaaaccgcgactcttctggaaagaatcaacgttatcgtccacctgctgggccagcttgccgccggcagtgcagcgagcagcaatgccgttcagtgactgcacagagccgtgtcccagacacgctgtcagtgccttcaacacggagccggtttgttcattcggtgctttgtttcattaaataatagggaaatatccatttaaaacaggtatatcagtggaaacacagagttattttaagtgacagacaaattacggttgagttctgtggcttcttcacttgaagtgctaacatcagaatcaaacttaaagcttccactatttatgtctttgagaagtatgtagtacctcggtattaacagacctgctgtgatgcagttacactttcacgtatttttgaagtatgtcaagctacacgggtctaagatatgattattttggataaaatgttactttggtcaagagaacttttatccagatgacattacaggttcaagtgggttaaggagacctcctgtacatctacagtgtttccttttaaattgtccagaaaaaaggtgtgttcttcataagcttcagtgcaggatttttcaaagacgagctgttgtgcaatttgctgtatttaatgcatgttctgaaaggattcacttttgactttatatgacagttgatcaagaacaggtactacccctttttttcatttcaaacttgaaactgtgaataaggtaagaaaactattttgaataaataaactatttatttaaaatgtcaaaaaaaaaaaaaaaaa

SEQ ID NO: 2631 - protein, 494 aa, Homo sapiens
LTLCGDIQLMLAQNANNRAAHLEEFHYQTKEDQEILHSLHRESSCQGFAWATDLSTDLESQLSVSCKCYEAANEILQFSDLKSQNPEHYVQVLKRMGNIRNEIGVFYMNQAAALQSERLVSKSVSAAEQQLWKKSFSCFEKGIHNFESIEDATNAALLLCNTGRLMRICAQAHCGAGDELKREFSPEEGLYYNKAIDYYLKALRSLGTRDIHPAVWDSVNWELSTTYFTMATLQQDYAPLSRKAQEQIEKEVSEAMMKSLKYCDVDSVSARQPLCQYRAATIHHRLASMYHSCLRNQVGDEHLRKQHRVLADLHYSKAAKLFQLLKDAPCELLRVQLERVAFAEFQMTSQNSNVGKLKTLSGALDIMVRTEHAFQLIQKELIEEFGQPKSGDAAAAADASPSLNREEVMKLLSIFESRLSFLLLQSIKLLSSTKKKTSNNIEDDTILKTNKHIYSQLLRATANKTATLLERINVIVHLLGQLAAGSAASSNAVQ

SEQ ID NO: 2632 - DNA, 4477 bp, Homo sapiens
gaattctgggaagaaacaaagagttgagttgcttcttaagatggaaagaagtgtactgtttggactgttattttaaaatacagggtggtgggggaaatcgaggctccttggccggggagggagtaaagagaagcctaattgatgaagagggagttgaggtgaatgcggtccatgggcaccgatgggggaggcaagagcggcctccagcaccctgggaattgggctcaggctccctggcgccagataccctcggaatccgggatccccggctggcgccacggcccgctgggccaaggtcggtgcttggtgggccccatgatctcatctctcctttcttccttgccactattagtgctcacataggcagaaagaggcggcccgacgtgcaaaccatgtgcaaaccgcgcccgctgggctggtcagccgtctttccttgcctgccgacctggactatgtggagcctgggggaccctcttgcctcccaacaaaatcccctctctattgcacatcccattcaacaactctgcccagggcttttcgaatttctggatcaacttctttaggaaaaagggaagaagaagtctcagagacagcggtagagaaaagaggagagagagggagaagacagaagagaggagggggaggtagcgagattaagagttgcaaagataaaaaaaattctctttatccccccacttctccctccttccctgctctccccctccccccgccctctggctaagtggtaaaaccgtccttacgttctcggtattgattggcagggctgacagtgattggcagtggttgccgtggcaacgccacaacgacacgccacagaccaatagaaaagcgaaacaaaatgtttcaatgctgcactcactgtggatttaggggagatattatgaggctgttgtcattagggcgattgcggtggaatcgctgaatcttgactcggcggtggttggctctccctctcctctctccctctccctctccctctctgtctcgggttctctctctgcgcgcgcgcaccgggccgctctcctacctccctctctatgtggctgcgcgggtgtgtgtgtgtgtggatgtgtgtggggtgtgggtgtcccttacgcccttcctcctctccctcctcctcctgctcccccctcctttccttctcctcctcccccctctcctctccctcctcctggtcctcatcgcccctctctcctcttcctcccctctctcttcctctccctgaattttctcctctcctctcaggtcagtccatggtattccgctcccccctagacctctattcctcccacttcttgttgccaaacttcgccgattctcaccaccgctccatacttctggcgagtagcggcggcgggaacggtgcgggaggcggcggcggcgcgggaggcggcagcggcggcgggaacggtgcgggaggcggcggtgctggcggagcaggcggcggcggcggcggcggctccagggcccccccggaagagttgtccatgttccagctgcccaccctcaacttctcgccggagcaggtggccagcgtctgtgagacgctggaggagacgggcgacatcgagcggctgggccgcttcctctggtcgctgcccgtggcccccggggcgtgcgaggccatcaacaaacacgagtcgatcctgcgcgcgcgcgccgtggtcgccttccacacgggcaacttccgcgacctctaccacatccttgagaaccacaagttcaccaaggagtctcacggcaagctgcaggccatgtggctcgaggcgcactaccaggaggccgagaagctgcgcggccgcccactcggcccggtggacaagtaccgcgtgcgcaagaagttcccgctgccacgcaccatctgggacggcgagcagaagacgcattgcttcaaggagcggactcggagcctgttgcgggagtggtacctacaggacccctaccccaaccccagcaagaaacgcgaactggcgcaggccaccggcctcactcccacacaagtaggcaactggtttaagaaccggcggcagcgcgaccgcgccgcggcggccaagaacaggttagtggcggggcccgcggcctggctacagcctcagaggcctgggaaggggagaggggttgagatggggctagcggagcggccgctgagagccagggaagccgtgactcctggccagtcggagaaagtttccgcttgtccgggacgcgcggaagagggggccgggctggctgtgggtgtattgattgctttgaccaagaggggctttcgtcagggcagagagtgtgtgcttgcgacccgagtacccgcagcccctgggagacttagccctgcgctgcacccgtgcctgcctcctcagccctgccgccagctcggcgatcctctggagcctagagacagggagggaaggaaagcactctttgccatctggttcttatttctgtgcgttgcaaaaccccgagagaaatccactagcgtcagagagaggaaagtgaacctgggtccctatcacaaggggaaaaggccagaggccactgcgcagcgggcctgtttccccgcaacgctgcacgttgcctgaccgggagcaggagagccgggctgggagtggagaggcctagcgtgtgcgtgtgtgtgtgtgtgtgcacgccccgtgtgcatgtactcgccctcctgtttcagccgaggagaatccctttggtcctctaagctgggaagcgggcacgagcagcctcgttgccggcaagttggccacaaagtcacaaaattgtatagggcttgaccaacatcacaggagctgggcctgggggaaggagaaaaagaaccagagggaaagaagtggataggcgaaaggagtggggagagaagggagaaagaaaagaggaagttgggtgaaagccctgatgtggagcctgtgtctttctctatccagccaggaaggcccagggcctggtgtacttcagggagcaggacccccagctgctgacagctgcccgtgggtgggggctgggtgtgagtttctggaggtgtgttcgagtttaggcggccgggacctgagcccatggccctctcacccctgccgtggagcccacttttcgtctgatgaggggagcgcccagggtcaagccaaggcctccttgtggagagaattccagacaccaggtccaggcagaaggttcccggtgggggaaagggcagctggagactgctctgtgcgcctctcttgccttctcctttgccccttttctgtctccctgctctttccccacttttccaccgccagctttcctattttctctaccctcggtcctgcgctctgcgctggcatccagagagcaaagtatgcagttctacccggagactggccgggcggtggggaacccgcagctcccggtgtgtgtttgagggagcagggacggggttactaggggaactcgaccggtcgcggggcagccggctcagtttgaagagccccagggactgcggagggaagaagcgcccggctcctctccgacttctgcttctccagggcttggcgtactttgtcgcttgcacccaaggcctccccaagcggccgggctcgggttctgcctctcctccgaggccagcctctatctgagaagacttgggatgctcccgaaagcggaatggggagcggcggcgcgggggagccgggtggcgggcctctgtgtcagggcgggcgcggatctctttctcccgcaggctccagcaccaggccattggaccgagcggcatgcgctcgctggccgagcccggctgccccacgcacggctcggcagagtcgccgtccacggcggccagcccgaccaccagcgtgtccagcctgacggagcgcgcggacaccggcacctccatcctctcggtaacctccagcgactcggaatgtgatgtatgatagccaaggccgccctcctccctctccttcccctcctcccccactccttcccctccgcctcctagccctcctcctcttcctcctcttccttctcctcctccatccccagaacaaaccgaaatcaggatacccaaccatacacacatacaagtccacacacactcccaccccagccaaaaatatataaaaaacaagaaaataacaaattaaccgcaaactatcaacaacccccaaccaccatctaccactacggccaccccaaaggaccccgacgccaacagacagtcaaacgctgatgttgcgggcagaaaacataaaagaggtgacaattgtatactttctaggacaagcacggcttctcctttcggttcccatggacccggcaccccacctgcatgacgatttatttgtatctgggaaaatattctctctagttaaaaatgatttaaagagtcgactatacaaagatcaatcaccaccacgaggacaagagggcaatgagcatgaacagacagagtaagaaacaagtcgccgtctccgttccg

SEQ ID NO: 2633 - protein, 332 aa, Homo sapiens
MVFRSPLDLYSSHFLLPNFADSHHRSILLASSGGGNGAGGGGGAGGGSGGGNGAGGGGAGGAGGGGGGGSRAPPEELSMFQLPTLNFSPEQVASVCETLEETGDIERLGRFLWSLPVAPGACEAINKHESILRARAVVAFHTGNFRDLYHILENHKFTKESHGKLQAMWLEAHYQEAEKLRGRPLGPVDKYRVRKKFPLPRTIWDGEQKTHCFKERTRSLLREWYLQDPYPNPSKKRELAQATGLTPTQVGNWFKNRRQRDRAAAAKNRLQHQAIGPSGMRSLAEPGCPTHGSAESPSTAASPTTSVSSLTERADTGTSILSVTSSDSECDV

SEQ ID NO: 2634 - DNA, 1837 bp, Homo sapiens
ctaggacaactcaaaatattttttcaaatctcccctacattgttcctgtgtcagaaaaactcagtctcctgacacatgaggtcagctagctcattagacttgataagtttaaggacaggtgagatgactttccagaagggtctccaataaacttaatttgaaaactgtcttgtcttcacacccctgatgctctgtgctcttgttaccacctccctatcttaccaaatggggttatctgtcatgtattttaattatgaacttagtgaatctcaaatgttaggtaattttatcttaggattgattaaggttttttaaaattatagttgccagttaattattttcctttattgatagaataaaatttgttaaaatagcatttagagatgatcatgtgatagaggattcattatgtgtgctttccatgtgttgctttctacccattgtgtttcctttttttccagatttctcctctttgccctgcccttcagcttttctcagctaggccccactgctctaaggggcatttactacagcacctattaaacttacttgtaactgtctctttttttttttttttcccctttgggccaggtcggggtatgataggtcggggaagagggggctttggaggccgaggccgaggccgtggacgagggagaggtgcccttgctcgccctgtattgaccaaggagcagctggacaaccaattggatgcatatatgtcgaaaacaaaaggacacctggatgctgagttggatgcccacatggcgcagacagatcccgaaaccaatgattgaagcttgcccatcctcccatgagagactcttgttagtcaacacatctgtaaataaccttgagataacagatgagaagaaatctgattgatgctggatggacctatcacaataggctgtggacttacttgccaccagcttgtgcatttagtgtgttccttttactttttgatactgtgttgtatgaaacccttttgtcctttgatttggttttttgtttttgtttttttaggggggagggggggtttcccctcctttgcccagacttctctttgaacacaaacgcattagccttgtggctagaacaccctcttcctacctctgtctcccctcacttgtcatatgctctgacatgctaacatttcttttgttcatccctgttgcccccacagaaacatcccagaaaaaccggtcagtgttccttcctccctgatccttaggtttctgaaatagggttctgttacatcctcttcgatagcctgtttaaaatgtttagaaggtctggagctcaaaaatgcgttcttccacattgataatttagtaaactgagaacattgacatcactacagggcagcataagaggttgcttacatgtggtagcagctctggtttgattcaagttgctaccatgtacattgacagcacatataccataaccagcgtgttgggttgaattgcactttctacctttgtatgagatttacagactttccttctgggtttgtatcatgaccagaggggtactatagggttggtttatactgcaatatagaggatcagaagccatttgatttggtaggtgtgtcagaagggagaatgatggcagacgaactgctggaagaggtcagaagatagccatgctaaaatgcaattatatcctcatgtttatcccaaactaatcttggacttttccactcattagctttgttttgcccttgtttcccttgaaggtttaagttcaaccatattctgtcaactgttcagtttcagtggaatcttgtatttctggttcattataacaaactgttcgcttaaaaaaaaaa

SEQ ID NO: 2635 - protein, 95 aa, Homo sapiens
MRRNLIDAGWTYHNRLWTYLPPACAFSVFLLLFDTVLYETLLSFDLVFCFCFFRGEGGFPLLCPDFSLNTNALALWLEHPLPTSVSPHLSYALTC

SEQ ID NO: 2636 - DNA, 1164 bp, Homo sapiens
gaattccggcggcctctctcctctccctcagtgactcctgagccacagcccctccatggcccagaaggaagaggctgctgtggccactgaggctgcctcccagaatggggaggatctggagaacctggacgaccctgagaagctgaaagagctgattgagctgccgccctttgagattgtcacaggagaacggctgcctgccaacttctttaaattccagttccggaatgtggagtacagttccgggaggaacaagaccttcctctgctatgtggttgaagcacagggcaaggggggccaagtgcaggcatctcggggatacctagaggatgagcatgcggctgcccatgcagaggaagctttcttcaacaccatcctgccagccttcgacccagccctgcggtacaatgtcacctggtatgtgtcctccagcccctgtgcagcgtgtgctgaccgcattatcaaaacccttagcaagaccaagaacctgcgtctgctcattctggtgggtcgactcttcatgtgggaggagccggagatccaggctgctctgaagaagctgaaggaggctggctgtaaactgcgcatcatgaagccccaggacttcgaatatgtctggcagaattttgtggagcaagaagagggtgaatccaaggcctttcagccctgggaggacattcaggagaacttcctatactacgaggagaagttggcagacatcctgaagtagggcaactgggctttgcctcacgtattcctgctgccaccaagagacagcaatgacatgtacagccatctgggacatgcctgtcttcctaataccatttggagctggacaacatttgacaccaaccaatcatactggacaaggcccttagaggacttgaaatatacttctcatgctgtagtttatttaggctgtgactctctctctaatgctgctctcgggaaggacgaaagtgacctgcaaggagagaaatgcaaccatacatgggctccagtcaactatgggactgaaggtcctaattgctcacccaagggggctgcttaacacaaacagcctcagacccgaggtttagatttctgaaatatgcattttatgttaagttgggtatttttttaaaaaaagaaaaacagcaacattaataaaagaagtggtgtggc

SEQ ID NO: 2637 - protein, 224 aa, Homo sapiens
MAQKEEAAVATEAASQNGEDLENLDDPEKLKELIELPPFEIVTGERLPANFFKFQFRNVEYSSGRNKTFLCYVVEAQGKGGQVQASRGYLEDEHAAAHAEEAFFNTILPAFDPALRYNVTWYVSSSPCAACADRIIKTLSKTKNLRLLILVGRLFMWEEPEIQAALKKLKEAGCKLRIMKPQDFEYVWQNFVEQEEGESKAFQPWEDIQENFLYYEEKLADILK

SEQ ID NO: 2638 - DNA, 411 bp, Homo sapiens
tttggtggtttgggtcaggtttattagattgttatgaatcccagcttttcctcctaaagcaggcccacacaatgagatctgcaaatccagaaacctaacaaaggcattaagttccaaaagcctgtttcctcctacaaaattcccattatcagtactgtgatttctgcttttcagtgttgaccccaagccatgttcctgagtcatggctctgagtggcccagcattaataagcccagcgtgcaagggcttgttgacagaactctgaaccgctttcaggcagctgattagaaaaaactggcgagtctccaagttgagtgatttagaggccttctgggggtcagaacatgagaacagagaccaggaacctgagtagggctgtctggagattttttgccccattttctgagaagc

SEQ ID NO: 2639 - DNA, 4848 bp, Homo sapiens
gcggtacgggggtggtgccgcgctcctggccccgcgcgggcggacggcggaggcgcctcccagcctgctatgggatggatgaagaagagaaccactatgtctcgcagctcagggaagtctacagcagctgcgacaccacggggactggctttctggaccgccaggagctgacccagctctgccttaagcttcacctggagcagcagctgcccgtcctcctgcagacgcttctcggaaacgaccatttcgccagggttaactttgaggaatttaaggaaggttttgtggctgtgttgtcttcaaatgctggtgttcgcccctcagatgaagacagtagttctttggaatcagctgcctccagtgccatccctccaaagtatgtgaatggttctaagtggtatggccgtcggagccggcctgagctatgtgacgctgccacagaagccagacgcgtgccggagcagcaaacccaggccagcctgaaaagtcacctctggcgctcagcgtctctggagagcgtggagagtcccaagtcagatgaagaggccgagagcactaaagaagctcagaatgaattatttgaagcacaaggacagctgcagacctgggattctgaggactttgggagcccccagaagtcctgcagcccctcctttgacaccccagagagccagatccggggcgtgtgggaagagctgggggtgggcagcagcggacacctgagcgagcaggagctggctgtggtctgccagagcgtcgggctccagggactcgagaaagaggaactcgaagacctgtttaacaaactggatcaagacggagacggcaaagtgagtcttgaggaattccagcttggcctcttcagtcatgagcccgcgctacttctagagtcttccactcgggttaaaccgagcaaggcttggtctcattaccaggtcccagaggagagcggctgccacaccaccacaacctcatccctcgtgtccctgtgctccagcctgcgcctcttctccagcattgacgatggttctggcttcgcttttcctgatcaggtcctggccatgtggacccaggaggggattcagaatggcagggagatcttgcagagcctggacttcagcgtggacgagaaggtgaaccttctggagctgacctgggcccttgacaacgagctcatgacagtggacagtgccgtccagcaggcagccctggcctgctaccaccaggagctgagctaccagcaagggcaggtggagcagctggcaagggagcgtgacaaggcaaggcaggacctggagagggccgagaagaggaacctggagtttgtgaaagagatggacgactgccactccaccctggagcagctcacggagaagaaaatcaagcatctggagcaggggtaccgggaaaggctgagcctcctgcggtctgaggtggaggcggagcgagagctgttctgggagcaggcccacaggcagagggccgcgctggagtgggacgtggggcgcctgcaggctgaggaggctggcctccgcgagaagctgaccctggccctgaaggaaaacagtcgcctacagaaggagattgtggaagtggtggaaaagctttcggattcggagaggctggccctgaagctgcagaaggacctggagtttgtgctgaaggacaagctggagccacagagtgcagagctcctggcccaggaggagcggttcgcagcagtcctgaaggaatacgagctcaagtgccgggacctgcaggaccgcaacgatgagctgcaagctgagctggaaggcctgtgggcgcggctgcccaagaaccggcacagcccctcatggagcccggatgggcgcagacggcagctccctggactcggcccagcaggcatttcattcctgggtaattctgctccagtgagtatagaaacggagctgatgatggagcaggtaaaggagcattaccaagacctcaggacccagctggagaccaaggtaaattactacgaaagggaaattgcggcactgaaaaggaactttgagaaggagaggaaggacatggagcaggctcgcaggcgcgaggtcagcgtgctggagggtcagaaggccgacctggaggagctccacgagaagtctcaggaggtcatctggggcctgcaggagcagctgcaggacacagcccgcggccccgagcctgagcagatgggcctggcaccctgctgcacccaggcactgtgtggcctggccctgcggcatcacagccacctgcagcagatcaggagagaggctgaggcggagctgagtggagagctgtcggggctgggagccctgcccgctcgcagagacctgaccttggagctggaggagccgccgcagggacccctgccacgcgggagccagaggtcggagcagctggagctggagagggcactgaagctgcagccctgtgcgagcgagaagcgcgcccagatgtgcgtatcgttggccctcgaggaggaggagttggagcttgcccgcgggaagcgagtggacgggccctccctggaagcagagatgcaggccctgccgaaagatgggctggtggcaggaagtggccaggagggcacacgtggcctcctaccactgcgtccgggctgtggggagcggccactggcctggctggccccaggtgatggcagagagtctgaggaggcggcaggagccgggcctcgccgcaggcaagcccaggacacagaagctacgcagagcccggcccccgcccctgccccggcatcccacggcccctcagagaggtggtcacgcatgcagccctgtggagtggatggggatattgtcccaaaggagccagagcctttcggcgcgagcgcagcggggctggagcagcctggagcccgggagctgcctctgctgggaacagagagagacgcctcgcaaacccagccacggatgtgggagccacccctgaggccggccgcttcgtgcaggggacaggctgagaggctacaggccattcaggaagagcgagcacgaagctggagcaggggcacccaggagcaggcctcggagcagcaggcccgggccgagggcgccctggagcctgggtgtcacaagcacagtgtggaggttgccaggagagggtccttgccatcccacctccagctcgcagacccgcagggttcctggcaggagcagcttgctgccccagaagagggggagaccaaaatagcgctggagagagagaaggatgacatggaaaccaaacttctacatctggaagacgtcgtccgggctctggagaaacatgtagatttgagagagaacgacagactggagttccatagactttctgaagaaaacactttgttgaaaaacgatctgggaagggttcggcaagagcttgaagctgcagaaagtactcacgatgcacagaggaaggaaattgaggttttaaagaaagacaaggaaaaggcctgctctgagatggaggtgctcaacagacagaatcagaactacaaggatcaattatcccagctcaatgtcagggttcttcaactgggacaggaggcttctacccaccaggcccaaaacgaggagcatcgtgtgaccattcagatgttaacacagagcctggaggaggtggttcgcagtgggcagcagcagagtgaccaaatccaaaaacttagagttgaacttgaatgcctgaatcaggaacatcagagcctgcagctgccatggtcagagctgacccagacccttgaggaaagtcaagaccaggtgcagggagctcacctgaggctgaggcaggcccaggcccagcacttgcaggaggtccggctggtgccccaggaccgtgtggccgagctgcatcgcctgctcagccttcagggagagcaggccaggaggcgcctggatgcacagcgggaagaacatgagaaacagctgaaagccacagaagagcgggtggaagaggcggagatgattctgaagaatatggaaatgctcctccaagagaaagtggataagctgaaggagcagtttgaaaagaacacgaagtccgacctgctgctgaaggagctgtacgtggagaacgcccacctggtgagagcacttcaggccaccgaggagaagcagcgaggcgccgagaaacaaagccgcctcttggaagaaaaagttcgcgctctcaacaaactcgtcagtaggattgcccccgcagccctctctgtgtaaagacagattattttctaggattcattcgaaagcacatcttttaaattaagccactgtgctgccttagattccgtgggtcatgagccatgagtcctgggacatctgaggattgggattctttgttcaccccgcagatagttaatgaatggtctgccctgggcaagatggaggtgggggctgggggaatatgcatgttgcagaagccggcgtttttattagcggtcctgagtaatttcccttggcaaaattcccagttttgccactctctggagccagatcctgggagctgtcagcaaggagcaggtaagtgagcagttatggacagcactttccatgtggtgcttccgaccctggctgtcagagtgaaatgtaaagtcagggctctgtacagttttgccatttcactgttctgctttaagcttagcttattagaactcttggtggagggtgcgtacacacattccagaaaaggcttcactcgctgggaacgtcaacccagcgagaaaggaggggaagccccttctccggggaccttatctgtggactcaggaatgatggtgtttattgcaaatgcacaatctttttcccattgaaatgtcatcacactggaaattgtactatatgt

SEQ ID NO: 2640 - protein, 1406 aa, Homo sapiens
GTGVVPRSWPRAGGRRRRLPACYGMDEEENHYVSQLREVYSSCDTTGTGFLDRQELTQLCLKLHLEQQLPVLLQTLLGNDHFARVNFEEFKEGFVAVLSSNAGVRPSDEDSSSLESAASSAIPPKYVNGSKWYGRRSRPELCDAATEARRVPEQQTQASLKSHLWRSASLESVESPKSDEEAESTKEAQNELFEAQGQLQTWDSEDFGSPQKSCSPSFDTPESQIRGVWEELGVGSSGHLSEQELAVVCQSVGLQGLEKEELEDLFNKLDQDGDGKVSLEEFQLGLFSHEPALLLESSTRVKPSKAWSHYQVPEESGCHTTTTSSLVSLCSSLRLFSSIDDGSGFAFPDQVLAMWTQEGIQNGREILQSLDFSVDEKVNLLELTWALDNELMTVDSAVQQAALACYHQELSYQQGQVEQLARERDKARQDLERAEKRNLEFVKEMDDCHSTLEQLTEKKIKHLEQGYRERLSLLRSEVEAERELFWEQAHRQRAALEWDVGRLQAEEAGLREKLTLALKENSRLQKEIVEVVEKLSDSERLALKLQKDLEFVLKDKLEPQSAELLAQEERFAAVLKEYELKCRDLQDRNDELQAELEGLWARLPKNRHSPSWSPDGRRRQLPGLGPAGISFLGNSAPVSIETELMMEQVKEHYQDLRTQLETKVNYYEREIAALKRNFEKERKDMEQARRREVSVLEGQKADLEELHEKSQEVIWGLQEQLQDTARGPEPEQMGLAPCCTQALCGLALRHHSHLQQIRREAEAELSGELSGLGALPARRDLTLELEEPPQGPLPRGSQRSEQLELERALKLQPCASEKRAQMCVSLALEEEELELARGKRVDGPSLEAEMQALPKDGLVAGSGQEGTRGLLPLRPGCGERPLAWLAPGDGRESEEAAGAGPRRRQAQDTEATQSPAPAPAPASHGPSERWSRMQPCGVDGDIVPKEPEPFGASAAGLEQPGARELPLLGTERDASQTQPRMWEPPLRPAASCRGQAERLQAIQEERARSWSRGTQEQASEQQARAEGALEPGCHKHSVEVARRGSLPSHLQLADPQGSWQEQLAAPEEGETKIALEREKDDMETKLLHLEDVVRALEKHVDLRENDRLEFHRLSEENTLLKNDLGRVRQELEAAESTHDAQRKEIEVLKKDKEKACSEMEVLNRQNQNYKDQLSQLNVRVLQLGQEASTHQAQNEEHRVTIQMLTQSLEEVVRSGQQQSDQIQKLRVELECLNQEHQSLQLPWSELTQTLEESQDQVQGAHLRLRQAQAQHLQEVRLVPQDRVAELHRLLSLQGEQARRRLDAQREEHEKQLKATEERVEEAEMILKNMEMLLQEKVDKLKEQFEKNTKSDLLLKELYVENAHLVRALQATEEKQRGAEKQSRLLEEKVRALNKLVSRIAPAALSV

SEQ ID NO: 2641 - DNA, 863 bp, Homo sapiens
ttcagtccaggccagtaaatttgatcttgaagtcaccgtcagctgccatgtagttgatggcctccaggttgaggcggttggggaacttgaattcgtatccatctggcagcttgacggtcaggttggcctggtcgaaggtgatgcacacctctgcaacacttccaggctggaagggaaagacagcctcccgctgctcggtcccccaggccccgccgtccttgctgttgcacacgatggtgttggcgtcgccgtgggcgttgaagcgagggttgaagtgcaggcacaggttgttgctgtctttgcccaggttcagcacgaagctcttagcgtcaggagccacctcgcctcgcactcgaaggcactctccaggtttgagattcaggttgctggcgaccagaccacaagccatgattgagtccaggaggatgttcccgggcaggcgcaccagctgtcagaagcctcgtgccgaattcgccacccaggcctcgctaccttaggaccgttatagttactggccgtcgttttacaagcctgcttttttgtacaaacttgtggatccttcgagttctatagtgtcaccataatcgtatgtgtatgatacataaggttaatgtataattgtggcccgcgttactaaacgatcgcacagtaccaaattacgcccccgcccttgcagctcatacgcagaactgtatgtaaattcattagaagcattactgcccacatggaaaccaatcacaaacggcattgaataaatctgagatcgacgaaggtattcagaaacctagtcgcctagcgtatcatatatggcctagagaaaacgggggggaaaagtgtactattggcagttaataaactcgaaa

SEQ ID NO: 2642 - DNA, 365 bp, Homo sapiens
cggcacagggtgactgaaataggagaaccacgtccaggggtcaggggggattcctctgaaatcgcagctggaacatttcgtaatagttctggtactgcacccatagatactgtcacctctactctttcttccaatcaccattagcagatgccacaggattcctacttctgaaagtttttgggccccgcagtggcaagaccggagaagccaataaagtttaaggctacatgtttattccatccacaaatttggtgaaggaggaaatgtttacaattctgccatgccattagataggagttttccaccgggtgtacactgctgttaacaaggtgtaaatacttgtccagtaaagagaccgtacggta

SEQ ID NO: 2643 - DNA, 1484 bp, Homo sapiens
tggtactgaggaggcctagcagggtgaaggccacggtcgcggccttcacgggttcctcggccgtcctgagtcccaaatcccaagctggagccgttcagctcccctccaccgcttagagatttggggggctctggccccgtccttgcggaccattccgaggggagtccagaggtgtcagtaattaacactgtggatacctcccatgaggacatgattcacgacgcccagatggactactatggcacccgcctggcaacctgctcatcagacaggtccgtcaaaatctttgatgtgcgcaatggagggcagatccttatcgccgacctcaggggtcatgagggtcctgtgtggcaagtggcctgggctcaccccatgtacggcaacatcctggcatcgtgctcctatgaccggaaagtcattatctggagagaggaaaacggcacctgggagaagagccacgagcatgcgggacacgactcctcagtgaactcggtgtgctgggccccccatgactacggcctgatcctggcctgtgggagctcggatggggccatctccctgctgacttacaccggggaaggccaatgggaagtaaagaagatcaacaacgctcacaccattggctgcaatgccgtcagctgggcccctgctgttgtacctggaagcctcatagaccacccatcggggcagaaacccaattacatcaagaggtttgcatcaggtggctgtgacaacctcatcaagctgtggaaggaggaggaggacggccagtggaaggaggagcagaagctagaagcgcacagtgactgggttcgagatgtggcctgggccccctccatcggcctgcccaccagcaccatcgccagctgctcccaggatggtcgtgtgttcatttggacctgtgatgatgcctcaagcaatacgtggtcccctaaattgttgcacaagttcaacgatgtggtgtggcatgtgagctggtccatcacagccaacatcctggctgtctctggtggagacaataaggtgaccctgtggaaggagtcagttgatgggcagtgggtgtgcatcagtgatgtcaacaagggccagggctccgtatcagcatcagtgacagagggccagcagaacgagcagtgacaagacaggtggggcctggctccccacccgccagctccaggactgccccttcctgggccaactaaccaaacaactgggaagagcccccaactccaacaggattattttcccaggaggagttacagatgcagccacagattgatcatctgccttaacgtgatcggagatgctttgtaatctactgtccagctgaaagcactcatgttacgaggaagaaactacaagtgatgttcaaatctattttgggtcatttttatgtacctttgggttcaggcattatttggggggttttgtttccaaaggaactaaataaagtcatattgcttataaaaaaaaaaaaaaaaaaa

SEQ ID NO: 2644 - DNA, 909 bp, Homo sapiens
taatgcccaaatgtttgtgcaatgagtaatgtgtgtgtatacactacatatattctctgaaatagacataccatcagagacatcattcagcaagtgactgatgtattggcatctcattcatatttctcgctgtgtgaggtatatggtactagttatcttgacttgatgtttgccaaatcctgaatagaagtgcattggtacgaaattactgaatgtaaagaaaatgttttcggcgtgaaaaattaacatattttatgacgtaccacagtataactctgtcccaaaccagcagcctatctatctttcctgttctttacatccctgttccccatccctacttcctcattttggtataacacagttctttgtagcatcattataattgcagttctatggcaattggacagtgtatagcatggaagacagactggtataagtagtacagtagtcaccagtgtgccacatttgcattagtaatgcaaaatatacattttataaaaggagcaaactatggtaatgtagatggcattacatcgtataatattgtaagactatgtatgtcctaatttgcatataatgttttcctacgtaaaggcataaatatagcaactctgtattaaccggtagcttaattagaattgcactatgtcaaataaaaaattgtccacagtgggactcccatggccaatggatattgaaggatggatttacccccatgtacattctttttaaccattacccaatttctctaggaacagacaatagtgggtcggacctggcacatgtgtcttatgcgggcggatcacagtacaatcgtgccctaacattgggaaagagccccgatggaatacctagtgatggcacacacaccaccacgccctagtatttcacagagcccatcatgaggaa

SEQ ID NO: 2645 - DNA, 6629 bp, Homo sapiens
atgaaatggaaacatgttccttttttggtcatgatatcactcctcagcttatccccaaatcacctgtttctggcccagcttattccagaccctgaagatgtagagagggggaacgaccacgggacgccaatccccacctctgataacgatgacaattcgctgggctatacaggctcccgtcttcgtcaggaagattttccacctcgcattgttgaacacccttcagacctgattgtctcaaaaggagaacctgcaactttgaactgcaaagctgaaggccgccccacacccactattgaatggtacaaagggggagagagagtggagacagacaaagatgaccctcgctcacaccgaatgttgctgccgagtggatctttatttttcttacgtatagtacatggacggaaaagtagacctgatgaaggagtctatgtctgtgtagcaaggaattaccttggagaggctgtgagccacaatgcatcgctggaagtagccatacttcgggatgacttcagacaaaacccttcggatgtcatggttgcagtaggagagcctgcagtaatggaatgccaacctccacgaggccatcctgagcccaccatttcatggaagaaagatggctctccactggatgataaagatgaaagaataactatacgaggaggaaagctcatgatcacttacacccgtaaaagtgacgctggcaaatatgtttgtgttggtaccaatatggttggggaacgtgagagtgaagtagccgagctgactgtcttagagagaccatcatttgtgaagagacccagtaacttggcagtaactgtggatgacagtgcagaatttaaatgtgaggcccgaggtgaccctgtacctacagtacgatggaggaaagatgatggagagctgcccaaatccagatatgaaatccgagatgatcataccttgaaaattaggaaggtgacagctggtgacatgggttcatacacttgtgttgcagaaaatatggtgggcaaagctgaagcatctgctactctgactgttcaagaacctccacattttgttgtgaaaccccgtgaccaggttgttgctttgggacggactgtaacttttcagtgtgaagcaaccggaaatcctcaaccagctattttctggaggagagaagggagtcagaatctacttttctcatatcaaccaccacagtcatccagccgattttcagtctcccagactggcgacctcacaattactaatgtccagcgatctgatgttggttattacatctgccagactttaaatgttgctggaagcatcatcacaaaggcatatttggaagttacagatgtgattgcagatcggcctcccccagttattcgacaaggtcctgtgaatcagactgtagccgtggatggcactttcgtcctcagctgtgtggccacaggcagtccagtgcccaccattctgtggagaaaggatggagtcctcgtttcaacccaagactctcgaatcaaacagttggagaatggagtactgcagatccgatatgctaagctgggtgatactggtcggtacacctgcattgcatcaacccccagtggtgaagcaacatggagtgcttacattgaagttcaagaatttggagttccagttcagcctccaagacctactgacccaaatttaatccctagtgccccatcaaaacctgaagtgacagatgtcagcagaaatacagtcacattatcgtggcaaccaaatttgaattcaggagcaactccaacatcttatattatagaagccttcagccatgcatctggtagcagctggcagaccgtagcagagaatgtgaaaacagaaacatctgccattaaaggactcaaacctaatgcaatttaccttttccttgtgagggcagctaatgcatatggaattagtgatccaagccaaatatcagatccagtgaaaacacaagatgtcctaccaacaagtcagggggtggaccacaagcaggtccagagagagctgggaaatgctgttctgcacctccacaaccccaccgtcctttcttcctcttccatcgaagtgcactggacagtagatcaacagtctcagtatatacaaggatataaaattctctatcggccatctggagccaaccacggagaatcagactggttagtttttgaagtgaggacgccagccaaaaacagtgtggtaatccctgatctcagaaagggagtcaactatgaaattaaggctcgccctttttttaatgaatttcaaggagcagatagtgaaatcaagtttgccaaaaccctggaagaagcacccagtgccccaccccaaggtgtaactgtatccaagaatgatggaaacggaactgcaattctagttagttggcagccacctccagaagacactcaaaatggaatggtccaagagtataaggtttggtgtctgggcaatgaaactcgataccacatcaacaaaacagtggatggttccaccttttccgtggtcattccctttcttgttcctggaatccgatacagtgtggaagtggcagccagcactggggctgggtctggggtaaagagtgagcctcagttcatccagctggatgcccatggaaaccctgtgtcacctgaggaccaagtcagcctcgctcagcagatttcagatgtggtgaagcagccggccttcatagcaggtattggagcagcctgttggatcatcctcatggtcttcagcatctggctttatcgacaccgcaagaagagaaacggacttactagtacctacgcgggtatcagaaaagtcccgtcttttaccttcacaccaacagtaacttaccagagaggaggcgaagctgtcagcagtggagggaggcctggacttctcaacatcagtgaacctgccgcgcagccatggctggcagacacgtggcctaatactggcaacaaccacaatgactgctccatcagctgctgcacggcaggcaatggaaacagcgacagcaacctcactacctacagtcgcccagctgattgtatagcaaattataacaaccaactggataacaaacaaacaaatctgatgctccctgagtcaactgtttatggtgatgtggaccttagtaacaaaatcaatgagatgaaaaccttcaatagcccaaatctgaaggatgggcgttttgtcaatccatcagggcagcctactccttacgccaccactcagctcatccagtcaaacctcagcaacaacatgaacaatggcagcggggactctggcgagaagcactggaaaccactgggacagcagaaacaagaagtggcaccagttcagtacaacatcgtggagcaaaacaagctgaacaaagattatcgagcaaatgacacagttcctccaactatcccatacaaccaatcatacgaccagaacacaggaggatcctacaacagctcagaccggggcagtagtacatctgggagtcaggggcacaagaaaggggcaagaacacccaaggtaccaaaacagggtggcatgaactgggcagacctgcttcctcctcccccagcacatcctcctccacacagcaatagcgaagagtacaacatttctgtagatgaaagctatgaccaagaaatgccatgtcccgtgccaccagcaaggatgtatttgcaacaagatgaattagaagaggaggaagatgaacgaggccccactccccctgttcggggagcagcttcttctccagctgccgtgtcctatagccatcagtccactgccactctgactccctccccacaggaagaactccagcccatgttacaggattgtccagaggagactggccacatgcagcaccagcccgacaggagacggcagcctgtgagtcctcctccaccaccacggccgatctcccctccacatacctatggctacatttcaggacccctggtctcagatatggatacggatgcgccagaagaggaagaagacgaagccgacatggaggtagccaagatgcaaaccagaaggcttttgttacgtgggcttgagcagacacctgcctccagtgttggggacctggagagctctgtcacggggtccatgatcaacggctggggctcagcctcagaggaggacaacatttccagcggacgctccagtgttagttcttcggacggctcctttttcactgatgctgactttgcccaggcagtcgcagcagcggcagagtatgctggtctgaaagtagcacgacggcaaatgcaggatgctgctggccgtcgacattttcatgcgtctcagtgccctaggcccacaagtcccgtgtctacagacagcaacatgagtgccgccgtaatgcagaaaaccagaccagccaagaaactgaaacaccagccaggacatctgcgcagagaaacctacacagatgatcttccaccacctcctgtgccgccacctgctataaagtcacctactgcccaatccaagacacagctggaagtacgacctgtagtggtgccaaaactcccttctatggatgcaagaacagacagatcatcagacagaaaaggaagcagttacaaggggagagaagtgttggatggaagacaggttgttgacatgcgaacaaatccaggtgatcccagagaagcacaggaacagcaaaatgacgggaaaggacgtggaaacaaggcagcaaaacgagaccttccaccagcaaagactcatctcatccaagaggatattctaccttattgtagacctacttttccaacatcaaataatcccagagatcccagttcctcaagctcaatgtcatcaagaggatcaggaagcagacaaagagaacaagcaaatgtaggtcgaagaaatattgcagaaatgcaggtacttggaggatatgaaagaggagaagataataatgaagaattagaggaaactgaaagctgaagacaaccaagaggcttatgagatctaatgtgaaaatcatcactcaagatgcctcctgtcagatgacacatgacgccagataaaatgttcagtgcaatcagagtgtacaaattgtcgtttttattcctcttattgggatatcattttaaaaactttattgggtttttattgttgttgtttgatccctaaccctacaaagagccttcctattcccctcgctgttggagcaaaccattataccttacttccagcaagcaaagtgctttgacttcttgcttcagtcatcagccagcaagagggaacaaaactgttcttttgcattttgccgctgagatatggcattgcactgcttatatgccaagctaatttatagcaagatattgatcaaatatagaaagttgatattcaacctcacaagggctctcaaagtataatctttctatagccaactgctaatgcaaattaaaacatatttcattttaacatgatttcaaaatcagtttttcatactaccctttgctggaagaaactaaaaatatagcaaatgcagaaccacaaacaattcgaatggggtagaaacattgtaaatatttactctttgcaaaccctggtggtattttattttggcttcatttcaatcattgaagtatattcttattggaaatgtacttttggataagtagggctaagccagttggatctctggttgtctagtcattgtcataagtaaacctagtaaaaccttgttctatttttcaatcatcaaaaagtaattataaatacgtattacaaacaagtggatgtttttaatgaccaattgagtaagaacatccctgtcttaactggcctaaatttcttctggtagtgtcagttcaactttcagaagtgccacttaaggaagtttgatttttgtttttgtaatgcactgtttttaatctctctctctttttttttttttttttggttttaaaagcacaatcactaaactttatttgtaaaccattgtaactattaaccttttttgtcttattgaaaaaaaaaatgttgagaagcgtttttaacctgttttgttaatgctctatgtttgtatttggaatatttgaataatgacagatggtgaagtaacatgcatactttattgtgggccatgaaccaaatggttcttacttttcctggacttaaagaaaaaaagaggtttaagtttgttgtggccaatgtcgaaacctacaagatttccttaaaatctctaatagaggcattacttgctttcaattgacaaatgatgccctctgactagtagatttctatgatccttttttgtcattttatgaatatcattgattttataattggtgctatttgaagaaaaaaatgtacatttattcatagatagataagtatcaggtctgaccccagtggaaaacaaagccaaacaaaactgaaccacaaaaaaaaaggctggtgttcaccaaaaccaaacttgttcatttagataatttgaaaaagttccatagaaaaggcgtgcagtactaagggaacaatccatgtgattaatgttttcattatgttcatgtaagaagccccttatttttagccataattttgcatactgaaaatccaataatcagaaaagtaattttgtcacattatttattaaaaatgttctcaaatac

SEQ ID NO: 2646 - protein, 1651 aa, Homo sapiens
MKWKHVPFLVMISLLSLSPNHLFLAQLIPDPEDVERGNDHGTPIPTSDNDDNSLGYTGSRLRQEDFPPRIVEHPSDLIVSKGEPATLNCKAEGRPTPTIEWYKGGERVETDKDDPRSHRMLLPSGSLFFLRIVHGRKSRPDEGVYVCVARNYLGEAVSHNASLEVAILRDDFRQNPSDVMVAVGEPAVMECQPPRGHPEPTISWKKDGSPLDDKDERITIRGGKLMITYTRKSDAGKYVCVGTNMVGERESEVAELTVLERPSFVKRPSNLAVTVDDSAEFKCEARGDPVPTVRWRKDDGELPKSRYEIRDDHTLKIRKVTAGDMGSYTCVAENMVGKAEASATLTVQEPPHFVVKPRDQVVALGRTVTFQCEATGNPQPAIFWRREGSQNLLFSYQPPQSSSRFSVSQTGDLTITNVQRSDVGYYICQTLNVAGSIITKAYLEVTDVIADRPPPVIRQGPVNQTVAVDGTFVLSCVATGSPVPTILWRKDGVLVSTQDSRIKQLENGVLQIRYAKLGDTGRYTCIASTPSGEATWSAYIEVQEFGVPVQPPRPTDPNLIPSAPSKPEVTDVSRNTVTLSWQPNLNSGATPTSYIIEAFSHASGSSWQTVAENVKTETSAIKGLKPNAIYLFLVRAANAYGISDPSQISDPVKTQDVLPTSQGVDHKQVQRELGNAVLHLHNPTVLSSSSIEVHWTVDQQSQYIQGYKILYRPSGANHGESDWLVFEVRTPAKNSVVIPDLRKGVNYEIKARPFFNEFQGADSEIKFAKTLEEAPSAPPQGVTVSKNDGNGTAILVSWQPPPEDTQNGMVQEYKVWCLGNETRYHINKTVDGSTFSVVIPFLVPGIRYSVEVAASTGAGSGVKSEPQFIQLDAHGNPVSPEDQVSLAQQISDVVKQPAFIAGIGAACWIILMVFSIWLYRHRKKRNGLTSTYAGIRKVPSFTFTPTVTYQRGGEAVSSGGRPGLLNISEPAAQPWLADTWPNTGNNHNDCSISCCTAGNGNSDSNLTTYSRPADCIANYNNQLDNKQTNLMLPESTVYGDVDLSNKINEMKTFNSPNLKDGRFVNPSGQPTPYATTQLIQSNLSNNMNNGSGDSGEKHWKPLGQQKQEVAPVQYNIVEQNKLNKDYRANDTVPPTIPYNQSYDQNTGGSYNSSDRGSSTSGSQGHKKGARTPKVPKQGGMNWADLLPPPPAHPPPHSNSEEYNISVDESYDQEMPCPVPPARMYLQQDELEEEEDERGPTPPVRGAASSPAAVSYSHQSTATLTPSPQEELQPMLQDCPEETGHMQHQPDRRRQPVSPPPPPRPISPPHTYGYISGPLVSDMDTDAPEEEEDEADMEVAKMQTRRLLLRGLEQTPASSVGDLESSVTGSMINGWGSASEEDNISSGRSSVSSSDGSFFTDADFAQAVAAAAEYAGLKVARRQMQDAAGRRHFHASQCPRPTSPVSTDSNMSAAVMQKTRPAKKLKHQPGHLRRETYTDDLPPPPVPPPAIKSPTAQSKTQLEVRPVVVPKLPSMDARTDRSSDRKGSSYKGREVLDGRQVVDMRTNPGDPREAQEQQNDGKGRGNKAAKRDLPPAKTHLIQEDILPYCRPTFPTSNNPRDPSSSSSMSSRGSGSRQREQANVGRRNIAEMQVLGGYERGEDNNEELEETES

SEQ ID NO: 2647 - DNA, 554 bp, Homo sapiens
  misc_feature (506)..(506): n is a, c, g, or t
gtctccccgccccgcccctcgtctcctccaagatggcgagcggcggcagcgggggggtgtcagtacctgcgctgtggagtgaagtgaaccggtatggccagaacggcgacttcacgcgcgctctcaagaccgtcaataagatactacagatcaacaaagatgacgtaactgccctgcattgtaaagtggtatgccttatccagaatggaagtttcaaggaagctttgaatgtcatcaatactcacaccaaagtgttagccaataactctctctcctttgagaaggcatattgcgagtacaggctgaacagaattgagaatgccttgaagacaatagaaagtgccaaccagcagacagacaaactgaaggagctttatggacaagtgttataccgtttggaacgctatgatgaatgcttagcagtgtatagagatctcgtccgaaactcccaagatgattatgatgaggagaggaaaacaaacctttcagcagttgttgcagctcanagcaattgggaaaaagtggttccagagaacctgggcctccaagaggca

SEQ ID NO: 2648 - DNA, 280 bp, Homo sapiens
  misc_feature (50)..(50): n is a, c, g, or t
  misc_feature (91)..(91): n is a, c, g, or t
  misc_feature (98)..(98): n is a, c, g, or t
  misc_feature (106)..(106): n is a, c, g, or t
  misc_feature (225)..(225): n is a, c, g, or t
  misc_feature (237)..(237): n is a, c, g, or t
  misc_feature (272)..(272): n is a, c, g, or t
cagaaagcaggcgaacccgcggcgcaataacgttacaaattataatactntggtagaaacaaattcagattcagatgatgaagacaaactncatattntggaagangaaagtgttacagatgcagctgactgtgaaggtgtaccagaggatgacctgccaacagaccagacagtgttaccagggaggagcagtgaaagagaagggaatgctaagaactgctgggnggatgacagaanggaagggcaagaaatcctggggcctgaagctcagncagatgaa

SEQ ID NO: 2649 - DNA, 460 bp, Homo sapiens
gcaaaaagaaaatcagcaaatctcatttagaaaaaaaaaaatagttcctgaaataaagatgttgattttcttaaagaaaagataatattctcaagagaaaagggtattcctgaatctattttctaacatcagtctgtctctcagatgaatagagaattccatgtaattggggaatatttttgtgcttttagcaaagatggaaaacagcttcctttctcctcttcttttcatgtcatccttggagcattcctttaatgccccatttttctgttcaagagggtatgaaattaagcaggtggagtaagaacttcctggttatgcattaacactgattaaaatgcatagcccagaatggaatcccaccattatttcaaagtcaggatctctgcatttttccagtactatttttgggcaggaaaggatgagactagacaacttccaggatcctctcaaatactaa

SEQ ID NO: 2650 - DNA, 1684 bp, Homo sapiens
ggcaccagctacaaatgcctctgtgatccaggttaccatggcctctactgtgaggaggaatataatgagtgcctctccgctccatgcctgaatgcagccacctgcagggacctcgttaatggctatgagtgtgtgtgcctggcagaatacaaaggaacacactgtgaattgtacaaggatccctgcgctaacgtcagctgtctgaacggagccacctgtgacagcgacggcctgaatggcacgtgcatctgtgcacccgggtttacaggtgaagagtgcgacattgacataaatgaatgtgacagtaacccctgccaccatggtgggagctgcctggaccagcccaatggttataactgccactgcccgcatggttgggtgggagcaaactgtgagatccacctccaatggaagtccgggcacatggcggagagcctcaccaacatgccacggcactccctctacatcatcattggagccctctgcgtggccttcatccttatgctgatcatcctgatcgtggggatttgccgcatcagccgcattgaataccagggttcttccaggccagcctatgaggagttctacaactgccgcagcatcgacagcgagttcagcaatgccattgcatccatccggcatgccaggtttggaaagaaatcccggcctgcaatgtatgatgtgagccccatcgcctatgaagattacagtcctgatgacaaacccttggtcacactgattaaaactaaagatttgtaatctttttttggattatttttcaaaaagatgagatactacactcatttaaatatttttaagaaaataaaaagcttaagaaatttaaaatgctagctgctcaagagttttcagtagaatatttaagaactaattttctgcagcttttagtttggaaaaaatattttaaaaacaaaatttgtgaaacctatagacgatgttttaatgtaccttcagctctctaaactgtgtgcttctactagtgtgtgctcttttcactgtagacactatcacgagacccagattaatttctgtggttgttacagaataagtctaatcaaggagaagtttctgtttgacgtttgagtgccggctttctgagtagagttaggaaaaccacgtaacgtagcatatgatgtataatagagtatacccgttacttaaaaagaagtctgaaatgttcgttttgtggaaaagaaactagttaaatttactattcctaacccgaatgaaattagcctttgccttattctgtgcatgggtaagtaacttatttctgcactgttttgttgaactttgtggaaacattctttcgagtttgtttttgtcattttcgtaacagtcgtcgaactaggcctcaaaaacatacgtaacgaaaaggcctagcgaggcaaattctgattgatttgaatctatatttttctttaaaaagtcaagggttctatattgtgagtaaattaaatttacatttgagttgtttgttgctaagaggtagtaaatgtaagagagtactggttccttcagtagtgagtatttctcatagtgcagctttatttatctccaggatgtttttgtggctgtatttgattgatatgtgcttcttctgattcttgctaatttccaaccatattgaataaatgtgatcaagtcaaaaaaaaaaaaaaaaaaa

SEQ ID NO: 2651 - protein, 252 aa, Homo sapiens
GTSYKCLCDPGYHGLYCEEEYNECLSAPCLNAATCRDLVNGYECVCLAEYKGTHCELYKDPCANVSCLNGATCDSDGLNGTCICAPGFTGEECDIDINECDSNPCHHGGSCLDQPNGYNCHCPHGWVGANCEIHLQWKSGHMAESLTNMPRHSLYIIIGALCVAFILMLIILIVGICRISRIEYQGSSRPAYEEFYNCRSIDSEFSNAIASIRHARFGKKSRPAMYDVSPIAYEDYSPDDKPLVTLIKTKDL

SEQ ID NO: 2652 - DNA, 397 bp, Homo sapiens
  misc_feature (18)..(18): n is a, c, g, or t
  misc_feature (20)..(20): n is a, c, g, or t
tcagtgtgtgcggaacangncagccgagagcggagaggcgccgctgtagttaactcctccctgcccgccgcgccgaccctccccaggaacccccagggagccagcatgaagcgagctcaccccgagtacagctcctcggacagcgagctggacgagaccatcgaggtggagaaggagagtgcggacgagaatggaaacttgagttcggctctaggttccatgtccccaactacatcttcccagattttggccagaaaaagacggagaggaataattgagaagcgccgacgagaccggatcaataacagtttgtcttgagctgagaaggctggtacccagttgcttttgagaagcagggattttgttaagctaggaaaaagccgagattcctgcagat

SEQ ID NO: 2653 - DNA, 1442 bp, Homo sapiens
ccggggatccacgcgcgccgccacccctgcccgcccgacagcgccgccgcctgccccgccatgggtcgacagaaggagctggtgtcccgctgcggggagatgctccacatccgctaccggttgctccgacaggcgctggccgagtgcctggggaccctcatcctcgtgatgtttggctgtggctccgtggcccaggttgtgctcagccggggcacccacggtggtttcctcaccatcaacctggcctttggctttgctgtcactctgggcatcctcatcgctggccaggtctctggggcccacctgaaccctgccgtgacctttgccatgtgcttcctggctcgtgagccctggatcaagctgcccatctacaccctggcacagacgctgggagccttcttgggtgctggaatagtttttgggctgtattatgatgcaatctggcactttgccgacaaccagctttttgtttcgggccccaatggcacagccggcatctttgctacctacccctctggacacttggatatgatcaatggcttctttgaccagttcataggcacagcctcccttatcgtgtgtgtgctggccattgttgacccttacaacaaccccgtcccccgaggcctggaggccttcaccgtgggcctggtggtcctggtcattggcacctccatgggcttcaactccggctatgccgtcaaccctgcccgggactttggcccccgcctttttacagcccttgcgggctggggctctgcagtcttcacgaccggccagcattggtggtgggtgcccatcgtgtccccactcctgggctccattgcgggtgtcttcgtgtaccagctgatgatcggctgccacctggagcagcccccaccctccaacgaggaagagaatgtgaagctggcccatgtgaagcacaaggagcagatctgagtggcaagggccatctcccactccgctgccctggccttgagcatccactgactgtccaaggccactcccaagaagccccccttcacgatccaccctttcaggctaaggagctccctatctaccctcaccccacgaagacagccccttcaggatttccactggaccttgcccaaatagcaccttaggccactgcccctaagctggggtggaaccggaatttgggtcaatacatccttttgtctcccaagggaagagaatgggcagcaggtatgtgtgtgtgtgtgcatgtgtgcatgtgtgtgcatgtgtgtgcaggggtgtgtgtgtggggggggttcccagatattcagggcaagaccagtcggaaggatctgctattggggacccagagacagggaggcagcctgtccatctgtgcataaggagaggaaagttccagggtgtgtatgttttcaggggccttcacatggaggagctgcagatagatatgtgtttctccggaa

SEQ ID NO: 2654 - protein, 292 aa, Homo sapiens
MGRQKELVSRCGEMLHIRYRLLRQALAECLGTLILVMFGCGSVAQVVLSRGTHGGFLTINLAFGFAVTLGILIAGQVSGAHLNPAVTFAMCFLAREPWIKLPIYTLAQTLGAFLGAGIVFGLYYDAIWHFADNQLFVSGPNGTAGIFATYPSGHLDMINGFFDQFIGTASLIVCVLAIVDPYNNPVPRGLEAFTVGLVVLVIGTSMGFNSGYAVNPARDFGPRLFTALAGWGSAVFTTGQHWWWVPIVSPLLGSIAGVFVYQLMIGCHLEQPPPSNEEENVKLAHVKHKEQI

SEQ ID NO: 2655 - DNA, 1901 bp, Homo sapiens
ccgcggcgagtggagcgggagccgactggaagaagggctctagggagggggctgtggctgctggggtccgaggtggggccgggtacaccagccccatcactgtttgcagagagtcagggaggcggaaaagacacgcgctctaggctcccatcagggcacatggcccgggcccatcccccgcgcgtctccccggctgcggggcgcggggggctgccgggtgcgcttggctgtggcgcggcgcgttggagactttattgcgatgggacgataagaggggcgggggcggggtcctgggggccgaggcggcagcgctttaattaaaacggaaattgcggccccgggccgcgcgggggccggagggttccaagcggccccttagctggaagcgtttctccaggacccccccgcaacccccgccacgcccgggctgccccctcccgccaggccctgccggacccggcgccgtcttctcctccttgtcacccgcggtcgcttcgggcggggatcggtgccaccgagcgcaaagcctgcctcgccccccttccccgtcccccccatctcccaccgcccagtccccggcggcgatgagacagagcggcgcctcccagcccctgctgatcaacatgtacctgccagatcccgtcggagacggtctcttcaaggacgggaagaacccgagctgggggccgctgagccccgcggttcagaaaggcagcggacagatccagctgtggcagtttctgctggagctgctggctgaccgcgcgaacgccggctgcatcgcgtgggagggcggtcacggcgagttcaagctcacggacccggacgaggtggcgcggcggtggggcgagcgcaagagcaagcccaacatgaactacgacaagctgagccgcgccctgcgctactactacgacaagaacatcatgagcaaggtgcatggcaagcgctacgcctaccgcttcgacttccagggcctggcgcaggcctgccagccgccgcccgcgcacgctcatgccgccgccgcagctgctgccgccgccgcggccgcccaggacggcgcgctctacaagctgcccgccggcctcgccccgctgcccttccccggcctctccaaactcaacctcatggccgcctcggccggggtcgcgcccgccggcttctcctactggccgggcccgggccccgccgccaccgctgccgccgccaccgccgcgctctaccccagtcccagcttgcagcccccgcccgggcccttcggggccgtggccgcagcctcgcacttggggggccattaccactagacggggcggtcgggtgcctgcggcctcgcccgcacgcctagagtctcgcccgatcccatcggcatcccggggagggcccgggagcctccgtcaaccgtcctctaatccagagtttactccacctgccgcacttagcagggggacgggaccgaagctccctcaatccttgtctggtactagatttgctcctgtcccaccccgcagtcccctgaggagggcgatgtgcgccctctttcaccttttttcttctaggtctccaggtcccggaggggatttgtggacctctcttgtctccccaccactccagtgcatttccgcctggctcctagaagccccattcaatatcactactctttaacgagtgccaaatcttttcccacttttgctcttccccaaggaactgctcccacctcagcacgtggaggcctctcacggtcctccttcctgggacctgagcaggtttggtgaaagccaccgtcctccgtgacacacggcccccttcctcctgtccccacactcccaggagaaactcccggtgtgtttctgaccctttcagccccattaaagctcctgagctctcaaaaaaaaaaaaaaaaaaaa

SEQ ID NO: 2656 - protein, 238 aa, Homo sapiens
MRQSGASQPLLINMYLPDPVGDGLFKDGKNPSWGPLSPAVQKGSGQIQLWQFLLELLADRANAGCIAWEGGHGEFKLTDPDEVARRWGERKSKPNMNYDKLSRALRYYYDKNIMSKVHGKRYAYRFDFQGLAQACQPPPAHAHAAAAAAAAAAAAQDGALYKLPAGLAPLPFPGLSKLNLMAASAGVAPAGFSYWPGPGPAATAAAATAALYPSPSLQPPPGPFGAVAAASHLGGHYH

SEQ ID NO: 2657 - DNA, 619 bp, Homo sapiens
cagggacgtgtctgtgctcctgcgtgtgaccagggttgactaaactctgccaggatgtcttgccagcaaaaccagcagcagtgccagccccctcccaagtgtcctcccaagtgtaccccaaaatgtccacctaagtgtccccctaaatgcctgccccagtgcccagctccatgttcccctgcagtctcttcttgctgtggtcccatctctgggggctgctgtggtcccagctctgggggctgctgcaactctggggctggtggctgctgcctgagccaccacaggccccgtctcttccaccggcgccggcaccagagccccgactgctgtgagagtgaaccttctgggggctctggctgctgccacagctctgggggctgctgctgacctgggctaagaagaactctttggacagaatgtttaagaacctcctacagcctgatgcttaaccctttccatttcctctcattccattcatgggtggacagcgaccacaaagactcatggggcttccctgggagaactttgcacttgatggaacacctcaattgcaggttttgttttcctcctttacctcatgttgtaataaagctctgatttctgactcacaaaaaaaaaa

SEQ ID NO: 2658 - DNA, 1022 bp, Homo sapiens
aaaatccgtgtttataaaccatcatagattaaaatacatagtatttgtactttaatgcaatagggtcccaggattcaaacaaggaaatttgattccagagttggcattatgtagttatgtactctgctacaaagaactagtggaggtaaacttcggcagtaaaattctcaacagtcaaatattaatgcatttcatatacatggctttgcatccgtagaggaagatacagttccttcagcacacgtgccaatttctgagtcttccactagagaatcctcaacagtttcttcttcagaatcaaattcctgattatccagtgattcaaaattatccagaggttcaccattcagtctctctattagctctgccatatactgtacatgttctgctacttctgccagttctttattctcctttttcaggcgggcaatttcattgtccttttgttcaatttctttatgaagtttctcattttccttaagtgcttcatacagcgcctttctccgtttttctgccacttccttccaatactgagaggatggattttctttaatcataagatcaaatgactcctgggtgactcctccaagatttttatttgtcacctagaattcctgggacaattaaccccaggtttgaaatgtttgtagatgtacgtggtcatcccagatgtccccttttgggacaagactgcggacagctcattttctcttccacagagatccagatgcaggaatgctgaatcatcttcggagtcctcttgggacagaactattctttatattctcttgatgtcttctggtacctgcttcatactggattcttttgatgatgggtagcacaagaacagcgcggccccacgtgttaagtagaaccgttcaaggtgcggaggaaaggagttcttaagtgtcgacttgccgtgtccatccgcggcttgccattggtgaccacaaccaaggcatatcttacccggaaagaaacccagacttggtcacaagcctatggaagaaacaccactatag

SEQ ID NO: 2659 - DNA, 6200 bp, Homo sapiens
gcgagtgactgcaccgagcccgagaagtcgccgcgccccgcagccgccccgactggttccccgccttgcccgtgggccccgccgggatggggaaccgccgggacctgggccagccgcgggccggtctctgcctgctcctggccgcgctgcagcttctgccggggacgcaggccgatcctgtggatgtcctgaaggccctgggtgtgcagggaggccaggctggggtccccgaggggcctggcttctgtccccagaggactccagagggtgaccgggcattcagaattggccaggccagcacgctcggcatccccacgtgggaactctttccagaaggccactttcctgagaacttctccttgctgatcaccttgcggggacagccagccaatcagtctgtcctgctgtccatttatgatgaaaggggtgcccggcagttgggcctggcactggggccagcgctgggtctcctaggtgaccccttccgccccctcccccagcaggtcaacctcacagatggcaggtggcaccgtgtggccgtcagcatagatggtgagatggtgaccctggtagctgactgtgaagctcagccccctgttttgggccatggcccccgcttcatcagcatagctggactcactgtgctggggacccaggaccttggggaaaagactttcgagggagacattcaggagctgctgataagcccagatcctcaggctgccttccaggcttgtgagcggtacctccccgactgtgacaacctggcaccggcagccacagtggctccccagggtgaaccagaaacccctcgtcctcggcggaaggggaagggaaaagggaggaagaaagggcgaggtcgcaaggggaagggcaggaaaaagaacaaggaaatttggacctcaagtccacctcctgactccgcagagaaccagacctccactgacatccccaagacagagactccagctccaaatctgcctccgacccccacgcctttggtcgtcacctccactgtgactactggactcaatgccacgatcctagaggggagcttggaccctgacagtggaaccgagctggggaccctggagaccaaggcagccagggaggatgaagaaggagatgattccaccatgggccctgacttccgggcagcagaatatccatctcggactcagttccagatctttcctggtgctggagagaaaggagcaaaaggagagcccgcagtgattgaaaaggggcagcagtttgagggacctccaggagccccaggaccccaaggggtggttggcccctcaggccctcccggccccccaggattccctggcgaccctggtccaccgggccctgctggcctcccaggaatccccggcattgatgggatccgaggcccaccgggcactgtgatcatgatgccgttccagtttgcaggcggctcctttaaaggccccccagtctcattccagcaggcccaggctcaggcagttctgcagcagactcagctctctatgaaaggcccccctggtccagtggggctcactgggcgcccaggccctgtgggtctccccgggcatccaggtctgaaaggagaggagggagcagaagggccacagggtccccgaggcctgcagggacctcatggaccccctggccgagtgggcaagatgggccgccctggagcagatggagctcggggcctcccaggggacactggacctaagggtgatcgtggcttcgatggcctccctgggctgcctggtgagaagggccaaaggggtgactttggccatgtggggcaacccggtcccccaggagaggatggtgagaggggagcagagggacctccagggcccactggccaggctggggagccgggtccacgaggactgcttggccccagaggctctcctggccccacgggtcgcccgggtgtgactggaattgatggtgctcctggtgccaaaggcaatgtgggtcctccaggagaaccaggccctccgggacagcagggaaaccatgggtcccagggactccccggtccccagggactcattggcactcctggggagaagggtccccctggaaacccaggaattccaggcctcccaggatccgatggccctctgggtcacccaggacatgagggccccacgggagagaaaggggctcagggtccaccagggtcggcaggccctccgggctatcctggacctcggggagtgaagggcacttcaggcaaccggggcctccagggggagaaaggcgagaagggagaggacggcttcccaggcttcaagggcgatgtggggctcaaaggtgatcaggggaaacccggagctccaggtccccggggagaggatggtcctgaggggccgaaggggcaggcggggcaggctggcgaggaggggcccccaggctcagctggggagaagggcaagcttggggtgccaggcctcccaggttatccaggacgccctggacctaagggatctattggatttcccggtcccctgggacccataggagagaaagggaagtcgggaaagacagggcagccaggcctggaaggagagcggggaccaccaggttcccgtggagagagggggcaaccgggtgccacagggcaaccaggccccaagggcgatgtgggccaggatggagcccctgggatccctggagaaaagggcctccctggtctgcaaggccctccaggattccctgggccaaagggcccccctggtcaccaaggtaaagatgggcgaccagggcaccctggacagagaggagaactgggcttccaaggtcagacaggcccgcctggaccagctggtgtcttaggccctcagggaaagacaggagaagtgggacctctaggtgaaagggggcctccaggcccccctggacctcctggtgaacaaggtcttcctggcctggaaggcagagagggggccaagggggaactgggaccaccaggaccccttgggaaagaagggccagctggactcaggggctttcccggccccaaagggggccctggggacccgggacctactggcttaaagggtgataagggccccccagggcctgtgggggccaatggctcccctggtgagcgcggtcctttgggcccagcaggaggcattggacttcctggccaaagtggcagcgaaggccccgttggccctgcaggcaagaaggggtcccggggagaacgtggcccccctggccccactggcaaagatgggatcccagggcccctggggcctctgggaccccctggagctgctgggccttctggcgaggaaggggacaagggggatgtgggtgcccccggacacaaggggagtaaaggcgataaaggagacgcgggcccacctggacaaccagggatacggggtcctgcaggacacccaggtcccccgggagcagacggggctcaggggcgccggggacccccaggcctctttgggcagaaaggagatgacggagtcagaggctttgtgggggtgattggccctcctggactgcaggggctgccaggccctccgggagagaaaggggaggtcggagacgtcgggtccatgggtccccatggagctccaggtcctcggggtccccaaggccccactggatcagagggcactccagggctgcctggaggagttggtcagccaggcgccgtgggtgagaagggtgagcgaggggacgctggagacccagggcctccaggagccccaggcatcccggggcccaagggagacattggtgaaaagggggactcaggcccatctggagctgctggacccccaggcaagaaaggtccccctggagaggatggagccaaagggagcgtgggccccacggggctgcccggagatctagggcccccaggagaccctggagtttcaggcatagatggttccccaggggagaagggagaccctggtgatgttgggggaccgggtccgcctggagcttctggggagcccggcgcccccgggccccccggcaagaggggtccttcaggccacatgggtcgagaaggcagagaaggggagaaaggtgccaagggggagccaggtcctgatgggcccccagggaggacgggtccaatgggggctagagggccccctggacgtgtggggcctgagggtcttcgagggatccctggccctgtgggtgaaccaggcctcctgggagcccctggacagatgggccctcctggccccctggggccctctggcctcccagggctgaagggagacactggccccaagggggaaaagggccacattggattgatcggtctcattggccccccgggagaagctggtgagaaaggagatcaggggttgccaggcgtgcagggaccccctggtcccaagggagaccctggtccccctggtcccattggctctctgggccaccctgggcccccaggtgtggcgggccctctaggacagaaaggctcaaaagggtctccggggtccatgggcccccgtggagacactggacctgcaggcccaccaggccccccgggtgcccctgccgagctgcatgggctgcgcaggcgccggcgcttcgtcccagtcccgcttccagtcgtggagggcggcctggaggaggtgctggcctcgctcacatcgctgagcttggagctggagcagctgcggcgtcctcccggcactgcggagcgcccgggcctcgtgtgccacgagctgcaccgcaaccacccgcacctgcctgatggggaatactggattgaccccaaccagggctgcgcgcgggactcgttcagggttttttgcaacttcacggcgggaggagagacctgcctctatcccgacaagaagtttgagatcgtgaaattggcctcctggtccaaggaaaagcctggaggctggtatagcacattccgtcgagggaagaagttctcctacgtggacgccgacgggtccccagtgaatgtcgtgcagctgaacttcctgaaactgctgagtgccacagctcgccagaacttcacctactcctgccagaatgcagctgcctggctggacgaagccacgggtgactacagccactccgcccgcttccttggcaccaatggagaggagctgtctttcaaccagacgacagcaaccactgtcagcgtcccccaggatggctgccggctccggaaaggacagacgaagacccttttcgaattcagctcttctcgagcgggatttctgcccctgtgggatgtggcggccactgactttggccagacgaaccaaaagtttgggtttgaactgggccccgtctgcttcagcagctgagagtgtccggggtgggagggaccgtgagggagccccagaatggggtgcatttggtgctgaggctttgaagccaccgtatttttcgttacctgtgactatggagccaatgggatgtgacttcgctcatcacggtcagtcattccttctcctttccagggtgctgggggctggggttccctggcccaagggtccagcctcctctcaccccattccaggtggcatactgcagtctggctctttctcccctccctccccacccaagcctcacctccccaccccttgaacccccatgcaatgagcttctaactcagagctgatgaacaaaagcccccccacccccaatgcctgcctcctcactcctccgtcgctgcccttcacaccttttggtgctacccctccccagagttaagcactggatgtctcctgatcccaggctgggacccctacccccaccccctttgatcctttctacttccacggtgaaaggactgaggtcggactacagagggaagagggacttcccttgactgggttgtgtttcttttcctgcctcagcccagctctgcaaatcccctccccctgcccctcacctccccaggctcaccttgccatgccaggtggtttggggaccaagatgttgggggggtgaatcaggatcctaatggtgctgccctatttatacctgggtctgtattaaaagggaaagtcccccctgttgtagatttcatctgcttcctccttagggaaggctgggatatgatgagagattccagcccaagcccggccccccaccgccaggccatagggcataatttgcatctcaaatctgagaataaactgatgaactgtggaaaaaaaaaaaaaaaaaaaaaaaaa

SEQ ID NO: 2660 - protein, 1745 aa, Homo sapiens
MGNRRDLGQPRAGLCLLLAALQLLPGTQADPVDVLKALGVQGGQAGVPEGPGFCPQRTPEGDRAFRIGQASTLGIPTWELFPEGHFPENFSLLITLRGQPANQSVLLSIYDERGARQLGLALGPALGLLGDPFRPLPQQVNLTDGRWHRVAVSIDGEMVTLVADCEAQPPVLGHGPRFISIAGLTVLGTQDLGEKTFEGDIQELLISPDPQAAFQACERYLPDCDNLAPAATVAPQGEPETPRPRRKGKGKGRKKGRGRKGKGRKKNKEIWTSSPPPDSAENQTSTDIPKTETPAPNLPPTPTPLVVTSTVTTGLNATILEGSLDPDSGTELGTLETKAAREDEEGDDSTMGPDFRAAEYPSRTQFQIFPGAGEKGAKGEPAVIEKGQQFEGPPGAPGPQGVVGPSGPPGPPGFPGDPGPPGPAGLPGIPGIDGIRGPPGTVIMMPFQFAGGSFKGPPVSFQQAQAQAVLQQTQLSMKGPPGPVGLTGRPGPVGLPGHPGLKGEEGAEGPQGPRGLQGPHGPPGRVGKMGRPGADGARGLPGDTGPKGDRGFDGLPGLPGEKGQRGDFGHVGQPGPPGEDGERGAEGPPGPTGQAGEPGPRGLLGPRGSPGPTGRPGVTGIDGAPGAKGNVGPPGEPGPPGQQGNHGSQGLPGPQGLIGTPGEKGPPGNPGIPGLPGSDGPLGHPGHEGPTGEKGAQGPPGSAGPPGYPGPRGVKGTSGNRGLQGEKGEKGEDGFPGFKGDVGLKGDQGKPGAPGPRGEDGPEGPKGQAGQAGEEGPPGSAGEKGKLGVPGLPGYPGRPGPKGSIGFPGPLGPIGEKGKSGKTGQPGLEGERGPPGSRGERGQPGATGQPGPKGDVGQDGAPGIPGEKGLPGLQGPPGFPGPKGPPGHQGKDGRPGHPGQRGELGFQGQTGPPGPAGVLGPQGKTGEVGPLGERGPPGPPGPPGEQGLPGLEGREGAKGELGPPGPLGKEGPAGLRGFPGPKGGPGDPGPTGLKGDKGPPGPVGANGSPGERGPLGPAGGIGLPGQSGSEGPVGPAGKKGSRGERGPPGPTGKDGIPGPLGPLGPPGAAGPSGEEGDKGDVGAPGHKGSKGDKGDAGPPGQPGIRGPAGHPGPPGADGAQGRRGPPGLFGQKGDDGVRGFVGVIGPPGLQGLPGPPGEKGEVGDVGSMGPHGAPGPRGPQGPTGSEGTPGLPGGVGQPGAVGEKGERGDAGDPGPPGAPGIPGPKGDIGEKGDSGPSGAAGPPGKKGPPGEDGAKGSVGPTGLPGDLGPPGDPGVSGIDGSPGEKGDPGDVGGPGPPGASGEPGAPGPPGKRGPSGHMGREGREGEKGAKGEPGPDGPPGRTGPMGARGPPGRVGPEGLRGIPGPVGEPGLLGAPGQMGPPGPLGPSGLPGLKGDTGPKGEKGHIGLIGLIGPPGEAGEKGDQGLPGVQGPPGPKGDPGPPGPIGSLGHPGPPGVAGPLGQKGSKGSPGSMGPRGDTGPAGPPGPPGAPAELHGLRRRRRFVPVPLPVVEGGLEEVLASLTSLSLELEQLRRPPGTAERPGLVCHELHRNHPHLPDGEYWIDPNQGCARDSFRVFCNFTAGGETCLYPDKKFEIVKLASWSKEKPGGWYSTFRRGKKFSYVDADGSPVNVVQLNFLKLLSATARQNFTYSCQNAAAWLDEATGDYSHSARFLGTNGEELSFNQTTATTVSVPQDGCRLRKGQTKTLFEFSSSRAGFLPLWDVAATDFGQTNQKFGFELGPVCFSS

SEQ ID NO: 2661 - DNA, 2389 bp, Homo sapiens
gggaaggcgagcagtgccaatctacagcgaagaaagtctcgtttggtaaaagcgagaggggaaagcctgagcatgcagagtgtgcagagcacgagcttttgtctccgaaagcagtgcctttgcctgaccttcctgcttctccatctcctgggacaggtcgctgcgactcagcgctgccctccccagtgcccgggccggtgccctgcgacgccgccgacctgcgcccccggggtgcgcgcggtgctggacggctgctcatgctgtctggtgtgtgcccgccagcgtggcgagagctgctcagatctggagccatgcgacgagagcagtggcctctactgtgatcgcagcgcggaccccagcaaccagactggcatctgcacggcggtagagggagataactgtgtgttcgatggggtcatctaccgcagtggagagaaatttcagccaagctgcaaattccagtgcacctgcagagatgggcagattggctgtgtgccccgctgtcagctggatgtgctactgcctgagcctaactgcccagctccaagaaaagttgaggtgcctggagagtgctgtgaaaagtggatctgtggcccagatgaggaggattcactgggaggccttacccttgcagcttacaggccagaagccaccctaggagtagaagtctctgactcaagtgtcaactgcattgaacagaccacagagtggacagcatgctccaagagctgtggtatggggttctccacccgggtcaccaataggaaccgtcaatgtgagatgctgaaacagactcggctctgcatggtgcggccctgtgaacaagagccagagcagccaacagataagaaaggaaaaaagtgtctccgcaccaagaagtcactcaaagccatccacctgcagttcaagaactgcaccagcctgcacacctacaagcccaggttctgtggggtctgcagtgatggccgctgctgcactccccacaataccaaaaccatccaggcagagtttcagtgctccccagggcaaatagtcaagaagccagtgatggtcattgggacctgcacctgtcacaccaactgtcctaagaacaatgaggccttcctccaggagctggagctgaagactaccagagggaaaatgtaacctatcactcaagaagcacacctacagagcacctgtagctgctgcgccacccaccatcaaaggaatataagaaaagtaatgaagaatcacgatttcatccttgaatcctatgtattttcctaatgtgatcatatgaggacctttcatatctgtcttttatttaacaaaaaatgtaattaactgtaaacttggaatcaaggtaagctcaggatatggcttaggaatgacttactttcctgtggttttattacaaatgcaaatttctataaatttaagaaaacaagtatataatttactttgtagactgtttcacattgcactcatcatattttgttgtgcactagtgcaattccaagaaaatatcactgtaatgagtcagtgaagtctagaatcatacttaacatttcattgtacaagtattacaaccatatattgaggttcattgggaagattctctattggctccctttttgggtaaaccagctctgaacttccaagctccaaatccaaggaaacatgcagctcttcaacatgacatccagagatgactattacttttctgtttagttttacactaggaaacgtgttgtatctacagtaatgaaatgtttactaagtggactggtgtcataaactttctccatttaagacacattgactcctttccaatagaaagaaactaaacagaaaactcccaatacaaagatgactggtccctcatagccctcagacatttatatattggaagctgctgaggcccccaagttttttaattaagcagaaacagcatattagcagggattctctcatctaactgatgagtaaactgaggcccaaagcacttgcttacatcctctgatagctgtttcaaatgtgcattttgtggaattttgagaaaaatagagcaaaatcaacatgactggtggtgagagaccacacattttatgagagtttggaattattgtagacatgcccaaaacttatccttgggccataattatgaaaactcatgatcaagatatatgtgtatacatacatgtatctggtttgtcaggctacaaggtaggctgcaaaattaaatctagacattcttttaatgccaccacacgtgttccgcttctctcttttaaagtatttataaaaatataaattgtacattttgtaaaatattatgtttgatttctctacttgtcatatcactaaataaacacgattttattgctgaaaaaaaaaaaaaaaaaaa

SEQ ID NO: 2662 - protein, 357 aa, Homo sapiens
MQSVQSTSFCLRKQCLCLTFLLLHLLGQVAATQRCPPQCPGRCPATPPTCAPGVRAVLDGCSCCLVCARQRGESCSDLEPCDESSGLYCDRSADPSNQTGICTAVEGDNCVFDGVIYRSGEKFQPSCKFQCTCRDGQIGCVPRCQLDVLLPEPNCPAPRKVEVPGECCEKWICGPDEEDSLGGLTLAAYRPEATLGVEVSDSSVNCIEQTTEWTACSKSCGMGFSTRVTNRNRQCEMLKQTRLCMVRPCEQEPEQPTDKKGKKCLRTKKSLKAIHLQFKNCTSLHTYKPRFCGVCSDGRCCTPHNTKTIQAEFQCSPGQIVKKPVMVIGTCTCHTNCPKNNEAFLQELELKTTRGKM

SEQ ID NO: 2663 - DNA, 536 bp, Homo sapiens
tggcacgaggcacacaggatggagccgggccaccctcacagctcctgccctgcagacgctggccttgtggagggaggcaggcagcaggagcagtgctttctgggcctctgtggccagagctggccctgctgcagcttacgtctgcctgcagcccagacgtcctcctggtcctcctgatgcccccgacctccacggaggacaagcatttccagcccagccctccccatcttcacctcgcactcccctgacacactgggagcctcctgatccgtgaacccgcgctggcgggagtagctactgaccgctggggacccctgcccaggctgttcgcatgtggaaaggattcagggagcaggcgatgcccaaagcgtggagaccagcactgctctctccccagtgacaggtgcacgcccagatcacggatgtgtcgggaacagctgtgctcctgctgctcagcgtccgtcactccaggctgggagcgggtccccaaacttctggctgggcctatccggctccactctcagggtgggggtgag

SEQ ID NO: 2664 - DNA, 460 bp, Homo sapiens
catgcagcactctgtctcgctccctgtcagtgctgctggcacgtgggacgcggcaggtgacagccgttctcagcatgttttagaagcttgcctcacagacttccatgcctctccattcagccgatgacttcagggtgtcaaactgttttaatttttcagacaaatggaacagaagccattgtggttcatcctgattacttgaacgttgcacttggtggaccgtgcctgggagcgctcgcatgccccctggcttcagaagtcatgtcagtgtctctgtagacaaactccactgtacatcttggattaatcttctgattcattgttcattttctcaagacttttcgtggaattctctgataaaggaagcttttaggatggtatctatcaggccaccagcaggaattgcaaatgttttcacaaaaatccttttccttagaaataacagctggtgacagagatg

SEQ ID NO: 2665 - DNA, 193 bp, Homo sapiens
  misc_feature (28)..(28): n is a, c, g, or t
  misc_feature (40)..(40): n is a, c, g, or t
  misc_feature (124)..(124): n is a, c, g, or t
  misc_feature (134)..(134): n is a, c, g, or t
  misc_feature (140)..(140): n is a, c, g, or t
  misc_feature (161)..(161): n is a, c, g, or t
  misc_feature (164)..(164): n is a, c, g, or t
  misc_feature (167)..(167): n is a, c, g, or t
cttggtgtgtttgacagactttcaggcncatgcgcgaganagcctgtctaagtcaactcgggattttattgaaggtggagcagatgacagcatcacgcgggatgacaacattgcagcatttaanagaattcgcntccgtncgcggtacctgagagatgtgnctnagntggacaccagaaccacaatccaaggg

SEQ ID NO: 2666 - DNA, 2380 bp, Homo sapiens
cggatcctgtgacacctccgggcagcccggcacttgttgctcccacgacctgttgtcattcccttaacccggctttccccgcctcctcccggcttcgctccttttcatgtgagcatctgggacactgatctctcagaccccgctgctcgggctggagaatagatggttttgtgaaaaattaaacaccgccctgaagaggagccccgctgggcagcggcaggagcgcagagtgctggcccaggtgctgcagaggtggcgcctccccggcccgggacggtagccccgggcgccaacggcatgacagactcggcgacagctaacggggacgacagtgaccccgagatcgagctctttgtgaaggctggaatcgatggagaaagcatcggcaactgtcctttctctcagcgcctcttcatgatcctctggctgaaaggagtcgtgttcaatgtcaccactgtggatctgaaaagaaagccagctgacctgcacaacctagcccccggcacgcacccgcccttcctgaccttcaacggggacgtgaagacagacgtcaataagatcgaggagttcctggaggagaccttgacccctgaaaagtaccccaaactggctgcaaaacaccgggaatccaacacagcgggcatcgacatcttttccaagttttctgcctacatcaaaaataccaagcagcagaacaatgctgctcttgaaagaggcctaaccaaggctctaaagaaattggatgactacctgaacacccctctaccagaggagattgacgccaacacttgtggggaagacaaggggtcccggcgcaagttcctggatggggatgagctgaccctggctgactgcaatctgttgcccaagctccatgtggtcaagattgtggccaagaaataccgcaactatgatatcccggctgagatgacaggcctgtggcggtacctcaagaacgcctatgcccgtgatgagttcaccaacacctgtgcagctgacagtgagatcgagttggcctacgctgatgtcgccaaacgcctcagccgatcctgagcacagccattttgccccatccccgctgcagaaggactcaaccactcccctaagactccagcttcatagactcctctgtatcactgccttgaggcgcactttttataatcaagcctcatcttgctggtatcatgggaactccagcctgctatctttcatgaaggtcagcaccatccctggcctcctcacataggaatctagcagaaatgatagacacagtccacctttcggccggccagcctgatctgggctcagcatgtttggggtcagtcagtgttggagagcccacatatgggattgccactagcttcttctgccaatatcaaaataccttctcagatgctttagaaacatgcaacaccaactccttttctaccctcctctctgtccatacctacaaggccaaggacaaacgccatcttcatccttcttagaaagagatctattaccccattaggggagacagagagagtgaatggaggagtaccgagctggctatggacttgggtgtctggcaaacacagcttcagtctcactacttctgacactctggttattgggcactaagggccagactggaaagtcacttgagacacattctcagtttgttgcagtgccaggaatgctgcgctgctgctgctgcgcacctggcccatgctgtccctggcttccatgccgtccaggccctgccagaaaaggaaattggcatgcaattctaaactgcagtgactgggatgggaggggaggggagcagtgttgatgccaaaatacccacggggtctaccagccatggggtttgcttgcttaggagtagttgtttcagaggtgattacaggcctgggtttgactgtgcttaccaatgagtggtttttgagctatgagaaagtggatgggagtgggaggaggagagatgggtgaagacaaaagagttctttatgagcctcgatgttccctggtaaacttttaaaaaggccttctctcatgatctaagtcttggactggtggcatcatgtaactgctaaccttacagtaaaaacccaagaatgggtcaaaaatgtcttcccagtttctccaagctgcttctggaatgcaggtctgtcggctgggtgctctccagcagctgctcctgcctgattcaactgtagcctgtaatgggtaaaagccacatttaggaggtggtctgatcatagaacaccttaggaagaaagtccatgagactttctgactaggaaaccatgtggtttgaacttgaagaaaaatgtagacccatctgggttaattttcctacaatctgactcaactgccaggtgaaaaaaaaaaaaaaaaa

SEQ ID NO: 2667 - protein, 251 aa, Homo sapiens
MTDSATANGDDSDPEIELFVKAGIDGESIGNCPFSQRLFMILWLKGVVFNVTTVDLKRKPADLHNLAPGTHPPFLTFNGDVKTDVNKIEEFLEETLTPEKYPKLAAKHRESNTAGIDIFSKFSAYIKNTKQQNNAALERGLTKALKKLDDYLNTPLPEEIDANTCGEDKGSRRKFLDGDELTLADCNLLPKLHVVKIVAKKYRNYDIPAEMTGLWRYLKNAYARDEFTNTCAADSEIELAYADVAKRLSRS

SEQ ID NO: 2668 - DNA, 318 bp, Homo sapiens
tttttttttttttttttttcacatttaaaagaattcaaatactttaattcaacaagggaaatacaatagtagctataaaactatggagatggtaaattaagcaataacagaaaactgctataatttatgctaaacttccttttatcactacttaagtttcattcatcacattaatataatactgcatctcaacatctgcaattttgacaaatgcctggaaagttttttgttcagaaacagacgccggtctgacagaaacacattggaaaatgttctttttctggtcatagttgccaacacatctatgaactcggcctc

SEQ ID NO: 2669 - DNA, 3141 bp, Homo sapiens
ttccgaattctgtattaactttaccatcaaggcagacctcagctgtaccatcacagcagtatgccacgcatactgacaaaagacctactcctcctccttacaactgtagatatggaagccagcctttgcaaagtactcagcatattactaaacacttgtctatggaagttcctcagagtcgagaaatgctgtcatctgaaataaggaccagctttcaacagcagtggcaaaaccctaatgaaaatgtcagcacaattggaaatttcactaacttgaaagtaaacaccaacagcaaacagccttttaacggtcccattagatcttctgtggatggtgttcagactcttgctcaaactaatgaagagaaaataatggattcttgcaatccaacttcaaatcaagtactggacacaagtgttgcaaaagaaaagctagtaagggatattaaaacattagtagagataaaacagaagttttcagaacttgcgaggaaaattaaaatcaataaagatcttttgatggcagcaggttgtattaaaatgactaatacttcttatagtgaaccagctcagaattctaaattgtctctaaaacaaactgccaaaatccagtctggaccccagataactccagtaatgccagagaatgcagagagacaaacaccaacagtagtggaatctgcagaaacaaataagactcaatgtatgttgaattctgacattcaggaagtcaattgcagaaggtttaaccaagttgattctgttttaccaaatcctgtctattctgaaaagcggccaatgccagacccatctcatgatgtgaaagttctcacttcaaagacatcagctgttgagatgacccaggcagtattgaatactcagctttcatcagaaaatgttaccaaagttgagcaaaattcaccagcagtttgtgaaacaatttctgttcccaagtccatgtccactgaggaatataaatcaaaaattcaaaatgaaaatatgctacttctcgctttgctttcacaggcacgtaagactcagaagacagtattaaaagatgctaatcaaactattcaggattctaaaccagacagttgtgaaatgaatccaaatacccaaatgactggtaaccaactgaatttgaagaacatggaaactccaagtacttctaatgtaagtggcagggttttggacaactccttttgcagtggacaagaatcctcaacaaaaggaatgcctgctaaaagtgacagtagctgttccatggaagtgctagcaacctgtctttccctgtggaaaaagcaaccttcagatactgcaaaagaaaaggagtgtgataaactcagaacaaacacaacagcagttggaatttcaaagcctgctaacatccacgttaagagtccttgttcagttgtgggaaattcaaattctcagaataaaataagtaatccctcacagcagacagctttgtcgatggtaatgcacaattatgagtcttcaggtataaatataacaaagggaacagaacttcagatagctgtagtgtcaccgttagttctgtcagaggtcaaaacattgtctgtcaaaggaataacacctgcagtgttacctgaaacagtgtatcccgttattaaagaaggcagtgtttgtagtttacaaaatcaattggcagaaaatgcaaaggcaactgctgctttgaaagttgatgttagtggaccagtagcaagtacagcaacatcaaccaagatttttccactaactcagaaggaaaagcagaatgagtcaactaatggtaattcagaagtcacacctaatgtcaatcaaggaaagcataacaaattagagtcagctatccattctcctatgaacgatcagcaaatctcacaggagtcaaggaatagtactgttgtgagtagtgatacattacagattgacaatatttgttctctggttgaaggtgatacctcttacaattcccaaatagcaaagatattcagctctcttcccttgaaaatggttgagccacagaaaccttctctacccaatcagcaagggattggcagcagagaaccagaaaaacaattagataataccactgaaaataaagactttggttttcaaaaagataaacctgtacagtgcacagatgtttcacataaaatatgtgatcagtcaaagtcagagccacccttagagtcatcttttaacaatcttgaaacaaacagagttattctagagaaaagtagtttggagcatgccactgaaaaaagcacagctaacgatacgtgctcgtcagctgctattcaggaggatatttaccctcaggaaatagatgcatccagcaactatactccccaagatcctgcaagaaatgaaatccacagtgataaggcacctgtcttatacctacatgaccagctgtcagaacttctaaaagagtttccttatggcattgaggctgtgaatacacgtgaaggttctgtgggccagcaaactacataccagacctcagaagatcaaactgctgataaaaccagttctgactccaaagacccagcagatcaaatacaaattacaatattaagctcagagcaaatgaaagaaatatttcctgaacaggatgatcaaccctatgtagtagacaagttggcagaacctcagaaagaagagcccatcacagaagtagttagccagtgtgacctgcaggcacttgcagctggacaaagtcgtgattctgtgatactggactctgagaaagatgatatccactgctgtgcattgggctggctctccatggtttacgaaggagtacctcagtgtcagtgtaattccatcaagaactcatcttcagaggaagagaaacaaaaagagcagtgttgtcctttggataccaacagttgtaaacaaggagagagaacttctgatagagatgtcactgttgttcaatttaagagccttgtaaataatccaaagactcctccagatgggaaaagtcattttcctgaactacaagacgacagtagaaaagatacacccaaaacaaaacataaaagcttaccaaggacagaacaagaattagttgctggtcagttttcatctaaatgtgataaactaaatcccttgcaaaatcacaaaaaaaaaa

SEQ ID NO: 2670 - protein, 993 aa, Homo sapiens
MEVPQSREMLSSEIRTSFQQQWQNPNENVSTIGNFTNLKVNTNSKQPFNGPIRSSVDGVQTLAQTNEEKIMDSCNPTSNQVLDTSVAKEKLVRDIKTLVEIKQKFSELARKIKINKDLLMAAGCIKMTNTSYSEPAQNSKLSLKQTAKIQSGPQITPVMPENAERQTPTVVESAETNKTQCMLNSDIQEVNCRRFNQVDSVLPNPVYSEKRPMPDPSHDVKVLTSKTSAVEMTQAVLNTQLSSENVTKVEQNSPAVCETISVPKSMSTEEYKSKIQNENMLLLALLSQARKTQKTVLKDANQTIQDSKPDSCEMNPNTQMTGNQLNLKNMETPSTSNVSGRVLDNSFCSGQESSTKGMPAKSDSSCSMEVLATCLSLWKKQPSDTAKEKECDKLRTNTTAVGISKPANIHVKSPCSVVGNSNSQNKISNPSQQTALSMVMHNYESSGINITKGTELQIAVVSPLVLSEVKTLSVKGITPAVLPETVYPVIKEGSVCSLQNQLAENAKATAALKVDVSGPVASTATSTKIFPLTQKEKQNESTNGNSEVTPNVNQGKHNKLESAIHSPMNDQQISQESRNSTVVSSDTLQIDNICSLVEGDTSYNSQIAKIFSSLPLKMVEPQKPSLPNQQGIGSREPEKQLDNTTENKDFGFQKDKPVQCTDVSHKICDQSKSEPPLESSFNNLETNRVILEKSSLEHATEKSTANDTCSSAAIQEDIYPQEIDASSNYTPQDPARNEIHSDKAPVLYLHDQLSELLKEFPYGIEAVNTREGSVGQQTTYQTSEDQTADKTSSDSKDPADQIQITILSSEQMKEIFPEQDDQPYVVDKLAEPQKEEPITEVVSQCDLQALAAGQSRDSVILDSEKDDIHCCALGWLSMVYEGVPQCQCNSIKNSSSEEEKQKEQCCPLDTNSCKQGERTSDRDVTVVQFKSLVNNPKTPPDGKSHFPELQDDSRKDTPKTKHKSLPRTEQELVAGQFSSKCDKLNPLQNHKKK

SEQ ID NO: 2671 - DNA, 3524 bp, Homo sapiens
tctccgtcagccgcattgcccgctcggcgtccggcccccgacccgtgctcgtccgcccgcccgcccgcccgcccgcgccatgaacgccaaggtcgtggtcgtgctggtcctcgtgctgaccgcgctctgcctcagcgacgggaagcccgtcagcctgagctacagatgcccatgccgattcttcgaaagccatgttgccagagccaacgtcaagcatctcaaaattctcaacactccaaactgtgcccttcagattgtagcccggctgaagaacaacaacagacaagtgtgcattgacccgaagctaaagtggattcaggagtacctggagaaagctttaaacaagaggttcaagatgtgagagggtcagacgcctgaggaacccttacagtaggagcccagctctgaaaccagtgttagggaagggcctgccacagcctcccctgccagggcagggccccaggcattgccaagggctttgttttgcacactttgccatattttcaccatttgattatgtagcaaaatacatgacatttatttttcatttagtttgattattcagtgtcactggcgacacgtagcagcttagactaaggccattattgtacttgccttattagagtgtctttccacggagccactcctctgactcagggctcctgggttttgtattctctgagctgtgcaggtggggagactgggctgagggagcctggccccatggtcagccctagggtggagagccaccaagagggacgcctgggggtgccaggaccagtcaacctgggcaaagcctagtgaaggcttctctctgtgggatgggatggtggagggccacatgggaggctcacccccttctccatccacatgggagccgggtctgcctcttctgggagggcagcagggctaccctgagctgaggcagcagtgtgaggccagggcagagtgagacccagccctcatcccgagcacctccacatcctccacgttctgctcatcattctctgtctcatccatcatcatgtgtgtccacgactgtctccatggccccgcaaaaggactctcaggaccaaagctttcatgtaaactgtgcaccaagcaggaaatgaaaatgtcttgtgttacctgaaaacactgtgcacatctgtgtcttgtgtggaatattgtccattgtccaatcctatgtttttgttcaaagccagcgtcctcctctgtgaccaatgtcttgatgcatgcactgttccccctgtgcagccgctgagcgaggagatgctccttgggccctttgagtgcagtcctgatcagagccgtggtcctttggggtgaactaccttggttcccccactgatcacaaaaacatggtgggtccatgggcagagcccaagggaattcggtgtgcaccagggttgaccccagaggattgctgccccatcagtgctccctcacatgtcagtaccttcaaactagggccaagcccagcactgcttgaggaaaacaagcattcacaacttgtttttggtttttaaaacccagtccacaaaataaccaatcctggacatgaagattctttcccaattcacatctaacctcatcttcttcaccatttggcaatgccatcatctcctgccttcctcctgggccctctctgctctgcgtgtcacctgtgcttcgggcccttcccacaggacatttctctaagagaacaatgtgctatgtgaagagtaagtcaacctgcctgacatttggagtgttcccctcccactgagggcagtcgatagagctgtattaagccacttaaaatgttcacttttgacaaaggcaagcacttgtgggtttttgttttgtttttcattcagtcttacgaatacttttgccctttgattaaagactccagttaaaaaaaattttaatgaagaaagtggaaaacaaggaagtcaaagcaaggaaactatgtaacatgtaggaagtaggaagtaaattatagtgatgtaatcttgaattgtaactgttcgtgaatttaataatctgtagggtaattagtaacatgtgttaagtattttcataagtatttcaaattggagcttcatggcagaaggcaaacccatcaacaaaaattgtcccttaaacaaaaattaaaatcctcaatccagctatgttatattgaaaaaatagagcctgagggatctttactagttataaagatacagaactctttcaaaaccttttgaaattaacctctcactataccagtataattgagttttcagtggggcagtcattatccaggtaatccaagatattttaaaatctgtcacgtagaacttggatgtacctgcccccaatccatgaaccaagaccattgaattcttggttgaggaaacaaacatgaccctaaatcttgactacagtcaggaaaggaatcatttctatttctcctccatgggagaaaatagataagagtagaaactgcagggaaaattatttgcataacaattcctctactaacaatcagctccttcctggagactgcccagctaaagcaatatgcatttaaatacagtcttccatttgcaagggaaaagtctcttgtaatccgaatctctttttgctttcgaactgctagtcaagtgcgtccacgagctgtttactagggatccctcatctgtccctccgggacctggtgctgcctctacctgacactcccttgggctccctgtaacctcttcagaggccctcgctgccagctctgtatcaggacccagaggaaggggccagaggctcgttgactggctgtgtgttgggattgagtctgtgccacgtgtatgtgctgtggtgtgtccccctctgtccaggcactgagataccagcgaggaggctccagagggcactctgcttgttattagagattacctcctgagaaaaaagcttccgcttggagcagaggggctgaatagcagaaggttgcacctcccccaaccttagatgttctaagtctttccattggatctcattggacccttccatggtgtgatcgtctgactggtgttatcaccgtgggctccctgactgggagttgatcgcctttcccaggtgctacacccttttccagctggatgagaatttgagtgctctgatccctctacagagcttccctgactcattctgaaggagccccattcctgggaaatattccctagaaacttccaaatcccctaagcagaccactgataaaaccatgtagaaaatttgttattttgcaacctcgctggactctcagtctctgagcagtgaatgattcagtgttaaatgtgatgaatactgtattttgtattgtttcaagtgcatctcccagataatgtgaaaatggtccaggagaaggccaattcctatacgcagcgtgctttaaaaaataaataagaaacaactctttgagaaacaacaatttctactttgaagtcataccaatgaaaaaatgtatatgcacttataattttcctaataaagttctgtactcaaatgta

SEQ ID NO: 2672 - protein, 93 aa, Homo sapiens
MNAKVVVVLVLVLTALCLSDGKPVSLSYRCPCRFFESHVARANVKHLKILNTPNCALQIVARLKNNNRQVCIDPKLKWIQEYLEKALNKRFKM

SEQ ID NO: 2673 - DNA, 281 bp, Homo sapiens
  misc_feature (45)..(45): n is a, c, g, or t
  misc_feature (89)..(89): n is a, c, g, or t
ataaattgcaaaacctaatgaaagtgactgcttggtaaacaaatnattattatattataaaatgctataaaagagccatattgaaagtnccctgttggagacagggcaaatgccacaaaaatgatgtaaatttacatggaggaaaagtagaatctgcctggtttgtaggcagcagaagacatttttcatcagtgggcaggtgttctttaccttttgtagaaatgggagtcaagtctcaaataggaggctccacaaaatctcatgccaggtctctggtacct

SEQ ID NO: 2674 - DNA, 318 bp, Homo sapiens
gctgcgagcgcgcgcggaccgcgcacaggcggcggagccggtatgggcccgcctgaccctgggcgccgcgccgcacgagcaccagcctagagccaggactgaagcttcaagatggctgaccaggaccctgcgggcatcagccccctccagcaaatggtggcctcaggcaccggggctgtggttacctctctcttcatgacacccctggacgtggtgaaggttcgcctgcagtctcagcggccctccatggccagcgagctgatgccttcctccagactgtggagcctctcctataccaaattgccctcctctctccaa

SEQ ID NO: 2675 - DNA, 530 bp, Homo sapiens
ttttttttttttttttaaaaggcaaagaaggtttttatttaagggacaacatttgagagctaaaaaccagctcacatcaaaatcaagacccagttgtaaaaatcttttaactccataatgctgtttttgtcttgttagaaatctgatatcttacattagcgtttctaacggattttgtacaaggcagccataaggaatataataaacctttttcaccacagaaccatctgtcacagataatactgaaagttacacacttaggaacagtcagaccacagacaaggtcagactggctgccaccaccaagtaaacaactagaaaaggacagcggggtccaagggtgggggtccctgtgcacgagtcgccctcctctggcctgccccccctcgggtcacctgcttctcctttgccccaaagagggtggagtcaaatgcagattttcctcccaactgcctgttagtgtctcaacaaggagagcagagcccaggtcaggcctcactgcttggacttaaccctaactatgattttta

SEQ ID NO: 2676 - DNA, 595 bp, Homo sapiens
  misc_feature (585)..(585): n is a, c, g, or t
tctgttctaatgtatcattaagctccttaaaatactggagaacagcttccttatcgccttggatcattttctcagaatgagatttttgttctttcagcttttcaataagatgggtaagatctgtccagtgtgtgtcagtcaactgttcaagcagtttttgaggagtgtccttttctttcaaataggcactttgaaggtcatctataggatgaccatgatgttgacctatggtaaggcaatgaccacaaactaattttttatctaatagacagtaaacatttaatggttgcctgtaatgttcagggcaggtgacaatatctggatggtcttcttgctggtacttttcaataatagcccttagtgcaaaattaacaggtaaagattcaatgccagttggagcaatttcagtaatacttctgcaattagggcacttgagtggaattcgtaaaggtctccatatataaaagttaccagatgcctgaagaatgttttccaaacaatttctacaaaatgtatgagagcatggcagtacacgaggatcttcaaaaatactataacatatgggacaagttaactcttgctcanaattgtgcat

SEQ ID NO: 2677 - DNA, 162 bp, Homo sapiens
ttttttttttttttttttttgcacttatggtatttattgttggaagattgagtaccttaatgcacaccaatgctcaaatgacttgggggcacataggggactgctgtcaccatgcctcactcctgcagggaaggggctgccctactaaaaccccagcgggcc

SEQ ID NO: 2678 - DNA, 793 bp, Homo sapiens
  misc_feature (18)..(18): n is a, c, g, or t
  misc_feature (43)..(43): n is a, c, g, or t
  misc_feature (47)..(47): n is a, c, g, or t
  misc_feature (90)..(90): n is a, c, g, or t
  misc_feature (134)..(134): n is a, c, g, or t
  misc_feature (144)..(144): n is a, c, g, or t
  misc_feature (162)..(162): n is a, c, g, or t
  misc_feature (169)..(169): n is a, c, g, or t
  misc_feature (184)..(185): n is a, c, g, or t
  misc_feature (189)..(189): n is a, c, g, or t
  misc_feature (193)..(193): n is a, c, g, or t
  misc_feature (199)..(199): n is a, c, g, or t
  misc_feature (202)..(203): n is a, c, g, or t
  misc_feature (207)..(207): n is a, c, g, or t
  misc_feature (214)..(214): n is a, c, g, or t
  misc_feature (219)..(219): n is a, c, g, or t
  misc_feature (224)..(224): n is a, c, g, or t
  misc_feature (228)..(229): n is a, c, g, or t
  misc_feature (233)..(233): n is a, c, g, or t
  misc_feature (241)..(241): n is a, c, g, or t
  misc_feature (243)..(243): n is a, c, g, or t
  misc_feature (245)..(245): n is a, c, g, or t
  misc_feature (253)..(255): n is a, c, g, or t
  misc_feature (258)..(259): n is a, c, g, or t
  misc_feature (263)..(263): n is a, c, g, or t
  misc_feature (277)..(277): n is a, c, g, or t
  misc_feature (280)..(280): n is a, c, g, or t
  misc_feature (282)..(282): n is a, c, g, or t
  misc_feature (292)..(292): n is a, c, g, or t
  misc_feature (298)..(298): n is a, c, g, or t
  misc_feature (301)..(301): n is a, c, g, or t
  misc_feature (306)..(306): n is a, c, g, or t
  misc_feature (310)..(310): n is a, c, g, or t
  misc_feature (312)..(313): n is a, c, g, or t
  misc_feature (315)..(315): n is a, c, g, or t
  misc_feature (317)..(317): n is a, c, g, or t
  misc_feature (330)..(330): n is a, c, g, or t
  misc_feature (340)..(340): n is a, c, g, or t
  misc_feature (349)..(349): n is a, c, g, or t
  misc_feature (375)..(375): n is a, c, g, or t
  misc_feature (392)..(393): n is a, c, g, or t
  misc_feature (398)..(398): n is a, c, g, or t
  misc_feature (400)..(400): n is a, c, g, or t
  misc_feature (406)..(406): n is a, c, g, or t
  misc_feature (408)..(409): n is a, c, g, or t
  misc_feature (412)..(412): n is a, c, g, or t
  misc_feature (414)..(415): n is a, c, g, or t
  misc_feature (423)..(423): n is a, c, g, or t
  misc_feature (434)..(434): n is a, c, g, or t
  misc_feature (445)..(445): n is a, c, g, or t
  misc_feature (453)..(453): n is a, c, g, or t
  misc_feature (462)..(463): n is a, c, g, or t
  misc_feature (468)..(468): n is a, c, g, or t
  misc_feature (472)..(472): n is a, c, g, or t
  misc_feature (474)..(474): n is a, c, g, or t
  misc_feature (481)..(481): n is a, c, g, or t
  misc_feature (485)..(485): n is a, c, g, or t
  misc_feature (492)..(492): n is a, c, g, or t
  misc_feature (507)..(507): n is a, c, g, or t
  misc_feature (513)..(513): n is a, c, g, or t
  misc_feature (524)..(524): n is a, c, g, or t
  misc_feature (526)..(526): n is a, c, g, or t
  misc_feature (529)..(529): n is a, c, g, or t
  misc_feature (531)..(532): n is a, c, g, or t
  misc_feature (541)..(541): n is a, c, g, or t
  misc_feature (566)..(566): n is a, c, g, or t
  misc_feature (569)..(569): n is a, c, g, or t
  misc_feature (571)..(574): n is a, c, g, or t
  misc_feature (580)..(580): n is a, c, g, or t
  misc_feature (582)..(583): n is a, c, g, or t
  misc_feature (591)..(591): n is a, c, g, or t
  misc_feature (593)..(593): n is a, c, g, or t
  misc_feature (595)..(596): n is a, c, g, or t
  misc_feature (614)..(614): n is a, c, g, or t
  misc_feature (618)..(619): n is a, c, g, or t
  misc_feature (628)..(629): n is a, c, g, or t
  misc_feature (635)..(635): n is a, c, g, or t
  misc_feature (641)..(641): n is a, c, g, or t
  misc_feature (645)..(645): n is a, c, g, or t
  misc_feature (648)..(648): n is a, c, g, or t
  misc_feature (657)..(657): n is a, c, g, or t
  misc_feature (660)..(662): n is a, c, g, or t
  misc_feature (666)..(669): n is a, c, g, or t
  misc_feature (672)..(672): n is a, c, g, or t
  misc_feature (675)..(675): n is a, c, g, or t
  misc_feature (681)..(682): n is a, c, g, or t
  misc_feature (692)..(694): n is a, c, g, or t
  misc_feature (705)..(705): n is a, c, g, or t
  misc_feature (710)..(711): n is a, c, g, or t
  misc_feature (714)..(714): n is a, c, g, or t
  misc_feature (716)..(716): n is a, c, g, or t
  misc_feature (727)..(728): n is a, c, g, or t
  misc_feature (732)..(732): n is a, c, g, or t
  misc_feature (741)..(741): n is a, c, g, or t
  misc_feature (744)..(744): n is a, c, g, or t
  misc_feature (753)..(753): n is a, c, g, or t
  misc_feature (755)..(755): n is a, c, g, or t
  misc_feature (765)..(765): n is a, c, g, or t
  misc_feature (779)..(779): n is a, c, g, or t
  misc_feature (782)..(782): n is a, c, g, or t
  misc_feature (786)..(786): n is a, c, g, or t
  misc_feature (789)..(790): n is a, c, g, or t
ttctctagatgagtcacngtctcatcgtcttcagagccatgtncccntggtcagatggaacatatgaccagctttcagaatccagtagantgcaaggttcttgtaggactagacaattagcagatgtttccagngctttagggncactgtccagcgcctccnacttcanttgactgagttctgnnagcnctgnccactncannttcngcacccngcccncctgntctnnggtntctacgangngntccagttnnncannatanaggggcacggggcnccnanattccaccanctcgtncanatttntttncnntngntccaccccgtccnccacaatgtncacaagggnggtggcccccctaggctccacccccnggattctcagggagtgnnctcgntnttctgncnnccnannacattcanaaagtcatttngggggggtcgntgcagggngtctcaggnnggganagcnangcgccancctnggagggngggcggtgggggganctcacnagggggcaaancnggncnnagatctagntaaggagaggctcaaaggggctggnacntnnnnggaggngnntccggggncntnnaccaaggtggaggtgggncaanngagagttanncaaggnttgaanttgngtngaggaggcnttnnncccnnnnctncgncttggnncaacgagagnnnttgcgaggganggtcnncgngnagaagggatannagcnggagcgagnggngggagcagnanagcggagagnggagagagcgatgnganaganggnnccc

SEQ ID NO: 2679 - DNA, 619 bp, Homo sapiens
ggcgagaggagggcctacagcaaccttggggaacgcccacgtcttcctggggctgctttgacgtggcctgccgagtactacaagaagacgctgcaactgtctcggcagctcagggaccaggcagtggaggcgcaggcctgctacagtctgggcaagcacctacacgctgctgcaggactacgagcgcgcggccgagtaccacctggcggcacctgctcattgcccaggagctggccgacagagtgggcgagggccgggcgtgctggagcctgggaaatgcctacgtgtccatggggcgcccagtcgcaggccctgaccttcgccaagaacgcacctgcagatctcccaggagatcggggaccgacatggggagctcacggcccgcatgaacgtggcgcagctgcagctggtgctcggccgcctgtacgcagcccggcagcctcagagaagcctgacctggccggctatgaggcccagggggccagatcccaagaggacgcagagtgctgagcgcggagacctgggacctgctgagactccccctggagcgggagcagaatggagacagccagcagtacaggggactggcgggggcccagcagggactcgctacccctcc

SEQ ID NO: 2680 - DNA, 1019 bp, Homo sapiens
aaaaatctggcatctggaaatatcctccccgcgctgaaaaaactggctagcaccaacgacgcaaattcttaataaaatccttacttttttaagtaaaactttttttcttttttcttatttcttaagtaaacattttaaattgaaattttttttctgtacagagaaagttgaaacatccattcctatgtttgggatgagaaaagataaattatttatgttattggaaaacagaagattacagactgtcaataaacttttacttttaaatgaataaataatacatgacaattcttttcacatgagagaacgtctgcttctatttcctcctaaaatactgtggcggctgggcatgtcaacagcgccgctggtgtagtggtatcatgcaagattcccattcttgcgacccgggttcgattcccgggcggcgcataggcgttttgcttctcgctcgctaaaaaccagatagcttgaagagtctttatatatctttccaaaagaggaaagatttaggctttttactgtccctgaaggtttccactccctcataattcgcggtcgaaacactcgaatccgcagccagaagacaaaaaagttcacgcaaatcgtgaagtagttaatacttgcgcctgcgcagtctgaggcgtccctcgcgtcgggtggaagagcggctgcgcaacaagtgaacctatggattaaggtgtagccgggcggcccggaggttgagagtgcaagattattctgcgcctgcgcggcccgggtaactttgctggctgctcctaggctcccggctcgccgccatcttgtattggggtttcattgttcccgctgggccgggcggtttagtgtaattgccgccggaggaggaggcggagtaacctctggtcagccgagaaaccccactatcctgtagccataaccgcttaaacgatttgggaggtagtgaagggcagggagctggacctggaggcgccgccgcgacagcagcagccatggaggacgagatgcccaagactctatac

SEQ ID NO: 2681 - protein, 10 aa, Homo sapiens
MEDEMPKTLY

SEQ ID NO: 2682 - DNA, 2291 bp, Homo sapiens
gcaattaaagtcaagagctaaggagggagggagagggtttagaaataccagcataataagtagtatgactgggtgctctgtaaattaactcaattagacaaagcctgacttaacgggggaagatggtgagaagcgctaccctcattaaatttggttgttagaggcgcttctaaggaaattaagtctgttagttgtttgaatcacataaaattgtgtgtgcacgttcatgtacacatgtgcacacatgtaacctctgtgattcttgtgggtatttttttaagaagaaaggaatagaaagcaaagaaaaataaaaaatactgaaaagaaaagactgaaagagtagaagataaggagaaaagtacgacagagacaaggaaagtaagagagagagagagctctcccaattataaagccatgagccccctttggtgggggtttctgctcagttgcttgggctgcaaaatcctgccaggagcccagggtcagttcccccgagtctgcatgacggtggacagcctagtgaacaaggagtgctgcccacgcctgggtgcagagtcggccaatgtctgtggctctcagcaaggccgggggcagtgcacagaggtgcgagccgacacaaggccctggagtggtccctacatcctacgaaaccaggatgaccgtgagctgtggccaagaaaattcttccaccggacctgcaagtgcacaggaaactttgccggctataattgtggagactgcaagtttggctggaccggtcccaactgcgagcggaagaaaccaccagtgattcggcagaacatccattccttgagtcctcaggaaagagagcagttcttgggcgccttagatctcgcgaagaagagagtacaccccgactacgtgatcaccacacaacactggctgggcctgcttgggcccaatggaacccagccgcagtttgccaactgcagtgtttatgatttttttgtgtggctccattattattctgttagagatacattattaggaccaggacgcccctacagggccatagatttctcacatcaaggacctgcatttgttacctggcaccggtaccatttgttgtgtctggaaagagatctccagcgactcattggcaatgagtcttttgctttgccctactggaactttgccactgggaggaacgagtgtgatgtgtgtacagaccagctgtttggggcagcgagaccagacgatccgactctgattagtcggaactcaagattctccagctgggaaactgtctgtgatagcttggatgactacaaccacctggtcaccttgtgcaatggaacctatgaaggtttgctgagaagaaatcaaatgggaagaaacagcatgaaattgccaaccttaaaagacatacgagattgcctgtctctccagaagtttgacaatcctcccttcttccagaactctaccttcagtttcaggaatgctttggaagggtttgataaagcagatgggactctggattctcaagtgatgagccttcataatttggttcattccttcctgaacgggacaaacgctttgccacattcagccgccaatgatcccatttttgtggttcttcattcctttactgatgccatctttgatgagtggatgaaaagatttaatcctcctgcagatgcctggcctcaggagctggcccctattggtcacaatcggatgtacaacatggttcctttcttccctccagtgactaatgaagaactctttttaacctcagaccaacttggctacagctatgccatcgatctgccagtttcagttgaagaaactccaggttggcccacaactctcttagtagtcatgggaacactggtggctttggttggtctttttgtgctgttggcttttcttcaatatagaagacttcgaaaaggatatacacccctaatggagacacatttaagcagcaagagatacacagaagaagcctagggtgctcatgccttacctaagagaagaggctggccaagccacagttctgacgctgacaataaaggaactaatcctcactgttccttcttgagttgaagatctttgacataggttcttctatagtgatgatgatctcattcagaagatgcttagctgtagtttccgctttgcttgcttgtttaacaaacccaactaaagtgcttgaggctacctctaccttcaaataaagatagacctgacaatttgtgatatctaataataaccccccccccaatattgattaagcctcctccttttctgaaagcatttaaaaaaaa

SEQ ID NO: 2683 - protein, 519 aa, Homo sapiens
MSPLWWGFLLSCLGCKILPGAQGQFPRVCMTVDSLVNKECCPRLGAESANVCGSQQGRGQCTEVRADTRPWSGPYILRNQDDRELWPRKFFHRTCKCTGNFAGYNCGDCKFGWTGPNCERKKPPVIRQNIHSLSPQEREQFLGALDLAKKRVHPDYVITTQHWLGLLGPNGTQPQFANCSVYDFFVWLHYYSVRDTLLGPGRPYRAIDFSHQGPAFVTWHRYHLLCLERDLQRLIGNESFALPYWNFATGRNECDVCTDQLFGAARPDDPTLISRNSRFSSWETVCDSLDDYNHLVTLCNGTYEGLLRRNQMGRNSMKLPTLKDIRDCLSLQKFDNPPFFQNSTFSFRNALEGFDKADGTLDSQVMSLHNLVHSFLNGTNALPHSAANDPIFVVLHSFTDAIFDEWMKRFNPPADAWPQELAPIGHNRMYNMVPFFPPVTNEELFLTSDQLGYSYAIDLPVSVEETPGWPTTLLVVMGTLVALVGLFVLLAFLQYRRLRKGYTPLMETHLSSKRYTEEA

SEQ ID NO: 2684 - DNA, 2242 bp, Homo sapiens
ggaaaccagcaggcgttggggaggggtggcgggggaatagcggcggcagcagccccagccctcagagagacagcagaaagggagggagggagggtgctggggggacagccccccaccattcctaccgctatgggcccaacctcccactcccacctcccctccatcggccggggctaggacacccccaaatcccgtcgcccccttggcaccgacaccccgacagagacagagacacagccatccgccaccaccgctgccgcagcctggctggggagggggccagccccccaggccccctacccctctgaggtggccagaatggatttgtggccaggggcatggatgctgctgctgctgctcttcctgctgctgctcttcctgctgcccaccctgtggttctgcagccccagtgccaagtacttcttcaagatggccttctacaatggctggatcctcttcctggctgtgctcgccatccctgtgtgtgccgtgcgaggacgcaacgtcgagaacatgaagatcttgcgtctaatgctgctccacatcaaatacctgtacgggatccgagtggaggtgcgaggggctcaccacttccctccctcgcagccctatgttgttgtctccaaccaccagagctctctcgatctgcttgggatgatggaggtactgccaggccgctgtgtgcccattgccaagcgcgagctactgtgggctggctctgccgggctggcctgctggctggcaggagtcatcttcatcgaccggaagcgcacgggggatgccatcagtgtcatgtctgaggtcgcccagaccctgctcacccaggacgtgagggtctgggtgtttcctgagggaacgagaaaccacaatggctccatgctgcccttcaaacgtggcgccttccatcttgcagtgcaggcccaggttcccattgtccccatagtcatgtcctcctaccaagacttctactgcaagaaggagcgtcgcttcacctcgggacaatgtcaggtgcgggtgctgcccccagtgcccacggaagggctgacaccagatgacgtcccagctctggctgacagagtccggcactccatgctcactgttttccgggaaatctccactgatggccggggtggtggtgactatctgaagaagcctgggggcggtgggtgaaccctggctctgagctctcctcccatctgtccccatcttcctccccacacctacccacccagtgggccctgaagcagggccaaaccctcttccttgtctcccctctccccacttattctcctatttggaatcttcaacttctgaagtgaatgtggatacagcgccactcctgccccctcttggccccatccatggactcttgcctcggtgcagtctccactcttgacccccacctcctactgtcttgtctgtgggacagttgcctccccctcatctccagtgactcagcctacacaagggaggggaacattccatccccagtggagtctcttcctatgtggtcttctctacccctctaccccacattggccagtggactcatccattctttggaacaaatcccccccactccaaagtccatggattcaatggactcatccatttgtgaggaggacttctcgccctctggctggaagctgatacctgaagcactcccaggctcatcctgggagctttcctcagcaccttcaccttccctcccagtgtagcctcctgtcagtgggggctggacccttctaattcagaggtctcatgcctgcccttgcccagatgcccagggtcgtgcactctctgggataccagttcagtctccacatttctggttttctgtccccatagtacagttcttcagtggacatgaccccacccagccccctgcagccctgctgcaccatctcaccagacacaaggggaagaagcagacatcaggtgctgcactcacttctgccccctggggagttggggaaaggaacgaaccctggctggaggggataggagggcttttaatttatttctttttctgttgaggcttccccctctctgagccagttttcatttcttcctggtggcattagccactccctgcctctcactccagacctgttcccacaactggggaggtaggctgggagcaaaaggagagggtgggacccagttttgcgtggttggtttttattaattatctggataacagcaaaaaaactgaaaataaagagagagagagaaaaaaaaa

SEQ ID NO: 2685 - protein, 283 aa, Homo sapiens
MDLWPGAWMLLLLLFLLLLFLLPTLWFCSPSAKYFFKMAFYNGWILFLAVLAIPVCAVRGRNVENMKILRLMLLHIKYLYGIRVEVRGAHHFPPSQPYVVVSNHQSSLDLLGMMEVLPGRCVPIAKRELLWAGSAGLACWLAGVIFIDRKRTGDAISVMSEVAQTLLTQDVRVWVFPEGTRNHNGSMLPFKRGAFHLAVQAQVPIVPIVMSSYQDFYCKKERRFTSGQCQVRVLPPVPTEGLTPDDVPALADRVRHSMLTVFREISTDGRGGGDYLKKPGGGG

SEQ ID NO: 2686 - DNA, 5047 bp, Homo sapiens
gctggatcctgcagtaaccacaacagcatcctctccctgcgccagggacctgccagccggagagatgactgattagatcagattagatccggagccccgctctgcagaagggggccccaggggcgggggaggaggaccccagctggcctgagctggggggaggggtgccttggggctcgcagagttagagctttccagcgcggggatcacacctcagaagccgccacaatgaaagacggaacacatttctacacccagtgactggccaggtcccagaggaaaacaaaaaatttgacttgaaaatatcgaccttggacatgtccaataaaacaggtgggaaacgcccggctaccaccaacagtgacatacccaaccacaacatggtgtccgaggtccctccagagcggcccagcgtccgggcaactcgcacagcccgcaaagccatcgcctttggcaagcgctcacactccatgaagcggaaccccaatgcacctgtcaccaaggcgggctggctcttcaaacaggccagctccggggttaagcagtggaacaagcgctggttcgtcctggtggatcgctgcctcttctactataaagatgagaaggaagagagtatcctgggcagcatccccctcctgagcttccgggtagccgcagtgcagccctcagacaacatcagccggaaacacacgtttaaggctgagcatgccggggtccgcacctacttcttcagtgccgagagccccgaggagcaagaggcctggatccaggccatgggggaggctgctcgagtacagatccctccagcccagaagtcagtgccccaagctgtgcggcacagccatgagaagccagactcggagaacgtcccacccagcaagcaccaccagcagccaccccacaacagcctccctaagcctgagccagaggccaagactcgaggggagggtgatggccgaggctgtgagaaggcagagagaaggcctgagaggccagaagtcaagaaagagcctccggtgaaagccaatggcctcccagctggaccggagccagcctcagagccgggcagcccttaccccgagggcccaagagtgccagggggtggggaacagcctgcccagcccaatggctggcagtaccactccccaagccggccagggagcacagctttcccgtctcaggatggagagactgggggacaccggcggagtttcccaccacgcaccaaccctgacaaaattgcccagcgcaagagctccatgaaccagcttcagcagtgggtgaatctgcgccggggggtacccccgcctgaagaccttcggagtccctctaggttctatcctgtgtctcgcagggtccctgagtactatggcccctactcctcccagtaccccgatgattatcagtactacccgccaggagtgcggccggagagcatctgttccatgccggcctatgatcggatcagcccgccctgggccctggaggacaagcgccatgccttccgcaatgggggtggccctgcctaccagctgcgagagtggaaggagcccgccagctacgggcggcaggatgccaccgtctggatcccaagcccctcccggcagccagtctattatgatgagctggatgccgcctctagctccctgcgccgcctgtccctgcagccccgctcccactctgtgccccgctcacccagccagggctcctacagccgtgcccgcatttactcccctgtccgctcacccagtgcccgttttgagcggctgccacctcgcagtgaggacatctatgctgaccctgctgcctatgtgatgaggcgatccatcagctcccccaaggtccctccatacccagaagtgttccgggacagcctccacacctacaagttaaacgagcaagacacagataagctgctgggaaaattgtgtgagcagaacaaggtggtgagggagcaggaccggctggtgcagcagctccgagctgagaaggagagcctggaaagtgccttgatggggacccaccaggagctggagatgtttggaagccagcccgcctacccagaaaagctgcgacacaaaaaggattcactgcagaaccagctcatcaacatccgcgtggagctgtctcaggcgaccacggccctgacaaacagcaccatagagtatgagcacctcgagtctgaggtctctgccctgcacgatgacctctgggagcagctcaatttggacacccagaatgaggtgctgaaccggcaaatccaaaaggagatctggaggatccaggacgtgatggaggggctgaggaagaacaacccctcccggggcacggacaccgccaagcacagaggaggacttggcccctcagccacctacagctccaacagcccggccagccccctcagctctgccagcctcaccagccccctgagccccttttcactggtgtcgggctctcaggggtcccccaccaagcctggctccaacgagcccaaggcaaactatgaacaaagcaagaaagacccccaccagacattgcccctggacacccccagagacatcagccttgtgcccaccaggcaagaggtagaggcagagaagcaggcagctctcaacaaagttggcgttgtgccccctcggacaaaatcgcccactgatgatgaggtgaccccatcagcagtggtaagaaggaatgccagtgggctcaccaatggactctcctcccaggaacgccccaagagtgctgtgtttcctggcgaggggaaggtcaagatgagcgtggaggagcagattgaccgaatgcggcggcaccagagtggctccatgaaggagaagcggaggagcctgcagctcccggccagcccggcccccgaccccagtccccggccagcctacaaagtggtgcgccgccaccgcagcatccacgaggtagacatctccaacctggaggcagccctgcgggcagaggagcctggcgggcatgcctacgagacaccccgggaggaaattgcccggcttcgcaaaatggagctagagccccagcattatgacgtggacatcaataaggagctctccactccagacaaagtcctcatccctgaacggtacattgacctggagcctgacactcccctgagccctgaggagttgaaggagaagcagaagaaggtggagaggatcaagacactcattgccaaatccagtatgcagaacgtggtgcccatcggcgagggggactctgtggacgtgccccaggactcagagagccagctgcaggagcaggagaagcggattgaaatctcctgcgccctggcgaccgaggcctcccgcaggggccgcatgctgtctgtgcaatgtgccaccccaagccctcccacctcccctgcttccccggctcctccagcaaaccccctgtcgtctgaatccccacggggcgccgacagcagctataccatgcgggtctgagctctgactgcaagccctggctgaggccaatgctgtgaagctccacagagccacattctgaagccgtcctctgcccacctgaggtcctggctccccaccctggccccctgcccctgcactcccatgggaatgccgcagggagccaggctggggccatgggctgctgccagaggaccgtggatacctcagtgtccacacacccaccatgcccagccctggagccatcactactcacaccgtggtcctgggccagggcctgagatgacagtggggagcaccatcctcattaatgtccaagtcacagggagcctcagccttgccctggctggggttgtggtgactccagtggaacattccctgatgggggacatgccgtggtggagaacacacctgtggctatcttatgtgaggactagaggtgaagaggagatggacactgcctctggagccagcctgacaccaaggacagcacttgtcatcatccctatcctcgtcagccccaccctgctgcctcagctggacccagggctttgacacaaacccagtgctttgcttatgggtgctcgctggggtccggtggagactgaccaccctgcttgagccaaagacaaggtgatgagagatggggagaggccattggctcccagagggaacagtgctggctgtggctagagaacagcaggtctgtgcagtgtctgagggcaggttgggaagggtagcagagagagagagacagaaagagagagagagagagagagagagagagagagagagagagagagatcctcagagtggaaggagggggaagcagcaggacacattggcaagtcaagcaggaaggagggagatggaaaggggatatcagattggtttcccccggtggagccttaggttagtgcccagtgcagtgccagactgtctcctctgctcctcccacctcatccctaggaggacccaccagtggagcacatgcagcctcagtggagatgcttggtgtggggatctgggtgaagggggttgagtagcgactgcctgggagatggctgttagtaggtctgcgcctggtgtctgcctcgccatcctggggtaaggggcagagagaaggacttgtcttatgtagggtgtggtcagccttggggccttacctacccagttccatgatatttcttgccctgttccccctggaatgtgcagtgggccagctgagagtacgccttgaggaggggggatgaggccttaatctgggaggcctatccccctatcccaggcatcccagacgaggactggctgaggctaggcgctctcatgatccacctgccccgggagggcagcggggaagacagagaaaagcaaacacattcctcctcagctccacccacctggagacgaatgtagccagagaggaggaaggagggaaactgaaaacaccgtggcccctcggccttctctctgctagagttgccgctcagaggcttcagcctgacttccagcggtcccaagaacacctactaattcctctccactccttcatggctgggacagttactggttcatatgcaagtaaagatgacaatttactcaac

SEQ ID NO: 2687 - protein, 1048 aa, Homo sapiens
MSNKTGGKRPATTNSDIPNHNMVSEVPPERPSVRATRTARKAIAFGKRSHSMKRNPNAPVTKAGWLFKQASSGVKQWNKRWFVLVDRCLFYYKDEKEESILGSIPLLSFRVAAVQPSDNISRKHTFKAEHAGVRTYFFSAESPEEQEAWIQAMGEAARVQIPPAQKSVPQAVRHSHEKPDSENVPPSKHHQQPPHNSLPKPEPEAKTRGEGDGRGCEKAERRPERPEVKKEPPVKANGLPAGPEPASEPGSPYPEGPRVPGGGEQPAQPNGWQYHSPSRPGSTAFPSQDGETGGHRRSFPPRTNPDKIAQRKSSMNQLQQWVNLRRGVPPPEDLRSPSRFYPVSRRVPEYYGPYSSQYPDDYQYYPPGVRPESICSMPAYDRISPPWALEDKRHAFRNGGGPAYQLREWKEPASYGRQDATVWIPSPSRQPVYYDELDAASSSLRRLSLQPRSHSVPRSPSQGSYSRARIYSPVRSPSARFERLPPRSEDIYADPAAYVMRRSISSPKVPPYPEVFRDSLHTYKLNEQDTDKLLGKLCEQNKVVREQDRLVQQLRAEKESLESALMGTHQELEMFGSQPAYPEKLRHKKDSLQNQLINIRVELSQATTALTNSTIEYEHLESEVSALHDDLWEQLNLDTQNEVLNRQIQKEIWRIQDVMEGLRKNNPSRGTDTAKHRGGLGPSATYSSNSPASPLSSASLTSPLSPFSLVSGSQGSPTKPGSNEPKANYEQSKKDPHQTLPLDTPRDISLVPTRQEVEAEKQAALNKVGVVPPRTKSPTDDEVTPSAVVRRNASGLTNGLSSQERPKSAVFPGEGKVKMSVEEQIDRMRRHQSGSMKEKRRSLQLPASPAPDPSPRPAYKVVRRHRSIHEVDISNLEAALRAEEPGGHAYETPREEIARLRKMELEPQHYDVDINKELSTPDKVLIPERYIDLEPDTPLSPEELKEKQKKVERIKTLIAKSSMQNVVPIGEGDSVDVPQDSESQLQEQEKRIEISCALATEASRRGRMLSVQCATPSPPTSPASPAPPANPLSSESPRGADSSYTMRV

SEQ ID NO: 2688 - DNA, 602 bp, Homo sapiens
  misc_feature (49)..(49): n is a, c, g, or t
tacgactcgagctgagaccatgtcccctagcggccatacaatgaatttngcttacacgtctttaatttcttttaattcctcatgtccagttctatgagatgggagtagatgaatggctgtcctggtgtgaggtccttacattttacttctctttaaaaatgaaaacaaaaaaaaatgtcgctggtcagaccacacaaagccacacaggcttataacagagctcaggaatcttctgtcctttccagagcaggcacagagacacgtggtcttcagcagagcctatggggttcagatgattcacataagaatagaagtttcagggctggacctggggaggcagcctgagcctgagccggctgtcctgagcctgagtactctagctgccttgtcgtcatcgcatctggctgccatccagcgccagcacacagtaatgagtggccgagcttcctctgggagggaggaaccagttaaaatcttgcagcagctgcaatcatctaggcgtggtcctcttgtctgactggggctgcacagatccggggccatgggacagaagaaagacagcctaggagcagagcttcccagatggttgagtgggatctaat

SEQ ID NO: 2689 - DNA, 5456 bp, Homo sapiens
  misc_feature (659)..(659): n is a, c, g, or t
  misc_feature (5367)..(5367): n is a, c, g, or t
  misc_feature (5374)..(5374): n is a, c, g, or t
  misc_feature (5379)..(5379): n is a, c, g, or t
  misc_feature (5398)..(5398): n is a, c, g, or t
  misc_feature (5403)..(5403): n is a, c, g, or t
  misc_feature (5436)..(5436): n is a, c, g, or t
  misc_feature (5449)..(5449): n is a, c, g, or t
  misc_feature (5454)..(5454): n is a, c, g, or t
aacttggctagttacagggtctcaaggaatctttattctgcgtcttcattctgaactggatggaaccttcctgagcgcagagtcctttccactgtgaattatgggtttgttatcgtttttgttcgttgctggttgtacgtgacgggagttcagctttttgctgcgggacggcagagataggatgcggggcttcctgagaggcgccggggcagggccgcacaggtccatccacctcccctgggaccccagccctgcagcagccccaggggagcggccggggatcggggcggggtgcccaggacgcgccctgattggcccagtgttagccaatcaaagctctcgcatccccatggtgctgattggtccgcctcccaggcctgacccaatcggagcattcctaggaggagcggccccagagcccctgactcgggggtcccagagccctctgcacaccacagccccggtgtccccgtgtgtccctgggttctcccagccctggtgtcccctgagtctcttcttcaccgtcagccctggtgtctcccgtgtccctgccacaccctcatccctggtgtcccccgtcaccccatcccctcacctcctgggctcctgaaggtcccatcttgtgggcctcattcatggaaccaggacggggcaggtgnaggcctctggggagtttgtccagagaatggaggagaagcagggtcatgagcaggagcggtctgggccacccctgcctctcccccggggggtgcagcccggaaggagtccagatggatatggccccgcagtgcagagtcagccccaaaccaggctggtcccaggcagggtgggggcaggaggagccccggagtggccctgtgttgggggtcggggggcaggcagggggtcctggggctcagaagcggaggaggtgggctggaggccccagtgaccaacaggcccaggggagtcgggaggtggggtggacggacctgcagggacagtgtcagcgctgaatgggatggagagcacagggagctggggccggggatgagaccatggggagctggggctggggctgggactagtccatggggagctggggctgaagttgggggtgagtccatggggagctgggctgggcctcctggggttgcacctgcactcctctctgctcttccctctgcgtatgaagctcagatcccatgataaggaggcacctgcagaccaggggacctgcacggacagccccagaggtggacattgaggactcgtaggaggacttgggtctcatacggcgggtggggagcagggccccttcctggctgaggacacttggtgctgtcccctctcaaggctgtttccccatctgacaaaggggtctcacgtgagcccccaaccaagtgagtcgaggagggctggccccacccccgtggattcggagtccgtaggaggggtgtcacccgtcatgtccccaccccgtgggcaccttcccgtctcttggagcgtggcccatggacatgagttcctcacccgtgtccctcttggggaaacaggtttcaggagcgacgggtcttgtagcctggggcagccaggccacctgggtgcagcaatgcctgaaggcctcctggcaccgagacaggggcaggagcagatcccaccagcgggaaggtggtgggttccagtgctgggatccaccagctgacaggtggagctgccagtctccagtgctcagccctcagcggggcctgcctggcagccccacacacagagggcatcggggtggcgggggcacgtgttacacgggggccctgggtctgagtcatccacttcctccgagtctggatgggaggacccagcgcccctcctccgccccctcctgatctggaaggataaatggggaggggagagcccactgggtagaaggaacagggagcggccagggtaagtccccactctcagagaccctgacatcagcgtcacctggagcagagtggcccagcctcagactcagagcaccaagacccaggcccgcaggcctggacccaccccggtccccccgtcccagctccattcttcaccccacaatctgtagcccccagccctgccctgtgaggcccggccaggcccacgatgctcctccttgctccccagatgctgaatctgctgctgctggcgctgcccgtcctggcgagccgcgcctacgcggcccctggtgagtcccagccggggtccaccctgcccctcaccacattccacaggtcagggcctgggtgggttctggggaggtcgggctggcccccacacagggaagggctgggcccaggcctggggctgcttcctggtcctgacctggcacctgccccagccccaggccaggccctgcagcgagtgggcatcgtcgggggtcaggaggcccccaggagcaagtggccctggcaggtgagcctgagagtccacggcccatactggatgcacttctgcgggggctccctcatccacccccagtgggtgctgaccgcagcgcactgcgtgggaccgtgagtctcccggggcctggaggggtggggaagggctggatgtgagccctggctcccgggtgctcctgggggctgcccagggccctgagtgggatcctccgctgcccagggacgtcaaggatctggccgccctcagggtgcaactgcgggagcagcacctctactaccaggaccagctgctgccggtcagcaggatcatcgtgcacccacagttctacaccgcccagatcggagcggacatcgccctgctggagctggaggagccggtgaacgtctccagccacgtccacacggtcaccctgccccctgcctcagagaccttccccccggggatgccgtgctgggtcactggctggggcgatgtggacaatgatggtgggtctggggacagtggaggtggggccagggtcttagccacagcccagcccctgggctccctctgggctccaggtgggggttgcccggccccctcctgaggctgcaccctcttccccacctgcagagcgcctcccaccgccatttcctctgaagcaggtgaaggtccccataatggaaaaccacatttgtgacgcaaaataccaccttggcgcctacacgggagacgacgtccgcatcgtccgtgacgacatgctgtgtgccgggaacacccggagggactcatgccaggtgggccccgcctgtcccccgccccccgccccccaacccccactcccaggcctgttcggcgagcgctgacctctgaccttcccagggcgactccggagggcccctggtgtgcaaggtgaatggcacctggctgcaggcgggcgtggtcagctggggcgagggctgtgcccagcccaaccggcctggcatctacacccgtgtcacctactacttggactggatccaccactatgtccccaaaaagccgtgagtcaggcctgggttggccacctgggtcactggaggaccaacccctgctgtccaaaacaccactgcttcctacccaggtggcgactgccccccacaccttccctgccccgtcctgagtgccccttcctgtcctaagccccctgctctcttctgagccccttcccctgtcctgaggacccttccctatcctgagcccccttccctgtcctaagcctgacgcctgcaccgggccctccagccctcccctgcccagatagctggtggtgggcgctaatcctcctgagtgctggacctcattaaagtgcatggaaatcactggtgtgcatcgctgtgtttctggttgtggatgtcactgggagagaaggggtccaggtgtgctgaggacacctgccacagtgtgaggtcctagccctcaaggcacagccagtcaccgtgggacggggcctcctgggcagccctggtccccgagctggcttctccccacacgatgcatccaacattcgggtcacacagagccactcgggcaactcagttgattataaaggacagccaggtccctgcaaccgggtcaagacagagaatggtcgccgggagccccagggctgcccatcatgagcccctaccccacgcttcccacgagctcttctcccggcccctctgtccactgcttgtgctttgcctagtgtttgctttgagacgggatctcgctgtgtcatccaggctgaagtgcagtggtgtgatcagggctcactgcagccttaactcctgggctcaagcgatcctcccatcttggcctcccatatagctgggccacaggcgtgagccaccacgcccagttaatttttgtattttcagtagagatggggtttcgccatgttggccagtctggtctcgaactcctgacctcaagtgatccgcccgcctcggcctcccaaagtgctgggatgacaggcgtgagccaccgcacccggcctgagtttgacattttcaaattcattttgaggtctttctctacatcaataggtgagccctctgcgtctggcgagtgttgcattttatcccgggctcttgtttgcattttttatttgaacatgattacacccaggaatgaaatgcggggctgttctggttgaaaacaactctctaaagaaacattcactctttccttccaactgtcagatgcagagatgtgcatttagtctctccaatctctgcaaatgacctctgtcctcacaaggggtggactcgactcccagcgccctctccagccccacgtgacctctgcctctgcagcccctgaaggcccatccctcggctcctgttctgcaggcccagcgtcttgtctatgaagatggacctggaactcgggccctccttcctccctctggcccatcccaccttctagggatcacagagacagcacggggtgacccccagggaacactgagcccctagaagcacttccacacgcccactggaggttttgcggggtgggagtcggagggatgagaccccgaagggaagcaagacagcccctcaggacagggctgccggtgtaaggaaaggtggacagcaggggccggtcactgggtggagggggagggcgggctccagccccagagcttcccaaattagatctaagatccctgggaagctcagtgaagctcagcgcagtgacactggcagatgtgagcgtcagcttcagcaggaagggtctctcaggacgtgacaggcaggctgctggccagggctgcagccacctgcgttttgactgggacggggacacctgatccaaggtcacccacgtggctgccggcaggaggccctggttccccgtcacaggggggtgtgagggggagggccagtggtggcgacagggttcccacccgagaggacagtgcccaagtggccaggccacccgtggacagaaacnatcccangtctnccaaggtcctggacaacangagancccaccaaagcttgggggcaattaaccaagggncaggccccccctnccggntc

SEQ ID NO: 2690 - protein, 275 aa, Homo sapiens
MLNLLLLALPVLASRAYAAPAPGQALQRVGIVGGQEAPRSKWPWQVSLRVHGPYWMHFCGGSLIHPQWVLTAAHCVGPDVKDLAALRVQLREQHLYYQDQLLPVSRIIVHPQFYTAQIGADIALLELEEPVNVSSHVHTVTLPPASETFPPGMPCWVTGWGDVDNDERLPPPFPLKQVKVPIMENHICDAKYHLGAYTGDDVRIVRDDMLCAGNTRRDSCQGDSGGPLVCKVNGTWLQAGVVSWGEGCAQPNRPGIYTRVTYYLDWIHHYVPKKP

SEQ ID NO: 2691 - DNA, 451 bp, Homo sapiens
cgcagccaccgagacaccatgagagccctcacactcctcgccctattggccctggccgcactttgcatcgctggccaggcaggtgcgaagcccagcggtgcagagtccagcaaaggtgcagcctttgtgtccaagcaggagggcagcgaggtagtgaagagacccaggcgctacctgtatcaatggctgggagccccagtcccctacccggatcccctggagcccaggagggaggtgtgtgagctcaatccggactgtgacgagttggctgaccacatcggctttcaggaggcctatcggcgcttctacggcccggtctagggtgtcgctctgctggcctggccggcaaccccagttctgctcctctccaggcacccttctttcctcttccccttgcccttgccctgacctcccagccctatggatgtggggtccccatcatcccagctgc

SEQ ID NO: 2692 - protein, 100 aa, Homo sapiens
MRALTLLALLALAALCIAGQAGAKPSGAESSKGAAFVSKQEGSEVVKRPRRYLYQWLGAPVPYPDPLEPRREVCELNPDCDELADHIGFQEAYRRFYGPV

SEQ ID NO: 2693 - DNA, 469 bp, Homo sapiens
aacagaggacattgggaggcagatgcaggagcgcagaggatcaaacagcacgtgaaactcgcacagacatctcacacaggtaccatgaaggtctccgcggcagccctcgctgtcatcctctattgctactgacctctgcgctcctgcatctgcctccccatattcctcggacagcatcaccctgctgaattgccaatattgcccgaacattgccccgagcacacatcaaggagtctcactacaccagtggcacgtgctccaacccaacaatcgtctaagtcacccgaaagcaccgccaagtgtgtgccaaaccagagaagaaatgggttcgggagtacatcaactcttaggagatgagctgggatggacagtccttgcccctgaacaatacacaaaatttgcctgtatctagcttgcacaagtcctagcttggaaggctacccctcactatcctacccctccttgtcca

SEQ ID NO: 2694 - DNA, 435 bp, Homo sapiens
  misc_feature (365)..(365): n is a, c, g, or t
ttttttttttttttaggtataaaaaaatttctttaatcagaaaggatttatcttccctcaacacaaatgcacacattaatagtaaaaatacatatatacataaatatttacacaaagtagaagtcacagtggacagctgtatgccctgggctagaggttgagaagatgagcatcagcagcaactggaggatggcttctctgctgctcccggtgtcctatggtcatctttctggccaaggtgggtagactgggaggggatagggtatagctccagtctgatggcagagttactggcaaactgtagcaacgaggaccctctccagatagtttcataggctcaccagggatgacaggagatgctgtantaggtgggactggggtggttggggcaaagtgggttgagggttgcactccatgctggaggaaaagaatgac

SEQ ID NO: 2695 - DNA, 2448 bp, Homo sapiens
gtcgccatccagggcatcgctaacaaggacgccacccagggcatcgctaatgaggaggccgtccacagcgtcactaacgcggacgccgtccagggcatcgccaacgaggatgccatccagggcatcgctaaagatgacaccgttcagggcatcgctaacaaagatggagtctacggcattgctgaggacgctgcccagggcatcgctaatgaggacgccgaccagggcatcgctaatgaggacaccacccagggcatcgccaacgaggaagccgcccagggcatcgccgaggacgccatccagggcatcgccaacgaggaggttgcccagggcatcgccaatggggtcgccgcacagggcatcgccaatgaggacgccacccagggcatcgccaactgggacgccgtccacggcttcgccaacggggacgccgtcctcagcttcgccaacggggacgccgcccagggcatcgccaacggggacgccaccaagggcatgggcaacgaggtcaccatccacggcatcgctaacgaggacgccgtccagggcatcgctaacgaggtggccgcccagggcatcgccaacgaggacgccgcccagggaatcgccgaggatgtcgcacagggcatcgccaacgaggacgccgcccagggcatcgccaacaaggaggccgcccagggcatcgccaacgaggacgccgcccagggaatcgctgaggacgtcgcacagggcatcgccaacgaggatgccgcccagggcatcgccaacgaggaggccgcccagggcatcgccaacagggtcgccgcccagggcatcgccaatgacgccacccagggcatcgccgaggacaccgcccagggcttcgccaacgacgacgccgtccagggcatcgctaacgaggacgccgtcctgggcatcgccaacgacgacgccgtccagggcatcgctaatgaagatggagtccacggtatcgataacgaggacaccgcccagggcatcgccaactgggactccgtccagggcctcgccgacggggacgccgtccagggcctcgctgactgggtcgccgtccagggcctcgctgacggggacgccgtcaagggcatcgctgatcgggacgccgtcaagggcatcgctgatcgggacgccgtcaagggcatcgctgacggggacgccgcccagggcatccctgacggggacgtcgtccacggcatcgctgacgaggacaccatccagggcatcgctgacgaggacgcagtccagctcatcgctgacgaggaccccgtccatggcatcactaacgaggacgccgcccagggcatcactaactaggacgccgcccagggcatcgctaactaggacgccgcccagggcatcgctaacgaggacgccgcccagggcatcgctaacgaggacaccgtccatggtatccctaaagaggtcaccgtccagggcgtcactaacgaggacgccgtccagggcgtcgctaacgatgacgccgtccagggcgtcgctaacgaggacgccgtccacggcgtcgctaactgggacgccgcccacggcgtcgctaacgaggacgccgcccacggcatcgctaacgaggtcgccgcccacggcttcgctaacgaggacgccctccacggcatcgctaacgaggatgccgtccacggcatcgctaacgagaaaatcaaatgttaaccagcagtgccctgcttcaacaccatcatcggaagtcataagttgaactcttttttgatgtttaaagcctgcataatattcgctgtgttattattcagcctattactatttccttcatgatggaaatttggtttatcccaattttctattctatcaaaacaccgctacataaaaaatccccatgcacatatttctcctaattgtggaaatattttacctaaaagactctagacatgggatgaaattcccaggttactggaattttaaaatagataggtacttccaaattgacctcttacaaattatatgaatttgtaagcttccaactgttatggagttaccccttttgagaaatctgtgctaaaaggacccaaacaatgctgatgacaatgatcaggataataagtacgctgggaagagaacaaaatgatttagatcttagacaagtcattctaggtgtctccactgtttcagttctcgcgttcgttcattcttgtgctttttcgttttaccaaataaaatagccccttgatgtcatatgaatccacgctatgcttaatgagtattggttagtaaaatgcctataactagtaatcttcatctatgcaattaaatattaattcataaaacacttcaaatgtaaacaataattagtaaatgaaaagtacataatacctcgattagaaaaaaatcactccattaaaagacattatttgtgtgataaaaaaaaaaaaaaaaaaaaaaaaaaaa

SEQ ID NO: 2696 - protein, 580 aa, Homo sapiens
SPSRASLTRTPPRASLMRRPSTASLTRTPSRASPTRMPSRASLKMTPFRASLTKMESTALLRTLPRASLMRTPTRASLMRTPPRASPTRKPPRASPRTPSRASPTRRLPRASPMGSPHRASPMRTPPRASPTGTPSTASPTGTPSSASPTGTPPRASPTGTPPRAWATRSPSTASLTRTPSRASLTRWPPRASPTRTPPRESPRMSHRASPTRTPPRASPTRRPPRASPTRTPPRESLRTSHRASPTRMPPRASPTRRPPRASPTGSPPRASPMTPPRASPRTPPRASPTTTPSRASLTRTPSWASPTTTPSRASLMKMESTVSITRTPPRASPTGTPSRASPTGTPSRASLTGSPSRASLTGTPSRASLIGTPSRASLIGTPSRASLTGTPPRASLTGTSSTASLTRTPSRASLTRTQSSSSLTRTPSMASLTRTPPRASLTRTPPRASLTRTPPRASLTRTPPRASLTRTPSMVSLKRSPSRASLTRTPSRASLTMTPSRASLTRTPSTASLTGTPPTASLTRTPPTASLTRSPPTASLTRTPSTASLTRMPSTASLTRKSNVNQQCPASTPSSEVIS

SEQ ID NO: 2697 - DNA, 1047 bp, Homo sapiens
agagagcgctgggagccggaggggagcgcagcgagttttggccagtggtcgtgcagtccaaggggctggatggcatgctggacccaagctcagctcagcgtccggacccaataacagttttaccaagggagcagctttctatcctggccacactgaggtgcatagcgtaatgtccatgttgttctacactctgatcacagcttttctgatcggcatacaggcggaaccacactcagagagcaatgtccctgcaggacacaccatcccccaagtccactggactaaacttcagcattcccttgacactgcccttcgcagagcccgcagcgccccggcagcggcgatagctgcacgcgtggcggggcagacccgcaacattactgtggaccccaggctgtttaaaaagcggcgactccgttcaccccgtgtgctgtttagcacccagcctccccgtgaagctgcagacactcaggatctggacttcgaggtcggtggtgctgcccccttcaacaggactcacaggagcaagcggtcatcatcccatcccatcttccacaggggcgaattctcggtgtgtgacagtgtcagcgtgtgggttggggataagaccaccgccacagacatcaagggcaaggaggtgatggtgttgggagaggtgaacattaacaacagtgtattcaaacagtacttttttgagaccaagtgccgggacccaaatcccgttgacagcgggtgccggggcattgactcaaagcactggaactcatattgtaccacgactcacacctttgtcaaggcgctgaccatggatggcaagcaggctgcctggcggtttatccggatagatacggcctgtgtgtgtgtgctcagcaggaaggctgtgagaagagcctgacctgccgacacgctccctccccctgccccttctacactctcctgggcccctccctacctcaacctgtaaattattttaaattataaggactgcatggtaatttatagtttatacagttttaaagaatcattatttattaaatttttggaagc

SEQ ID NO: 2698 - protein, 241 aa, Homo sapiens
MSMLFYTLITAFLIGIQAEPHSESNVPAGHTIPQVHWTKLQHSLDTALRRARSAPAAAIAARVAGQTRNITVDPRLFKKRRLRSPRVLFSTQPPREAADTQDLDFEVGGAAPFNRTHRSKRSSSHPIFHRGEFSVCDSVSVWVGDKTTATDIKGKEVMVLGEVNINNSVFKQYFFETKCRDPNPVDSGCRGIDSKHWNSYCTTTHTFVKALTMDGKQAAWRFIRIDTACVCVLSRKAVRRA

SEQ ID NO: 2699 - DNA, 627 bp, Homo sapiens
aaagcctagagcagtaacatgctgtgatggaagaagcaggaaaagcaagaagaaaagacagcagcatcaagaggaggaggacatcttggatgtaagggatgagaaggatagcggggctagggaagcagagagcagagcacacactggctcaagcagcagaggtaagaggaagaggcagcagcatcccaagaaggaaagagctggagtcagcactgtccagaaagccaaaaagaaacagaagaagagagactaaaggtctggtaaaggtagggctcaattgattgattttcaggagttgaagcctcaaagaccagggttgatgcaggtctgcaggtcttctgcacccccctcaatgaggagtccctcccagaaaggaaactgatctctgggatgtcagctgctgagaggagcaagcggtagtaccaccccttagttgagggagtcagcacagtcctttctgcagcttctaacccaggaccatgaactcaggtgccttagagaagccaggcagctaaaggacaaggaatgctgggggctgtgggaacaggaatgcagataccctttgaaggagcattcctgctaaaagaagctgaaaatgtgacctatttgaagtgctctgatttctaa

SEQ ID NO: 2700 - DNA, 469 bp, Homo sapiens
  misc_feature (427)..(427): n is a, c, g, or t
tttttttttttttttgtagaatgatttgtgctaaagcaatacatctctttctatcatatactgatatcttgaaaacttttataacgtttcttgtcacattcagtattttaaaaataggattgattctaagttttgagtttatggtgtatttgaatattagagatattatctcttatacatttcaaagctttgctgcattctaaactcagccctgccttagccttagtaatggcaatgaagtgcggggatagaatgttcactatttttttatgtgctgttaaaatttcatacctcctgttctatcttgaagtcttacagttttggaatggtgagtgggggaaacaagcataaaactattacataattcatgcagttttcactgggcaacagtatcctctgaatggtgaaatggctacttttcatttanttatttttttctctcctggggtaaaacacttgaaaactgcac

SEQ ID NO: 2701 - DNA, 486 bp, Homo sapiens
gataaataccgcaagcactgagcaggcgaaagagcgcgctcggacctccttcccggcggcacgtagccgagtagtgcggacgtaccagcgtgcgctcggaggaaccagagaaactcagcaccccgcgggactgtccgtcgcaaaatccaacatgaaaatcctcgtggccttggcagtcttttttcttgtctccactcagctgtttgcagaagaaataggagccaatgatgatctgaattactggtccgactggtacgacagcgaccagatcaaggaggaactgccggagccctttgagcatcttctgcagagaatcgcccggagacccaagcctcagcagttctttggattaatgggcaaacgggatgctgattcctcaattgaaaaacaagtggccctgttaaaggctctttatggacatggccagatctctcacaaaagacataaacagattcccttgttggactaatgggcaaagagctttaa

SEQ ID NO: 2702 - DNA, 2444 bp, Homo sapiens
agcaggagggtgggaccaagggtgctgctggaccaaggatgggactgggccaagggtggggctgggaagcatcctgttttgcatgtttgatcaggagctgctgccaagttgtgactttcactttcccttttgggttccagggtatatctcagagcctggagaacgtgtctggttattatgcagatgcacggctggaggtgggatccacacagctcagaacagctggatcttgctcacactctttcaagagaagcttccttggacaaaaggaccctgccttggtgtgagagtgagggcagagggagctggagcaagtagaatttctctaaataccagctggctggggcccaggagattaaaaaacaccgggctaggttggtcttggcatttgctgacacgcaaagggattgcagagatccagcccctccaacctccctctgtccacaggtggctcacattcagtcccacaatttgctttctcctcctcaagggttaagaaaaaaaacgaacccttccagtcaggtcagtgactggagagctccatggaaagtctctcagtgacctggctgctggcaccatggactcagaaaagaaacgctttactgaagaggccaccaaatacttccgggagagagtcagcccagtgcatctgcaaatcctgctgactaacaatgaagcctggaagagattcgtgactgcggctgaattgcccagggatgaggcagatgctctctacgaagctctgaagaagcttagaacatatgcagctattgaggacgaatatgtgcagcagaaagatgagcagtttagggaatggtttttgaaagagtttccccaagtcaagaggaagatccaggagtccatagaaaagcttcgtgcccttgcaaatggtattgaagaggtccacagaggctgcaccatctccaatgtggtgtccagctccactggcgctgcctctggcatcatgtcccttgctggtcttgttttggcaccatttacagcagggacgagtctggcccttactgcagctggggtagggctgggagcagcgtctgctgtgactgggatcaccaccagcatcgtggagcactcatacacatcatcagcagaagctgaagccagcaggctgactgcaaccagcattgaccgattgaaggtatttaaggaagttatgcgtgacatcacacccaacttactttcccttcttaataattattacgaagccacacaaaccattgggagtgaaatccgtgccatcaggcaagccagagccagggcccgactccctgtgaccacctggcgaatctcagctggaagtggtggtcaagcagagagaacgattgcaggcaccacccgggcagtgagcagaggagcccggatcctgagtgcgaccacttcaggcatcttccttgcactggatgtggtcaaccttgtatacgagtcaaagcacttgcatgagggggcaaagtctgcatctgctgaggagctgaggcggcaggctcaggagctggaggagaatctaatggagctcactcagatctatcagcgtctgaatccatgccatacccactgaccccagaccagtgcagccagcaggggaggtgagccatacacaggccacgacaaaatgcaggcattttattagggggataaagagggcaaggtaaagtttatggagctgagtgttagtgactttggcatttctgtagctgagcacagcaggggaggggttaatgcagatggcaagtgcaccaaggagaaggcaggaatgctggagcctggaataagggaggagaggggactggagagtgtggggaataggaagaagaaatttcctttagactaacgaatatattggggggaggaatagaggggaggtgtgcaggaaccagcaatgagaaggccaggaaaagaaagagctgaaaatgcagaaagccgaagagttagaacttttggatacagcagaagaaacagcggctccactaccgacctgcccccggttcgatgtccttccaagaatgaagtctttccctggtgatggtcccctgccctgtctttccagcatccactctgtcttgtcctcctggaagtgtatctcagtcagccagtggcttcttgatgatggcggtggaggtggtggttgtagtgtgatggatcccctttaggttatttaggggtatatgtcccctgcttgaaccctgaaggccaggtaatgagccatggccattgtccccagctgaggaccaggtgtctctaaaaacccaaacatcctggagagtatgcgagaacctaccaagaaaaacagtctcattactcatatacagcaggcaaagagacagaaaattaactgaaaagcagtttagagactgggggaggccggatctctagagccatcctgctgagtgccctgtgtgtaagtcctaataaactcacctactcaccaa

SEQ ID NO: 2703 - protein, 331 aa, Homo sapiens
MDSEKKRFTEEATKYFRERVSPVHLQILLTNNEAWKRFVTAAELPRDEADALYEALKKLRTYAAIEDEYVQQKDEQFREWFLKEFPQVKRKIQESIEKLRALANGIEEVHRGCTISNVVSSSTGAASGIMSLAGLVLAPFTAGTSLALTAAGVGLGAASAVTGITTSIVEHSYTSSAEAEASRLTATSIDRLKVFKEVMRDITPNLLSLLNNYYEATQTIGSEIRAIRQARARARLPVTTWRISAGSGGQAERTIAGTTRAVSRGARILSATTSGIFLALDVVNLVYESKHLHEGAKSASAEELRRQAQELEENLMELTQIYQRLNPCHTH

SEQ ID NO: 2704 - DNA, 28772 bp, Homo sapiens
ctcccggcatccgcttacagacaagctgtgaccgtctccgggagctgcatgtgtcagaggttttcaccgtcatcaccgaaacgcgcgaggcccagctggcttatcgaaattaatacgactcactatagggagacccaagcttgaagctctcgtggtctggggcatctggcatgaagtggatagtggagtcactagtatcatagtaggcaatgcccaagtatcctgaattccacagcacacacagatggatctgtccagcaaggaagaaaggaaatcactattagaatcactcataagtgtagggtttaccatgtcttatataatttaatcattttctcaaatctctgagataggcatcatcacccccatttagtgaatgtgaaacagccactcaggaggtaagagacttgcccagctcttcccaaccctgttttttttttctttctttctttgagacggagtcttgctctgtcgcccaggctgaagtgcagtggagcaatctcagctcattgcaacctccgcctcccgagttacagtgattctcctgcctcagccttcccagtagctgggataacaggcacgtgccaccacgctcggctaatttttatatttttagtagagacggggtttcgccatgttgcccaggctggtctccaactcctgagctcaggtgatccgcccgcctcagtctcccaaagtgctaagattacaggtgtgagccaccgcgcccggctcccaaccctcttttattctaacttcccatcaactctccattcaagtttctactcccctcagagacctcggccagctcctcctcctcctcgacttcctcctcctcggcctccctggggcccggcactggggccgggctggggaagccggaggaggccgccccaggtctcggtccctgcggtgtcctccttgggttcgctcctaaggaggccatgagcttggaggctctgcggatgcaaaaagtgagggcggttcggaagcaacgattcacagaggaggccggggtagggtggcgcgcagaatgcaaagcgctaagtacttctgctacagggctgcggggcagggctgaggggcgtggagagctgtggacacaggaggtgaattctcgggtatttaactaaagtacagattgtgggaaactccacgcgccccaccctcattcctgtcacgcggaggttaccctttggaaggaaggggtctgagggccctgtggggcgagtcgtgcacgtcttatgtctctgcctctgccaaccacgcgccaggaccccagcctcacgcgcttatcttcctcctcccccagctgccgccatcgcagcgttttcccgccttttcagtaacctgagtcgctacaggtgggagaacgccccgctgaccgaccgccacgagcctgcaaaaggagcgcgccggcgcgtgagcgaggtgcgcgcgcacgcgccccgccctcctagccgctgttgattggagaggcccggatccagcctagagatccgacagggcgaggaggagaagcggactgccgtagctgaagagtctggacgctgattggcctatttgccttcggggcgggtccagaacgttcaaacttcccgccctctgccgttgcttagcagccgggcctctagcactcactgtttctgggatttgattggcgcagtgggaagcccgcgagaaggtcggaccagggtccgtagtcccagtccctggaaggggtttgggaccgttgcgggggttttgagggggaggccaaacttaaagagccagaggcgcttattttttttcctgcaacaactcttaagttaatatttgtaccctctgagttaatatttatacagagcttagaacagtgcctggcaaacaaagtaagacctaaatgagcggtgtttcaaataaataagcggaaacaagcaggacttctgtctcagccctaccgtgcctgtttcctgggtacagggtatgaccacccccataatggcacgacagggcctaatttattatttaaacccttcaagcagaggtggaagcattcgaattacatcaaattctggcagagagaagtagttctgatcagaacactcacacccctactgggacatgcccataccccttcgcacttctacacacccctgaagacagagaggtatctatcattcatgcattcggcaactatttagtgcctattttgggccaggggttggactcaaagcggtgaacataatgaagtcactgctccataaagcttatttgtgcgtctgtgtgtgtgtgtgtgtgtgtgtgtgtgtgtgtgtgtgtgtgtgtgttgcgggggtggggttatgagggagaaagaaaaaaaaaatatatatatatatatatataatccctttaaatgcaccatcctccccagctttgttcctagtaccctgagatggggagattcctccccagccccccaacccaagaagttaggaaagatggtgggggtgagatgacctagctgtgctaaccagtaattggaaaatcccctccagcaagaaaggtgggggaacagagttaagggctgggttaatggttacccctggcaaatctgttgagcaatggagctatagaaacttggaggaggttggtgacagctctggggagtgtcagggagggacccaccttccaatctggggtgtgaagagattagggactagtttaccaagcccaggaaggggagggagtggaaagagaagcccagagagggaaagaggagctactgagataggagaaatgcagggacagggaggtgagatggagggaaacctctgttgcaggatttgggggtacagccctggctctgctggatggttccaggagagggcagcgttgcctgtcacctggtaaattaaggcacgataccctgtgggtagtcatgccagccagccaaagtcaatattgatatcaaggcagctgtagctataaagctgtaggagagaaaagagaggccgggagaggctgccaaacctgtttgatcttcaagctggccccatttacctaaggcttctcttggacacagaccagttggaacaggagaggaccctgagaagtagagttgttttgatcccctcccctcaatgggaaggggtcctgtgtgcagattttgagggtcaccatgagggaattcacacccacacagaggcatggaatcatacccttacaggatgttacagttcaagggaacgaacaccaaagatagcctttctgtcgggaggagagaaaaaggccctcccacaagcaggagaaaacccacagaagaggaagcacaagaggaaaccaccaactgctggtttccagcagcacatcacgtcactccaccccactcctcccccaagtctctccctttctttaagtttcaagctctgttttagttctgtgttcttgcactccaccatggttttctggaactgtaggtcttttgttggacagagggtgatgaggaggatagagaagggatggttggacaggagagaaattcaggatatggaggctggaattctgggtttattttttcagcaggtcataaaggtttaatagaaatcaaggttactggagagagagctgctcctcctatgtcctccctgcttatttatttaggtgtccccaaggactctactcccactattctgtctgatctttctttatccccatgacaggaccagctaacaacacccctaccccaccccctatacacatacttcaggatcgggccatgataatcccacccctctgccccatctccaaggcaacctgtcagtgagacgaggacaaagggcacaggaaggggccccaataggaaacataagtggaagcacaaagctgaccaagctacaggaacagacccctccctgcaacaaagccccttgcctcggctttatgtttccttcgcaaaagacttcgtcatctcccttcccatccctaactctactttctttttcttttcttcttcttcttttttttttttttttttgagatggagtttcgctctgattgcccaggctggagtgcaatggcaccatctcagctcactgcaaccttcacctcccgggttcaattgattctcctgcctcagcctcccaagtagctgggattacaggtgcccaccaccccgcctggcaaatttttgtatttttagtagagacagggtttcaccatgttggccagtctggtcttgactccctgacctcaggtgatccaccccccttggcctcctaaagtgttgggattacaggcgtgagccacctcacccggcccctaactctatttcctatgcccaatcccaagtgtaggccacaaggactgcaagtcctagtgctgagctgggcccggagacagtagactgcggggggcacaggacctactgagacaccagtctgggcagctcagggagtgctggcgtcaccccttccctaatcccaggctgcatggctaacggttcctatctgcagtcccagccttccacttccgagttcttctctcagaccacagtcccagcaacccagaatttggattggagtctggaagaaatgcagaatgattaaacgaccacctttccatttgaagtccccatccctgaatcttcacgggtgtgcccaagctgttagtgtcaagttttttatatgagggtcagtcgggttgtactcagattaatgaagcagggaaactgaggcagaaaagagtcctgtgttcaggagaggtcggagaaacaaggaggttttcaggactcctccttaacacccccatccccatcctgtgggagatccgaggattccccttccggactcactccctacatcgtcgagtcccgcccccctccagtcccctccccaggttcagggcggggccggtcggtgagtcagcggctctctgatccagcccgggagaggaccgagctggaggagctgggtgtggggtgcgttgggctggtggggaggcctagtttgggtgcaagtaggtctgattgagcttgtgttgtgctgaagggacagccctgggtctaggggagagagtccctgagtgtgagacccgccttccccggtcccagcccctcccagttcccccagggacggccacttcctggtccccgacgcaaccatggctgaagaacaaccgcaggtcgaattgttcgtgaaggtaagaacacttctctcctcagccacccaaattcctggaagccaactctcacctttcccccggtccagccttaactccccaatcccttccctccttgactcccacccccaatcccacgtgcactctttggttgaggggtggttttgagaggggaagacattaacttgttagcaagtaatgagaattctaggatcaaccctgaaaagtttgtaaaagtgcaagtttctagcagactaaaggaagggaagtggagaaaaaggagaattcccaaaagtgagactggggtggggttagagggcgagctggtgaagggacagtgggggcccagcagggtttagaagggacagaggggaacctcagttaggacatgtgtccctacaagatctgagggtgagtagtgcagtaggagaggtgtgtgtgtgtgtgtgtgtgtgtgtgtgtgtgtgtgtgtggatggagacgcttcagggaagacggtgtgttgagggaggcctgagagtgagagcaagtaaattgggaagctttggaggggcggaacaaaacaggagactgggatcggagtttgaaaagcagagctggagaggtgatcgggtggcattgaatatccccaggactggggaaagggacagaaggggaggtggcaagaagacgtgagtttaacgtagctaccacaaggatgggtgggagagagatcagacggaggagaagagctcggttagggcattttgggatttgggggttggagaagtagaagacttgccccaactctctcctctctctgcgggtgtgggtaaggagagatggtcctatggcatttgggtagcaaaactgcaggcagcaggcttctcggtgtcacccagcccccctctgattgcagcggccgctcccctccctaccgctgctgcattcatttcccagtcttgggacctcctggctgtgccctccctcccttccttaacagtgtcctcttctccccgctccgtttgtgtctctccgttggcacgcacgtctccccactctccactttcctgccgcctttctttccccttccccccttttgtttctctcatctttgtgtgtctctgcctgtgtctccctctcccttctgcttgggtttctcgggcagccattccctctccctgggcccagggaagtcggagcctgcttgggtccgcccccttaggtgtggtccccacctcactctcacattcgcctccggggctatttttactcgtgggtgaggctgtgccgcagagattccggccctgtgtcctgtgggaggatggttattgcagtcagaggacttgtgctgggagaccctggcagcaggttaggggtagccttagctgcccaggcctcatcctcactgtcccttcccccacatccttgacaggaaggaagccggagacagagagatgaatcaccctcagcttagggggaggtgtcccttgggccaatgaggtcaccacttgctaattagagggcagcccctctctgtagggccctccacatctctagcgcgaggcccagggccccttgactagactccccacccaaagacaccttggattggaggtgtagagaaccaaaactctggctcccaaaccccacccacctctcctgtcttcagactctactcccttcaggaacccagaaatccaggcttctagcctacaactctggcctcactgaagttccacacccttccctctctaggattcagatcctcccaagttctccaggacctcctccctctacctacctcccacctgtcctcagtgtctggggaaccagaagcctgcctttgcaaaacagtttcccattgatctgccttaggtttgacccaggcccaagggcaaagagcccatagtgaggggacagtgtatgtgtcatgactaggcagaaaacagctggtctgggagtgggaatgcagggactggcctagggatgggtggggtgcatcaggcataaccttgggttggggttacttttcaggctggcagtgatggggccaagattgggaactgcccattctcccagagactgttcatggtactgtggctcaagggagtcaccttcaatgttaccaccgttgacaccaaaaggtaggcctgcttatgttccttgaaacacccctggtgtacacatgtgtgcaaacacacacccacccgagtccttctgtcatgaacatttttgccctccccctggagtccctttcttatcccacgtcctccattccccctttctggttcttcctgacccccatttccagtcctgattcctgatcctttctccaggcggaccgagacagtgcagaagctgtgcccaggggggcagctcccattcctgctgtatggcactgaagtgcacacagacaccaacaagattgaggaatttctggaggcagtgctgtgccctcccaggtataggggcactcagaaagtggagaggtggagcagggagattctgggaaacagacagtttgcagaaatggaaaacagagatggtggtggggctggggcaggagagctagctgaggttcctcccaggaagacatcttacctcatttttcccattggctttcaggtaccccaagctggcagctctgaaccctgagtccaacacagctgggctggacatatttgccaaattttctgcctacatcaagaattcaaacccagcactcaatgacagtgagtcttgtgggtcagaggcctgggtcctgggaggaatagagaggacccagcgggtaggagacattaggggcacctggacgttcagatatcagggagatgaagcagatgttcgtaaatttcccccagcttcccatttttgctttacctctatatttccctgcattttcattggccaagacttttaagcttttctcatttgttccctagcctcttctgccccactgaggacgttagttggctgctggcctgttttctggcagaatagggtcatgcttaagaacagtcatcactctagatccagactacctgagtacaaatccaactagccgtataattttgagcaatcatttcacctctctgtaagtccatttccagatccacaaaattaggatgacaatacctatttcatgggttgatataaatttttttttttctttttttttgagatggagtctcgttctgtcgcccaggctggagtgcagtggtgcaatcagctcactgcaacctctgctgccgggttcaagcaattctcctgcctcagcctcctgagtagctgggattacagacgtgcatcaccacgcccagctaatttttgtatttttagtagagacagggtttcaccatgttggccaggctggtcttgaactcccgacctcaggtgatccacctgcctcggcctcccaaagtgctgggattacaggagtgagccactgcacccggcgatataaatgagtttgtaaaatgtaaagtgttcactttgggaggccgaggctagcgcaccacctgaggttaggagttggagaccagcctggccaacatgactggtctctactgaaaaaaatacaaaaattagccagttgtggtggcaggcacctgtaatcccagctactcaggaggctgaggcaggagaatcatttgaatctaggaggcagaggttgcagtgagccgggatcatgccactgcactccagcctgggcaacggagcaagactccgtctaacataaaataaaatgtaaagtgcttagaataacacatagaaaagtaactacatgagtgttagctattattattttggactcaccattagtatccacccccaacgggccttttcggactatgtcaatcttttcctgaagttctaatcagttccctctcttgcacagatctggagaagggactcctgaaagccctgaaggttttagacaattacttaacatcccccctcccagaagaagtggatgaaaccagtgctgaagatgaaggtgtctctcagaggaagtttttggatggcaacgagctcaccctggctgactgcaacctgttgccaaagttacacatagtacaggtgtgtggttattgcgggaggagaggatgaccactggagtggccctttaaggagctcccacatgggcttcccctgacaaccactctaaagacgatttctttcttagggtggttttcataaattgctaccaatggcagaccccaccccagtcctttgcagcagtcattgctaacaagaccactgcttgagataattatattccatgatgtaagtcatgggtgcaaacagactagcaaagaggaatacatcccagtattacttttgaagaatgctcttcctgtctcggtatcactgccaaattcccagattagacagagcaggcttttcctaaagtcaaagctttaactttctttataacttcagtcttcacttcctcttgtggaagatcaaaactgctggttcccatgtttttgtcatagtctcaaagctatggtttagtttgtgcaacatgggcctgacatcagtctgccacacaactatgtagtgaacatctgtgtactaagcattgaaagatacacaagtgtatggtgactgggccttgctctcaaagggttgaaatctgagacaataaaatattcacatgaaagttaagaatatatgatgaaaagtcagatgggccgggcgtggtggctcacgcctataatcccaacactttgggcggccaaggctggtggaccacctgaggttaggagttcgagaccagcctggccaacatggtgaaaccccatctctactaaaattacaaaaattagccgcacatggtggtgggcacctgtaatcacagctatttgggaggctgaggcaggagaatcacttgaacccgggaggcggaggttgcagtgagccaagatcgcgccattgcactccagcctgggtgacagcaagactccatctcaaaaaaaaaaaagtctgatgaaaaatatagagacaaaagtcacctgtgtcagtgcctgaagtggtatagggggaaaaagtcactgtggaaattcaagaggagaattttataagtaaattatatctcaagttttaaaaactcaggaaaaatggctggttattaaaagccaggatttcagtaagtgagaaggaaggctaacgacagtacaagacagtgaggagttgagctggttttatcatgtcggcctggggagaagggaaagccaaggtggcttccctgggtctaacatgttggtccctctcctctccccatcctcaggtggtgtgtaagaagtaccggggattcaccatccccgaggccttccggggagtgcatcggtacttgagcaatgcctacgcccgggaagaattcgcttccacctgtccagatgatgaggagatcgagctcgcctatgagcaagtggcaaaggccctcaaataagcccctcctgggactccctcaaccccctccattttctccacaaaggccctggtggtttccacattgctacccaatggacacactccaaaatggccagtgggcagggaatcctggagcacttgttccgggatggtgtggtggaagaggggatgagggaaagaaatggggggcctgggtcagatttttattgtggggtgggatgagtaggacaacatatttcagtaataaaatacagaataaaaatcaagtgtttttacgcaatgggggtttaaagtgtgggcgacatggaatgaggggtgggtcagtgatcttgagctcagggcagaagccaggaattaagaagggaaatgtttgtggtggggctgctatgtttcgtgccggtccgccggtccgccgttgcgctgttctgaggtctacgaagcgtttgcagccccgtcgccagggccggccagatctgggtgggcctgggcagcgctcgctgggcggtgccgatttctggcaaggggggcgcagtctggatgtaatgggcgcggcttagcagggcggaatgggcgtggcccgaagaagccccgccccgtcccgcttagacaatgccccggagccgccagaccgtcgcgcccctgccccatcgtagtatatgagctcgcctacacaaggacccccgctaaaagccagagctcccagtccccgaggcttgaagacggggactcccttctccaccaactctgtcctcggggggtggggccccagccgagatcacagcgcgacaggagtgggggtggccgctggaggtgagtcttgcgtgggggggccctgaaccgtgtgggggccggagtttgggggtgccgggcccatgcctgcaccagacagagagtatggggagccggtatttgggcgcggagctaggcggggtggactttgggacatagacggggaaccgggtgctggagccgggagtagtgccagcgccccggaaccacgccccctgttaccccgcccctcgcatttcgttttagacctctcccagtccttcgggactcggtctggtttatactaggtcgtgctaggggcagcgtgaccagccagggcggagagaggatgcttaactccttaggctcgaactcctcccttcctacccacctctctcccttctcgttcgggtattcaggacttccattccccagcccctgcctctccagctttctccttctgtcccataacccctgcgggtcccgggctggacttccagtccctgcggtagcgagcagctgagggttaagggggcggggctgctgcatttttggggagtgagcgcatcctagtggctgccaagaggggcgcccgacagggacctcacaagcccccaagcaggggcaacaggtgttttggagattagagaccctagccttgttcctcaggctcctcttaaagaatctgacccctgagggtgctgggtagagtgaggtcgacaggagcggaaggtctggagtgggtggggcggagtgggagggacgcctagagatggcaggaggaagacctgggcgctcttaaccacccccaacgcccttgtctgcatgtctttttctctgtctcctccttttctgtttcttctcccagacaggtgaagaaacaagaaaactaagaaatccgagcggttggagggggagtctgtgtggatgggatggggacgccgggggaggggctgggccgctgctcccatgccctgatccggggagtcccagagagcctggcgtcgggggaaggtgcgggggctggccttcccgctctggatctggccaaagctcaaagggagcacggggtgctgggaggtaaactgaggcaacgactggggctacagctgctagaactgccacctgaggagtcattgccgctgggaccgctgcttggcgacacggccgtgatccaaggggacacggccctaatcacgcggccctggagccccgctcgtaggccagaggtgagcgccgtggcgcgggtgtggtatggggaaaggcagaaggaactggatgtcggggctttggggaagaattgaggatgggggtgtcacagctccgtgccctcttctcctatcctaaggtcgatggagtccgcaaagccctgcaagacctggggctccgaattgtggaaataggagacgagaacgcgacgctggatggcactgacgttctcttcaccggtgaggctggggggaggcataggtcttggcacagggaagtagagtttgggagactcggccgtctggagccttgtttctaactcactcccgccctcaaacctccgcggcctcccggactcaggccgggagtttttcgtaggcctctccaaatggaccaatcaccgaggagctgagatcgtggcggacacgttccgggtgcggagcgggaccagcctagggagggagggggtgcaggtgggggtcggaagggcctgggcgcccgctgaggaaatgagaggcagagagcagcctatgtttgaagataccccatcacccctcccgcgcccctgaatacctcccttcgctctccctaggacttcgccgtctccactgtgccagtctcgggtccctcccacctgcgcggtctctgcggcatggggggacctcgcactgttgtggcaggcagcagcgacgctgcccaaaaggctgtccgggtgaggagggggcggggccaacgaaagtgggcgcagttctgggcccgggaggccgggagctgggaggcttaggaaattagccctaacccctgccctcaatgggctgtccatcttacatgaaagaacacaggagaaaataagaagttacaacagcaggactgggaacaggggtgattaatttgctcttccggagtttcaggaaaccccaaaggtggcacctaaactgtgactctaaggatgggtaggacagataggaggggctggggaaggtagggggttgaaaataactgcatgtgattccaaggtggaaattagcaaaggtaactaaagtacttagtgtctgacatatcgtaagctctatgtgcttgctgtcattattttccacaaatgtcagtccgtccccagcccttagtggtggttgagcaggcagacacagctgtggagaggttctgagactcgaacacttcctctttcctctaggcaatggcagtgctgacagatcacccatatgcctccctgaccctcccagatgacgcagctgctgactgtctctttcttcgtcctgggttgcctggtgtgccccctttcctcctgcaccgtggaggtggggatctgcccaacagccaggaggtgagagagggcaggaactccaacaccaagcaccatcagagaaaagagtttcaggctttcctagtgggaggaaggaagggtaccttctctagaagcctgggtggggccactctgagctggctggaagagtggcctggctcagcctgaggtctcactcccctctccccactccatgtcttccctgtgcaggcactgcagaagctctctgatgtcaccctggtacctgtgtcctgctcagaactggagaaggctggcgccgggctcagctccctctgcttggtgctcagcacacgcccccacagctgagggcctggccttggggtactgctggccaggggtaggatagtataggaagtagaaggggaaggagggttagatagagaatgctgaataggcagtagttgggagagagcctcaatattgggggaggggagagtgtagggaaaaggatccactgggtgaatcctccctctcagaaccaataaaatagaattgaccttttagactgggctgtgactggtgtcttactggggcaaagggatagggcagggctgaaacctgagtttggggtcagtgcagggaagaaggcctcttattcaaaaatcttgttaggtacttatcaactcattgcccaaccatgtcataggtacttgagcacaagatgaacaagacagaatttctatcatgggaagtgtgtccagggcagagaaaagagtgtatgggtggattgctcactgaatttatctaaatgttagatgattcagagactggtagattaccagtccacccctatttgataaagaaaaagaaatgacacttccagggacattcattttcattcattcatttaatgaggcttagcaatgatatcaaaagggtcagtctcctgacgttggggagctcacagtacatgcaaatttcttacaaattgaaatacaggttgtcatggaacaatttacagaaggctgtttctatgagggaaataaagggggtgtgccctagggcatcaaagtatatgcaaggggtggccaaggagggtcaccttcccagaaaaggccatacttgaactaaggataaataagaattagccaggcagatagtgtgaaggagggaaaggggtaatacaggaagaaggaattgcactgggcaaagacattttggggctagggagaattctctaaggctggcattttctaagatgtgcatgtggaatgacacaggtaagcctggagagtggacaaagtgctgtagtaccttgtatccaaagccaaggcacgtgggcacagagctgaagctaaggagagtacttcagttctgtaataagggctgtcaggagcagttatctcttgagtaggatctctctgacttcagggaggaaagcaagggtaggaggatgaggtggggctatgggtaatccaggaaggaagtgagcagagtacattcacgtggcagcgctgggcatggaatacagtgtgggtttgacagtgatgttaagatagaaagactggacttcatggctcattgtgtgggagtaagagagaaaggaggtctgcgtgactcccagtttctgggttgggcaactgggttgttaaagagaatacagaggagaattaagtgagcagcttcagagatgacaatgagttgggtttgacattcagagtgcgaaatgcctgaggtcagtcaggcagaatgtctaagtggaagtttgttaatcccaaatctgagatctgagccagagagagttctgagtgtcatttgcagaggagggggctgaggactgactgttgatgagagtgtcccagaagaagagaaagggacaaacctagaatggtgggaaatactgtagggatatggagcaaggaagaggagtccaaaaagaaaacaccagcaacaaagaaaaacagcttaaagaatcaggccgggcgcggtggctcacacctgtaatcctagcactttgggaggccggggcgggtggatcacgaggttagcagatcaagaccatcctggctaacacagtgaaaccccgtctctactaaaaatacaaaaaattagctgggcgtggtggcgggcgcctgtagtcccagctactcaggagcctgaggcaggagaatggtgtgaacccggcaggcggagcttgcagtgagggagatggtgtcactgcactccagcctgggcaacagagcgagactccgtctcaaaaaaaaaaaaaaaaggagctagggcttgattgggtatagagaggacactggtggtgagggagacatggaggttataggagagatgggagtaagtttagaagtaagaccagtggcagagacagcctggaacccaggtctcccaactcccagtttagcacttatttctataccatggtgccttcctcttccaggtgaggaaccaaggaggggagagggattatggggagctgggatcccctagcttgggaggtttggagtaagggcttcccttcaaactacaactgcatagatggtggaggcatcagcagggtccgctgtggacagccggcggggcctgctgagggctagatggtccagatccgcatagagcaggctctggaggaggaaggggaggaagacaagatggtctccacagtcttccttggggttcaggcctttttttttttggtccattttcctcagagattctggctatccccttcccatccccatgcccttaccggttcctggtccaggtcccctggaatcttgggctcttcctcctttactggcctctggggctcggttttcacaagtggagctatgtgggggggacagagctgaaggatggagagaaggtgaccaacgtgtctgctcccagcaagggctcagactcaggaattgaggggtggggagtgggcatgtaggagaaagaaaatggggtggaattagtctcaccaaatctagggagtggtcgaatcggttgcgggggcaggcgcctgtaagggacatatgagtctttgagaaccaccagtcttgtctcactggttctcctgggactcgccacgccaaggacagcccagcaacttgaaggctcagaccggaaacaacttagactctaccccaccgacagtccagcccaggctctaactctgctgcacttccagctcatctgctctggtggggctctactcaccagccagcggcctcgctcccacctttgacctctcccattcttcgccaagccaggaccagagctctaggtctagctctttcttttgcgaaggttctggtcctgccccttccacctctggtcactccccatttaacgaggccgggtccctcctgctcacctgtgcagccaccagaccaggcccaaagctcccagtccgagcaccaacccagcgcccagcagcgggatcaggagctggggatacacggaccctgggggaaaggcgtggcggggagggatgctgaggtcaggggtttgacgagggacagccagcagtcccgctcaagaacccccagccaaggccctcttccctcctccgggtatgtgtcggagttaagtacccttgtgcgcacaggcctgcacctaccatgggtaggcccgggggccttgcaataggtcctgtcccccagcacgtgaagcactgtacggctctcgtcctcgtggcggcccttgcagaaaaaagtgcccgagtcccccgcgctcaagaggagctccagccgccggataccagagtccagggagcgtaggcggccgacgaaaggctggaggggaggcacggtgggggtcccgctcgaagaggcccacaggatcggtcggcgtcctttggacaggcccttgcaggccgggaagctgggtgcccagacccagcggatgggatgagagactcctccgcaggagagattcacccggtccccagggcggccgtccagagaagctaggagaggccggaggctgtggttagggcacgtccacagggcaagacgaccctccatcccgtctcctctttctcttctctgttctgcactccagccatcctggatcttcccacacacaacccaccctactaggcggcccttatcttgcttcagcccctctgcgtctatcacaactctcccagggatcgcttacccccagggttcccttgggccctcgagagcagcagcggtagcagctgaagaaacacagccatggttaggatgtggtgaggagaagctgcgagcgaatcagcggcgtggggccggttggggggggaccggaggaagttaggcgtggggagaacggaggggctggggggctccgataagagagggggcggggccaccagctgcccagatccctttgggaatcctcgcaggcaaactcggagtcttcaaatggttctcacttaaaatgtgtgctcgggccatttacacaaatgctttggcctgcttaacttttcaggtgcgcctgtaatcccagctacttaggaggctgaggagggaggatcgcttgagctcaggaggtcgaggttgcagtgaactgtgatcaggccattgcactccagcctgggcgacagagccagccagaccctgtctcaaaaacaacaacaacaaaaactcctgttttgtaggggattgtgataacgaaataaagtaatacatgtaaactgcttagaatacataggatcactatgtaagtgcttgccattattattactatttctattcttttttttttttttttttttttgagtcagagtcttgctctgtggccaggctggagtgcaatctcgactcactgcagcctccggctcctggattcaagtgagtctcctgtctcagcctcctgagtagctggaactacaggtgcatgccaccacacctaatttttgtattttcagtagagatggggtttcaccatgttggccaggatggtctcgatctcttgaccttgtgatccacccacctcggcctcccaaagtgctgagattacaggtgtgagccaccacacccggcctactatttctattcttattttagcttctacctcacctctctgtgcccatgctgttcctcctggcttggtaccctgcccaagttggcaggttttgactggggaggtgctttggagcaggtgcacacagccacacctaggacaattgctgctgctggactggagcaacaaggccacaccaagcgcaagtggagcacgggtgacatcctgagaaccttcatgggagcctgaggcagccctacttagcagacctgtggtggctctcctggatgagtagccccagcccctgcctctgctgctgtggcatcacagaagccatcagtgagtcacttattgctgagcaggtattggaaagaccgagtgggggctgaatggagattaatttgacccattcctcccccaatttccaccagcatgcccctatcaatgcccagcagggacccagggacccaaattcagcaattaatttgggccacatccttttgtccattttccaggaaccagcagaagctgccaccatggacactgtaaatcacagaggcctttgatgatgctcattcagaggactgagcagcaggactcttagctggggaccaggaagggcatcttggcctgaaaccaagaaccacaatggcattggccactagtggcacctgccttcccccatccctctctcccatccctactccccactcagtcctgctcagtgccttcccaccccttgtcttttctctggtcagctgcgtagtaagtgagaagggaggggctaccagaggcagggaagggaggagcctttgggtttataaattccaaaaaggccactcaactcctagagctggatccttgaaaatctactctatcagctgctgtggttgccaccattctcaggaccctcgccatgaaagcccttatgctgctcaccctgtctgttctgctctgctgggtctcaggtgagcacctgggggccccaaagacctggtttgcctggtcaggacctttacaccctgctctacccacttcccggccctacccaccactcgggatcccaacacccccagccccaactggctcagctctcctgtgccaccaagaccaggcttccctatgacagcctccttgctctatttctcaaaaagccaggtctccatccatcctccccacctccaagaaagacccatttctctcacctgccagggctctgggtcccctgttccccactccaaggtgtctcctccttggaaactctggtatccagttccccaaccagccccacttcaatatgcaactctccagagtctagcttacctgccttctcctctatctgctgtgctcagtaaggtgtcctctcgaagacctaggcatccagccccaggctccttttgtaacctaccctccccatctactccatcagggactcacatgttcagtctctcagccatggcctttcctagataccccctactcccctcctgggttgcatacctcctcccatacaggggatacaaactttctagatggttgcagtgacatctaagagcctccatggaaacagagcgttttcttgagccttctgaagaggggacaactgggccacttacctccagggtgaagtggatttcactgaggtacacttaccaggctcttccaccctcggaccctgcgtcaccaaatcttgcctgcccaaaccttgaattaactgaagcaggaaacttggggtgccaccttctgtatccaccctctccattttgataaggtgctaagatggaatctggtgatctgtctctcaggtatcattcctttctgctgaagagctactggggtgagaggattctattcaggtctggttcctcttgccacactcttgccagctccaggaggtgaagagtaaattgtaaattgctaaagctggccacagatggctttctcgccagcctcaagttccaaggcatttctgacagtgttgtaaccctcatgattttcatttttattatttctccttctttcaagtttccatctcctccttcaccatccacattctttccccatggtatcttcctcacattccatctatctccagccccatgtttttcttcatagttctgtccctcttgactcacctccaaacggggtggagtgacggaagatatgtagggcgtgggcctttcacaaagcaacagctctacccttacctgccgcccactttccattttccctgcatcactcacctgctctgtgcttgctagaccaaacagccaaacaggttggagcactacgggatgggctcttctccaccctccacccctgcccccagctcagcttatccccaggtaagtcagagaccccatcacctcagcctgacttgtgtcttcccagctgacattcgctgtcactcctgctacaaggtccctgtgctgggctgtgtggaccggcagtcctgccgcctggagccaggacagcaatgcctgacaacacatgcataccttggtaacatccccttccttagtggggtgaacagggaggtgggagcctctatgaccaggactgaggcccaaatgggtctaagactgagatggagaagcagaggattatagcaatgataatatttggccaaagatggttgtgtgccaggcaacatcctatgtctttgcatgcctttttttcaattaatgttcatgacaaccctgtgatgtgggtgctattattatactgagaaaacggcctcaaaaagagacagtaacacagccgggcatggtggctcatgcctgtaatcccagcactttgggaggccaaggtggttggatcacttgaggtcaggagttcaagaccagcctggccaacatggtgaaaccccatttctactaaatatacaaaaattagccaggcatggtagtgggcgcctgtaatcccagctactcgggaggctgaggcaggagaatcgcttgaacctgggaggcggaggttgcagtgagctgagatggcaccactgcactccagcctgggcgagagtgagactctgtcttggaaaaaacaaaaaaacaaaaaacagagacagtaacaggtccatggccagcaagtgatagaaccaggactgggggagtggtgggtaaggatgtgcagaaggaagatcagactaagaaaagagaaggggagggccagggacagagttgggaaggaaggaagcctaggtgggtggatggggtggggaggtggacacaggcatgccaggtgcccatcctggccgattccctgcccattcccacccctaggtaagatgtgggttttctccaatctgcgctgtggcacaccagaagagccctgtcaggaggccttcaaccaaaccaaccgtaagctgggtctgacatataacaccacctgctgcaacaaggacaactgcaacagcgcaggaccccggcccactccagccctgggccttgtcttccttacctccttggctggccttggcctctggctgctgcactgagactcattccattggctgcccctcctcccacctgccttggcctgagcctctctccctgtgtctctgtatcccctggctttacagaatcgtctctccctagctcccatttctttaattaaacactgttccgagtggtctcctcatccgtccttcccacctcacacccttcactctcctttttctgggtcccttcccacttccttccaggacctccattggctcctagaagggctccccactttgcttcctatactctgctgtcccctacttgaggagggattgggatctgggcctgaaatggggcttctgtgttgtccccagtgaaggctcccacaaggacctgatgacctcactgtacagagctgactccccaaatccaggctcccatatgtaccccatcccccatactcacctctttccattttgagtaataaatgtctgagtctgataaaatgtacatttattataagaagacctaagggtcaggtcacctcccaggaaataatactctcaatctccctcccttacacaggaatccttcagggaggttccctgggaggctgggctggggaaaatggagaaacaggtttttcaggtcttcatcctcccttccagtgtctccaggtggcacacaacaactcatatcctaaatttaggccacacccctgatgtattgccaagaagaaggtgcggcctggcttgagggctctccagaaaggataggagaggtacatggagatggggcctgagaccctgtttcttcagtttctctcaggttagagtcaaaggcctcacctagcctagttagtaagtagggcatcaagcagtttttacctatcacagtttttacatttcttttctcaattcaaaatagtcctattgggagccaacttgcaaatgggaaataggggagcaaacccagactcaggctcacaaaaccctggcaaccccactcaatgaatctcattgctaaggaagattcaacccagcaacaggatccaggagccacagaaggcagataagccattgccctttggggtttagttggttaaggagtgcaccactgtaattaagcccgctgttgcttggtaacccccaaactagaacctggatgccccatattacgcttttagccctcccatcaaccaaagatagatgtaattttccagtcagctgtagagtggttcatagattttaatgactcacagaaggatgtttgtcttctcacattagatgttcagatgtcccttgttcccttgctcccttgttcccttctctactcctactccccctatccgctccacagtcctggcaagagacaggtcagggcggtagctgctgcagccaaaatgcctgcaggggccacatggcttgccacggcgctgttgcacaggtctcccaggtagcagtccctgtgggctggataagtcacgtctcccaccgactctgtctccacttgattgcaatgatgggctgcgacgcaggctggatgttggtgaatcaaggtcactggggctgagagagagaatgaaactggggtgttggactcctggcttcaggacttgccttctggggcagagcagatgtgatttcaaggagcccaaagggattttcagccccctcaaaaaacacctccctgaaaccaagtgatcaaagttaatgcattgaccttgtaaactcctgatgtgatgcagcaagaaggatgcaacatcacttctgcagtattcttgcttaaaatgcatgacctcaatctcatcatggcaaatatcagataaataaatatcgagggacattctataaaataatttttagtatttcaagtatctgtaattttttttttttttttgagacggagtttcactcttattgcccagctggagtgcaatggtgtgatctcggctcaccgcgacctccacctcttggggttcaagcaattctcctgcctcaggttcccgagtagctggtattacaggcgggcaccactacacccggctaattttgtatttttagtagagacgagatttctccacattgatcaggctgggtcttgaactcccgacctcaggttatccacccgccttggcctcccaaagtgctgggattacaggcgtgagccactgcatccggcacgtaatttttgtttaatctaaaaatgattttatttaattttagagaaaagatcttgctctctcactcaggctggagtgtggtggtgcaatcatacctccctatagcctcaaactcctgggctcaagtaatcctcctgcctcagcctctcaggaaactgagattacaggtgtgtgccactatgcctggctaattttttaaaaacattttttgtagagatgggggtctcactttgctgcccaggctggtgtcaaactcctgacctcaggtgactcttcagccttggcctcccaaagtgctgggattacaagtgtgtgccaccaagcctagcctaaaaattattattattattatttttgagacagggtctcattttgttccccaggctggagtgtagtggcgtgatcatggctcattgtagcttcaatctcccaggctcaagcgatcctccctcttcagccccctgagtagctaggactacaagcatgtgccaccacacccaactaattttttaatctgtttgtttgtttgtttgtttgttttttgtagagacagggtctccctatgttgcccaggctggtctcaactcttgggctcaagtggtcctcccaccttggcctcctaaagtgctgggattacaggtgcgagtgactgcactggccctaaaagtaattttttaaactccaggtataaaataatttatcagggctcttcaaatgtgtcagggtcatgaaagacaaagaaaaacagaactggcacagatcagaggagactaagaagacatgagagctaaatgcaatgtaggatcttgctaaatcaaataaagtctgtagattagttagtagtattgtatcagttattttgtgattttgataattgtgctatggttatgtaagatgttagcattaggagaagttgagtatttctgcaacttttctgtcaatccaaaattatgttaaaataaaatattaaaaacatgtacacacacacacacacacacacacacacacacacacccctccctggtccttaactaatgccgaaaatttgaagtttggttttaactttggcctttcagggccagagctcttcatttgtgagctaatgggcctatgagattcttttaggagaataaggaggtggggaagtgggggcacaaggactgtgggcctctcaggggctccgtgccaggagccagaaggggtacagactgctctcctctaacagctgcaccatctgcccagagccagactgagcctggagggttctggaagccagaaggattgacatggggctggaggcagggaaaggctgctggaagagggagaaactgaggactcacggtttccaggtagcttgatctgttccaggcctggctggggtctgccctcgccacaggtggtcacggcctctttgcaagaactgctggggcttccaccacagttgtagcaccgcattcggtttcctggcaggagaaaagaggcgctggacctgggccctcggtggagccggctggcagaaggcctgtgtgagaagctagctggccgcctccttacccaaggcagcccctagcagggagctgagcaagatcccaacaaactggggtttcatcgcagtctgcccgtgtcaggaccgcctctacctcctgcccacccccctccccagcccggctctgcctgccttatatcccccgtgccttgagctttatagggctataaaaaaggaagaaagagtctcccccagcaggcaccaagggccccagtggggacagggaggggccccacagcatgctctcagcatcctctggagtcctcaaactcctttatcctcagcagcagtctgtggaccaacaagaacccctgaggatccctgataccctttcacagggtccttgagggtcctccttttgcaactatctgtgtaaggtcagattttcttcatatactggacttcaacgaaaacaacatatcccaacagactgaatgcagaagcagataggaaaacccaggcatctcccacgaagcctgacactagattcacaaaaatgtaaagcaatgctcagcttctcactgtgctgtggagaaataatagttatttttcacaaaactgtattttgttagcatgtaatactttattatttttattgtttaaataaatcaataaatacctactttaaattttctgttttaatttttaatgtagtaaatattgatataacctcataaagaaaagctcttcagagtcttaagtaactttgaaaagtgtaaagaggtcctgagatcaatatttttgaaaagagctgctctcctgggcacctgtgtctcccctatcttcactccctgttcctagtcttactcctcctggtacatgctggctctgattccccagatgggccttcctccttcccagtctcttcaaccccagccttccaggctgtatcaccacccccctaccccaaatcccatccatgccttcctttctagtgatttctccccagtgcaagcacatcagcaggccctccagccccacccgtggttatttctttcctccaaggtagtaaagctggcagggataattacagggtaggaatgttgaagcttggggggatcaaagggatctgaagctgggtggggtccgcccttacacagctgggctttgtgtgtgcatgtgggtgtgtgggtgggggtattgttgattctacactcaaacagatccacgccggggctgtttaggagggtgactttgagagacatgaaagcactgagggggaaagacagagaaaacaaagacagagagaagctgagagagccagggagcagcttgagacatggggagggagggggaggagtaggagggaaggcgacagacacaactcaggagcaggagaggaagctaagttacagagacaacatgctgagagagcagaggagaccctccaggcaagggcagactccttgcaggggcaggctgggggcccccgctgcctgctgggtcaggctggtgaatctggtcatggttccgccccccagattcactccctaggtgtgtttgtttactggttcctcactgtcttgctcaaatgctccaactctacaaatcccgggatctcggggtgcagatcacctctcccagattcctgagcctgtgtctggccatgggcacctccagcatcttcctctgcgtgctgttcctctgtggggcactgggtaagggtgggctggggaaccttcagtggtcagggggctgggggtggggacaagggcatgtggaggaacctgagggctggggaggagaggggtgtgggtgctggaagaggccaagaagagagctgggggagtgggggacttcagggagaccagccactgggaaggccagcctgatgaggtgggaaaggaagagtttcctttcaaggcatttgagaataactgtctcccccttgctgcatctttgatccacccctgtctcccctatcccttatttcacgtgttgcttctgtgctgggccctttggtcaatgtcaatttctattttcctatctgtctctggtgccatttacttaactttttcactgaccccctcaacttccctgctgctgggtctggctttttgtctcactctttttatgttggtctctgattcttgtggcttctgttcatgtctgcgcatctctcaatccctgtacccctcttgcctccatctctgtttcttttcctgcatcgtctccctctttttttttgagacagagtctcgttctgtcacccaggctggagtgcagtggcatgatctcggctcactgcaacctcagccacccagattcaagagattctcctgcctcagcctcccaagtagctgggactagaggcatgtgccaccatgcccggctaattttttgtatttttagtagagacggggtttcactgtgttagccaggatggtctcaatcttctgacctcatgatcagcccgcctcggcctcccaacgtgctgggattacaggcgtgagccactgcgcccagctattttttctacttctgtcagctttcctcccttattccacagctttcctctctctgcttcatgtgtcacctctctctgtgatccctctccggatctggcctctgcctgccccacagggagggtttgcctctcctgctctcctaatctctgctgcctcaacaggtctcaccatgtcccctgcccggggaaggctccgctgctacatctgtggcttcaccaaaccctgccaccctgttcccaccgagtgtcgggacgatgaagcttaggatcgcggccgcagtactggatcctagtattctatagtgtcacct

SEQ ID NO: 2705 - protein, 241 aa, Homo sapiens
MAEEQPQVELFVKAGSDGAKIGNCPFSQRLFMVLWLKGVTFNVTTVDTKRRTETVQKLCPGGQLPFLLYGTEVHTDTNKIEEFLEAVLCPPRYPKLAALNPESNTAGLDIFAKFSAYIKNSNPALNDNLEKGLLKALKVLDNYLTSPLPEEVDETSAEDEGVSQRKFLDGNELTLADCNLLPKLHIVQVVCKKYRGFTIPEAFRGVHRYLSNAYAREEFASTCPDDEEIELAYEQVAKALK

SEQ ID NO: 2706 - DNA, 210 bp, Homo sapiens
  misc_feature (195)..(195): n is a, c, g, or t
  misc_feature (203)..(203): n is a, c, g, or t
tcacacatagacacgcacacacaccctttctcgcacacacacacacacacacacacacacacacacacacacacacactctcacacattctcacatgctagacccttctaagcagcttgtccgtttttacacatgtatctgaactctcctgcatcactcttggccattttctcgcattcgattgcttttgcccgngttttatntttgaga

SEQ ID NO: 2707 - DNA, 4780 bp, Homo sapiens
gatggatgctgcgggaaggggctgccatttgctgcccctgccagcggcgcgcggacctgcccgcgctcctgcagccgccgccgccgccgccgccagcccgcccggcccctgcagcggcgccgcctgcgctccctccgcggccgccggagcgggcgccatgaaccccagctcctcggcgggagaggagaaaggggcgacgggcggcagcagcagcagcggaagcggcgccgggagctgctgcctgggcgccgagggcggcgcggacccgcggggcgcagggtcagccgcggcggcgggggccgctgccctggacgagcccgcggccgccggccagaaggagaaggacgaagcgctggaggagaagctgaggaacttaactttccggaagcaggtctcgtacaggaaagcaatctcccgggcaggcctccagcatctggctcctgcacatcccctcagccttcctgtggcaaatggtccagccaaggagcccagagcgactttggactggagtgagaatgccgtgaatggagaacacctgtggctggagaccaacgtctcgggagacctctgctaccttggagaggagaactgccaagtcagatttgcaaaatcagctctcaggaggaagtgtgcagtctgtaaaatcgtcgtccacaccgcctgcattgagcagctagaaaagattaatttcagatgtaaaccaacatttcgagaaggaggctcaaggtcaccaagagaaaattttgtacgtcatcactgggtgcacaggcgtcggcaggaggggaaatgtaagcagtgtggtaagggcttccagcaaaagttctccttccacagtaaagagattgtggctatcagctgttcctggtgcaagcaggcgtttcacaataaggtgacctgcttcatgctgcatcacattgaagaaccctgctccctgggggctcatgctgctgttattgtcccgcccacttggatcattaaggtgaagaaacctcagaactccctgaaggcttcaaatcggaagaagaagagaacaagctttaaaagaaaagccagtaaaagagggatggaacaggaaaacaaaggtcgtccttttgtgataaaacccatctcttctcctctcatgaaacccttgcttgtatttgtgaatcccaagagtggaggcaaccagggaaccaaagtcctgcagatgttcatgtggtacctgaatccacggcaagtctttgatctttctcaggaagggccaaaagatgcgcttgaattgtataggaaagtaccaaatctgcgaattctggcctgtggtggggatggaacggtgggctggatcctttccatcctggatgaactgcagctgagccctcagcctcctgtgggggtccttcctctggggactgggaatgacctggctcgaactctcaactggggagggggctacactgatgaacctgtttctaagatcctgtgtcaagtggaagatgggacagttgtacagctagatcgctggaacctccatgtggaaagaaaccccgacttgcctccagaagaacttgaagatggcgtatgtaagctccctctgaatgttttcaataactacttcagccttggatttgatgcccatgtcacactggagttccatgaatccagagaagcaaatccagagaaattcaacagtcgttttcgaaataaaatgttctatgcaggggcagctttttctgacttcctacagagaagttctagagatctatccaaacatgttaaagttgtttgtgatggaacagatctcaccccaaagattcaggaactgaagttccagtgtatagtatttttaaatatacccagatattgtgctggcacaatgccctggggaaacccaggtgatcaccatgatttcgaacctcagcgtcatgatgatggttatattgaagtcattggatttaccatggcctctttggcagccctgcaagttgggggccatggagagaggctacaccagtgtcgagaagtcatgcttctaacttacaaatccatccccatgcaagtggatggggagccctgtaggttggccccagctatgattcggatctccctgaggaatcaggccaacatggtacagaagagcaagaggagaacatccatgcctttactcaatgatccccagtctgtcccagatcgtctgaggatccgggtgaacaaaatcagtttacaagactatgaaggattccactatgacaaggagaaactccgagaagcttctatttcagactggttaagaaccattgctggggaactagtgcagtcatttggagcgatacctctgggtattctagttgtgcgtggagactgtgatttggagacttgccgtatgtacatagaccgcctacaggaggacctacagtcagtttcttctggctcccagagagttcattaccaggaccatgaaacctccttccccagggctctctcagcacagaggctctctcctcggtggtgcttcctagatgacagatctcaggaacatttgcactttgtgatggagatttcccaagatgagatttttattctggacccagatatggtggtgtcacagccggcggggacacctccgggcatgcctgacctggtggtggaacaagcctcggggatctcagactggtggaatcctgccctgcggaaacgcatgctgagtgacagtgggctggggatgatagctccctattatgaggactcagatctgaaagatctcagccactcccgcgtgctacagtcaccagtctcttcagaagatcatgcaattttgcaggcagtaatagctggtgatcttatgaagctaatagaaagctataaaaatggaggcagtctgctaattcagggaccagaccactgttcactccttcactacgcagctaaaaccggcaacggggagattgtgaaatatatccttgaccacggaccttccgagttattggatatggcagacagtgaaacgggtgagactgcactgcacaaggctgcctgccagcggaaccgggctgtgtgccagcttctggtggatgcaggagcatctctgagaaagacggactccaagggtaagacacctcaagaaagagcacagcaggctggggacccagacttggctgcttacctagaaagccgtcagaactataaggtcattggccatgaggacctggaaactgctgtttgaccctggtattcgggcaaagaggacatgagcaagcgtatcacatctgccctccctgcaattgggcagctcccctggaagaagctgatggaattcatatatctgtctctctcctgcaagaatctacctgagaccatgccactagcttttaagggctaccaagatgtacaacagaacatgatagcccattgagaaggaggcaggatacctggagatttgtggaatacagtacgagttccacaaaatttgatccttattgcttccagcaagtagcatgaacttctgtgttcacctgtataatttattttaaagattcaaaggatgttcgtataaatggcactgctccatcctccccctatgcattggtttttttccctgtaccatacaattctactgtaactacccatcaacttaaagaaaaatattatctcttctctttacattcagtcttggaagaccacaagattgtctgaaggccttctaaaaccttctgaatgtcctgcagaaatataactgtaaaaccacttccatttctaagactaaatatatcaagactatttagtgactctctctgcatgtccccctcacccgccaaccctccgtttcattatataggagctgggaagtgccacatggataatgtcaacttgtgtgctatatctctgaggaatggtgaggtggcatgggagatgtctgtgcttggaggtacctcagagaggtaacccaggggtcagcccaggctgctgggctgtagccaatagccatgcaggactggttcagcttgggctgtctgtacagctccgtactgcctatgtgtagccatctttgccttttgctgcaatagaagatgagcaaaggattaaacagaggcccacagctagtttgcagaaccactcaattttaagtgctgtttaaattgcagagcaaataatcctgtgtgggaactgtggttacaggaaatggagcactctaacaatgtttacttctaaactttgttgaatgataatagaaagcaccctaattgacttggaaaaaaaaaacagcaaaagcaaaagtagcaacatatgtcaacatatgtcactgaaataggaaacagtcattggaatgttgcacagaggctaataactatagactgttggatacagtggtgagaggagccccattttaggtctttcttttaggtttttggttttcattactccaagtaatccttgacccaagaacaaaggcttgttgtatgagttccactgccagatttatgggatgcctggatcattcagaaggatgcttcaactattatttgtcaggtccaaaggtcgtacttaataaccccattttctatgtatggggtagtctaatatattattttatctactttatttttcccttttcagaaagtccttagtgcaaaccaccattggaatctagccagaaatgtctgtcagatagttagaattgtaacatctaaacctgccacggatcgaatggtacttacaggtacctctcttagggactctgtgatccctaaaatatcagaagaaaatgtctgtctttctgtccaaatatctacttgacttgggggta

SEQ ID NO: 2708 - protein, 1065 aa, Homo sapiens
MDAAGRGCHLLPLPAARGPARAPAAAAAAAASPPGPCSGAACAPSAAAGAGAMNPSSSAGEEKGATGGSSSSGSGAGSCCLGAEGGADPRGAGSAAAAGAAALDEPAAAGQKEKDEALEEKLRNLTFRKQVSYRKAISRAGLQHLAPAHPLSLPVANGPAKEPRATLDWSENAVNGEHLWLETNVSGDLCYLGEENCQVRFAKSALRRKCAVCKIVVHTACIEQLEKINFRCKPTFREGGSRSPRENFVRHHWVHRRRQEGKCKQCGKGFQQKFSFHSKEIVAISCSWCKQAFHNKVTCFMLHHIEEPCSLGAHAAVIVPPTWIIKVKKPQNSLKASNRKKKRTSFKRKASKRGMEQENKGRPFVIKPISSPLMKPLLVFVNPKSGGNQGTKVLQMFMWYLNPRQVFDLSQEGPKDALELYRKVPNLRILACGGDGTVGWILSILDELQLSPQPPVGVLPLGTGNDLARTLNWGGGYTDEPVSKILCQVEDGTVVQLDRWNLHVERNPDLPPEELEDGVCKLPLNVFNNYFSLGFDAHVTLEFHESREANPEKFNSRFRNKMFYAGAAFSDFLQRSSRDLSKHVKVVCDGTDLTPKIQELKFQCIVFLNIPRYCAGTMPWGNPGDHHDFEPQRHDDGYIEVIGFTMASLAALQVGGHGERLHQCREVMLLTYKSIPMQVDGEPCRLAPAMIRISLRNQANMVQKSKRRTSMPLLNDPQSVPDRLRIRVNKISLQDYEGFHYDKEKLREASISDWLRTIAGELVQSFGAIPLGILVVRGDCDLETCRMYIDRLQEDLQSVSSGSQRVHYQDHETSFPRALSAQRLSPRWCFLDDRSQEHLHFVMEISQDEIFILDPDMVVSQPAGTPPGMPDLVVEQASGISDWWNPALRKRMLSDSGLGMIAPYYEDSDLKDLSHSRVLQSPVSSEDHAILQAVIAGDLMKLIESYKNGGSLLIQGPDHCSLLHYAAKTGNGEIVKYILDHGPSELLDMADSETGETALHKAACQRNRAVCQLLVDAGASLRKTDSKGKTPQERAQQAGDPDLAAYLESRQNYKVIGHEDLETAV

SEQ ID NO: 2709 - DNA, 431 bp, Homo sapiens
  misc_feature (128)..(128): n is a, c, g, or t
  misc_feature (387)..(387): n is a, c, g, or t
  misc_feature (394)..(394): n is a, c, g, or t
  misc_feature (401)..(401): n is a, c, g, or t
ctgagtgagtctctggcgtcccaaattgcctgtttttctcgcaggctctattccgttcgctggttcgccacctcaggggaacgatggccatggagtccacagccactgccgccgtcgccgcggactgngtttctgccgacaaaattgaagatgttcctgctccttctacatctgcagataaagtggagagtctggatgtggatagtgaagctaagaaactattgggtttaggacagaaacatctggtgatgggggatattccagcagctgtcaatgcattccaggaagcagctaagtcttttaggtaagaagtatggagagacagctaatgaagtgtggagaagccttctttttctatggggaaatcacttctggagttggcaagantggagantggtgtntttgggaaacgccttggaaggtgtgcatga

SEQ ID NO: 2710 - DNA, 4704 bp, Homo sapiens
gccgcggggttcagagcgatgattcccccacaggaggcatccgctcgacggcgggagattgaggacaagctgaagcaggaggaggagactctgtccttcatccgagacagcctggagaagagcgaccagctcactaagaacatggtgtctatcttatcatcctttgagagccgccttatgaagctggagaactccatcatccctgtgcacaagcagacggagaatctgcagcggctgcaggagaatgttgagaagacgctgtcctgcctggaccatgtcatcagctactaccatgtggccagtgacactgagaagatcatcagagagggccccacaggtaggctggaagagtacctgggaagcatggccaagattcagaaggcagtggagtatttccaggacaacagcccagacagcccggaactcaacaaagtgaaactgctctttgagcgcgggaaggaggccctggagtccgaatttcgcagcctgatgacgcggcacagtaaggtcgtctcgcccgtgctcatcttggatctgatcagtggtgacgatgatctggaggcccaggaggacgtgaccctggagcacctgcccgagagcgtgctccaggatgtcattcgcatctcccgctggctggtggaatatggccgcaaccaagatttcatgaacgtctactaccagatacgctccagccagctggaccgctccatcaaaggactgaaggagcatttccataagagcagttcttcctctggggttccctactcccctgctatccccaacaagaggaaagacacacctaccaagaagccagtcaagcggccagggacgatccgtaaggctcagaaccttctgaaacagtattcccagcatggtctagatgggaaaaaggggggctctaacctcattcctctggaagggagagatgacatgctggacgtggagaccgatgcctacatccactgcgtcagtgccttcgtcaagctggcgcagagcgagtaccagctgctggccgacatcatccccgagcaccaccagaagaagaccttcgactccctgatacaggatgccctggatgggctgatgcttgaaggggagaacatcgtgtctgctgcccggaaggccattgtgcgacacgacttctccacggtgctcaccgtcttccccatcctgcgacacctcaagcagaccaagcctgagtttgaccaggtgctccagggcacggctgccagcacaaagaacaagctgcctggcctcatcacatccatggagaccatcggtgccaaagcgctggaggacttcgcagacaacatcaagaatgacccggacaaggagtacaacatgccgaaggacggcaccgtacacgagctcaccagcaatgccatcctcttcctgcagcagcttttggacttccaggagacggcaggcgccatgctggcctcccaagagaccagctcttcggccaccagctacagctctgagttcagcaagcggctgctaagcacctatatctgtaaagtgctgggcaacctgcagttgaacttgctgagcaagtccaaggtgtacgaggacccagctctgagcgccatcttcctgcacaacaactacaattacatcctcaagtccctggagaagtctgaactgatccagctggtggcagtgacacagaagactgctgagcgctcctaccgggagcacattgagcagcagatccagacctaccagcgcagctggttaaaggtgactgattacatcgcagagaagaatctacctgtgttccagccgggagtcaagctccgggacaaggagcggcagattatcaaggagcgttttaagggcttcaatgatggcctcgaagaactgtgcaaaatccagaaggcctgggctattccagacacagagcagagggacaggattcgccaggcccagaagaccattgtcaaggagacctacggggcctttctacagaagtttggcagcgtgcccttcaccaagaacccggagaagtacatcaagtacggggtggagcaggtgggcgacatgatcgatcgccttttcgacacctctgcctgagcctgctgctagccctgcctggttccaccagactggcgtgtcattggacagataaaccagtgttagcttgcctctgggctgggtgagcttgaagtcctctgggacagagacctgtctccacgcctccgggagctgtgtccctgagccccctagtcctggctcctgctttttccccacagcccgtgttcccagccgaaccagcactctcccggaagcctggggtccctccacaccttggcttttatgaccctgatggcttctgaaacaggaaaagagagaaggaagacagaggcctgtgcccactgctgctccatgtgtaccaagagcagcagggcagaagggccctccctccagcctaggtcagaggtggggacagagaactcccctacagcccagagatgtggcagggctcagagaagcagccagagctcctggaggaaaggcagtcgggactgaccccctctcttaaaacacattcccgcccgcccacaggcctgaggtctgggacctttccctcccaggagtcccctaggtggctgggggaggcaggctcactggccattttccctagagtccagcacactgcaggaggcgttcggaggaggagttccgccccaccctctacagccttcctcaggcccctgtctctggtccccagcctcagtgcctcttggcccagggccaggcagtcgtggttgcagaaggagcaattaggctgcctgcctgtgggctgggagacagggacaatggggaaaagttaaggagcaaaatgggggttggaagcaaaaaatagggccccacctatttaggacgagattgaagactgacccttgaggcacacttgcactggagatgggtttatttcacgctctgtgcttgtgtgctagcggagggagagctcagggtggcttaatccagaggccctgtcatggcccgcccccagccatgggaaagcaaacttcatcctaaggtgtgcagcccaggccctgcccctttacagtctaggccgcctgccatggggtgcagcctctccaggggctgcgtcagacttgcacgctgcccacatccagattcctgcaaagacgaattgggtgcacagcaccccaaccacatacacgaggaagaagatgcggtcagcagtctcaggccagcttctctgtgacccctttactcctctggagggctctgtggggagagatacagggaaaggagctgttcttcaaggtcccctcaacatgagcggaagagcgaaccccaggggtcatcagcctgtatcgcttcctttcttagattctcagctgatgaaaatttgggtctggcccatttcaggccatcttcagttgaagaaacaccctcttaggctgtgcaaggcatgggttatcaggggattgaggtcacctgggacttcagggaggctcagcttgctccctgccccagacctgtttcttctaagggaggaggacatggtggagaccagggacaggagagccagcagggtggatgcaaggggcctctacccacacctggacctccgtgccctcaccccagccctaggtgtgcacctaggcctcattccttaccccccagcccctgcccaccttcagcaggatgaggccctgggttgccgtgctctcgctgttcccctctcggggctgggctggggccgctcttggccccaaggttgccccgggccagcagcccagccagcagcacagtctctatggtgctgaggaagagcagcagcagcaggatggtgaagtagtaaactgggggaggcagggcacagggagatgctcaggggccagtccctgtgtctctggtgcccagcgagctgagcaccagtgggtgaccggggagaaacagggcagactgggtaagggagcagggcttactgagcagtgggttgcaggaggaggagctgggcagggcctgcaccagggaggagtggaggacgaggtaactcagcagcaatgtcaccttgtagcctatgcgctcaatggcccggaggggcagcaaccccccgcacacgtcagccaacagcagtgcctctgcaggcaccaagagagcgatgatggacttgagcgccgtgttcttcagcctcagctggaaggggaaaagtcagggccttcccggcgggggggaaggaggtgggcatcgggggcatggggcctggcctctggccgtgcatcctcactcccacccgcctccagcagccctctgtcggcctcctcgcgacttgactcaccgtcacctggaagcagggcaccagctgctggggtgggacttgggtcttcagatcataaactacgtattccctcttgacactcacaatctcgttcaccacgtgggcctggaactctaactccatcgctgaggggtgggaatgagaactatgaaccaggaaggagagatcccagctgccaagtctgggggtagcagactggagcccaggggtgatggagacttttgatggcttttggcagggacagacttggacacaaaaccgatccatagaagggcttcccaaaccttgttttgcaacatcccaaattgtctccagttgaaggaaggcctttatcagattcatagatgagctttcattgtaaaaataaatgtactttgcaccacttc

SEQ ID NO: 2711 - protein, 690 aa, Homo sapiens
AAGFRAMIPPQEASARRREIEDKLKQEEETLSFIRDSLEKSDQLTKNMVSILSSFESRLMKLENSIIPVHKQTENLQRLQENVEKTLSCLDHVISYYHVASDTEKIIREGPTGRLEEYLGSMAKIQKAVEYFQDNSPDSPELNKVKLLFERGKEALESEFRSLMTRHSKVVSPVLILDLISGDDDLEAQEDVTLEHLPESVLQDVIRISRWLVEYGRNQDFMNVYYQIRSSQLDRSIKGLKEHFHKSSSSSGVPYSPAIPNKRKDTPTKKPVKRPGTIRKAQNLLKQYSQHGLDGKKGGSNLIPLEGRDDMLDVETDAYIHCVSAFVKLAQSEYQLLADIIPEHHQKKTFDSLIQDALDGLMLEGENIVSAARKAIVRHDFSTVLTVFPILRHLKQTKPEFDQVLQGTAASTKNKLPGLITSMETIGAKALEDFADNIKNDPDKEYNMPKDGTVHELTSNAILFLQQLLDFQETAGAMLASQETSSSATSYSSEFSKRLLSTYICKVLGNLQLNLLSKSKVYEDPALSAIFLHNNYNYILKSLEKSELIQLVAVTQKTAERSYREHIEQQIQTYQRSWLKVTDYIAEKNLPVFQPGVKLRDKERQIIKERFKGFNDGLEELCKIQKAWAIPDTEQRDRIRQAQKTIVKETYGAFLQKFGSVPFTKNPEKYIKYGVEQVGDMIDRLFDTSA

SEQ ID NO: 2712 - DNA, 2957 bp, Homo sapiens
acgtctgctcagctccgcggtaatggaggctagggatgggtgctgaagtatcaggctctggctctagctttagctctggcactggaactgcgtcggagtctgggtctgagtctggcagcccgaagcctggacaccttttcttgattctctaggcgggggctgcctgcgtccaagcagctggtttgcagcgttccaacgctgggagggagttcccttacctggggtccagtctgtaaagttgtcgccgctttctagggaccccgccccaccggctgggactcttccatgcagttgaaactggttgacaaccattaacctgggttgcaactacaggtggcactggaagcagactggttcctggacatgcccggtggaaggaggggccctagtcggcaacagctaagccgttcagctttaccttctttgcagactttggttggtggaggctgtggcaatggaacaggcttgagaaacaggaatggtagtgctattggccttccagtcccacctatcacagccttaatcaccccaggtcctgttcgtcattgccaaattcctgacttgcctgtggatgggagcctactctttgaattcctttttttcatctacctgttggttgctcttttcattcagtacatcaacatttataaaacagtgtggtggtatccttacaatcatcctgcttcttgtacatcactgaattttcatctcattgattatcatctggcagcattcatcacagtgatgcttgcgaggaggcttgtatgggctctcatctcagaggctactaaggcaggtgcagcatcaatgattcactacatggttctgatatcagctcgcttggtactactcactttgtgtggatgggtactttgttggaccctcgtcaatctctttcgaagccattcagtcctcaatctccttttccttggctacccgtttggtgtttatgttcctctttgctgttttcatcaagatagtagagcacatcttcttctcacagactacaactatgtggttcagcacgaggcagtagaggaaagtgcctcgactgtgggaggcttggccaaatccaaagactttctctccttgttgctggagtcgctaaaagaacagtttaataatgccacacccatccccacccacagttgtcccctatctccagacctcattcgcaatgaagtagaatgtctgaaagcagatttcaaccacagaatcaaggaggttctcttcaactccctcttcagtgcctactatgttgcatttctccccctgtgttttgtgaagagtacccagtactatgacatgcgctggtcatgtgagcacctcattatggtgtggatcaatgcttttgtcatgctcaccacgcaactgttgccatccaaatactgtgatttgctacataaatcagctgctcacctgggcaagtggcagaagttggaacatgggtcctacagcaatgctccacagcacatttggtcagaaaatacaatatggcctcaaggggtgctggtgcggcacagcagatgtttatatagagccatggggccttacaacgtggcagtgccttcagatgtatctcatgcccgcttttatttcttatttcatcgaccattaaggctgttaaatctgctcatccttattgagggcagtgtcgtcttctatcagctctattccttgctgcggtcggagaagtggaaccacacactttccatggctctcatcctcttctgcaactactatgttttatttaaacttctccgggacagaatagtattaggcagggcatactcctacccactcaacagttatgagctcaaggcaaactaagctgcctctcaacaatgagggagaactcagataaaaatattttcatacgttctatttttttcttgtgatttttataaatatttaagatattttatattttgtatactattatgttttgaaagtcgggaagagtaagggatattaaatgtatccgtaaacaaggtgatgtgatctttcatgtgttagtatattcgaataatatacatatgagaggtatgcctgtccagtaaagagattgatttgtttgtatggctctggaataactcattcgtttatgaacacatctcatgtattacttgacacagtacctttggtatgtctgcttttctttcaatcctcattatctttagccctcagctggccagtacttattgctaaagaaagggagatcaatggagttgcctaccagcacccattctcttttagttcagctggctaatagtattggaatacattgggaaaagagtgggttaaagtcctaggtggggttctctttgttgcctaccaggagaaagcagtaggcttcctttctaagatacggactcagctggtctattttaccctgtgacatttaaatatacttttgaataagctactatcctgaggctgagggttttgctgccacttttcctgtgtttccacttctgcttccaaagattttcctcttagttgtttgaaataatactttgccagacaggaagtctttagactgcccacattcatgaagaagatgatgtgtggctggatcagtaggagaagctgagtgcaaatgccatgtgggctagagtatgggaaggttgaaaattccaagtaactgggagagtgggcaagtcctcagctgaacaatcttggatgtagtctagcagcaacccacctacaatggcgttatgtttggagttatgaggggaagtgaaagataagaattacctacagctttgtactcagataatttatatccaaaatttgtgttttaaatttcatactccagaactttcatgtttatgagtattagccttttaagttatgggaggtgatatacttagtccattgatgttgtcacttgtcatctaaacttatgagaccttgtcttagagaatctaaaatatattgtcatatgttttctgtgc

SEQ ID NO: 2713 - protein, 488 aa, Homo sapiens
MPGGRRGPSRQQLSRSALPSLQTLVGGGCGNGTGLRNRNGSAIGLPVPPITALITPGPVRHCQIPDLPVDGSLLFEFLFFIYLLVALFIQYINIYKTVWWYPYNHPASCTSLNFHLIDYHLAAFITVMLARRLVWALISEATKAGAASMIHYMVLISARLVLLTLCGWVLCWTLVNLFRSHSVLNLLFLGYPFGVYVPLCCFHQDSRAHLLLTDYNYVVQHEAVEESASTVGGLAKSKDFLSLLLESLKEQFNNATPIPTHSCPLSPDLIRNEVECLKADFNHRIKEVLFNSLFSAYYVAFLPLCFVKSTQYYDMRWSCEHLIMVWINAFVMLTTQLLPSKYCDLLHKSAAHLGKWQKLEHGSYSNAPQHIWSENTIWPQGVLVRHSRCLYRAMGPYNVAVPSDVSHARFYFLFHRPLRLLNLLILIEGSVVFYQLYSLLRSEKWNHTLSMALILFCNYYVLFKLLRDRIVLGRAYSYPLNSYELKAN

SEQ ID NO: 2714 - DNA, 812 bp, Homo sapiens
cttaggctctaagtgtgaccttcgaaccctggtcagagtaatgaatggcgccatttgcggtacggaagctacacagcaacacgtataggagactctccccgagatcttctagggagtgacccatctattttgtttgggaagaggaaactccgaaatgggatcgcggaagacttaaagggccaggctgattttttttttcctactgcaggtctctgaggctgtggttgctacagggtcaccacgagctgtggcttactgtgtctcatccttccctgtgcctggtatcattttctcagttctcccaaaagccatgtcccggcccttgctcatcaccttcaccccagccacggaccccagcgacctcgtggaaggatgggcagcagcagccacagcccgagaagccagagtccacccgtggatggggctgcagcccgagctttctatgaggccctgatgggggatgagagcagcgctcctgactcccagagatctcagactgaacctgcagagaaagaaagagaaagaaaagaagaataatgaagggcaccagcagcagaagcaggtggcagaaggagcatcaggaagacatggaccaagggagatccctgtgaggctgaggataagatgactcaccggataccgagggcagccagggaggggggacctgcagaaattaggagactgctgggaaccgcatgaggcaggaggagctggggggaatttcaacgcccgggatgcctttctggtgggacccaatgatgtgtggcggtcgagcggggcaggtggcagatgtgagacaattcctggccggg

SEQ ID NO: 2715 - DNA, 1572 bp, Homo sapiens
  misc_feature (1497)..(1497): n is a, c, g, or t
  misc_feature (1504)..(1504): n is a, c, g, or t
  misc_feature (1526)..(1526): n is a, c, g, or t
  misc_feature (1564)..(1564): n is a, c, g, or t
gtcctctgcacacaagaacttttctcggggtgtaaaaactctttgattggctgctcgcacgcgcctgcccgcgccctccattggctgagaagacacgcgaccggcgcgaggagggggttgggagaggagcggggggagactgagtggcgcgtgccgctttttaaaggggcgcagcgccttcagcaaccggagaagcatagttgcacgcgacctggtgtgtgatctccgagtgggtgggggagggtcgaggagggaaaaaaaaataagacgttgcagaagagacccggaaagggccttttttttggttgagctggtgtcccagtgctgcctccgatcctgagcgtccgagcctttgcagtgcaatgtcccgcctgctgcatgcagaagagtgggctgaagtgaaggagttgggagaccaccatcgccagccccagccgcatcatctcccgcaaccgccgccgccgccgcagccacctgcaactttgcaggcgagagagcatcccgtctacccgcctgagctgtccctcctggacagcaccgacccacgcgcctggctggctcccactttgcagggcatctgcacggcacgcgccgcccagtatttgctacattccccggagctgggtgcctcagaggccgctgcgccccgggacgaggtggacggccggggggagctggtaaggaggagcagcggcggtgccagcagcagcaagagccccgggccggtgaaagtgcgggaacagctgtgcaagctgaaaggcggggtggtggtagacgagctgggctgcagccgccaacgggccccttccagcaaacaggtgaatggggtgcagaagcagagacggctagcagccaacgccagggagcggcgcaggatgcatgggctgaaccacgccttcgaccagctgcgcaatgttatcccgtcgttcaacaacgacaagaagctgtccaaatatgagaccctgcagatggcccaaatctacatcaacgccttgtccgagctgctacaaacgcccagcggaggggaacagccaccgccgcctccagcctcctgcaaaagcgaccaccaccaccttcgcaccgcggcctcctatgaagggggcgcgggcaacgcgaccgcagctggggctcagcaggcttccggagggagccagcggccgaccccgcccgggagttgccggactcgcttctcagccccagcttctgcgggagggtactcggtgcagctggacgctctgcacttctcgactttcgaggacagcgccctgacagcgatgatggcgcaaaagaatttgtctccttctctccccgggagcatcttgcagccagtgcaggaggaaaacagcaaaacttcgcctcggtcccacagaagcgacggggaattttccccccattcccattacagtgactcggatgaggcaagttaggaaggtgacagaagcctgaaaactgagacagaaacaaaactgccctttcccagtgcgcgggaagccccgnggttaangatccccgcaccctttaatttnggctctgcgatggtcgttgtttagcaacgacttggctncagatggt

SEQ ID NO: 2716 - protein, 354 aa, Homo sapiens
MSRLLHAEEWAEVKELGDHHRQPQPHHLPQPPPPPQPPATLQAREHPVYPPELSLLDSTDPRAWLAPTLQGICTARAAQYLLHSPELGASEAAAPRDEVDGRGELVRRSSGGASSSKSPGPVKVREQLCKLKGGVVVDELGCSRQRAPSSKQVNGVQKQRRLAANARERRRMHGLNHAFDQLRNVIPSFNNDKKLSKYETLQMAQIYINALSELLQTPSGGEQPPPPPASCKSDHHHLRTAASYEGGAGNATAAGAQQASGGSQRPTPPGSCRTRFSAPASAGGYSVQLDALHFSTFEDSALTAMMAQKNLSPSLPGSILQPVQEENSKTSPRSHRSDGEFSPHSHYSDSDEAS

SEQ ID NO: 2717 - DNA, 634 bp, Homo sapiens
tgaatttaggtgacactatagaagagctatgacgtcgcatgcacgcgtacgtaagcttggatcctctagagcggccgcctactactactaaattcgcggccgcgtcgactgtctttattattcaagctgaatgtttaagagagattttggtcttaaaggcttcatcatgaaagtgtacatgcatatgcaagtgtgaattacgtggtatggatggttgcttgtttattaactaaagatgtacagcaaactgcccgtttagagtcctgttaatattgatgtcctaacactgggtctgcttatgctagttcagtatttggtctaggcttcattttgatatgactgaattgcaatctatatttttaaaaagaaaaatcaaaatacattagggtttacttggttgtggcaaacaaacaaaaaatgctttcagtgttgaaatatctctattttccaaagatgattaactttcatcgttcttagcctacattgtcatttatatcaccaaatgagtttatagattaatgcaataaactttctaataaaaaaaaaaaaaaagtcgacgcggccgcgaatttagtcgtattaagtcgacccgggaattccggaccggtacctgcatgcggtccaccttttccta

SEQ ID NO: 2718 - DNA, 328 bp, Homo sapiens
  misc_feature (134)..(134): n is a, c, g, or t
  misc_feature (152)..(152): n is a, c, g, or t
  misc_feature (155)..(155): n is a, c, g, or t
aaaaggctgagttcagctttggggcatgtcggtccagggagccacagaccccagggaaaatgctcgacaacacccatacggtaacttaagtgtgcatatgtgtagggggaggatttaagggggtagggttttgntgtgatgtacaggtggtncanccacaatgagactgtcagcatgcccccctattctcccaggttccaggggccacccatctaaggacagtggggatatgcgtcctcactccgcaaccaacaatggccctggctgctcttgatataaagtttcagctgcgaggcctgccttgcctcacctgtgctcccgtccacac

SEQ ID NO: 2719 - DNA, 666 bp, Homo sapiens
tttaggtgacactatagaagagctatgacgtcgcatgcacgcgtacgtaagcttggatcctctagagcggccgcctactactactaaattcgcggccgcgtcgactgctattctgtaaacaatggttccctacataattgtaatagtgttttacgttgtcacaacaccaggcaaaacccaagtgctattgcaagctttgtaaatctatcactgtcctcatccaccttatcagattcttctcttctttgtgtatgcactggtctttttaaaatctgtgatgtgtactgattgtagatttattccatactttcaagtgaatgctaataatatctaagagtaatgatttccctgagaaaactttatccatttgaatataatgaatgttcatatttcttggtgtaccaaagttataaaaaaagacagaaacaattttacatttaaaatcaatgaagtaaaacagaagatttagttaacacaattgtatttaattatttgcttaatatgtatttttaaaataacttatttgcatatgttgactaagtcatgctgttgaccctcaataaatgttaaattatgataaagtcgacgcggccgcgaatttagtagtagtagtcgacccgggaattcccgaccggtacctgcaagcgttcccacctttccctattg

SEQ ID NO: 2720 - DNA, 158811 bp, Homo sapiens
cctttgaggtccaagggagttattgagattggctttgtggcatttccattcaaacacattttattgcagaataagatgctgagaagcacagcttaaagaaaaaaaataagaaaaaagaaaaatagtgcattcattcattcattttatcactcacttagtagacacttattgagtgctactatatgccagtcagtgtgatctaggtgctggtgataaaataattaattacactgtcaacatcccctcacatttttacatcataacagtcacaaaacatgtgacagcatacaaattaagttataatattatggaataataggtgctatgaaaatatatagtgttgttacccacaacgtcaaacaatactcaggaggtacagagtatttcagaaaaagcaggccaatgtaaacaatccccgtgaatgttgattcaattcctatggtaactcggcagcacttcctgagcagtccgtgctgcagattctgtggtgttctgcccagggctgacttacccatctccaagctgttgcggaaataggcttctgacatttcatagtgtgcctcactcaaggttatgccctctgccagcaagcataatgaatggctgatggggaataaatacacaggctcagtccctcacctcaatttaaaacaactctagaagttcattcagctctagggctccaagtaggataagctgaggcctcacttgtaactgcaatgtgagtcagcttctccctctgtccagtcttgcctccatcttcacttcctttaggtatatttcctgagggcattctccaataaaccttctacctggaattctctgtttctagaagatccagtctaaggcactgagataaactggagggattcaagtgctttcatatggagcctggggaaaatttgaaacagttttcatatgcaaggtaatacagcacaaagtttagaaggaaatttagatactaaatacatgtaaaatttgcaaaaaagaattgttgaaaacctttaatgagaaacttgagcttatatctgtttaaaaattggattttatgcttgaaagggctacacacagctccttatcaagactttttaattacattttcaaattcttaatagtcaccatcaataaaaatctgcttatacagacatggacaaatcatttaaacacattttacaaccattcaaaaatttgggacttgtaacctgtacagacctggtggactgaacaaaggggggcgaacacaggaatcaaaggcaagagacaagagtatatttgtaagaaggggtcggggggcaccttgcctctagtgcacaagggccctgagatttacacagccctccatatttattaggcaaaagagatcggggtggggggtgtgattgttgggtaattgtcagtcagcaatttggttcacagcaggcaagactgcatcctttggataataggtgctagatttctcagtagataacttcaaggagccgggtgccagggagtgatgtccctcagcaaaccttttggtggcagggcagtgtgagtttgcccacatcctgcattcatgataaacagtttgctgtttaatcatatcctccagtggactactgagttggtcacatcctacgggccttcggctccctgcagggactattgaagttatatacatagaaagaatcctacagatctttctttcattaataatctaatgatagcatttcttgtgatagttataatagatttcaaatccatttaaactttttgaaatgaagaatttcaaataatggtaaatctttcatttgtagaacacacataacattgctagggctatgacgcagctactagcttggatgactctaaaatgcacctgaattgtaaaatggacagaaccctcagatatacgtgcagacagttttgcccttgactttgatctgcacaccatactctttgggcacatggaacatccacagtggctactatatggatgtccagttgataagagtatttctttccttatagtagagcagtaagtgctggatgtttctccagttcactgcttgcagagactttggacacactgtcaagtggcactcaaaagtgccactgtctgacgcactgaggaagaaagacttgaggctctagagactattccagaccccaccctgaggatttaagtgatttgtgtagtgtgtcacatcttgaaccctcttatagcagatcactatgtgctgcatacaaattgggtagatcaggaatacacttctacgagtgtcaactcaaataaccaagagagaatcccagggaaagatgtaaatattaagcactgtaattgggataaaggaactgagattgattgtcctggcaatatacatatacaaagtcaacggaagctggaaaacagatgaacctgtggtaacttgctgaacagagctgagaaagaagactactcaggcagcagtggagagatttgagaatcccctagatttaaagcagagaaccatcgaaatagtcagcaataggcaacaccatgtgtctgtgagctaggagacaagggcaagaagctaaaatggaaaactgagagaaactgtttgcaaagcagtttgatctctagttccacttctccactatcccactggtcagaggacaagggatttatttcctggagaaagtatgactgagggtctttggcatggggatcaatcaacactgatgatagtgctgctatcccacagaaaataggggatacagtgaccagatgtacattataggttgggctgaaatctccaggcttctttctccactgaactctgagaatacttacagccaaacctttagccacctggcagaagactggcggagaacattctaggaaatctgaccaacttaagggaaaaaaactaaagacactaacccatatggttcatccaccagccatctttctgcagtgttcaaaaccccaacactcaaactcaatgtttccactcagattttaggctgtctccttctttcatctcttttgactcagtcctgatcagtttttattcctcttcagagcagttcctctgagtgcagaactctgttctaggaggacgttctgccaggtcaatttttagagtgcataaggcgagactgctcaagccccttcaatttctcctttccactctccccaaaattgtggagggcatagcccttcctgttctcgaacttgcctgctaagctttataatgagtaggtgttggctattttgtggggtattcttttcaggtaagtcagaggctgttcccctcttcttgtttccgtggaaacaccagtcccatgccgatcttgacattgttagaaatttgtccccacctgcttctgtttggggattcaaggggcacattgtccctgaattttgtagtaaatctttcccatagggttttgatttgtttgtttttatgtaggaattcaaaacaatttaaaaagctatgctgctattgttgccatgtccctggaatatgccctgtaccattattattattatttgttatagtcaggtttattgaggtataatttacatacagtaaaattcatccttttaaggtgtgcagtgagacgagtttgggcaattatataactaccacccaatcataatgtaaaacatttccatcatccaaaaatcttctctcaagccatttagtagtcagtcttttttgcccaccttaagccccttggcaacagctactcggatttctgtccctgtagttttgcttttatcagaatgtcatataaatggaagcatacagtacatagccttttgtgtttggcttctttcacttagtataatgcttttgaaattcatcggttttattgcaggtgttagtagttcatttctactttttgctgagccgtattccattgtatgggcacctcacaatttgtttattcattcacttggagatggacatttgggtggtttcatgtttttggttgttaggaacaaaattgttaaaaacatttacacgctggtctttctgtggatatatttcttttgggtaaatattttggagtagaattgctaggttgtatggtaaatatatatatatattatatctttataggaatctgccaaacttgtttcttaaagtggttctactatttttcattctttcaatgtgctctcctttttaacctgatatagtaactgtagcatatgtatcactgaaagtaaatctatgaaaaacaatgttatgaggttaaggaaacagaaatccaatccaggagaaatgtgaagaaaattccaaggatatcagcaaaattatttccatatgacacgtgtgtctttggtctagagaatggtcagtctaaaagcattaaaatggtggtctccagaagggatatctccaagaaaaaaaaatagtatcatgagagagcctgatgaggttgactttttgaaaatttgcttatagagattattggaaactgtggcaagaatttggagtggataaaaagaaactgaagcaatagaaaacagaatcaaagtcattatttactcaaggaaaaggaaaaaccaggaagggaaatataatcatagtgcactacaattctcggctttgaagaacactttcacaggcataataatggaaacgtcaaatactgattttacccaaaattatgagataattaattagacatacacactgggtacaagaaagaggagaaatggagatgttgttgatgtaagaaaattaaatccttgtttgtcataaaaggtactcggtggctaatatgtaaaattaatagcagtctgcacacatttcacttgagagacacaaatgcaaaagaaacatttagaaggtcaaatttggttggctcaggggaggcaaagtaggagaagttgggagtcataggacagggaaccatcctatataataatactatttgcctttgtgtgtatgtatcatgttataaaaataaataatttttaagtaaaaataaaagggtatcacgtgcaagttcacagtcctgggaccaaatcagtgaatacagtatttatgtctaattagaataattgtccattcattgaaaattatgcgtattttctttttaggagacacataatgctgtgatctgtatgcaaagctcccttaagataaaatgcattgtatttcctgatcttaggaacactcagtcagccacaggtgattggaaaaataactgactaattcattgtttggccagactagtcataaactctcccaataatgtgagttgagataaagactttgaagtaagttaacaaagagactgaggctgctactttggatcaagcagagatttattaggaagaagagaaagctagactacagaaagaagtaaagcagcatataccaaaggaaaagacccaaaaagcaaaacagagataaaactaatctcaaaatggcttttgtctcttattttctggaggacttgatgaacccagttcccatatttgatatatatcagatcagggtcctgaaattaatcccaataaacactgttattctttaccatgccacattccccacatttatcaacatttaagagatcccaaagagaatctttgataagcagagaggcaaattcagttaggaaacttgcccaatgataagaaagtgacagagattcctgaccaacttttaaaccgggtcctctgagcccagtggggcctctccttgtgtggaacctcccagagctcaaatttagcaagaatctctctaagtaggtttagtcaaaataccccatccttgatgtctaattccccttgatatctgaccaaattcctcatcccccatcatcccgcaggtgatatctgatcacactggcctatcttcagcaagaatcctgttaggtcactatatccagaatgtcctcctgtccctgatgttttctcttaatagttttccatccactgagctccatcctgctccttggctataaattctcacttttccttgtattttgaattgagtctacttctatactgaggtgtctttttccttattgcaatagtgtttgagtaaaatctgttttatctgctttaactcccaccagtctctggttttttctttaacatttatggtaaaacaacttggatagtatcagattcatctttggactcctgaacttctcacttgggacccaaatgtgcacatttgaagtctttgttttcactcctgactgaccaaccagggatccattgatgagtctgacttctgaaccagtgctccagatgtcccttgaagcacacagttaggacagatttctattcttaacatcgtgagtatacttcagaagctgtgggtagagcccttgatttttctgtttgtaagaagctgtattagagtcctgggcaaagtgaagttgaattagaatcctagacttgtctctgcaagaaacagaacctgggctgtgtgtggtggggcatgcctggaatcccagctattcaggaggctaaagtgggaggagggcttgagcccaggagttctgggctgtagtgagctgtgctcatcgggtgccgcactaagtttggcatcaatatggtgacctctcaggagccagggactaccaggttgcctaaggagaggtgaactggccaagttcagaaatggaactggttaaaactcctgtgatcaagaacagaagccagatcagagttgcagtcttctctattcataagtgtagaggtaccattacttaagaacatgggagcttctcagttgactggaaactcccttctagaacccctgctgaattgtgctccaccaactctctctgctttctttcttgttagcatgattgtactaaggataatatggagcttcagtggcctctttgggaaacttaagttctcctgacactggtggcttctctaagccctctacccctcccattgcattcacaactcctttatccttgtaccacccttgaccatcccatcagctcccttgaatccttcagtgtgtccacttcaaatctttgccttccctatccccgctgtccacgctgccagacttttgacttcccacttcagccccccagtcacttgaacttcagtccctctgccctcagtgggaactttgaagggtctctggacctccaaaagcaaatttctgaggttggaaagagaaagacagaaaaagggctattaataattggaaaaagaaaattgagtccacagcctccatcagattatatattagggcaaatgaaaaatcttaaatgtctcccctacagatattggtaaaaagcattaggcctcatgttgagtaggtgaagttaaattgctccatctgtcagaaacacatttcagataaaaatacaaagtggagtaaagaggggcaaagtattcatttaaaccagtgagttttgtcttggtatctttaactcatggctaaaattttagaatgaaagctataagatttttgttttgtgtctgtctgtctgtatgtttatgtatgtctaaacatgtatgttatatacacataacattttcttacctctggatggtattaccaaattaatttataaaatctgttaaaggagttctattcaatttggcatagagatgaatgagcacttgtataaattgaatactcattaaactcctagaaatatagaaactaattcaaattcacatgacttgagtaaatctttggtaaataagattagtttaatatgttgatttaataagaacagtcttttgagttttcagtattatatgtgagtaaacatttttattctacttaggtttagtagtcaaataatgtaaaaataacagagaaacaactcgaaatgatggctagttatgtttattcttatagtatgacggcctaaaaacagttgccaaaatccttttggtggcttgcagccttagagttatgcaatagatattcattgagaatttctaagtaggataaagtactgaaacacacactactaagcataagtttgagtccatatgcttttagctttttatctttatatgatatagagagatcaaatacatctgagtctgttaatgaaaaattatactatcagaaagcatatgccttcaaaaatagtgaaataatatgttaataaatttgctagcctgctacagaatacttgtatgtgacagacaattcacaatgtatccttcctagttttctctgtaaaaggaggttactaatggttaaaaattataatcaatatttggaaataaagctaccagaaacaataaaggtgaagagaaacaatttggtatgcaaaatatgcaagaaaaatgggatgtgtttttgattaaaaaaggtatgaagtaagcagaatgtgtttttgttaaatgaaacacaagttttttattctaaaatagaatggctcgttgttccagaatgagaaagaagaaaatgtaggagaaagcaaatctttaatggatataaaaattgtagaagttttgtggtaaaggaatttttaaaaaggaattttatgtgtggtcaaattggctaaagatttgaatggatttatttataagtttgtttttttaaaaaaactttaataccaaaagcatattgatgaaaaattaaaatgacaaagttttcttggattattggtctgttcttagtaacagattgttaaaggctttttttggggggtggtgcggaattgctgtgctttatgtcttatgacgtctttttttttttttttttttttttttgagacagtcttgctctgttgcccaggcttgagtgcagtggctggatctcggctcactgcaacctccgcctcccaggttcaaacaattctcgtgcctcagcctcccaggtagccgagtagctaggacgtgcaccatcatgcctgactaatttttgtatttttattagagacgggatttccctatgttggtcaggctggtgtcaagctcctggcctcatgtgatctgctcgcctctgcctccctaagtgctggaattacagatgtgagccgctttgcttggccattatcatgttttctttgttttttaatttaatttaattctaagttctggaatacacttgcaggacatgcaggtttgttacataggtaaacgtgtaccatggtggtttgctgcacttatcaacccatcacccaggtgttaagcccctcatgccttttaattaagagaactgacatgtctcagttttaaaagagttaaggttttttacatttttacaattttgccttcccaaaatcaaatcctaaacgaaatcttgttgtagaactgactgagatttacttgtgggtcccttgtaaagagaaatgttaaaaataattaggtttatttaatatgttaaattgcatggggaacattgtaaaacaagaagcgatgtttcacttttcctatgttatatgtatatgggtaaatactattaatatacatatttcagaaattctataaagttcatagaaatttgtcactacctttgccattcatatttcctggtataatgttatcatcagtcataattcgttatttttaaaaatgttgtatgtaacagaaataaccaaatttccttctcaaattaattcctttttttcttttcttttcttttttttttttttgtgagatgaagtctcgctttgttgccaaggctggagtgcagtggcgtgatctcagctcactgcagcatttaccacccatgctcaagcaatcctcccactcagcctcccgagtagctgggattacaggcgtccaccaccatgcctggctaatttttgtattttttgtagagatggggttttgccatgttggccaagctggtctccaattcctgagctcaagcaatacccacctcctcagtctcccaaagtgctgggattacaggcctgagccactgcacccagttgtcaaattaattcctataaaatctttaatcatggtcatataaaatatttctcatccgtatagtttttgtttcactctgattcttctctgaaagcatttgtaaccagctattgcccagaatgattcctgatgtcattgcttaaacaactttgagaccatttcactggactgagtaaggatttgccaaacattagtggagaaattgataggttttaatgaaactgcaaacctaagatcaagcagaatggtttttgttttggaacatagctgtttttaaatgttttattttccatatttaaggaacccttttctcttgctacacttttgtaaatagaaatggaacagttatctttctccctactgatgcctccagaatttggaaactcattgaattttcttattttcatggccattcgttattggcataagtttaataagaatctgttcttcttgtaataggacataattgggaacattggttatgttaccaaggttttaactggaatgccatatttgagaattatgtgcatggaatctggtttaaggaactaaagttgactttatgaagccaagatttacaatggtctctttgaaaagctaccctggtacctgggttacaagattcccagcatcagaggtgaataaggaaagtcatttactggcagcaccaggaatattgaaatatcttggggacctcaagaagagaggaattcacccaaatctataggtccaaagttaagtctgttggtgagttcttggcttggcttcttagcctcaagagacttctaaaagtctaatctgagattcctgatgaaactttcagcaaaacaaactcaaaaaggcatgtgtgatcaggtaccatttttgctgcacatatgtaattaatcaggccaaatctaatgagactaggcatattttgtcaacaagaatcaaaatggaagtaactgtagagataaattttatgtattgataaaaacctatagtgtacccttgtgggttctcaattcttctggtttcctctgacgtggctacaattctgaaaactaaagtttccaatttttctcccagcctcctgacttggagttactaagaaataaaactgctcttttctgaagctgggtgatttaatataaactttgaagaaatcactgcaatagatcatgtacgggcaaaccttgtgcctgcttctgtgtgagccactcagaaagttcatcagaactcctgatgccatcaccaaagacattcaaaacacagacaaggacatctgtgggactgccactttcgtccttgagaaaaacatttagaaattttctcaattggctggtccctggactcaaacgaagtttccaactacttatccttgttttactttaattttcatagaaattcctttcattgtattcctgactgttagcactattcagcaaatatcctctactagcagcttccaagagatggttcagctaatccttaatgaataaaaggcaaccaaaaaagaaatgcacttacattgttccaaggaaagaagaatgtatcttcttccctttaacaagaggaagaactgacattgatttttccctggaccaaattttagtcggctgctgtgagccccactaggccttgtccttgggaatatcctccaagagcctaattttagcaagaattctgctaagtaagttcaccagaaccccccacccttgatatctagttaccctctaatctgaccaaactcttcgtccataccatccctgagttgatgtctgatcccctggcctgccttcagcaagaatcataataggtgggttcagccaaaatctatctttacctctgatgtgttcctcttaataattttccatctaccaactacacgctctttaaccataaattcccacttttccttgtattcataattttgcccaattctatactgagatatcttttcccctgttgaagtagtttccaagtaaatcctgtttttaccaccttaactattgttagggtctcatttttctttgacaaagggaaccagctgtacagagagtctaaggagagagattctttaggactctttggaagaaataattttgttatgtaaaagtaaagtggggtgaagagtgggaaatcttgtgtttctgttttagaaaaaaaaatttctgactttagaatatatattttctattaggtagtctgctgtcttgtatttggttgataactttggtattggttgttttaaactagaaataagatatgccatgtaattttttgcttctgaatttatttgttaaaattgattcaactattgtctctgtgcaggagaaacaatgtaaatggattaaatgttttttgaggcactgaaaaatggtcattgagccaatatattagtaagatggtgagatggtaatggcattgagctagatcttggtgatagagttctgtgattaatataaccgcaatggaaacacagaagctagtttacagatgggtagcagaggacacatacttatagaaaaattcaatggcaatttgccaacatcaaagtccaggtacagaatgacaattatccaattaagaaagtatgtagacaatgttggatccatgtgaatgtttctaatgttcgtggcatttggattgatgccagtggaatttggcccagtaggaaccaagactacgattcaaggaaatgatgtcttaggaggatgaaattgcaaaggtaaaagccccagacaattaggcaccctcattcacaatggggactttcagatatttcctaaatttgcaggaaaacaggaaagctacttttcaagaagggcaacatccatgaggattttatgttgtatatcttaggttagcagcatctatttagcaatggaggcctctttgggttattgatttatttatttttataatttcttatataaatgaaaacagagaacatttagattctgttttccaaattatgtaaccctcctcctgaagcttggtactgagaaaagccatgaccctactttttccccataattaaaatctggctctaattaagtaaaaagtaaagcattctttaatatgattgccttagtacccttaaggcatttcagattacttaacactaacggtaagacatagatcttgcttgtaatactaatggtaagacatggatcttgcttgtgatcttgcagtttgcttggacaaattttttttttttaatcttcatcttgtgaggcctcggcaggttttaatgaacatttctaattcatacagtttgtctcttttaactaccttctgtaaacatctgtagcagctggcaactttttacacactgaaaacacagaaaaggggctgggtgcagtggctcgtgcctgtaatcccagcactttggattgcttgagcccaggggtttgaaaccaacctgggcaatatagtgagacccctgtctctacaaaaattttttaaaaaatcagggccgggcatggtggctcatgcctgtaatgccagcattttgggaggctgaggtgagcagatcacttgaacacaggagttcaagaccagtctgggcaatacagccaaaccccatctttaccaaataaataaataaataataataagccaggtgtggtggtgcatgcctgtagtcccagctaccagagaggctgaagtgagagggtcacctgggcctggaaggtcaaggcttcagtgagccatgatcatgccactgcactccattctggacaatagagtgagatcctgtctcaaaaaaaaaaaaaattagctgggcatggtggcacctacttgagaggctgaggctggaggatcacttgagcctgggagatcaaggtagtgcatcattattgtgccactgcactccaatctgggtgatagagtgagatcctgcattgaaaaagaaaagaaagaaagaaagaaagaaagaaagaaagggaaaacttttgttgttaacgttatatatattgcacaaataatatacattcattagaaaaaattagaaaataaagcaaaagaagaaaactcatctataatcaaaacactgagacaagtaactaatacctttttgatgtggagtcttcatacttctcatacatacataactacaaaatatgcacatattttaattgtaagttggaacaaaatctgctttcatataactcaatcctttatcatgaacacatttccattcctttttgatatgtaagtcttcattctcagtaatacacagaattcaaatagtggatttattacttttttcacttaagcatctattaatgaatattagagttgttcttaatttttcactaatgaaagaactctacaatgactattctcttgaatatatccttgccaacatgtgcaattatttccttatgatatagtactagaagtagaattttttgatcaaattttaaacgtttttttgtttatgctatgaaattaccttttagaaattttgtaccgacttcaattctaaagaatgttgggggaaacgacataaaacatcttacagatctagggcaagtacgaagatctaaaagaactatctctttgcaaaacattatgcattttgatgtgtactgtacattaaatcaactttttttaattcaaacatgcaaaaatttacagttctttcagataaactgctctctcctcttcaacatttggcataacaagtactttgtgcaaatactcttcaaattttgaatgaaagggaagaatcacaaatatgctttctaaaaaccattacttcgaagaagaaatcaaccccacagaaatacaatcataagagaatactataaacacctctatgcaaataaactggaaaatctagaagaaatggataaattcctggacacatacacccttccaagactgaaccaggaagaagtcgaatccctgaatagaccaataacaagttctgaaattgaggcagtactaaatagcctaccaaccaaaagaagcccaggaccagatggatttacagctgaattctaccagaggtacaaagaggagctggtatcatttcttttgaaactactctaaacaattaaaaagggtggactcctccctaacattttgaggccagcattatcctaataccaaaacctggcagggatacaatgaaacttcaggccaatatccctaatgatcattgatgtgaaaatcctcaataaaatactggcaaacagaatccaccagcacatcaaaagctcatctaccacgatcaagttggcttcaacccgggctgccaggctggttcaacataagccaatcgataaatataaatcatcacatacatagaactaaagacaaaaaccatgtgattatctcaatagtcacagaaaggccttcaataaaattcaacatctcttcatgtttaaaactctcaataaaccaggtattgaaggaacatacttcaaaataatgaaagctatttatgacaaacccacagccaatatcatatcgaatgggcaaaagccaaaagcattccccttgaaaactggcacaagacaaggatgccctctctcactactcttattcaacatattattggaagttctggctagggcaatcaggcaagagaaagaaataaagggtattcaaataggaagagaggaagtcaaattgtctttgtttacagacgacatgatcctatatctaaagaaccccattgtctcagcgcaaaagcttcttaagctgataagcaacttcagcaaattctcaggatataaaatcaatgtgcagaaatcacaagcattcctttacacgacaacagacaagcagagagccaaatcatgaataaactccaatttacaattgcctcaaagacaataaaatacagaggaatacagctaacaagggaagtgaaggcctttccaaggagaactacaaggtgctgctcaaggaaatcagataaaacacagcagatggaaaaacattccatgctcatggataggaagaattaatactttgaaaatggccatacttcccaaagcaatttatagattcaatgctattcccattaaattaacactgacattctccacagaattagaaaaaaactatttactaattcatatggaaccaaaaaaagattcatatagccaggacaatcctaagaaaaaagaacaaagctggagacatcacactacccaacttcaaactatactacagtgctaaagtaaccaaaacagcatggtgctggtacaaaaacaggcacatagaccaatggaacagaatagagaactcaaaaataaaaccacacatctacaaccatctgatcttctacaaacctgacaaaaacaagcagtgggaaaaggaatccctatttaacaaatggtgctgggaaaagtggctagccatctgcagaaaattgaaactggactccttccttataccttatacaaaaatgaactcaaggtggatcaaagacttaaatgtaaaacccaaaactataaaaaccctagaaaaaaatctaggcaataccactcaggacatagacatggggaaagattttattatgaaatcaccaaaagcaattgcaacaaaagcaaaaattgacaaatggaatctaagtaaactaaagagcttctgcaaagcaaaagaaactatcaacagaacgaacagataatctacagaatgagagaatatttttgtaatttgtccatcagacaaaggtctaatatccagaatctacaaggagcttaagcaaatttacaagaaaaaaataaacaacctcattaaaaagtgggcaaaggacatgaacagacacttttcaaaggaagacataaatgtggccaacaaacacatgaaaaaaattttaacatcactggtcattagagaaatgctaatcaaaaccacagtaagataccatttcactccagtcagaatgccaattattaaaaagtaaagaaacaacagatgctggaaaggttgaggagaaataggaacacttttacagtgttggtgggaatataaattagttcaactattgtggaagacggtgtggtgattcctcaatattttagaaccaaaataccatttgacccagcaatcccattactgggtatatacccaaaggaatataaatcttctattataaagatacatgcatgtgtatgttcattgcagcactattcccaataaaaatgacatagaatcaacctgaatgcccatcaatgatagactggataaagaagatgtggtacatacacaccatggaatactatgcagccataaaaaggaacaagatcggccgggcgcggtggctcacgcttgtaatcccagcactttgggaggccgaggcgggcggatcacgaggtcaggagatcgagaccatcctggctaacacggtgaaaccccgtctctactaaaaatacaaaaaaaattagccgggcgtgatggtgggcgcctgtagtcccagctactcgggaggctgaggcaggagaatggcgtgaacccgggaggcggagcttgcagtgagccgagattgcgccactgcactcccgcctgggccacagagcgagactccgtctcaaaaaaaaaaaaaaaaaaaaaaaaaaggaacaagatcatgtcccttgcaggaacatggatgaatctggaagccattaacctcagcaaattaatgcaagaacagaaaaccaaacaccgcacgttctcacttataagtgggagctgaacaatgaaaacacatggacacagggaggggaacaacacacaatggaacctgttgtaggagggcaggggggcagggagagcatcaggaaaaagagctaatgcattctggacttaatacctaggtgatgggatgataggtgcagcaaaccaccatgacacatgtacaaacctgcacatcctgcacatgtaccctggaacttaaaaaataaaataaaataaaaagaagaaataagattatacaggacaaattacttggaaacttattaaaataaggatacttcaaagaaaaagctatgaaatgcgactaaagttatagttagttttcaaatatacaaaccattcaacttaaggagttaggaaaaaacaataaaagaaaattgctatcagttagagacaacgtatgtttttgcttctaatttaaattaaagccaagtagagagtaacaatttaattgttccatatatatataaatgagaatttataagtaaggatttaataaatataaaagataaaatgaatgaggtatgaatgatctaaaaaacaaaaccaatagcatttgtaaagttaacgtgaataaaaagagctgttagatgatttttaaagaacgggcttggcagccaatatttatttatgtttgcctgtttctgtgatatttttctatattgcagaaaacaaaggtccttctacgactaatgaaattcaatatcaagaactggaaacatctgaagttttacccttcttgcaagctatcatgttagtctgccactgcttcatggaagctgccagaagacatgagactcttaggctagatattaatgactttattattcagaacagcaaaaaccagagtatcagcatttgcattggttctggaagacacaaatctacaggataatacaaagaagtctgggtaatacctgcacacataatggggtggggtacaagagaggaattctaaacatagggtacctgaatcttttaaaatgagcagtaattctatctggtcttcaccctagagagagacattttctctgtcatttgctatataaacatccttcaaaagataatttgaaataaagtcagtgagtgccttcatttgcaagatgtccagaaatgtgagagacccatggaaaacagtctcctagcagaaaaaaagagaaggaagcacaattagtgagtaagcagctgatttgtagatttgtaggattataataaagcagattgaaatttttgcctgcattttcccaatattatccagctgaatcacccactttgatgctgaaggcagctgaggaaataagtagtggtttcttgcaattccttacttcccaatttcttgaatctaacagatctttgctgtctcttccaaaccaggttttcaaattgttttgtaaggttatagtttgctttattaattttttctggcttattatatttagtgtgtctttcacttttctgaccaaactctggctgatatgatagataatgtaaggatgtggttcagaaaacagattctcgcagatgggaatctgtgatttgcccttggaaggccatagtgaccccatcatcagtggaaagtaggatactagtagttgaaagaaaacaatggcaaacaacttgtgtttacagaggtacgaaatactaaaccagaaataggatttgatcatgtggtttgcaaacgtaaaaggaaaattaaattcttaattatgccagggcttcaatgtaaaagttggggtattgattaagaaagagtagaattccaggaattgggatgaaaactttttgatgaattccaaaaagtctgaggacttcaaactgcctacctcattgatccttaatttccatcagaaacagcccatcttttctgtttgagaacatcagtcttccttcacctgaagattctaaatgacctcaatgatgtgtcctcttgtaaggcaatgacaattttattcaatacctactaccactcattgcttccagatctataattagaggatgaaaacaagacaagttgggaataactacaaagtctaatccgagggatagcacatacacgaaaacagaaacattatctttcaaatttaccttcacacaaaccaggggaggaatgtagggaggaatgactgtaaacgttttgaagcagcacacacacacaaaaataccataccaggtaccacattagattactgatatgggtacctttaccggagattctggtgtgactgtgacctcaagcaggtgggagtggttctcgtagtttattcagtctgttgatttaaatctgaacatagaagtgacctaaattaaataaggttgaggtgccagaatgtccttagtttaatgtagactaatgaatctaaaagcttaaggaaataggaatgatggagggtgttttcatgggaaactcacatattttccattattgtgtccctgaggaggatttagagaacacttccttcaccaaagctttaagagataccagggaaggcagatccagcattgttgcaaaggtagtggtggctgttctttgcaggcaaggaaagactgtgacagattaagcctcttacatggactcattgattttaaagaaataaaagatctcagaatgacagaagccgaatagtagcactaccaactgccagacacaaggaggttcaattaccataaagggaagaagggtacagcagagtggcttggctgggtctaggacttgatagttaagcagcctactaacattttgtataatatatacttgatctggatatttgattgaaaaataaaactataggtttagtgattagagatctgaattgagtcactacaaagcagagtcacagcctctcactgaaatgccatatttaatctagtacgtagatccagaactttttgaatgaagaacaagcagattccctttgggagaaccccaacaaaattaccatgagtaggtactacgaataatccttttagccttccatcaactaaactatggcaatttcccaggggacaccatgcattgaataatgcaaatggccagatttctaaggcatttttggacgtaagtcccaaactgaccctaaaacatggagcttcaaactgctacggcgagactggtcttattgtgatcaggcaatacgtgagattttggctgccaataatgtctatcatgttggaatgtgtactaatgtctattaagttgtaatagtcatactcagcaactgacagagtccccacattgggtttctgccctttagaagacagccactataataggaagggaaaaatagaagccgagggagtgcttctctctagcaaagcaataaatgaaaattaaggccaaatcaagggcagttgcagactactgccactatcaaatatgtgaaaatgcagagtaaatttttaaatatcacattcctatttaactcaactatttgttttgtgaagaagacatacagatcttgcagaatctctgttgattgtcatgaaattaatcaggtggtgactctaattttggttgctgttccagatgtggtatctttaatggagtaaatcaatttagctcctattatccagtatatagttaatattcgggtatttatctggaactttttaatataatttgtgaaaaacaacagaaaacaatttgctttcatttggcagagacagtagtatgtcttcatcatcttacctaaggactatataaactctttctctctcacaatagtttctacaggaaaccatcacacaggatataaagtaggaggcttagtaacagagatatctagtgaaagtgtatgtgaaagctcacaaaaacattccagagaaggctttcaataatagttgtacacaacccattctgtgcaagtcagtttgcctcttttcttagtcatttcatcactggattcatgaataaaatggccattatgaagatgaagtctaaacaaagatttttattctgagaaagctcatgtggcaatcatgacagccaaagaatgaaacaaccaatagtgtagaccaaaccgaggccctgatatagaaccatttcctagtgtgacaagtgagccagtcagtggcagaataattactttggacccccgccattctggaagggaagaaaacattgcctttagaaaagataatttggatataaatttgtatttcttcccccacattgctttcaccagcatcaccacctgcgtataataccttattctctcacttggtatcccacataatatggcttcggaccaaagagctcattttacagtgaaagtagtcactcatatcagtgagacttactggtgctaccatgtaccacattgtctgaagatgctgtcttaatgaaatagcccgatggtctattgaagaaacagtacgtcacctgctgggaggacaagaagagccaacacatacacataaaagcttgcaagtccaaggtatcttctgacaagatgtacaatatattccaatagcaattgatagcaataatgactaataaatacatgatgctgtttctacaatagtcaggacacatggctttgagaacgaaggggctggagtgggaatattccctgccctgttacctcaacaatgcacccagtaaaaattttgttttctctttctgtaactttgaactctgctggattattgagtttaattctcacacacacacacacaaaaatggttctattcaactggaaactgagaattccatggaaccaccttgagctccttataccactgactcaatggacaagggaagagttaaaggtctgagatgattgattctgattattaggggaaaatagggttgctagggttgcttttacgcactcttagccattactactaatgcctattgctgctgttgctactgctgctgctaatactactgggaacactttaggaataatatttagtcacccaaccaggtaaagaactgcaaccagaccagaaatgccagctgagagacaaggggcaagaactagatactggaagaaggaagttgtaaaacccaactccaacctcatggcttgttgctatgtgtattttcaactctgctttgtttacatatgtacatgatggcaaatgtggactgaaacaaaaagttaagattaaaaagatattatttgacttgcataaaactgaataagtctaaaagaaactaaataattaagccttcaaacaatgttgtttttaaagtttgtagcatttccacttctgaaattattaaagcttaaaccctcactacgattttggggctaacctgttttccttgtgtatgtgtctgaatttatgcatattaaccaaatgacattttttcctctctcttaccttaccattgcatatataatgtgtgctgttgctggtggtgatccttctaatttagttgtaaaatatcaaagagggattttatggtaggtatgcatattttcttccctgctttgttttgcatatatttttatgaataaattaatttttctcctccttctttttctctttcctgggcaggggaaaataaagttattgacatatttccaaaacttccactggatgtccttgttcattttctcccaagatctgcaggaacaaatgcaaacattggctacaggagaagaaatattccactcctcacttgagggagctgtaatctgttttcctgttgcatcctttcccttaaatgtttttccagggtgttgcagagccacagaacccttggtaattttgccaagaacaaattgtgaagtagcttctgaacccattacctactaagattttattgttcatcttaattttacaaaatgtccattcttggccaaaacattctcttccttaaataacaagagattgtgtaagtaattcttagaaggctcaactgtatagactccctttggccagaggggcaaatcctggattgagtttttgaaatatctttttaaaaattatttattgcataacaaattaaagagggcctataagtttttttttttttttttttttaacagctgttgagctattgctcttctgtgataaaatcccgtagaagatttaacctgctatggatttctgggaggtcacagggctaagtaaactcggaatttggggtaagctttttcaaacaaagtcactgaatagatgtggatgaggaaaaaagcttgtgaaaggcatcaggcactgcaaacaacagctgcagctgcaaaccggaaagcattcatatccctgtgtgacagtttgctcctcagccttcctaggattagggtgtgcacgcaaacaacacagataacacgagaaagagtcgtttatatccttacaatgtttgcatttatgtgcacgagggtacaaaaggtgacatagaaacatatttgaaacattgctctgtgactaagaacttagtcttatcattaaagtaataaactgtgtgaactgccctaatttatgctaaatctctcagaagcaccaagcagctcagctgttgctgctagacctcagcaccttaaagattggggattccgtgctctctggtgacaacccttgaggacaaaacaggcctattggagaaagccatttatcagagccctcctttgacacagggatgcagggtgtttggacttcaggggactgctgtggagatggaggagaaggagagaaaggataagtctaccctatgctctagagaagagacagctggctacatattctttccaaccacacttgttcctactggtagtgcaatcaggaacaatctctaaaatctattgctgcgtatctagtatctgctttgagacatggagtctaattttttgtttgcttgtttacatagtttgatttcttttctaatctgatgttaaataacatctataattttgcgcttaaagtgtaaattatcacataaagagaacagtaacaggatttcacaaacacttgttgttctgtcttatatcaaaataatataaaatactaagacctttatattagatatcagtatgtagactctcattattttggtatgtaatgtacattttagagcacctaccataagaatatgataaatcatgttgaaataaatgatttttaagagaaattgacatatgattttaagctaagtgtatttcaatcatattgtattttttttgcctaaaatgttttatttcctttgtcaccatagtgaaaaattatcagcaaaatatatctactgttattataacaaccatgaaaacatttccaaatttattttgccaatctctttaaggggcaaagaacattcacatttaaaatatgatgaaaacaaagttgcttagctttaagtgaaaacttaaccacttcaagagcaatgatcatacagagtatgttaagaagaacttttcactgagagacaaagaaggattttgtctttctaacttagtgaatcaagggacagaaatggagagagaggcaaagaaggattttgtctttctaaattagtgaaccaagggataaaaatggagattttagaagagaaagtcacactaattctctgcaattggaggtttcccagaaatacatctgggaaatgtatttcccaggcctgagagtcaacctcttgtaagtcagtgttatatggtggttacatcatcacctcatcttcatagatgcaataacttggtggaaatttgggtatgattagatatttttcaatgagtattagtcatgaaaataacttttaaaaaaattaatagatttcaaaagcagttttaggtctgtagggaaaaaatgagcaaaaagtgcagagagcgccgtacaccccttgcactgccaccgagttcccctgttcttaacacctttcattagtgtggtacatctgttacagttgatgagctaatattgatatgttatctttcactaaagccaaaatgtgcctagagtttactgtttgtgttgtacattctatgggttttaacacatgtaaaatgacctgtatccatcattatagtatcatacagaatgatagctttcactgttatattgcattttcatttaatattttttaaacaatttactgaacacattttgggttaaaccagctttcatgttgtgctgaaagttctccaattgttcttccagattattcatttatctcctttcatcctgctctgtacccctggtggtgacctctacagaatgcattactgggactctgccgaatttgggtagtttactcagtgaaaattatcagcaggtgatcagaggaggggaggagagggaggtcagggtgtttactccctgctccttccctgtctatttgggttctttctttctttctttttttactgtactttaagttctagggtacatgtgcacaacgtgcaggtttgttacataggtatacttgtgccttgttggtgtgctgcacccattaactcatcatttacattaggtatttctcctaatgctacccctcccccagtcccccaccctcgtggcaggccccggggtgtgatgttccccaccctgtgtcaaagtattctcactgttcaactcccacctatgagtgagaacatgcggtgtttggttttctctccttgtgatagtttgctcagaatgatggtttccagctacatctatgtccctgcaaatgacatgaactcatcctttttttgtggctacatagtattccatggtgtatatgtgctacattttcttaatccagtctatcattgatgagcatttgggttggttcaaagtctttgctattgtgaatagtgccacaataagcataacgtatgtgcatgtctttatagtagcatgatttataatcctttgggtatatacccagtaataggatcgcttggtcaaatggtatttctggttctagatccttgaggaatcgccatactgtcttctacatggttgaactaatttacatgcccaccaaccatgtaaaagtgttcctatttctccacatcctctccagcatctgttgtttcttgactttttaatgattgccattctaactggtgtgagatgatatctcattgtggttttgatttgcatttctctgatgaccagtgatgatgagcattttttcatgtgtctgttggctgcataaatgtcttcttttgagaagtgtctgttcatatcctttgcccactttttgatggggttgtttgtttttttcttgtaaatttaagagcttctgcacagcaaaagaaactaccattagagtgaacaggcaacccacagaatgggagaaaatttcttcaatctacccatctgacaaagggctaatatccagaatctacaaagaactatttggggttttggcaatgactgtgttcctttacccatagctacagcaagcccctcttccacaggttcggctcgtacctggttctagaaacagctccttcctctgtcctctggggtctaggggtggtaaattcttcctgttgtgactagtccttgggtattttaccatcttttgttagtttctttatgctgcccacacttttgtaaatagacccttcaataagttcttttcaattaccccttgagtctgcatctgtctctgtagaaagaacacacacctatttcattgaatttttacaatactgttagaaattccagcctgtagacttaacttattctcattttatattatgtttaaaaattaaggtaaaattgaggcttgggaagattaaaacattgcccaatatcacagactaaatatatcttgagccagggataagaatcaggacttaggggtcttcacttcttgtatagccatctccccatgcacaatagtatctggaaaaatgctttgctattgtgtggtatgttcattattatgcaaaaaaaaaaatcaataagaaagaaactatctattttggaaacagtgagtctgtaagtgaactgaataatttagaaagtgatgaagtaatacatatgttaactaatttaactgagccgtttcacaagtatacatattttagaacatgttgtacatgataagtatatacaattttatttgccaattaaaaaaaacaaattttaaaaagtgatgtgaatattgtggaggtccttttgtattttgtcattttctgagattttggatgagaagtggaaaatttattagcatacatttacatattcatgaaagaatatattttacacataaaattcattgacttttaaaggcttcttttcaggtccttaatggtttggataggttattttatacctatattaatattaatatgaaagaaaaaatatttgatttgtagagatgttttactgaatgtagaaaaatctcatataatttaagattaataggtattttgaaagaattcagcacattaataaaacactgatcaaataactaaagccttggatttccacaaagcactgacattgccccttgtaataacctagagccaagatggagaaatatggcttaggttagacgaaacagagattcgaattaattattgggcagtgaaatataggggatgaattcaatagattggattgttgttaggaaaaatagttagctggaactcttatgtagtgagtctcacccttggtcatacaggggaatcacctggaatacagtggaataccaatgcctggatcctaccctgatttaatcatattgtagcctgggcaatgtgatctttaaaaacttcctggtgattttgatgtgtaaccaaaacggaattgaagaagaaatcaaagatagatttctggtattgacaacatctacagtatgtcctgaagaggggtgtgtgtgtttgcgtgcatgtgtgtgtgcccgtacatgcacaaagcattctagacgcaaacaatggcataaaaaaagacatggagactatgatgtatgcgggagccacagctgaattttattattagagagtaaatatgtggccaatattaaaacttaagaggtaggcttaatgcttagtttcctgtattctatactgaggacaacaaagagtcactaacattatatctgaaatgcattttaaaagtgctccctgtgctgtagtatggagaaatggtttggaagtaaatcacatgacatgcaaggaaaccatttatggcattttagtttagggcattggtggcctggattaaagtggtgatagcagtgatggagaaaagcaaatgtactcacaagatattttgaaaaatttggtgactgctgtggtttgaatgtgtcccccaaagtttgtgtgttgaaaacttaatccccactgtaacaatgttgggaggtagaagccaattagtggtgattaggttgtgatggcagagcactcatgaatggattaatgccattatcacagaaatgagttggttatcttgagagtaggtttgttacaaaatctagtttggcccctcttgctcttcttctcaccctcttttggcattccaccttctgccattagatgatagggcatgaaggctctcaccagatgctggaaccatgctcttggactttctagcctccagaatcatgagccaagtacatttctgtttgttataaattacccagtcagtgattttctgttaaagcaatgcaaagcagactaagacagtgatggagtgcatatgaggtaaaatactggaaggagtcaacagtgacaaatattctttccagagtatcaaatttcttatactataatctagcacttcctgataagaaaatctgggagattcattatctcaaaacatatttagccaaaaatcagggaatggtgtttattgcagttaaattgcactcttagcttttaaacgccattgattagaaagaaaaagttataaattaacattgtcgcaattgacccgtatacatcatcttgagatgagtggagttttcatgtacaacaaaaaattattgcaggtgcacaaatgatgtatgcatttaaaatctaactcaattaattatatgaagaaaagaaatatgctttgtcaaattttaaaataaaactgatatatgtgtttcattttgctttcaaaatgtcagttacagctctctttaaggaacacagtggtgagaaaacacaacacttcaaaactccactaagaactactttgtagaaatggcaagtttaagagcagagtatttgacaaggttctggaaatcctaaaggaaaaatatccaaatataatatcaaagtgagaagtgaatctgagagatggatgttgccataattttcaatggtaactcagctcccttaatagattctttatgagcatttggaaagaaaaagtaatggttatagttagaaaatgaaaatagtacatttaattctcctggctcaatatatagtaaaggtattgtggatacaccccttgcctaattcaatcattgacttatctgggcttcaccactcattacaatacattgaggtattcacatcaatggggctaatttgtatataaatatataattccatataaattgtaggttacagcctacatggagataatagttatgagattatctatattttcatatattgttttattttttatttcaattcaactagatgaatatgctttttgtcatccttgagggatacattaaactcattttctcaatatcatgtcctttcagttatataacttctatgcccaaaatactgtatcagtcattggctttccataagaatattatggcaggtaaaaaccaaaactattgactcttaggtagatttatgtggtgatgatttcattggtgatgttctcccatttaatatcattttttggaaagctatctcattatagctcgtgtgtatgtgtctgtgtgtgtgtgtgagtgtgtcacagagagaaagatgtgaaatttgctgaaaaatttctccatcaaaactagaaagaagattctgagatggtaaaaatgtaataaaacagcgaacagacaggattttaaatgttcttaccacaaataaatgataaatatatgaagtaatcattatgataattagcctgatttgatcatttcacaattgaaacactgtatcccataacggtatcccataatgtatcccaatattgtattccataaatatatacaattattatttgtcagttaaaagtcaaagtttaatggtatcaaaagttagagccattttaatgtaaaaaacacccaatagttccctctactgaaatccactgtgtttttagaaaccaagtcctaaggcaaactgttaaatatgaactaagcaggtgtttctgcacactgctaacgattaatggtcactgcctttggtgaaaaatttcaaatgagtacaatttgtgaaaaatatacatgtaattgtattatgtaaattcagtgtatatatcctttctgagcttaactgtatatattttttaggtttctgtccttggggaatatcatgggagttatttagtctttatgtaaaattttaattatttaggataatatgtttgtatgattacaataagacactgcggaagtcagctgtggcttaagtgttaagagaacagagtaacaatatccaggggccaatgtagacattgcttaggatgttggcagtatagcttcattaaccaaatcacatatagcatatgttgtggtctaagaaaggatcagaataaagttcttatagcgaaaggaacatcagatgctgcaaaaactttagcaagtgtaataggagcttgcatagttaagatgttaccttgctgtccctctgagtgtcaataaatatgatgaagttcatttacagtgaagaataaaggaggatacaacaattggaatttctcaaaagaagaggaaggaaaaagtttgaactgaaggcattttattgacattaaagagatggtgaggtggacattgttgaattgcattgatgatgaaatgcttgacaggaatacattacacttggtgacccaaaagttttccttgcaattgaaggtgagggtaggcttatttgggtatgcacacaccatggacattgttgaattgcattgatgatgaaatgcttgacaggaatacattacacttggtgacccaaaagttttccttgcaattaaaggtgagggtaggcttatttgggtgtgcacacaccatgggaaatatataattcttagggccctagtatatgctgagtatctttccaggtcctagaatgcaacattgtgtctgggagagagggagagagggagtgagggcatggggggcagatgcagaaacactttcttcactttgtattttcacatgaacctgaaattaatctcttggagagattaccttgtaaatatcttgagaaatgtcaggcaatttttttttttttttgagacggagtcttgctctgtcgcccaggctggagtgcaagtggcgcgatctcggctcactgcaagctccgcaatttttatagaaagaaaatctagtaatttaacattcttcctttcgctttcccttctaaagtaaatattttctcttaaaaataaaaataaacaaataactaaaaagaaaagggggtatttttgttgtatttttaaattttctttcacagaatagaccaaagttttaagcattctgtatctcttagtttctattaaatagggcttttctctttttattctatgttgtaagaagccattcaaatatttttgggcacaaatttgaggaatgcacatgaaacattaaaaactatgggcttaggagtcagaaaaaccagagtttgtatcagttttgtcacttattagctgcctgaccataggcaagttactgaaccacttggagatttgttttttttcttctataaaacaatgatattttggaggattaaagtgtcttacaattggtcatttttatactctttctccatcatcatcattattattataaatattctcttttgccagatgaaaatattagtaggaaaaaatcaaaataagcaatatttgtgcaagtaaatacaataatacttaattgttatgtttaatatcctaacatgctcccatacattatagaaataaaagaacggttattttgaatgaagttttcgcctttcttcttgtcttttcctactttgcaagtaaataagtagttaggcagaaggaatgaaggtagaatccttgaaactaaacattagatagtatttacataattgaaagttgactacatgggatctttcataataattgatttatctgcattttttcaaaccgcttcccacaagccagaggcaagcaagtcaaagaaaattattagaaaaaaatatatagacaagttgtctgaaaaaggacttgtagttggtataagttttggggagctatagttgctaaattagtgttttaccataaatatcctgaattacttctgctgaaacagttagtgaagttttcgtgaaaatagcattgaatttcttcaaaagtcaaagctcatttcagctatataatatttttcatagcaataaatatattttcagaattgagcttctataaaaaattttaagtaatatcacaaaataaaccagaaagcctattagtagacaagtaatgttttcagttccaagcagttttcctcttcaagtatttgaggttgttcatttcataacatggttactatgattggaataatgtactagtaagagtgataagaaattatttttgtcattattcatctcaattttgaggcatgtgaaaaggaactttgttgtatgtggtataacgtgttattcaagttcagatgtgacagatgtcacatgtgaatttaaaaaaacagatttcccactactgggtatctacccaaaggaaaagacgtcattatataaaaaaaaaaaaaaaacacctacacatgaatgtgtattgcaacacaattgcaaagatatggaacccacctaagttcccatcgaccaaagagtcgataaagaaaatgtggtatacatataccatagaaagctactcattaaaaaaatgaaataatgtcttatgcagcaacttggatggagctggaggcccttattccaagtgaagaaactcaggaatggaaaaccaaatatcatatgttctcacttacaagtgggagctaagctatgggcatataaaggattacagagtggtataatggactatggagactcagaaggtggagggtgggaggtgggtgtgggataaaaagctacatattgggtataatgtacactactttggtgaagggggcactcaaatctcagacttccctgctataatattcatctatgtaatcaaaagccacttgttcctcaaaaactattgatatttaaaaaatcaaatttattgaatcacagtattttacacatagaaagtaatagatagtttaattaagttctttcactttattaatgagaacattggggaataaaagagtgactttctgaaagaccaacagctgatttcctgtattttaaatctgaatgaagagtagttttggttcctaatatagtgatgagctacaaaaatatacacatttatgtcatctgtgcaattgcaaaccctcttcttattcatgggcctgttttttaaatctatttatgggtattatttctctgtttttatggtgatgatgatgatggtaaaaataatgagaccataaagactgacagtgtaaggatcagctttactgatttcaatagatctcaatttccattaggattgcataaccactaaaaagattcaatgacacaattttcacatatgtgtcaattagacccacagtgctccctaaatcttcccatccttcccaccaattctgttgctactcaaagtgcggtctgcactggggtaacctaggagcttgttagaaagcacaatctcacatcctatcccaaacgtactgattcagaatctgcattttaacaagatctccagataatagtgagcagtagtcgctctagagcaactttgatggaccccatgtgcctctttgataagaagttagactggttaatggggattctctgagtatgactttaaggttacaaatttcattatgctttttggtttggggcaggcacagaccaacgcaatccagactctttttgtggcgcctccaaaatgtttgctattgctgagaagagaggaatattagactctcatatcagaatttggtgaaagttgtattggttaccatttcatggctgtgtggtgtactctacacttagaacggagacagtgcacttaatagaagtggctttgcattgcatagctgttaaaacttttccagcaaatgctaccagctaaattataagggtgaattaaagagtgccctttataaatagtcacaaaaggcctttgcagctgattatagtgtgggtgtaatttggagaaaggtttgctgtaggcatgaaatcgtagtactgctattggaatagagtcaagagcctagccatttccagtagctgtatcaccacctgctagtatacttattcagatttgagtcagagggatgcatgaagtctaatgagtcatcaagtcttcacctaaaacacgtaatctacctattccttttcaaatgagacttgtttgagtcagactcttgcctatgagctgacctgaagtcttaaatgcttttctgccaaatgaattgcttaacacaaattgcttaacagtttttgttctgagttagtcccaaaattttgtctgggtctcagttctcctggaaatcttcatacatgaagacgagtcctggctgagtgtggtggctcatgcctgtaatcctaacactttgggtggctgagttggcaggattgcttgagcccaagagttcaagaccttcctgggcaacaaagccagaccccgtctctacaaaaaatttaaaagttagctgggtctgatggcttgcggtgggaggattgcttaagcccaggaggtagagggtgcagtgagctgtgatcatgtcactgtacttcagcataagtggcagagccagactctgtctcaaaaaaaaaaaaaaaaaaagacagagctaaggaatcttatcttggactcctccttggctgctggtttgattctccagccaaatatttatagcactaagccagcctgagagtcattggtcttagactcagaatgacccagaaaatgcatcttatcattgctgtcattaacaagttgcttgccactatgatctgctgtgccttggggactgttagctagggagtagttccctcttgctaggactacttttcctgctaaatagccttcccatgcctgtctgatttggacagggatttttgaaagtatatctgtgtgtgtctgtgtgtgtctgtgtgtgtgtgaaactcttatgtgtcttctataataataatagctacatttatatagaacttaccgtgtacaaggcattgttttagtattatatgtatatgtaagtgtgtgtatatatacacatgatctcattgaattcttactataacaatgatgtaggtggtagtattatttgttttacaggtagggagactgaggcatagaaatgttaagtgccttgatcaaggccataaagctaaaaaagagaggccaagattctattcaatcccaggcagtagagatcctaatttctactgtaattgcagattcgttgatgatactcctgactttggtggaggaatcagggcacaggaatagaggaaaccctgagaatggggacctctaattagggactgggaggaagacagtctctagctttcacagggacctaaagcgacagggtagtgaaacaaaagagagacaggcaattccttctgtcttctctggctaaaaaacaaggggagcagaaagccaaggggacaatgctagaaggccaaataaggaacaagtcacaaattcctcattccaaggagaagatgccaactcctaggcaggtccatgtggctagtcaattagggtctcaaggagacacatgcaaagagctttaccattgatctactttctctgagcaggaaagagccagattgaccctaaggcagttggacagactgtcagcagttaaatggaaggatgtgggctgatggaagcagatctgaaaaatcctgtctcagttgtccattcccagatggagggaggaagctcttgtgggcagaacagggtgtggacgggtgagctgtaatttcttggggactggagagaacataattcagccaggcctactctcttcctactttatgcaaaatatttccagctgtgttcattagattatataatcttgaatattgagaataagatacaatttcttaaattcagcaatgcacaacgaattcttcattaaaagaaatttggtatgcttttagagatgggagacacagccataagaaaatatgctactataaaagaaaatgctcttaattaatactgacatagtgaggactcctctggcattgagaacatttaatattaatgcaaaatgttgttgtctaccatttccttttttctttagatcattagcataggattacaaaattttaaattggatttcaaacccataccaaacagctgtgtcttctattacaaaagacaatgcactcatacatatgtattatgcacttaattaaaactgttggattttcatttttaaaagttctgatgatgtcctgaatttttatagtgatttggatctctggcctgtcatcagtttgcatattttgggtggaaaagtagggtttgggtgaaataagcattccaaagtttatataacgggaggaacatggcctaaaattagccttaccatgggcttaaaattcattataggtattaattcctcgtacttctcaaggggttattttctcccttaatttttaaaattctaagtgacatgtatttgttttagaaatatgtagaaaaatataaacaggaaaattaaaattatctataatcttattctgctgagttgaacattacaactcatatatttcttttctataattttattgcataaaatctatatattttatagaatttgaatcacaccatattgataaatatgcatttttaaacttgcactttattttaagtggtcaacattttaccgtgttattaacttgtcttcacaaatatgagtttacatggctgtataataatgatgatagctgtagaatatttgagccttccaattctgtgatgaatgtaatttgaattataggggaagtaaggacaggatagaaatatattggaggaagaaagagagaggtgagaagtagtgtaagataaattcttagagattaaagcatgaagtaaattatgtgtagaaatgattatttaaaagataaagaaataagagtataagcagccaaaagccataaaatttccatctgtttctaaaatgagaaactggaattcaaacaggcaactgatgattttcattataagttcctctaaattacttgatttttaaccatctgcatatatgctttgggttttttttaagtgtaaattaactctggtgaagagttggacattaagattaacctcagaataccatgctggaaggggtgccggtgtgtgtttgtgtgtgtgtgtgcgtgtgtgtgtgcatgcacgtacttacatgggaagccgactgggaatacagtctatcagcaatggcagaagagggagtaaccacccaagagcaatgccctctgggatagcatgagggcttggggggctgacagcaaggagcagaaacggaggacaaaagtcaaggagcccttactctctatgtcatggctttgctgtagggtaaccttgctaagaagacctcatcaagtgggatgtaagatcccaacagcaaagcgcattggacctggaaaaaggccagttctcccaaatgtgatcattatgtagaaaaataagggagcagtattctgagcaacatgtctgtataccattgattgacacataaggtcccttcattataaattttacagggtgcccaagtcattttgctgtggtgtgattttgtaaaaataaatatgtagctaaaaataacatttccaagctgaaatatgtagaaaggcaaaacaaaaacttctagctttcttgtggtaaattgtgaggtaaaataaaatgaatcttaaatatagtgcaaaataggaggtatcatgccttacatcatctttatctcctccctcccattttttctgttctaaatggagttgtgctgttatttcatttgttatccatatttggaagtttagctaggaggctagaaaatttgatgaagacacctgattaatttttaaattttatttattaatatttcgataaatattaataaatattaatattttgataaatattaataaatattaatattttgataaatattaattgataaaagtgtttgcaatgtgccaggaattaggttagctactgatttatagtggtgagtaaaccactgtccctactctcatgaaatcagccatttggtctaagggcagcagggagccagagtaaacaattcagtcatggcagtaggagaactctgtgaagagctcaaactagctgaagttgcttcccatagatattataaaatgttaaaatataatcattcctatgggaagagtagaataagactatgtaaagaaaaaagaaagagacaacaaagtgtctgggcacaatgcctcacacctataatcctagcactttgggagcccaaggtgggaggatagcctgagcccaggagtccagaccaacctgggcaacatagttggacactttctctacaaaaaatataaaaattagccaggaacagtggcctgtgcctttagtcccagctattctggaggctgaaatgggaggattgctttagcccaggaagtcgaggctgcagtgagcaatgatcatgacactgaactccagcatgggtaacagagtgagaccctgtctcaaaaaaaaaaaaaaaaagaaagaaagaaaaaaggtaaaattatttttcattgttaaaaattcattggaatccaatatatccagtcctgggtgtccaagtgaatttgcttagaactgagatggtatatttactttcttctttggttgagctttttcagtagagatttctcttatctctctttgtctccttttctcctctaggtaaacagtatttccacaattgtcccccttatctctctttgtttcttctgtctccctcactccctttcctaatagtttctctactcattatttctccttttcattcctatttggataccttttcttcctcttctctccacactgctttaccaaaactaccagtcattaaaaggttttaaaattacatacagttgaattcagctttagaagatacatgttctagccgggtgtggtgcttcatgcctgtaatcccagcactttgggaggccaaggcaggtggatcatgaggttaggagatcgagaccatcctggccaacatggtgaaacctcatctctactaaaaatacaaaattagctgggtgtggtggcacgtgcctgtagtcccagctgctcagggggctgaggcaggagaattgcttgaatccgggaggcggaggttgagccgagatcacacccctgcactccagcctggcaacagagtgagactcaaaaaaaaaaaaagaaagaatatacatgttctgcaaacaaatgtccttctgctacctattctatattccctttgccttcagcaacacctcagcaggtcgtggatttttacttagtggagtgaccaaaaccttcatttcttaagggtctaggtcatttgtagtcctgtctggattgggttgttatagtttccctttgaccttaatcatatggcatggtaatactaaaagatgccctaagggttcgcctgtattccacatatacacttccttacctccattgtggagtagtagactaatttcatcttgatagtctgggacaatcaacccagccaacactgtaactcccttcttagcctgttgacttagaggtaggaggagcccaaggtgtccaggtggcaatctcaacttccagtttaatggaattattgttgtgtctcctggtggcagcattcctccttctggaactaagacctctaggccagcagatgtctaatgttgtgggaacaggaagcaaaaatttcgctggtgggtcactaggggtgatggtgagtgatgccatttctacttctaccccttgattcctggacccctaaattctggctatgggagaaacaataccatatactgagcggtgatttggggcatacacagccttctggagaacttgaagtctgatatttgagggcagaaagcatccagcctgggagaaagatgaaatctggaagactcagcaagtctgctcttccatcttctgcctgctttattctagccatgctagcagctgattaggtggtgcccacccagattgagggtgggtctgcctctccttgttcactgactcaaatgttaatctcctttggcaacaccctcacagacacacccaggatcaatactttgtatccttcaatccaatcaggttgacacacagtattaaccatcacacacatccttgggattcagccacttcttaacttttccataggtccattttgagacagaaaataattactttgcaaaacatattcctagactataggtaatggataggatacacaatcacaattactctcagagatttctttttatatttatattatgtacttattttggttgaatgtctaaaatttggataatgtttgagatgtctgttttgttttttctcttcttccatgcatatacttgaaggggtctatacactctctaacccaggtgtactgttttaatgaacctggatgttggcattccaggacaataacagaagccatatttgctcaggcctgaatcagccaaaacagtggataacacagcttttgaaccatctgggtatttgagcttttcctaaacacttggataagaataatagtaggggaagcggatatatctactgtacttaatatcttttgcatgtttgatgagcttacatttggagttggttttagaaggaagaatgagatgaagtggaaagtactatcccagctgtagtataaaactttatatcctaaaaatggaacacagaaataaacgaaaccaaaacaaacaaataaaacccaaaaactgaacacagtgtgccatgaaactcagaatgtatctgcaatagcacaatcataacacatttaaagacacataagtagtaactgtaaaattgaagagaacataaatctgaaatcactatttgcttgtaagaagtatctacaaaaccaaaatttatttcaattcttcttctacatttccagatggctatagaaaaatttctgaaggagcaaggtattgaaatatgataggttagggtgatataaattagcctccctatggttttaatttgttcatgcctttttgcaggatttcttgtggtgttggaattctgaaattcgtataagctcaactcattgaatttggacataaaatttggaatagactcaaggagcaagcagtgttaaggtacaactctttgtctgattttttaaattgttcataaatttgtcagtatgcctattcattcattcattcaacaaatattagctgaacacttactatgtaaagcattattctagcagctgaggatatagtaatgaataaacagaaaaaaatagtccccactcttctgagcagaattctagtaggtggtcatagacaataaacaaggtaaataagtagagtttaccagacagtttctatggagaaaaatgaaaagggaagaggggtagtatatgaggaaggaggtaaaattttttgatgacatgatctcaagactttattcagaagctatcacttaagtaaagacctgaagaaactgagggagggaatcctagagatacctagaggaagaatttttgagcaagggaagaactgaggagagatctggaggtgagagtgtgacagcaaggaagccattgtggctgtgatggagcagcaggggagaggtcagagagaaagtgtagatgacagaaccctaatgtgtaggtccttttatgtcactatgaggactctggcttttactctgaatgagatgcgaagctaatggagagtttactgaactacatgacttacaacataaatatggaagatatgtgttatatgaaatagtaaccttaggccagatgtggtgattaaaattaaaattaatcaaaaatgaaaaatattaacattcagttcttcattcacactaaccacatttcaagtggttaatagccaaatgtggctatttactataatattgggcagcacagacataaaatacattcattattgcagaaattttatggacggtgctattgtagaccaatcatatcatttatttattaattctacagaaatgcatgcccataaaaattgctagatatcatattaagctttctatatatatctcaatatatattgaatatatatatttgatacatataaatgtatatatcttgaaaaaaaaggcaagaaattcagaagataaagaagctgccaagatcacacttgatatatgaaaaaaacctgatatatgaaaagtaaaggtaggttaactgtaagcagaaaaaacaagttactcataaaaatgaggctaattgccacatatatatagaagatacagacttttccttacctatcattcagtcttgaaaggagaacgagacacagaattatggtcacagaattattactgaaacatgttcaggatataggtttcaaatgatagagtcaattattcaggctcctcagttattctggaggagaggagctatcctgaaaatgagttgagaacatgagttatagtaacaccatgagtaagtaagagtatttcaggtgaagagattaggttagtagagatagtagtactccataactaccataataaaccttgtatctatgatgccttatttaattcttgcaataattttgagatggcagtattgatatttcaggcctggtgtggtggctcacacctgtaatctcagtgctttggagggtcgaggcaggaggatggtttgaggccaggcatttaagactagcttggcaacatagtgagaccctgattctacaatttttttttaattagccagatgtagtggtgcatgcctgtagtcttaggtacttgggaggttgatgtgggaggatcacttgagcccaggggtttgaggttacagtgagcttggcgacagagtaagaacttatctcttttttttaaaaaaggaagaaattcagaagttaaataagctgccaagatcacacttgatatatgaaaaacaacttgatacatgaaaagttaaggtggattaaccgtaggcagaaaaaacaagttactcataaaaatgaggttaatttcaaaagaaagtgaaagaatggcaatttggactctgggtgtctggctttaaagactgtgatttcatttatgtactattctacattactttactaaaaaggggtgttttatatataataataaagataaaaaataatgaacaaagatatataatcaatgtgaacatatgttcactcaacaatatggcctcaaattatataaagcaactgatgagaatgtcaagagataaaccaacaattaaggttgaagatatcaacatatgcttctcaggaagagatagaataaaatagacaaaaaataaagtggagatactaaaaatctgttcaattaaaggtttgagttattatgtatattatatattccatactaaaacagaatatactttaagcatacactgaatatttactaaaatagttcattaggaaataatgtcagggaaagatgccccatgttcatggattgaaagtcttaataatgttgagatgcaattcttttcaaagtcatctacagacataatacaatacctattaaaattccagtggcctccttttttccaaaaatggaaaagctaaccttaaaattcatatggaattacaagggcctctaaatagccaaaaactattgagaaaggaaaagaactttggaggactcatactttctaatgtcaaaactaactgcaaagctacagtaaccataacggtgtggtactggcaaaaagatagacgtatagatgaacagaacagaattaagagtcctgaaataaacccaaacatctatggccaagtaacttttgacaatggtgccaagctcttcagtgagaaaaaaatagtctctttaacaaatggtgctggaacaactggataaccacatgcaaaataatacatttgaactcttcctttactccatatataaaaattaactcaaaatggatcaacctaaatataagagttaaaactataaaatcattagaagaaaacacaagggtaaatcttgatgacctcggatttggcaatgggtttttaggtttgacaccaaaatcacaagcaataaagaataaatagatgaatttgacctcataaaaattaaaaatgtttgtgcaccaaaggacctcatcaagaaagtgaaaagacaactcacagaatcagagaaaatatttgtaaatcatatatctgataagaatttagtatggagaatatatattaggttggtgcaaaagttattccagtttttgccactaaaagtaatggcaaaactgcaactacttttgtaccaacctaaagaaaacaagtcaagaagaaaaagatgaacaatccaataaaaaaatgggtaaaggacataaatatacatttttttcaaagaaaatgtacaaatgggcaatgagcacaggaaatgatgttcaacgtaaatggtaattaaggatatgcaaatcaatactacagtgagatatcacttcatacccactgtgatggctataattaaacagccaaatatggcaagtgttgtggagaatgtagaactcttgtacatgggtggggatgtaaaatgatgcagccactggggaaaacgatttggtggtgcctcaaaaagttaacatatataattaccatatgaccctgcaatttcgttttaagtgtatgcctaggaggaataaaatgatatgtccacacagaaactttcatacattattcataatagccaaaaggtagaaaaatgattgagatgtccactgagaggtgaatggataaattgtggtccatacatgctatagaatattattcattcataaaaggtaatgaagcaccgatggctgctaaaacttggatgaaccacaaaaacatgctaaggaaaagaagccatgcatgaaagccattccttttatatgaaatacccagaacagataaattcatagagacagcaagcagattagtagttgccaggggatgggaggagagttgagggtttttaatggatacagagtattgttctgggatgaagaaaggttttgaaactggagagccatggtcttgcacaacactgtgaatgggctaaatgccactgaattatacatttcaaaatgcttaatagtatgctatttgagtttcatctcatttaaaaaaaaaaccctagaaagagaagagaaaaagtattacaataaaaatttcaattaattccatggaatagaaattttgactttatgttctttaatttagtgtagtaaacttataaattaaaaacctagacgttgggcgggcacggtggctcatgcctgtaatcccagcactttgggagtctgaatgtgatgggcgggtcaccaggtcaggagttcaagaccagcttggccaacatagtgaaaccccctctctactaaaaatacaaaaattagccgggtgttgtggtgcgtgcctgtagtcccagctactcgggaggctgacacaggagaatcgcttgaacccgggagttggaggttgcagtgagtggagatggcaccactgcactcaagcctgggtgacacagcgagactccatctcaaaaaaaaaaaaaagtagccaaacattcaatctatttggaaactaaatagcataattttaaataaccactgtgcttaaaataataaaggggatcaataaatattataattcatttaaatcatttaatttaatttacactatttgtaatacttaaggcactacttgtcaaaatttgaaagacaaagctaaagtactacttagagagaaatttactgttttatacatttttaaataaatttatatttttttctaaacaagtaaaggaaagaacaaataaaccaagaattctacataagaagctggaaaatgaacataaaaataagaaataaataacataaacaacaacaataataaattatataataaaaactgaaaagataaataaaatatagaaaagcaacaaaaacagagaactgaaacaaaaccaaacattagtctttgaaaaggattatgaggtaatactggggagattggaggaaagtaaaacaccgtctctatgttctcccctaatcttcattaaatactccagtgtttcctagttttacttttcctgccgtttcctcatatctttcttctgtacctgtgcttctaaactatgagaaattttgaataaggttagacttctgaaaaatgttcatagaaaggaaaaatagcagaacccatagtatttatttatttagcccataattatatctgtttcccctgcttccttccctccctctctccctcctttcattctttcttcttaaaagtcacctgtatttatgatttaatttttattatttatggtggacaacttgcttgttatcatgggacactgtatttctcgtatcttaagctctatagaaataatatataaagcaatgagtgaagtatatttttactgttaacatttttaacaaagagtcagattataaatcatgattttgatagggtaaagaaaaatgatcccaagccccactgccttcataaatgggcatgcacgtcagtgagttaagcttgactagttttatgatgcagtttgaagtcagaaaagattgtaagcaggtttctaaccttttttttaaaatttggctttgcatatgagtgactcttaacgcctagatcatttccaatggtcacacaccaggtactacttttttaaacacagaaatcataacccttttataactagtaaccactcttactccttgagaatagctaaaaaacctggaggcaaagctaggctgaaatattaattatgtgtatgttttgagtagtaatacattttttcaaccatttctcctgttactgtgaagaaagagaccacgttcctgttcaactgattggattcactatgcagccccagcctgtggtttcaactattcattgtgtagcacaaccatttccagaacataatatgtctattctcccttgggcctatttttattttctgggcgtgaacaaactattggaagtgcctctttgtcatgaataaagttctttgtcatgaataaacctctatgattcttatgagagaggagaatgctgggaaaatcaggaagaattggcttctttcacaactattaggcttctgctaacagttctttctcacctgcttctgtcttcagtagacctcacagctaaatttattgatatttccccctaccctaaccccaagctcaccctgacaacctggggacccaagtcttcctctagtccttaggaactaaggccaataaaggaagtgtatctatattcttgggtctatcccctagcttagaattggaatgaaatcctgattccctagctcagtaacagctactggactctctttcacttctatttccctccagttctctgaacttaactgatatgaaggtgtttagtatctgaccagcatccttcagcttttcctccttgtattcatgtacctctcatcttctaattcagtaattaattttacgaagacgtgctgagcacttccttttttccagtcaatcttttattttcttggagagaacaatagactcaacaaattgcctgctcttacagatcttagtggaagagaaagaaacaaataaatctattacacaagttctggtggacataagttgacctaatttagatatttgtccccacccaaattgatgttgaaatgtaatacctaatgctggaggcggggcctggtgggaggtgtttagattatgggggtggatccttcatgtcttggtgctgttttcaggatagtgagtgagttctcaagagataggtgtgtggcatctcccctcacctttctctctctctctctcttgctcctgcttttgcattttacataccagcttcaacttctgccatgattagaagcttcctcaggcctccccagaagtggataccactatacttctgtacagtctgcagaacagtgagccaattaaacctcttttcttataaattacccagtatcaggtaattccttacagcattgcaagaacggtctaacacgtaagtattattaagaaaaataaaataataaaccctcatgaactgaggaggccagtgtggctagagaatgttggatgacaggcagaatgggtgaggtaggcaagggccaggttctgtaggatccttgcaggctatgatgaagagtttacattttattataattgttatgggaagtcattgaatggtttttgagccaggatatgacatgatcattcctacattttaaaaggcctttctgctttaagaacaataagctgcagcaggacaaaagtggatgcacagagaccagtaaattaaaatgcgattgctatggtcaaggtgataaatactgatggctcaattagtgcatgataaatgatcagaattgaaatacacatatgaaagggataataccttggaattcttgattctgttccttgattgccggacctaactccatgggggtgatttgtgaagctattgagacttgaactttctagttgcccttgtcatcagcaatttttcaatctctttaacctctacctacaaatgcttcccaattttttctagtgataacagtagtctacttttagacttgaactttttgattgccctctctaacaacaaacttgcagcttctttgatcctggactgcaactgtccaatacttttcacctgtgagggagtctcttcttggtctctactcaccttaccttcctgctggccctgagtttcagaagtctttgtgggctttctagtgagcctgtgaactcacggaagccatctaaaaacttgacctgtgtaaatgttgtaaaatagtgactaagtgtaataggataaatccaaatttgctgtatatttttccttttatgtgtttaaaaatatttactatttccctgctcttacatggtttccatgtgtggaatacaattccttattctcagtcaaaaataaataacatgtctaaagaaaagataaaataattgtatcaaaagatacttgaaaaaatagtgggtagacgcagaatagtcaatgattcagttagtgcaaatattagaaatataataaatgaatttacaaaataattttttgttcaagtaattgaagtcaacagtgagctttctggcaaagaatttgataccattaaaaaagaaccaaatggaaattctagatttaaaaaaatacaaaatgactgaaattaagaaatcagtgactagcctgggcaagaaagtgagacccagtcttgaaaaaaaactaaaatattagctgggtatggtggtgcacacctgtagtcccagatcatgtcatccaattttcaaaactgtgtttttctgctgatctaaaaaacttgcatgattcccttattggaagagcaattggagtagatgtgttccacataccttggtaacagatgttatctccacattctgcaaattcctggaatcatttaaagtaagcatggtgtccaggatggtaaaatgtttcagccaaacatccatccaagagccagctgtttatgcagttagaaaaagatgccattcagagtcttttttttttttcagttacaggattctatagcatgctttataaatgctacaaatatttacttttctttcagaatagcaaacagattgcccacaaatttactaagcattttgtgtttctctttgcttttctttgatgaagaatgagtgttatttgaattggaacagagtaaatcttggtagacttttgggcattggaaatctgtaaagccacccctgtaatggcgttaaagagaccatattttttggatacttctgtttaactgcttggattttttcctggaagtcttttattaaaacccttcttaaagtttcctttcattccaatttcccaatttggatcactgttacttgctctggtgaagagaatgaaatgttaaagttgattatatgtcattttgccctgaaaaaagtgagttctactactctaaaaaaaaatcttattcttaatttttttttttttttacaaagcgagtggaacagaaatagaataatacaggaccaagtgtcagcaatatgttaattttcactgactgctggtgatattggctttttgtgtcactctgactcaaagcccattttaaaatttaatgtaactattataagtgtcttaaaatatgtcatttgggccatatgactcagaaaagaatgactttgcaggatatatgccaagggtgaatgcctgcataggaaagcaagctcataatcatgaaaatcattaatatatttttttaatcaaaacgcatattcccattcaaactattattatcctgaataagatcctcataatctctcacttaactatcacaataactctgattggtctctcttcctcaattgtacattcaccttttccaccacctcactttcaatagaggaaacactaaaccaataatagtcaagtgaggtagatactactatgggcctatctagattttgggggggcaattctgagtgttctagctacaactcatttctttcctccctctaagaaagaaaatcagaatgcaatctagtgagagtgttactatcccaataattgcactaatttttttgctgtcaatttgattttttaatcatggaagtatgatttatatgcaacaatattcaccagttttaagaattacaatttcatgagttaggacaaacatacagtcaaataaacaccatgacaatcatgatacaaaacaagcttgtctaacccacagcccaggatggctttgaatgaggccctacacaaattcataacatgagattttttttgtgattttttttttagttcatcaactgttattagtgttatatattttatgtgtagcccaagacaatttttcttcttccaatgtggcccagggaaaccaaaagattggacactcctgaattatgaaacatttctctcactccaaaaagtcctttgcctttcatttcctggcctcaaaccctttcccctgacaaacacagatttctgtatcttataataggtttaccttttctagaattcataaaattgattcctagagcacatatttctttatgtatggcttcttatataataatttagagattcacccatgttgttttattagtatttcattcttttgtgttgctgagtaatatttttaatggatataccaactttgtttttacatttcagttgatagacatctttttggccattatgttattgtccagtttttggctattatgaatacaactactttgaatattattgagtacaaatctctctaggagaacataggttttcgtatctcttgggtaaatatctaggagtggaactgtggttgtatgataaatgtaagtttaaatttattagaaacttacaaactattttcaaagtttcattttacgttcacacaaacattgtgtgagagttcaaatttcttagtatttttatcaactcttgttatatgactttttgtttatagcctttttggtggttatctagacatatagcactgtggttttaatttgcatttccctagtgacaaataatatggaatatctttcatgtgcttgtcattcttatattttttttgttaagtatctgttgtgtgcattctggacctaagacaccagtctttgagacattcttcctttttcttctctggtgtatatgtaccacattttctttatccaatccattgctgataggcacttaggttgattccatgtctttgagtgaacaatgctgtaacgaacatctgggtgcatgagtctttttggtagaacaatttattttcttttggatatacacccagtaatggaactgctaggtcaagtgatagctctgtttacagttctgcgagaaatcgccaaatcgctttccacagtagctgaaggaatttacattaccatgtggttgtatcagcctattttctacccgtaaaatttggagacttcaacagccttctttcattttgtatccatcctctctttgtccctttcagaacctcaggcccagagggtggagccaggagccatagaggattattcacagaccttgaaacctaatggagtttacccagttggattttgagggaactgagactcagggaggtcacattgctataggaatagaaatatgagtctcactataaagtcaatatatttttttcctttaccttactgcttttggggtatgatgggttatatagtatattttttgataaaagggaacatattagttcattaggagaatatagtattttctggataatagtatctgagaggaaattatgcttttatggagaatattgaataatgattaaagagtattcaacaatggtttgatataagatacagaaaatttattcatttcttaaaatttcaactttaatacattgtgacattaatacatgtctaaatgaagatctttatactaagcagatgagaagtacaaatatagcttttgggttagataagtctatataagacagatctaggagacccaaagggatatatttgtaatgtccattaaaaaatgccaagatatactgcccaaagcaatctacagattcaatgctattcctgtcaagctaccaatttcatttttcatggatctagaaaaaactattctaaaattcatatggaaccaaaaaagaacccaaatagccaaagcattcctaaacaaaaagaacaaagccagatgcattacattaccagatttcaaactatactataaagctatagtaaccaaaacagcaaggtactggtacaaaaacagacacagagaccaatggaactgaatagagcactcagaagtaatgctgcacacctgcagccatgtgatcttcaagaaagttgacaaaaacaagcaattgggaaaatatttcctgatcaataaatggtgctgggatagcgggctagccatatgcagaagaatgaaactagatccctatttttcactaggtataaaaatcaactggatggattgaagatttcaatataagatctcaaactataagaatcctagaagaaaagctaggaaacaccattctggacattggccttgggaaagaatttatgactaagtcctcaaaaacaatgacatcaacaacaaaaaaattgacaagtgggacctaattaaactaaagagcttctgcacagcaaaagaaactgtcaacagagtaaatggacaacttacagaatggaataaaatattagcaaatacaaatcttacaaaagtctaatatccagaatcagtaaagaacttaaacaattgcacaagcaaaaaacaaataaccccatttaaaaatggacaaaaaacatgaacagacatttctcaaaagacatacaagcagccaacaaacatttgaaaaaatgctcaacattatcagagaaatgtgaatcaaagccacaatgagataccatgtcataccagtcagaatggctattactgaaaagtcaaaaaaatagatactggtgagattgtgaagaaaagagaacaactgttggagggaatgtaaattagtttagccactgtggaaagcagtttggagatttttcaaataactcaaaacagatctagtatttgagccagcaatcccattactgggtatatatccaaaagaaaataaatttttctaccaaaaatatgcatgcacacattaaatgcagtactattcacagtagcaaagacatggaatcaaccttggtgcccatcaatggtggattggataaatgtgatatatacacactatggaatactatgcagccataaaaaagaatgaaatcatatcctctgtagcaacatggatgcagctagaggccattatcctaaacaaattaacataggaacagaaaaccaaggactacatgttctcgtttataagtgggagataaacattgggtactcatggacataaagacggcaacaacagaaaccgtagattactagagcagggagagagtgagggagccaaggactgaaaaactattaagtactctgctcagtactgtgatgatagtatcactcacacctcaaaactcagcatcacgcaatatactcaggtaagaaacctgcacatgtacaccctgaatttaaaattaaagttgaaattatttttaaaaaaccataagttttaaaaatataaatacataaaaatagccagaaattttatgaagaatgcctaacattatatctgattattccacaatatcaataatagcttctatgatccgcagcagctttccaggtaatgtttttgtttgtttgttgattggttggtgttttttcttttctcctggttactctatttcattagttcaatatagtttttatgttttatttgtttttttttttgccattgtcaaaagttaacttcagttatgcacttataccttaaaatatggttaatatccaagtactaaattcaaatatcttgtgtaagttctctttagatttatttaagaaattgttagccaggcacaatggatcatgtctataatctgggcacttcaagaggccaaagtgggaggatcactggaacccaggaagtcatggctgcagtaagccgtgattgtaccactgcactccagcctgggtgacagagtgagatcccatcttaaaaacaaacaaacaaacaaaggaaaaaaaaaaaaagaaggccaggcactgtggctcatgcctgtaataccagcactttgggaggcctaggcaggtggatcacctgaggtcaggagtttgagaccagcctggccaatgtggtgaaaccccttctctcctaaaaatacaaaaattagccggccgtggtggcccacacctgtaatcccagctattcaggaggctgaggctggagaatctcttgaactcgggaggcagaggttgcaatgaactgagatcgggctgttgcactctggcctgggcgacaagagcaaaactcggtctcaaaaaaaaaaaaaaaaaagaggaagagagagaaagaaattgtcattaaaagcatgaggtaaatttccaccgagaaaatgttactatttcagttaaacaattgtacacagaacgatggctaaaactgacatttatttctgtattggtcaaattttaatctgtcctttaataaactcctctgctaagaagttgattcttttcttattattgaatcttattatgtctctttgataatcagacaatgtggtataaatcctggttttaggctatcctttaacttaccattaatttgctatggattgtactttggtaagtcttataaaactttcttctatgtaactctgagaactatcttcagatgatcaactatttatatagggagtctaaatttcagattataataacactatttcagtgcaatagctgatatttatctagtacttactatgctaagtacattattccattagattcccatatagtctatgagatgaatactattacatcaattttaaagattaggaaaatgaagtttgaagaaagtaagcaacaaatttacataactcctaaaagatggagagacttatgtttctgttggattttggagcccacactgccactcccatatggttcttttttttttttttttttggagacggagtctcactgtgttaccccagactggagtgcaatggtgtgatctcggctcactgcatcctctgcttcccagattcaagcgattctcctacttcagtctccctggtagctgggattacaggtgccagccaccatgcctgggtaatttttgtattttagtacagacaagttttcaccatgttggccaggttggtattaaactcctgacctcaggtgatcctcctgcctcagcctcccaatgtgctgggattacaggtgtgagccactgcacccggccactcccaaatggttctgatgccttaagtggaactaccattgagtcaacacatattcatattatgctgactctatcccagatactgaaaaggacactaaggatgcaaaggtgattccaacagacatggtacctgtctagggattgttcagtctagacacaaatgacagccatggaatgctccaattaaaagaaaaatattttgagtaaaactatttaaaacactggtaatcacattatcaggattcattcacggccgggcgcggtggttcacgcctgtaatcccagcactttgggaggccgaggggagtggatcacgaggtcaggagatggagaccatcctggctaacacggtgaaaccccgtctctactaaaaatacaaaaaattagccgggcatggtggcgggcacctgttgtcccagctactcgggagtctgaggcaggagaatggcgtgaacctgggaggcggagcttgcagtgagccgagatcgcgccactgcacaccagcctggatggcagagcgagactccgtttcaaaaaaaaaaaagaaagaaaagattcattcacagtaaacaaacaaacaaacaaacaaaaaactcttcgttgatttcaatctggaaatgaaaaagaaaagaagaaaaggaaaggaaaaagaattctgactcattgatagatttgtttagaaatgtttttcttttttctgttagaaagctcagagttaaagagtggacaagagaaataacattttttcaactcttccattttctaaataaaacactgccactatacattggagtatgggatattatttccactttaaagataaggaaactgactcaaatacacggaaaacaggatttagtaaacgtgatttatttggaacgtgatctcagatccacagaggtgagaaaaacaggaaaggagaaagaaaaagtgctgattgagagtgtggtctcagctggagacgctcttaactctgattgcatggagacactcaggagcacaaattgcaccacggggttagtccatcacggggttagtccatccaaaagcaaggaggcagcctttggtacccctgtgccagtcaatattcattaaagggcagttttttcaaggaagtcggagctagctgctggacactaacagtcaaatctcaaaggagctgggagagaaatgcacaagcaggtaagggggttctggttaggggacctacaccatccactatgcgtttatattttagtgcacctacagtctatagttgggtaccgaataccatcagttgagttgctttgaattcacactcgtgtattccccaggcttaattaagagcacgtggtgaatgggaggtggtaatgactcagtataagattacctagaggctgaatacctagtgggccagaaagctgttttgtgaaaagataaaggttagattttgcctttggtcagttatttggaattatacccaacaccttacttttccaatcctttagttaacacctactataaaaatgctgcctaatataattgcaatgataaagcctatgtaaactgtagttttatatgagttgtttactcctaattatggtgttgtctgtcaatatggagttaccaggtggtgtgggcagtcacctagaggtttttccatctgaaaaagattgctttaagatcatggtgttttggactctctcactatttttttttttattctttatcactgaagaaagaatgaggcctatagtagtatatagaacaccttattaaaatgaatcatttacacacatcttttatctaaaaacaacattcaataagtgtgaattgaatcaaacctgttgggctgggataaaagatgtaaaatccaaccacgtgattctctcagataaatgccacaatacacattcctgaatatgttggatttagtaatatggtgcatttagtaaaagtgttttgttttttcctaataaggcctttttgcttgaggaaacaaaatgcagaaatttttgttgttttccttctgatttgcttctctttgttgttttccttctgatttgcttctctctggttgtgtttatactgactactgaaataacagagttcaatacccagacaactggttgaatgttaaatacagtatgtctctcccaccattgtgtatatgaaggggtatcagtgttttatttgaaacagtacgtcactttgggttttatcctatgattatctaaattagagtctatatttaactgcaatgacaacagccatagcaacccatggtttagtaaagccaaggataactttaaaaatcacagatgaaagagatctgaggttccctcttatgtacactcttacatggttttgtttactagccacattttagagaaatatgagtatttcatccagaatagaatacacaattataattcagaaggaaaacatggaatgaaagtaaaaagaatgagaaaggcaattgaaagcaaacaagaattctagtataaaaatgtgttataaaatgtttgaaaaatatttaaatcattaaattgattccattcctaacaaagataacctttaagaaattagataactaatgacaagaaataaagtttcatttcatgggcctttaagaaaccataatttatttatagacatttggaagcagtcagtatattcttttgaccataggcaccagtcttaaaaccatcacatctctttcagtcttcgtaggggcattgacaacagagtttcagtgtagttcctaattaaagattaagaatactttgaaaatataaaacaaatgtatattttttaatgtatcatttggggccttaaccattgaggaaatcatagagaagtttgtcgtgagggacaaggggaatataccacacgtttacaggaaacaaaaaggtaagaataagttttataattttattctttggaggtcatgaaaaaaatttcttaatatctttgcaattcaccagttgtattttctcctagaaaagaaaatgtagcaaatttatttggggaaataatatatttaaacaatgtaatgcatgccatataagaaaatttttagggttttaaaattagtatagctgtgttgacttatgaaaataaaaaaggtatcttgtctgtccagaatcattaggccataagtcatttggaagataaatattttctaatgagttaagaatttatacctttactcactataaggatttgcttatattttaaatattttatagaagttttttctaaaatattgtgtatgaatgtgtgtgtgtttttagagtatggtgtgatgaatataattcgagcatcatgctgagagcaaaaatagggcttggcattgatggatcaggattctagttttaccttttagcagcttttgggaaagttgctaaaatagttctgagtctcaaaggttttatttgtttttgtttattttgttttagtctgtgatgtagggataatgatatatttcttgggattgttgtaaaaattaaatttgattgaaattacacaagttccctggtactcacccattccttagatgacttgaaaccatcattgtgaacatcagttaagagatttgtttgaccatcttctaattaagactgaggttttttagttcctttgtctgattaaacattttttctgtttcttttgtcatttctcctccaatttgctccctctaatttacagtaagccttgaaaaacagatatatattttaaaaaggaataaaaatacaaccatccaaaaagccaactaaaaagtaattctttgaaccactatactaattgtgtacaaatgtgctgttcgattcagtaggtccagtccacattttaattttaattaagagttcagttcttgagtttcacctttcaaatgggtgataaccacagtagctagtagctgctgtactagatagcatagagaagcatttcgatcatcacagaagattctgttttacaatgctggtctacaatgtctaaagctctgaatttgtgttgtggaattctgaagatgagtggaatgtggctcttgctttcaatgtaactcaagtctgtgaaagaaaatacttaggggaaatgtttggaaaatatgaaaaattcagtgatgtggatgatgactatttgacaaacattggggagttagcgtaaacagttcaggataaaaggaagatagaaatgactgagctgaaacctaaagcatattagtgatatttgtgaccttcccagtgcatgaaagattataaaacattccaatgtgggcccacttgcaagaggaggcaaggggaaggggcaattctatttgtatccagaatgttgtatttttcttttaaaatgttctgtattaaaatatttttactataaatatgtataatttcaataatacaagttaaaaatttattttaaagaatcttgacctttgtgtaatagcattgactttctgccccttttctcatctctgaaaactcttcctggcatcccttcccatttttgtcttttagctctcccacactaagggaggcatctaccctcctgtccaagcttcatgtacgctcgtgagcttgaatgccgtttctttttatctcaaatatcacctgatattttattctttttctcttctctcttcaaacataccttctctatgatttttcccttcagtctataaatacatgtaaggtttctgaatcaaccaaccccctgttgatcctacttttctgtcagtctcccttttccaccaaattttctaaaaacatggcttcaatttgttgtctccaattcctcacttataatttactcttcaactctgaaattgaatttttcctctaagcatgaaattgctgtatcatttaccaaggtctccagttattgtcatcaacaattaatcttgtcaattctagcagaccatttatagtttatctttttcttgggaaatatgttgatcactccgtttacctatgttaatgacaccacaatctgtcttatgtatatatgagacagagatatctgagcacatctacaattgcccattaagtaaatattttcacaaggatttgccgtaggcaattcaaacttttctttaacatgaactggtcatctcaccaaaatttcctcctcctgtcccaggtagcaatgattgatacctccttaaagtccctctaatccaatccatcctttccacccccactatcattgacttcatgcaaatgtaacttactcacaaagtctctgactgaatgttcgcccttctccaatccattgtccacgctgcctcctgggtgatttttccagtatcaaatcagctgtatcagttccttttctgtttcctttatttttaacttgcttttctgctacagctctctgatagtttctctcacttttaaaaatacctattgcctaaataaataattttttctttttaagagaaagcaaacacagaattttcaaggttttagcactacattgagaatctcctgaaaagcatccaaatatgacacttttccttgagtttcaccttcccttgagggtctgtcacagtcacactgccaccgccaacatgctaggttctgaagatgccacttctctgataaattttggtttcagacaatacctaatctctttacacaatactcagagaaggaccaagtataaatataattataactaaatgttataaaatatataattaaaattttagggaggactgtaagaaaatcagcaagggaaatcacaaaagtaacacttactggttttattattttaaatcttgctgccttctttgtttttaaaaagctctatagatctcttaggccaacgtgttacatgaagagaaagtaggcttctcgcatagctgttcaactgctttcctagtttatgaataaataagccaagatcaatagagtgctgtttccattccctctctattggcttgtgattgtctatgcagaggctgatgccaggctctggcagaacattaatgtggactcacagttatggatacatgattcacatttaaaaatccaataagaaccagagttggcaggcacgagcctggcagattggcaattattttgacgatgtgaaagttgttttttaactttcctataaaatacatgtgcatgatatgacgctgcttttagaagaattcaatgaatatttcgtggctgttgtgaatagaaagttgctcttgataatgcaactaggactagtctcaagacacaattggctcagtggcctaattactgtcaatgccatcagtgagaagggtttattattagttattctcaaattactatcttaaataatttccaatattctatcaggtcgtggcagagaactccacacagaaaatcaatcagcttaaaaacccgaagacaggttttgcagttaatttgtatgggtttgggtaaaggggaaccaggagacatgagaatgccactttaataaaaactacatggtcacatggtcattaattatcttatgtcttaggctgggcacagtggctcaggcctataatcccagcactttgggaagatgaggtgagagcctcacttgagcctgggagtttgagaccggtctgggcaacgtagccagaccccaattcacaaaaaacaaaaagaattacctggctctggtggcttgcatttatagtcctagctactcaggaggctgaggtgagaggatcgcttaagcctgggaagttgaggctgcagtgagctaggatcactccactgtactccagcatgggcaacagtgagaacttgtctctcaaaaatatatatatataaaaattataatgcctcattaaattaaaatttttccttataaaatgagactgtcccataagaagtatgtgaaacattatttaatttctttagttcacatgtggattaaatctttcatgtcacgagcatatctgcattggcctatgtgtgaacctatagtgatgtttatgttcataataatgatcttgaaacttttcatagaaaatccttatattttttaagacattgttttgtatagtttcaatgttaagattaatttaaggttaaaattaatttaattgcaaccagagtattttattttattttattttgaaacgaaatcttgctctgtcactcaggctggagtgcagtggtgtgatcttggatcttggctcactgctacctctgcctcccaggttcaagcgattcccctgcctcagcctcccgagtagctgcgactacaggcatgtgctaccatgcccagtgaattttttttttcttttttgtatttttggtagagacttggttttaccatgttgaccaggctggtcttgaactcctgacctcaagtgatctgcctgcattggcctcccaaggtgctgggattacaggcatgagccacagcacccagccctcaaccagagtctttttttttaacttttaggttaaagggtacttgtgcaagatgttacataggtaaatgtgtgtcatgggggtttgttgtacagattatttcttcacccaggtaactagtacccattagttatttttcgtgatcctttctctcctcccaccctccaccctccaaaagtctccagtgtgtgttgtttccctttatgggtctctgtattctcatcatttagctcccacttataagtgagaacatgcggtatttggttttctgttcctgcattagtttgctaaggataatggcctccagctccatccatgtccctgcaaaggatgtggtctcattctttttcatggctgcatagtattccatggtatatatgtatcacattttctttacccattctatcattgatgggcatttgggtttattccatatctttgctattgcgaatagtgctgcagtgaacacacacgtgcatgtgttttcataatagaacaatttatattcctttgggtatatacccagtaatgggattgctgagtcaaatggtagttctgtctttaggtctttgaggaattgtcacactgttttccacaatggttgaactaatttacactcccaccaacagtgtatatgcattcgtttttctccacaaccttgccagcatattattttttgactttttaattatagccatcctgattggtgtgagatgctttctcattgtggttttgatttgcatgatgttgaacttttttttcatatgattgttggttgcacgtatgtcttctttcaagaagtgtctgttcatgtcatttgcccactttttaatggcattgtttttttctcatcaatttaagttctttatagatgctagatattagccctttgtcagatgcatactttgcaaaaattttctcccagtctgtaggttgtctgtttactctgttgattgattcttttgctgtgcagaagctctttagtttatttagactccatttgtcaatttttgcttttgttgcaattgcttttggtgtgtttgtcatgaaatctttgcccatgcctgtgtcctgaatggtaattgcgtaggttatcttccagggtttttacagtttggggttttacatataagtctttaatccatcatggttaatttttgtatattgtgtaaggaagaggtccagtttcaattttctgcatatggctagccagttatcctagcaccatttattaagtagcgtatccttttctctattgcatttttgtcatttttgtcaaagatcagatagttctaggtaaatggtcttatttctgggctctctattctattccattgttctatgtgtctgttttggttactgtagccctggtagtacagtttgaagttgggtagtgtgatgccttcagcttttttttttttttaatattctcttaagagtttattataaaccagtttcatgggccacaaggaaataaaaggactatgtacagcctttcaggaaagaggcagggagctaggagggccaagatgagtctagggtcttgatgggcacattctcaggggatggggctctgtaaggaaaaccagacaatctggagagactccgtgaacagcagcataacaaacaaataggtctgtggtaatgtggccctgaggagttgagcccatgtctctgtggagctacttccatactctgtggccaagggtcaaagacggcctcgcatcccatggggaggaggctgcattcccagaggggatatgcccactggagtctgtctcccaggggagatccccactgggggaccataggaggcctgacaccaggaggtaggcccatcacaccttcaagagaaaagccccaagaatgtaactcaagtgtctgtcttggaaagatatcaagaaactataaagctgtccaccaagttctgagataggtggacaattccaccctctcagcacctcctagaaaactgacatttgagcctaacacctagggttcccaatggctttgctctttttgcataagactgccttgactttagactgccctggctattcaggctcatttggctccatatgaattttaaaatagatttttctaggtctgcaaagaatgtcagtggtagtttaatgggaacagcattgaatctataaattgctttgggcagtatggctgctttcatgatattgattcttcctatccatgagcatacaatgtttttccatttgtttgtgtcatctctgatttttttgcgtagtggtttctagttctccctgtagagctctttcgcttcccctgctagctgtattcctaggtattttattctttttgtggcatttgtgaatgggagtttgttcatgatttggatctcggcttgactgttgttagtgtataagaatgcaaccggagtcttttacaattctaaaacgagtattctttgaattgtaaccttcgtcaacaagtatatattttctgaatcacagagctaaaaagtacctttgaaattatgtagcttattgatttacaaatctgtttatggatcctcacctggggaggatttttgtttttttaaaaaagatagatctctaggacttacccaaagctgactataatttgagaattagggttcttaagaaattccttaaatatgacaatgctgatgaatggctagtttaggaaactaagaataaatttattatttccagtttgtagaagattgaggcagaccaaaggaggtaaagtgacttccccaaataacagcagatctgacacaagattctaagcctctcaacttctaaacctgtggaatttctatgaaaaaaatacagaattttctaagttatctgaaagacgtgaattagctaaaagaattacccaaaacagtggacaatgtgtagtttctgtgatttcatataatgagtgtctaatagatataaagttgtttgcttctttcttaggtgctattggtccacattctgagtaaattatgtgtttgcttgaaatttgctggcagggattgaggccatgccaacaaacgttacttgtgacaagagcaagcatattaatgtcaataaaatattcatattataatagtattttactttcctgtaattttctaagaaactcaatgtgatattttccttcaacttccagccttgtggtttttataagctggattttcaagtgacattgaaatgaagcattatgttctaaaaatatattcacttgttttataatacaacattcctgagacatgagcaattactttttatgctgctgcaaagctacaatcatactaaattctagccaagtcaataggttcaactacagcagccattacatgaatcataaatcatggaaaaggacccctataattcattgcgtttttttttttatctctgaagaaccttgcattaataaagcagctaaaatctatgtaatcttcattaatttctacctgttgacacccttcagttttaccttagaacccactgttgataataagcactctgaaacatttgtatggttcagaattcagctctaagtgcatttggttgaacagcattctaggtctttaaaaaatgatttgtttacaatagtaattatttattctcatgctgaattgaaattgcagttctctccatgggaaaccatcgctattccattatttattggttctagcgagtacattaaactttgataaagtaggcaatccttttattttgccattgtaaagtgtcttctaaaatataccagccagtgcactttcctgctcttaaatgaaaagcaggggaatgtctctctggccattctgtcatcagtgtgctttgaagctttttatgaggatcaataatcatggtatatgccagagaagtaaagcctttgaagaacagagtactagctctgttttgaaatagcagattcaggttcaatgcaaccactgcaaaatgaggggcagaaatagaacatctccaaggaatttttagctccaaaggactatatgattttgtaaatgagaggttggacatctgtactgactcttgtcgatcatcttaaatttctagcatcaacctcttctgtcatctttagatttctattagaagtagagaggatattctaattaactgaggtttaatcttaattaactagtaaaaagaataattaatcagaacactgattcgttgagcatgccaactgatcaagtaacgtgaacactatctgtgcaacaaacatgaaaagaaatgcctgataaaactcattcttgttctatgctcctctcatacctgttcatgttctcttaccttgtctaccattcttttattttcttttgtttgttgagaccgggtctcactgttgcctgagctggagtgcagtggcatgatcatagcttacagcggcctcaaagtcctgggctcaggtgatcctcctgcctcagcctccggagtagctaggactaaaggcacataccacaatccccagctcttaccattcgtagggaaagaaatagagcagaaatgactcagactttttacagggcttcagatagttttgtccttcttttcctaatatgtagtcagaaaaatgggcaaaaataattagataaataacctaatctatttaagtttgttctgagatgttttatagatattttgtagaatcactttgttacaaatgctttgaggatatcctatgctattattggttgtgttttaaaaccatgcttttgccaggcatggtggctcatgcctataatcccagcactttggaaggctgaggtgggcagatcacttgaggtcaggagttcgagaccagcctggccaacatggtgaaacccgtctctactaaaaatacaaaaattagctgggcatggtggtgcacacctgcagtcccagctacctcggaggctgagacatgagaattgcttgaatctgggagacagaggttgcagtgagctgagattgtgccactgcactccagtctggtcaacagaacaagactccatctcaataaataaataaataagacaaaataaaaccatgtttctaaatatggagtacattttaaacataaaatatgtgtaagatataaggaatgatgattcaaatgcacactgtgtccaacatttggctttagaaatggttatcatttctatctttgaactatcctatgtcattctgaatttcattccctttcctctcagctcagaggaaattaaatcataaattttgtgtttaacattcctttgctttgctttttgacttttaccatatatctatgccaaaacagcgtattgttttacttttgcatagttctacatagaaattacattgcacacaattgtctattatttgctttttaattttattacacattatgttcctgaaattcattcatattgttgtttgaggatacagtacatttattctcacagtcatccagtgccaacacaatgtgaatgtagcaaaatttatttacttgttaatgtacacagtctacttctgtaactattcaattctattatgaatatttttgttcaaatggacatgttttcaaagttctctagggtaaatactcacctgttgaattactaagttacaagttcagcttcgttaaataatataaatttgttttccaaaatgcttgaagcaattgacattcacatcatcgttctagaaaagtttaattcacatcacatctcactaacccttaatattgtcagactttcatagttgtcaattttgtgagtatggaaatgtatttcatggttattttaactttcatttccccaattaatgtttaggtagaatataattgtgtatgtatatttgtttttcatgattcctcttctgtgacataccttttcatggcttttgctgcttctttctgttaggtcgtatagtcttttaatagacttacaagatttcttcatgtattttggatgttacctcatcttctttcccctagttcgtgacttgtgttttactttatcgatggtatcttttgatgccataaaattgtattaatcatttcctgtgtgtgtgactttttgcatcttatttatctttccctgacaacataaagatacatttcatatcatatatatattcatattatatatgaatatattatatattcatattatataatatgaatatgaatataattatgaatatataatgtattcacatataatatgaatatataatgtattcatatataatatgaatatataatgtattcatatataatatgaatatataatgtattcatagattatatataatatgaatatatataatataatatatacaatatatataatattgtatatatatattatatgtatataatatatatacaataatatatacaatatatacaatatatacaataatatatatatattttgagatggcgtcttgctctgtcacccaggctggagtgcagcggcacaatctcagctcactgcaacctccacctcccatgttcaagcgattctcctgcatcagcctcctgagtagctgggattacaggcacctgctaccgtgcccagctaatttttgtatttttagtagagacggcgtttcgccatgttggccaggctggtcttgaactcctgaccccaggtgatcgacccgccttggcctcccaaagtgctgggattacaggcgtgagccacgatgttcggcctcatcttttaaaagttttatagcttaaattacacatttaagtcttatacagctaatagttttatatgtaagaatttaatttttttgctttcataacaataaacagtcgtcccagtaccatttattgaaaactctttttccactaacctataatgccagttctgttataaaccaagtttctgaatatgagtggggctctttttctggaggggaaaaagcaatgtctgtactgttcagttggtttatacctgcaccaatactagattatcttaattactgcaaactttatattactctcaatacttgatataaagaaatttttcctacatttttatcttctttaacagtattttacctattcttgggtctttgtacttctacatatatttttgattcagcctttcaaattccaaaagaatcatcttttggaaggtcgactgacattggtttcaaactattgatcaatttgagaagaatttctatctctacaacattaagactctgaattcattattcatggtatattttttatacagtgatgtgccacatagtggcatttcaatcagcaatggactgcatatatcatgatggtccaataagtttataataatgtatttttactgtacctttttcatgtttagatacactaagataaacaaatacttagcattgtattgcaattgcctttagtattccatacagtaacatgctgtacagatttctagcctaggagcaatagcctactacataaagcctaggtgtacagtaggctataccatctaggtttgtgtaagttcactccatgatgtttgcctaatgctaaaatcgcctaactacacatttctcagaatatatccctgttgttaagtggtgcatgactttatcttggttttttaaattttttcagatgattatgtacatctataaagattttgtaacttttgttaaacttttactatgtattttacatttttaatgatattataaatgaaaattacattttaagttaatagactacattttttagaacagttttagatttacagagaaattgagcagatacaagaaaatttccatctacctcaatcctactccacacagtttccccagttattaacatcttacattagtgtggtacacttgctcccattaatgaaccaatattgatatagcagtgttaatgaaggttcaccctttattcagatttcatttgattttacctaatgtcctttttctgtttcaggatcccatggaagacaccatgttacatttagtcatcatgtctttatagggtcctcttggctgtgacactttctcagactttccttgctgttgatggctgtggctatttagaggattacttactggtcagatatttttgcagaatgttccgcagacaaaattcatctgattttttttatgaacaggctggggctctgaatctgggggaggaagaacacaggggtaaagtgtcactttcatcatatcatattaagggtgcttatctctacatgatttataactgttggtataacctagatcatctgtctgaagtagtgcttgtcctttttctccattgtaaaattattctttcttccccagaaccctcattttgtacttttagaaggaagtcactatacgtaacccacacttcaggatggagagttatgctacctccaaaattacattttcctttctttgagacaggggaggaaagcctggctgagtgcagtcatgcaatcgtggatcactgtagccttgacttcccaggctcaaccaatcctcctgccccagcctcccaagtagcttgcaccataggcatgtggcaccacacccagttaacattttaaagtttttgtagatatggggtctctccatgttgcccaggctggtctcgaattcctgggctcaagcctcccaaagtgctgaggttacaggtgtgagtcacagtgcccagcccaaaattacattttctaaattgcattattatcattttttgctagtgaacagaaattagtatatttattttttataaccagaaaaattgctgaactctctcattaatatttcttttttatgtttcttaatatagacaataacaccctctgcaaatagtattcattttggttcttgcattttgatacttctttctttttatttccttactctgttggccagatgccccagtacaattcttaatggaaatgttgatattgaatatccttgtatttttcctgttttatccatatatctgctttaatttaaagtgtaccttggttgattgtatcctcaagaaccttgcaaaagcaaatttgggaaaacagattttttaaaccaaatgcggtagattatattattttgcagcgattaattttttttccaaaattcacccttattagcatcaagctctggttaagttacctaaaacacaacgacagttgaattttgtgacagagctaggaagtatacacctttgtttttgtgcaactgtcacctctcctgcctactgtgtatccacaatacactttccattatttcattttctctttttaactcctgtcatctctactaagattgaaacctgccttaattcaatttctgctccctaaacaggcatcctgacggtcatttacatattggagaataagacttttttcaaaaattgcagctctagtaatatttctatcttactaaaacatcttaaatgtgttgccttaaagttctgaacctgatgttcaaaggcctcttcaaaataatgtcaatgtttattttttcaacatttatcagcattgccctcttaaatttctgaagatatatttattacattcacagtatgatttgatagtaaagtggaatttaaaatggatttttacctcatacaagtaatgtttttcagaaaacagagaggatatcacccttttaaatgttctacagtaatatgttaatctgctcacaatgtttaacacactaatcccagtaagggaaatcagaaaactgtttttttaacctgctgctgacctattgtactctcttgtgcaagtctgcctgttcttgtttgctttcctgtaaaacagtaatcataaaatgtttaattcttgactatcaacaggtgaattatattcattgtggataaccttgatttaaaatccttgttggcttaattacacagagtagtgggaactatctttagctgaaattatatactaactcttacttactttcactctttctccaagcaatttactgcccagcaagaagcactttttatgaaaaaataatattttcatatttccagaaatctctgaacaattatttcttagtaatatttttaagctgatacatttttcttactttgagaggccatgcttgttatctctagctcagtgtgaggagtaaggatgagaggtgtcaagaaaaaaaattaagtaatgttttctcatctaatcaataattttattttttgaaacagaagtgccttgatacttaatggtggacctatcaaactatacatatttacctgggatcatttcaaatttagtttgaatgtggattacagctttcctatttctgtaaccttggttatattacttaatctctctcaacctctgtacgctcatgtgtaaagtgagtattatacatttttgttttgtacacaaagtaccttaaataatgactatagagcacttagcattgttggagaaaccttgaacaaacattccttaagtaccaactgttactatttgcttaataaattaaaagtccaggccattaaacatgcacataatctcagttttagaaatactcaatttctgttgattctttgaagagacaaagaattatgattacttcacattttccatggaaggactgtaaacctctgaagtatgaaagatttttgtttgacccaaacatatatattctgttttgtataaggaattcacttttaagaaatcatgtacaaattgacatttttaccattaaatgaattttaataagcagaagatttcaccatttaaaaattatttcttatactatgtagccacacttcacttagaagatgcatcagacatgtggaataataacatttggaatagtcagagttagaaaacatgagaccagaggttctcaagtgtggtgcttcaactgcaccatccgcatcatctggggccttgttagaagtaccaaatcttgggccccataccagacctactgaatcacaaaccctgtggttggaaccaaccactctgtgtgttaactagtcctccacgggattctgatgctgctgctttctgggagcaattgcattaaaaataccaaaaggtgagaaacaacactgggatgcaattgtaggaggaaggagggagtgatgatatcttctttgcttgacgaaaatgtgagatagacactacttttgagctggtaacttgtccttaagctgagaggcaatgcagaacagaaacatttagtctggaaaaattaggaagtatttccaggaaaacaaggtgggaacgagagttaggtctccacatcacatttagggagttgggagttctttagaattcacagaacagaggacaagagagaacttcaatgtatttagttgaaaatatttctgtaagtttctaggctgcagagtcggttttaaaaaatcaaaaagtcactttgtggtttagcatataattaagaattttccagcatctaatggttcaatagtgggaccacgtcattcaaaagcagtgatagaaaactcaagatggcgtggggaattgctattctcaaggtcttaggatttttaaattaaattcctaattaaagtaagataaagaaaaaggtgaagtctacatctcaacaattaacataggtgtaaattctttaaactcagtaatttactattcctatctcctggtcactaagaaatatttaaatatgtattccaaactgggtggattagaactaacctacttttaaggtattcttttcctgattgaattatgtgaaggtcagaatttaaaacaaacaaaacccccaaaatgctactaacagatgaacgtgcgcatttcaaccagagtgtgctgctttgcttcactgagcaaattcgtgattgccctgaggcaaagcaattccctttcactcctgaccctctgctctcagccctgctttgcctgctatgaggttttttgagttagaaatatgtgatcctaagcatatgtttggaaataatatcattctggcttcaaggcataacttctgttacttaaattgtcaacttgtatgtgcatgttaagacagaaaggtctaggaactattcggtatcattcagcagcctgctgatctgttctgctaacactgtcaccttctaaggagaaaacagacacagggttttgctttgttttttaatattttttttctcttcttcctttgtctttagtaagtattcatctttctaatcagggcaaggaagtcaccagggttataagaccatttagatcttattaaagctttggggattaaatttatcttagatgtgaacatcaaatataatccctgaagtgtattaaaaatggttttacccatcactcatttctaaaaattgaatttgtctgttaatttttaccaacatgctattttttaaaactgatttttaatccccatacaattgtgtgattcttccagacttttcttcatgtcactcttgaatttctttgggcaaacttctcgccatcttcaagctccttacaccttctctagttaactgacactcatcctcttcatgattccacctgcccctcagaagcccagcttgtggagaatgctccttctctcaccttcgatgtgccacaggatctcaaaacaagggtggtgctatgatttgaatgtgttcttcaaagtccatgtcttagaagtgtaatccctaatgcaacagtgttgagaggtgggacctttaagaggtgattacatcaggaggactctacccttataaatggattaatgtcattatttcaggagtgggtttgttagcacaagactggggtccttttcataaagattggctagctcctctctctctcccaggtgatgtctcctgccttgttaagatgaagcaagaaggtcctcataagattctggtctttcgatcttggacttggatcttggttcagcccccagaaccatgaaccaaataaatttttgtttggtataaattgcacggtctcacatattctgttacggcagcacaaaatataataagacagccactaaggtggcttccaaaccactatgcttgctttctttaaaaaataattttaaatctaattatttttatcaaaatgaaacatgaatatactttaaatttttaaatagttttacaaagcttattatttattataatttaaaaaaaaaacagtagtctccaaaataccaacccacatccccagtccagagataacactttcatttcttaactttttctttttggaatttgctaccagttggctaactagcatctctatataatttttttcttttccttccattttttatattagctattgacttcctacagaggaagagggagaccttacatttattacattaacttaccccatctaccccgttgtcctttatcacctacaatccgccaaatataggtacaattatttatatgttatttaatatttagattaagattgtttatgttattacgatcatgagattatattcacagctgagtcatgtagtgttctacacttacatttctttccttgtatgcttttctgcatgatatttctccctccagtagttaattgttatttctctctctgtgaatctttagttttctgtttaactatcactatgtaactatccacaaactctttgttatatgtggaagtcacatatcactgcttaatttacttttctgttctccatagctattgttacgaagcctcgccttttcctcacactgtctcattatatggctacaatccttctgtctagagacttctaacttaacatctaaacctatgtagaaaatcaaggtgatcagccacagttataaattataacctctctgttaccaccctcaccaccttgcctctagtcctagtagacaagcttgaggcatgataatcctaccttttgtgctctagaccatatcccttcaacaggtcagtaaattacatacatcagtagtttgcagtccatttctcactcttcatttcctatgcaattaccttaatccagtcctgtcatcctatgctttacaactgcaacagtcttgtaagtggtctgcttatctcatgcttcatgccactccaattcattcttgtactgccaccaaaatactgtccttgaacacattttgggtcatgtaactcccttgtctaaatcttttggaaactccccaatgtatgtatggtaaaatgcctactccttacacaaagtcacctgtgatatggcctcttcctctctctcctaccttgtttcttttaaaactggcatcccagtttttaaaagtgagatgatatttatatatatggaaatgcacagttgtagggtgccgaggtgggaggatcacgaggtcaggagatcgagatcatcctggctaacatgatgaaaccctgtctctactaaaaatacaaaaaattagccgggccatgggctcctgtagtcccagctactcgggaggctgaggcaggagaatggcatgaacccggaaggcggagcttgcagtgagccgagatagcgccactgaactccagcctgggcgaaagagctagactccgtctcaaaaaaaaaaaaaaaaaaaggaaatgcacaattgttaagtgtcattcaatgtgttttgataaatatgtacacccatggtatacattttaaaacttaggcttgtagaataaggaactatttgcatttcctcaaatatgtatgactctttggtacttctgcacaaagtaccaatgtcttttctcctttgacctggaacatttgtgggcaatgtatccactctctctttttgcttttataactaatacataagtgtcatggcacccgtaaatctttattgtccttataaatctcatgtctatattctacaccagattgtacacctgcccgagggaggttcatttctaaaattttctatgaatattcaatagttaataccaagtgggcactcaataaatatttgtggaataaaggtacgaaatgaaagctgaatgcataattttaaaaaaatagggtagttcaggtgcatggtgtaatgtttaagggaagcagctgaagaatctgactgcctggtacaaatcagggcccaacttcatattacctgtgggatttggagaaagttatataacctaaacatgactcagctttcaaatatgtaaaatggggacattcgttgcacttatctcataggttgttaaaagttttttgaaaaattaaccttttccataatgctaggaacattttctggcaccaagtaaacattcaacgttattctgcttagtatttacatgattattaagcaataatttaaaaatttacataaattagataacgttacgttaaagatatttaaaattccagctaatcaaatggatgatcaaatattctatcttatgaaagtcatttatttttattaactaggaatctctttcacaacatctcttatcgaaggtaagaagaaaccactgaaatatcaaaatcctttgataactggaatgagaatatattagtctgtactcacactggtaataaagacatacctgagcctgggtaatttataaaggagagaagtttaatggactgacagttccacatggttgacctcacaattgtggcctcacaatcatggcagaaaacaaaggagaaaaaaaggcacatcttacatggtggcaggcaagagagagcttgtgcaggggaatgcctatttataaaaccattagatctcatgagacttattccctaccatgagaacagtatgggggaaactgcccccatgattcaattatttccacctagccccacccttgacatttggggtttattacaattcaaggtgagatttggctggggacacagccaaaacatagcagcgaataattccagattcctagaatcaaagttgttaatatatgttatgtggacgtttactttttattgttatcattattatttttatggttattttattactacctaatacataaaaattagtgtaacaaaccgaatttaaacctatatcgccagtattcaagatcacaagaagccatattagcatatgtaacaggatgatgtaagcaaaccccaccatctagagcagttcagggaagcatggacaactgatcagtttttgaaaaatgaagaaggataaaacgttggaaaataaagcaaggagagtgtgcacgattgagaacaggtgggattgatttagaatgccttccaaaaggagatgttgattatgttgattagaaaggaaattattttaatgtccaaatctggtggtagcttgttttttaaaatgattcttttagaaagcaacataatctaactgatggaaaaatagtgagttggcagcccattcaaatgaaaaaattttgttaatcaaaaaatttttttcttatttaacacatagcaaaattttgctgcaatgtatttttctgtctgttcaactaaaaataaaatcaggatgaagactgcagttagtttcttctgtgtataatttgaatccttagattctaaaatactgtagctttatttctgccatctggtggtagaaaatattgatgttcttgcagtctgtgaagctatattaattctacatacacatgtattaatatacattgcttccccaaggaataatttgtcttaactgaaattggcatgcattttagtatattgcacagggaaaaatggaatatattttctgtctctgaatttttcaatcaaaatgtatgatgacctatttattaaattatttgcacacaattatgttttattgtattaagtcctataaataagtttttttttgggggggctacagcttaaaaaataattcaacatgctctaaggcagtggtccccaacttttttggcaccagggactggtttcgtggaagacaattttttccacggattggggtggggatgaggaggatggtttcaggatgaaactgttccactgcagatcatcaggcattagttagaatttaacaaggagtgtacaacctcacatgcacagttcacagtagggttcacactcctatgagaatctgatgccaccgctgatctgacaggaggcagagttcaggcagtaattctccctagcctgccactcatctcctgctgtgcagcccagtttctaacaggccacggactggtaccagtccatggcccagggtttgggacccctgttctagatatatttttctccacattcttctactcagtgcattttcagaacaccaagacatttttaagtagctttaggataaattattaattttggttaatatctattcaagaaggggcaagtaatattgaatgcaagatgtaaaagcaaagtgtagttatcagtggagtaaaagacaaatagctggaagatcgcttttgagcatttcgtacttccttcagttctgcaaagtccagtttattgtatgccttcctaattatacaaagtaggtaatgcagcaagagtacatgaagtggcaacgtggggagtgagagactatagacattaaagtcattgtagtagaaataaacttcagagagctcaggctatatagtcaagggtctcttctccacagtttcagggtcaaacctaattgcttacctcttctaagaacctgactgcactcatgactccccttaaaatatatttctcttaggctgaagcaggagaatcgcttgaacccaggaggcggaggttgcggtgagccgagatcgtgccattgcactccagcctgggcaacaacagcaaaactccatctcaaaaaaaaaaaaaaaaaaaaatatatatatatatatacatatatatatacacacatatatatatatacatacacacatatatatatacatacacatatatatatacacacatatatatatatacatatatatatatatatatatatttcttttctttactaggttattgggaacccctactgttctgtggctaccaagaggacttttcaacgctgtggaaagctcctcctcttagaatgatattagtcctgtgtggcttatttctttgtttaaacctttgcacctgcatgtgcaagaggagtggttcagcctagacaaaaacatgttcaatattgactgaaggtttatttgctgtttcctttgaggtctctagatctttcttctttatttattttattttttggaagggtggggaagaacatggaatttggaggcgaactacctagattctaagcctagttccttctcttaactgatttcattgaataatttgaatctcagtaaatttatctgtaaaatgggaataatggtaacacacaccctacctgcatcagacattttttgatgatccataaataccctgtttcttaaagatttttaaaattagattgttaaaaaatgtaaacaatattccatgtcaacatttgttctattctacttgcttttttctgtcactggctccagccagttcaaaacaaaggaaggaataatatttaatagacaaagagaatattgtttgaaagagaaaaattttccacaaaggccaatttacgatgtagcccaagtatacgaagagctacagaatgtgctttaagaataacaggccaggcgcagtggctcacgcctgtaatcccagcactttgggaggccaaggcgggtggatcacaaggtcaggagatcgagaccatcctggcttacatggtgaaacgctgtctctactaaaaataccaaaaaaaattagccaggcctggtggcgggtgcctgtagtcccagctactcgggaggctgaggcaggagaatggcatgaacccaggagggggagcttgcagtgagcagagatcacgtaaccgcactccagcctgggcaacagagcgagactctgtctcaaaaaaataaataaataaataaaataaaaaaaataaaaaagaataacgattactccctttccaaatggcaacaccatctatagctgccaaactcaagtgaaaacatgcaattaatgatgtaccctttttacattttcatgacacctcctcttcaaaacatctctaccacagtgagaacaatttgtaggggtccagaattattagttatcaaaagcatcttgacagaaatacacactggattctatgggtcagaggccaagcaatgtgtgttggtaagaaaaggagaggagatgtttttcctacaccttcaacttcttaataaattttcccaagaccaagccctatttccgagatttttttttccaaaaaattacatgggttcactagaatatagttaaaataactctttaccagagatataaatacttaggtttgttttccttcaatactttttaaactttctctgagtttaagtttgttttttaaaaatatagttttgaatttgtactgtgtgtaattatcactgtggtaaccttagaaataaaaatatccctagcacatgcaatatatccaaaaacatttttgtagataagcttgatatgttggtgattgcacagaacattttctattctcatttaagaaatcagggtgataatttttgtcttcctaaaattattccccaccaaatatattgtgttcacaatcataaaaatggtgtttagtatggtgacaggttgtgatcacaattttctgtgtgccaaggataaattttaaaaaataccagtcttgcaagtttgccaattatcattttatattcctttctcaatatatttttgagaactaggtctctgaaatagataaaataaaaaggaaacaattacacctcaaatgatattctcaatgtagtaaaatcctcttagactttggcattagaagggcatagaaattacatatgtgattcttcattaaatatcatcagaatatctgttcattcatttattgctagagctaagccaagaattgtgcggggtactaaatatacaaaatgaagtaagtggtaagcgcaaagatgcctaagttgctacgtgcttggatgatatgtgtaaatattcaacatggaccctgccttcaagaagctcataatttcaagagaatgtaagggagatagtttactatgcagcataataagagtaatatggcagatactcaaagggaaagataaaatcagaacgaatgacaaattattctggagaataagaatgaagaagcctgcacagaatagaaaaaaagataatgcctgcatagaatagataaaaaagaaactgagactttaatgatgaagagcatatatattttattcaccaggtaaatatggtgagtggagatgaagaattggcattctgaatacatagggtaacatatataagaactatatattacataaactaatatttaaataatagattccaaaagaatagaaaagtattaacatgacattatacatctaacgacccattaggtatttttaaaattccctcattggagtaatagctacacaaagaatggagttactgtaaaccttaatctttagccattttacttatttttctgatctaatattttaagatgtcagtaaattatacatggtatatgcatatacaagaatgtgtttgaatgctaaggaaacatatgagaatttataaatcttatattccctcctcaagatgtgctaccatgttataaaattaactttgatatttttacatcaaaacatgagactgttttaatatttcaataattttgaagtgtattttttcagattttatttaggtaaatatgaagactatgatgaataaagattttgtagatgaatagagtgactaccaaatacttataaatctgattgcacacaggactagaaaagtctattttattattaaagaattatttataatagtaaaatactaaaactaccctaaatattcaatagtagtggaattactagatcaattaaggcatatccataagttggaaatactatgcagctactaaatgctgatttttaacaacaacttttgggaaaattgtcggggttaaatattaagtatgaaaactaaacaaaacagttttaaaatttatttttaaaaattacttttttggctgggtgtggtggctcatgcctgtaatctcagcacttagggaggctgaggcaggcatattactttaggtcaggagttcaagaccagcctggccaacatggtgaagctccgtctctagtaaaaatacaaaaattagccaggtgtggtggtggatacctgtaatcccaactacttgggaggctgaggcaggagaattgcttgaacccaggaggtggagattgcagtgagctgatatcatgccactgtactccagcttgggcgacagagcaagactctgtctcaaaaaaaaaaaaaaaaaaaaagaaaaagaaaaaaaattactttttttgttgttgtcgcagacaccaaatcacaaaagaagtagcctgaactagtgttttatagagttggaactcagctgacaggttggttccagggtggtgttcttagccactatccaacactgcctccctagcaagttactaaaatgttagtgatcatactctcctaatgtgcaattatagttgcttttaacttcttctttttacttcatatattggctcaactctttgtaattaacatgtattaacagttctactataatatacgtcatttttttggataaagaaaaatatgacaaaggagttagtactgaatttatcaactagactaactgaaaatttttctttctcacctatattagtcttgaaatcaacatgagtgttaattgcttctattcagataataggtgaagatagatgaaagacatcgcattcattcattcattcattcattcgtgtgatagctaaaattgtaaccactgcatttcctatagttgtctagtaaatgatataatgagattctactttcaatgtacattttgtgaagaaaacatgcccattgttcttggtagtatcctttagaagtgataccatttttctaacatactgggtttaatatctaaataagcagctacatttggaagagctaactgcaaagttaacctaggtatatattaaccaccaatcaatgattgagagtgataacactataccaacttatggaatgctagttgcaccttagagataatataatttaactttattcaaaactctcatttttacagataaataaattatagccctaagtcttctgtgaaacagttattctggctaattagtaacaaaattaagatgagattcattcatatttaacaacttgcatgtcaaattcatttcattctgtaatattgcatccaattatcctaatgttttacatatttgtttgaaaatattttaataatttatttttcagtcttctaataaagacattacaaatctaaatgcaaatgtgtttgttaaatgaaaaagaaatcctaatgaatcctgtattgctttgggtcattttgagggagtataatgtttttacagtctctattttgtactgcaatgaagagtgaatttacaaagtttatctgtgatattaacataagttatttaaggtgcttatgtgataaaatatataaaactatatacataattcttaaataggtatcagtttaaggccattaatgggagacatcaaatgaacaatgtgtttcatgggaagatttttataaaaaggaaagttggtagctattatgtaaaataggtatgtatagcttttgaaaataaataatatatttttcttctgaataatttgaagagtctatctaatgttatagtctgtctcactttttaaaactgtttctcacctgcagcatccttaaatttaaaactgtaataggtatgctggaactatttcttatactatgtttcaatacagaccaacctattatgcaaaagaatggttcactaaaagcaatctgagaaaagggggaaataataagcaattcaggaaactatcagaatcattatggcctgacttaatccacaggtaaatttttgagaatctgtaagaatactgcatatcccctgggtaatgctccatagttactgttttgttcatctgagcattgaaaaatattgaacagtggtgtattttattttttcttccttactggtacatacatgactaatttgccagctgccagttatttcagtgcagtcatgtcatagattgctggctatagaaaacaattgtgtaatgcaggattgacttctgatatggtttgggtctatgttcccacccaagtctcatgtcaaattgtaatccccgatgctggcagtggggcctggtgggaggtgattggatcataagggcagatttgcccttcggtgctgtttttgtgattgttagtgagttattgctagatctggttctctaaaagtgtgtagctccctcttctcttattcctgctctggccaggtgaaggtgtgcctgcttcccctttgccttcggccatgatcgtaaatctcctgcggcctccctagccctgctttctgtacagcctatggaacctcgagccaattaaacctcttttctttgtaaatttccccgtctcaggtatttctttatagcagtgcaagaacggactaatacaacttcttatggaaattaaatccctaacaaggctaagtttctaaataaaggtcactccatttatcctacgaggtgagccacgtagagaagtgagataaagataaagaactgacactcattgattcacaggtgctgttggaacagagttgatgggattgttcacagaaagcctgaaaaaatcccagaaaagtgctacatgaagtgtacttagaagccagaagtcatataggcaacctgaacatcagaaaaaaatagtgctttggtagtcaaggatgaaaatatttcaataataatttggaggctaagtgcagtgtcttatgcctgtaatctcaggactttgggaagctgaggcaggtggattacttgaggtcaggagttcaagactagcctggccaacatagtgaaaacccatgtctactaaaaatacaaaaattagctgggcatggtggtgggtgcctgtcgtcccagctactcaggaggctgagacagaagaatcacttggacctgggggacataggttaccgtgagtatagaccacgccactgcactccagcctgggcgacagagcaagactctgtctcaaaaaaaaataaaaaaaaattaaaaaagagaataaattggcctaaaatataaaatataaaatgtcaaagaggaaccaaatgagattaaactgaaggttagctgttatttaggcaattaggatgttactattgacattgtctttgacaaataaagacagattgacctgcacttagcactacatgagatatcagaaggtgcccagtcttaagagaaatttgactggcagatgtttgtttggtggtgatctagggtagatttaggtcataagaacagaaactatttgtagtcttaagagggaagagttttataaaggcacaaaaggcagagaagatacttgatggagcaagtcctggggaggtggaggagggtgaaatcaaggtcacaagtgagagaggtgatcttggaaaatagagagtatacctactagagagaaaacacagattctaactaccggataaggtaattgtcgtgagcataaaacaaagatttgcagatagtgctcaagattttaaacaactacttagagatcagttttaggggctgattagagtaaataactagagttctaaacagagtatgggctcattcaaaagaaaaatgtatcttagtaatcatgaggagatggaaggctttctgattctccctagcagtgcttggcaaccaaagatttggagtagaggaaggagatagatttttttagaaatgggattattaggatagttgtggtagaaagacaattagaccaaagagataattgaactgaacaatgaaggctctttggacaatctgaatgaaactacaagtattgggatgccaaactaaaggtgggttcaggaaacctttggggcttagggtgttgcttccagtttattttctatataggtttatctctaaatttttgtcaaaatttgtatcagaacttgaatgatttgactacaattacttcaactctaattatttattttctataaacacaggccaaagggaatggaaaaatatcaagcacaaaatggcatccagtagttcaaaatttttgccagtctatacatgtggttgatataaagtaatgatgcaggaagcaacctcattatataaatattcaccatgcagttgtaaagcttaatgaaattacaatgaaactatattagaaagaatagcttaaatcctaattactccccgaaatgacaagagccaaggtcactgttggttaaaaatacaaaactatatttgatgtattttgtttgttcgcagtagatttctttctactcagggaggcagagaagaagtgatgagataagatgactatttaatatattcagctcatttcaccctgaaatgtggcttaaagccagctagaaatgtattttctagctttagccattcctttatgtttaatccatgatacttataaatatatttatccaaataggtcaatattatacatatctcattgagaaaaattactagttaatttacttcttggttatctcagatttattctgaaatgtattatgttattatcatagattgcaaatagaaaaacttgtcttttgctctccttaaaaagctaacatttgctgggcacaatggcttatgcctataatcccagcactttgggaggccaggagaggaggatggcttgagcccaagattacgagaccagcctgagcaacatagtgagaccttgtctctataaaaaaagttttaaaattagccaggcatggtggtacatgcctgtagtcccagctgctctggaggctgaagttaaaggatcacttgagctcaggaagttgaggctacactgagtcatgttcatgccactgccctccagcctgggtgacagaatgtgacactgtctcaaaataagtaaataaataaatagcatttgagagtttggatttttgacctcggaagctgttgtgaggactgaagttcagtcaagagggtgaggataggctttgaactttaaatgttaatctttattaattttatcttaaatgtgtgcatgaggtgttctggatagaatacagattattgctattgacttaagaagcaaataatgattctgtaattctctttactctgattgttacccctggccaatgtgatgaaacctaattacaatgccctagaaaggcaaacttctaataagagaaaaaaggagaaaaattgattttctctgcttatgtactggagaaagacatagctgcctcctcctaccctcccaaaataaagaagaaaaatctttccttctcagacaaggatgaaaaagaacccatgttctcactgtaatattttggaatgtaaatacatctctccaaggccactggattctgtgacagaaagatgtgtacatagttttagacctttttttcccttgaaatataaattcatacatatagaattaggtcaatctctggagttcttttactatctgtacagttgtaaataaacttcccaagtcttgctctcatttgaagatcccaactttcagaaaaatttatttagatggccccacccccagaaacacaaaagcatttcctctttctccataatagatgatctagggcaattttggaaagaggtgataggaaaattggagaataagttacaggcaatatgcagatgcccatgaccacttagccaggatgtcagctagagtgactacctgacatgtgacatgtttaaacatgacgccagggcagtccagggacagattctaggcaaaagtcctcacgtgaaagaggtcagcatcaggtataaaagcttataagataaactttgattcaggatgcagaaagattttttgaaaatgtgtaaattgcaagggagtagaaaacaaagtagagaaataggataatgttctgtgttgagcaggtatgtacaaacctgtccccaaaggtggagggagctgagaagccaaagaaagaggctgagaaatccagtttctcagaaagaaatatttaatagggacttaggaacagagcaatatccaggccagccatgagatagtggatccctgcacccactctccattaagtgccctttacgtagcaagcttttatggtaaagacatgtgcagctgggcaaggggggcagttggataagcatccttatgtggggttatctatgctccaggcattgtttagagaccttgctgcagaacagcatatcatgcaggagtaaaatatcggttatcatggcagtttcgctttaagatggcgtcactcttgccatgcagcaggccgttttcctatagataagaacttggttctttatattatgaaattcctaaattatatacctagatgggtcattttaaaattcattctttcacacttgtatgccctttccttttgaagactcatgtctcttcccttcagtcctggaaatttttcctttattatttttttgataatttctttccttctctgttttctattctcattttaaaaaatttctattaattaggtcccagatttattggattaatattctgccttctcttatattttctgcattttttcttgacttttgttctatattctgtaagatttcctcggctattgttcccttctttctaatattattaacttatgcaaatatatatttaagttctaaaacctcattattattctatttgtcatagctttatgttttgttctgtgaatggaatatcttcatacatatctgagggtaatattcactttttattattttttaaattatctgttttccctaaggttattttttcctataaagaaaaaaaaaaggagctcagagctgtgcaaagaatgtaaagtatgcacaacttaccaaactcagagagaaatgagaataagccttcataaggctgggggacacccacccacacatgcctcattgtggggaagtgtttaaaggcaaattgttctttctttccttccctgtagtttccacactcactgataagttacctaaaatgctatcacaagttgcacaatgtgaccctcacccattatcttcatgctcctggaatttgcaatgcaaagaacaatgtatacttaatcaatagcttatgttcaacttagaagctgccccttcatttttcctttaaaagcacacttgtaacgttgctaatcaaagcatataatcaaggcaatttgaatctgtctctcaagttgaaggactcaaatttggcccaaagaaaccctctacttataataatgttgcctcagtttctttctttaggttgatacctgtttggctatgcttttacaataaagcttttttcaaatgtcacatgatccattattatctgtccatatttaacaataaaaagtgtgactaggggcagtgaaaagcagttgggacttcctaacagacaacttcttcagtttggagtgaatgttacagagccagcagttctgatggtgcatcccaaatgccaaaaggaaggagtttctgctctgtggtgctttcacacaatttttcctggttctcctaagacacttttataaaaagaaagattcctgactatttttgttaaacttaacgtgtgactgtaggtcaagtattgaggtattggaggaaaggatcttccttatagacttccagttagttcaacttttcgatgcaccaaccctcactccagcctttcttcaatttacactccgctccctgagttcttagtttttctggaattcccctttgctttatggtttctccagttgtagcacccatttagaatactttaggtgaagtttgctccaccctttatcagctgacacccttccctctgctttctgtattcgcatctttgttgtaaatttgcacctgctaaggtgccctttcctgctgtttgtattgctgtgattgtaaccattttcattaattttcatcaatttttatgttgtcaaacattctgaatagaaacacatgtacttggtcacaggctaggcactaagctcaaggtctaacctctatagctaaacaaaaatattctgtgaggtgctttgtgaaaaaattcagagggagaaagcagaaataaggaagccagatccatgtcatctaagccttaaaccaaatttcattcagcctgaaaaacaaacaaaaacaaaatacaccccaacatgtagaggatgaggtgaagttgaatataaaatctttaatattccataaacaatgtgatatatgtgactgtttaaaactaaatacaaatgaggcagccaacaaatatctctactctaggaatattccagctatgagattcttatagatcaatcctgttccctagaaagcagctactttggttttcacagctgagttttggtgattatctcacttacatgctttcctagtagaccaaccattccttgtaaacatttacatgctacagatgttatctctaataattccatcaaatcaaatggaacgaagcacagtaataaaaatcaggattgttctatattttagaggatctatttcttcctagcatctgtgggaaatccttggattaggataatgctttcattatagtctcagaaaaagtgaattattaccgatttgaatggacagtagagagtacatttaggcaccttgggtgtcaacaattaatggttcgattctctgcatggtaaatcaatatgtacttgggatatataattggtacacaaaataaaatatgtggcttagatatactttataattaaattttacactttttgaaatgctataattaacacagacaagattattttctaattgtgtgtattaagtaaaataaagtattttgcaaaatgaataatactttgaactatatataagtattattctaaaaaaatcaaacaactatataattttaaaatcatagtactaaagcaattataataaaatgtttaatgaagtttaaaataacaaatacttacgtagttttacatttcataatgcttaaaagtatataataaaaaatagtgttgctttgttccccatcttccaatataattcctttgcgcaattaacaattaacaagctaatacagatgcacattaagatttttattctaaaacacatataggcatattctttttaaatgaagtagatagaatccacataccacaaaactaaccgatttaaagtgtacaatttgggatttttagtctattcataagtctatcacagagttcaacaatcaccattatctaatttcagaacattttcatcacctaccccacccactaaaaaactcacatactcattaagcagtcatctctttctaccctacctgtctctacgaatttgccctttctggacatttcatatacaaatggaataacacatatgtggccttttgcatctggcttctttaacttaccaaaatgttttcaaggttcatccatgttttagcacatatcaatagttcgttccttttcatagctcaataatattccattgtatgcatataacatattttatttatccattcatcagttcatataatttgtttgggttgttttgttgtgattttgatttgtgtttccataatgactaataatgttgagaaaaattttcatatacctgtaggtcatttgcataccttctttggagaactgtctactctgtttctttgcccattaaaataaaattaattatttgtcttcttgagttgtgaacactctttatatattctggatgctagacccttatcagatataggatatataaatatttcacccatcttatgggttgtcttttatcttttttttaaaaaaaatattaccttaaattctgggatacatgtacagaatgtgcaggtttgttacataggtatacatatgccatggtagtttgctgcacctatcaacccatcatctaggttttaagccccacatgcattaggtatttgcccaaatgctctccctcctccttgcccccaacaccccccatgacaggccctcatgtgtgatgatcccctccttgtgtccatgtgtctcattgtttaactcccacttatgagtgagaacataaggtgtttggttttctgtttctgtgctggttttctgagaataatggtttccagcttcatccatgtcctgcaaaggccgtgatctcattctttttaatggctgcatagtattccacagtattccacattttctttatccagtctatcattgatgggcacttgggttggttccaagtctttgctattgtaaaatagtgctgcaataaacatatgtgtgcatgtgtctttagagtagaatgattcataatcctttgggtatatacccagtaataggattgcagggtcaaatggtatttctggttctagatccttgaggaattgccacactgtcttccacaatggttgaactaatttacactcctaccaacagtgtaaaagcgttcctatttttccacatcctctccagcatccgttgtttcctgacttcttaatgatcactattctaactggcgtgagatggcatctcattgtggttttcatttgcatttctctgatgatcagtgatgatgagcattttttcatatgtttgttggcggcataaatcttctcttttgagaagtgtctgttcatatccttcacccacttttggatggggttggttttttcttgtaaatttgtttaagttcctttagattctggatattagacgtttgtcagatggatagattgcaaaaattttttcccattctgtaggttgcctgttcactctgacgatagtttcttttgctgtgcagaagctctttaattagatcacatttgtcaattttggcttttgttgcaattgcttttggtgttttagtcatgaagtctttgcccatgcctatgtcctgaatggtattgcctaggttttcttctaggactttttggttttgggttttacatttaaacatttaacccatattaagttaatttttgtataacatgtcaggaaggggcccagtttctgttttctgcatatggctagccagttcttttatctttcttgatagtgttctttgatgcacgaaattttttgattttgatgaagcgtaatttatttatttttttattttattgcatgtgttaggtgccatatttgagaaactattgtttaattcaagctaataaacatttacacttatttttgctaagagtttaatagttttagctcttacattaaagcatttgatccattttgagttaatttttatacatggtatgagacagggctacaactttatacttttgctcatgcataactagtcctcctagcaccatttgcttaaaagactattttcctccatttaattttcttggccccattgtcaaaaattaattaattatgtataaaattgaaggcactgatgtagtatcttagattctagtaaaaaacttcagaaagcccatatcacttttattctctatcttttatatttggttatttttccctttctagaaacttttagaaatgtctatgaattccaaatattttgatattttactatcaattcattgatgtaggaaattttcaaattctctgtgctagacctttattctgacattgaaactgcagcagttttgaaacatgtctacaaatctttgacactcctccactcaacaggtggggtctctgttccaaccgcttaaatctaagctgaatataacaacttctttataactaagaggattaattggtgagaatattatgtgaccttccaagcctaggtcattaaatataatgaagcttccatgttgcatggctgggacactcacactggctgcttgagctaccgtgtaagaaatttgcctaccttgtaatctccattttgtgtggaaggccaggtcacatgaagagttcagacacagtccacatggctttagctaaggtcatagatgaaagtcagcattggccaggcacagtggctcacatctgtaatcccagcactttagtaggctgaggcagacagatcacttgagcccaggagctcgagaccagactgggcaacatggcacaacccagtctgtacaaaaaaattagccaggcatagtggtgcacacctttcgtggaaggctgaagtgggaggatcacttgagcctgggaagtaaggttgcagtgagccgtgatcacaccactgcactccagcctgggtgatacagtaagaccctgtctcaaaaaacaaaacaaaaaaatctcagcatcaatttccaggtagatgagtgaggatgactctagatgatttcagtaccctatcactgagtaatctatagccattgagtgtttccagctgagggtcctgaaactgtgtagcagaaacaaaccattcttcctgggccctgtccaaattctcaactcatttaaccatgagcatgataaaatgagtgtttaaagagctagattttggagtatcttgttacttggcaatagtgaccacagcaccagtctttcaattttggacaataataacttccttcccctggtctgtttttctgaaactccttttagttggatgttggtccacctagaatgttcctctaatggtcttaccttttgttctcccgtgacgtgttaccttgtctttttgtagtgtttttttgtgtctgtatgtatctgtgtgtgtgtgtgtgtgtgtaggagaaagattttccttaattttttcaaattattttgttgaattttaaaatttttatcatagtattaatttacaataatttttattcttgtggtctgctactttttattatatcttactttttttgacatgcatacaatatcataagctccttccctgaagatattaattttggagttttgtgttatattttctctggctcctctagttacttttcttctgttgcttactttactttagttttttctatcttgaagccattccttaaatgcctggtgatcctcggctatctgttcacatttgagtaaatttgtagctacatgtgcatgataagtatttgctgacttccaggcttcacattaaataatgtttttatttgtgtactaccgaatcccaatgttttaaagttacattttgtgaggccatttcattttcctagggaagaatctatgatctcctgcctgtggaagcaattcaggtaatatccacttggctgtagttcatactagcactagaatgggggcaggcccttagagtttcaacattcatttaattccccagtcttagtctcttgcctcctgctactctgctgcttctcctgtactagtctgggaccagtctgattcacttattccaaacaatgaaaccttaggctctttaggggtcaggaggaatgtaatgattcagggagcagatctggaggctgactacaattaatgtagaccttcaataatcctccaagtatctgctctatatttgaagttgccttcttcaagactttgaactgccaggctttcttaagaaattatgctttttttttttcatcagaatagtactctgattataattttctttgctcctaaaggtcaggcatcactcatctgtatgttttcagtcttctaaaaacatgttgtaatgttttatccgctcttatctctttttctttctgctttgtgattatagttttatactttcttttaaaactcttttctgttattttagtggagtttgggaaaaatagttttagccatgttgaactaacattttgcaattaatttaaaaaactgcaaataaatcatcagtttttatgacggaatatctttgtttcacttatttattttttcaaatttatttgtttaaattgactgaaaaaattgtgtgtatttcttctatacagcatgatgtttgaagtatgtacacattgttacatctgtctaattaacatggttgaatctgtctaattaacatatgcattaccccatatagttattatttgtgtggtgacagcacttattcacaatcttaatatttttaagaatatgatatattatcattagctatagtcaccctgccctataatagatcccttgacatttttcctcctatctaactgtaactttgtatcctttgattaacatcttccaacaccccggccacccctcaactgacctagcctctggtaaccaccattcttttgtatatttctatgagatcaactttcttagctgctacctgcatgagatcatgaggtatttgtcttgctgtgtctggcttctttcacttaacacagtgccttctaggattatctatgttgttgtatatgacaggatttccataaaatggctgaacatcagtttttaggatatgacacatgcaacatagtcgaataatatgattgtttacattagtataagtaatgatatcacaatatttaatataactgaacttctatgacatctaaaattacactatatatgggaacttttttgcattatattatttggaaaagtatgtatacacacacacacacagacatacactttatatatgtaaacatataccacattgtatgtttcaagttacatatgtatttatatttcagaatatgtggaagtagtttttttgtttattttttcctttttcctagagaggttggagtctgggacttggtaaagaaggaattgggcaattctttcactcacaagcttggttttgactgataaattaattacaatactttccatctaccgtacacttggggaatctacttaaatctactctcagagctgacctcccaagagaatacaagtcaattatggttcaagcttttcttgtctcattagctacttgaataataatacatttgaatgacggcccaggagactagcattaggaagtgcttgtctcagtcccagatgagcttcttggataatcctaagtgtctattattagttcaagctgtgccataagactgactcagtagtgttccactcacttcctgaaaaactggtggggtatagctttatctgtttttaatatataaagatccaattgtactagacttctgtagttgggggaattatttttaagtcatcaaaactgcttcaaaaaaagaaccaagcagtatgtcagttttgcttattttccacttgtaaaatagaaaagtacagtgttactaaaaggattgagtgttaaaggttttttaaaatgactatgttctatgtagccaaaaggcacacctagcacaaaattattttattattctcatggtcagccatgttttgatgcatgtagtggaaataagctgtggacctgtctataaaattgcacaaataattattacttgggtcattatttaagtaagttgtttaacagaaattattattttataaattattcccaaacatttggaaaaggagagctaagtacaacaaatacagtatgattgaagtcagaatttgtaaaagaaaagcaaaccatatagtaataatataaaccactctcagaaggaatatgattgttcccttacaaggtatatttttaagtatctgtatgtgtaaaactagaaataaaatcaattggtctttgaattaatctttataacactttagagaaggtgatttcaaagaacaaaacccagcaacgttttccagtgcctaaggggaaggtgtttcctatttgattagtgcttccttttgataatgtatttagctgatctggagccatcattttacagtgcatctttcatcatataaagtgcagagcctcactatttgggacattaacccttcttctcagaaaccccagggtttagagataacgtgaatataattttcctctaattctatctaagttctatattatcattaaatctctccattgtatgttaacataaaatctcttacatagacattattactggaaagttctggatttcctataaagagatttctgcttacatttttctagagaattcatgaattttatatatgttcatgcgcatgttcatacatagtatgtgcaactgactacatattggattttatgagttgatagattgtttcatgcatgtgaaatgactagattataggtgagtcaactttcatattggcttctttgttgatacatgaggattaccacataagtggatatctgtggtgactaacattgatcaacaaaagaattatgaaatttagcatgccttttgcaaatttagtcaccaactggaaacttcatttcaattaacatgttgcatttaagcataaagaccccaactaaaatggagatgagattgttttagaaggggttagttagcatcatccttctataatgagatatatttaattcattttggtggatagtatttgtaaacaaatgtggcctggggttgaaaaactttctatataaagttttaaatattaaatagatccttaatgttaaacattacaacataacaggtagccccctccttctgtctgtttcttcttatagcttgaaaacgagttatcttagtctatgcaggagaatgttttctcatgctaatataaggatctcactgatctcattaaagaaaagagcatgctgaatgtattattattcctgtacttctgctcagttgagtactctgaaagcatgctgcctattcatcaaaagacactgacaattctaatttggattgtcagtgactatggactgaattgtgtcaccacaaaactcatatgtctaagccttaccccacaatgtgtctatatctggacacaacatctttagggagtaattaagtttaaatgaggtcaagggtcgggccctaatctgataggactgatcccttataaggagagattctctctctctctctctctctctctctgtctctcgctttctctctctctctctctcaatgtgtgtgtccctgtctctctttctgccatgttggacacagccataagctggccatctgcaagccaggaagagggccctgactagaaaaagaaccctgctgaaccttgatttggacttcccagcttctggaaaagtgataaaattattctttgttgagctgccccacgtatgatatttcgtatagcagcctgagctggctagtacaacggttcaaaattagggtactttcatagaaggtctgttgtcacattgaacaagatgccttacttatttaaaaactaactgattaattataaattataatgaattagacaactgctacagagaaaaacaacacttttccttataattataggataaaaaaaatcttttataatgtcactcctgtatttaacaaaagttctaaaatactatggttattatatgtatgtctgtaagaatcttgaaatatttgtaacagtagttacaaatccttaagttcaataattgtatagtaataacaaagatacatcatatttattgagaacttactatgttctaagagacataattacatgatatgttttaaactcaacactatgaagtagatactgtatttttcccatttcacagatgatgaaattgaccacagatatgggaacacaaggatttcatcaaatagtcttaatgtctcaataaaccacagcgcccagtgctgcaccttggccatggagatacgtctgcaacatgcatcatagcctggtatccatgggacaaggctgccctagataactctggagataagttgccagtgtttccactgttgtctccctttttgctgatggtgtttagaccattttttttttctcatgaacacattttttactttagacagagaaaaaaaattacctacataagagcttcctcatttaccatcactttacagttttgcatcttcaagcttatactcaggattagtttgaatgaatatgaggtattaccaaacacttacgacatctcttaaaaagggctaaacttattccttacatattgagcctttctaatttcttctctgagtgtaatcataattttcaatttttgaaatgtattatttatattcctacttatggagaaaaagtaaaagagaggatggagagctctctttggagcccagtacatttccagagcaaatcaactctctccacttctcttagattctatcttttgtagattcttttagattatatctttttattgggtccaggcccaataaaagtttctcaaaatttttgagagccaccaaataagtgaaccaatgatccttttcaggataatgtcctatctctcccgcttctcctagaccattaaaatgaaagggagaggagggggtcagatatacacccggagaattctcccatggacctgtggaaaagggaggagagtgaaattgctaatagataatcagtaagcagcaaatgcatgtactttcctgtgcttcctgctgtgaatgtctgttgggaggatcagtaccgcctggtccctcatcatctagatatgagtttcctagccaaagcagattgttatcacattttccccaaagccagtgtttattatgtcacagaagaggcatcaaacaaacaccaacaaacacaagctcatcatgtaatgaaatgaatatattttaaaatattgctatttgatatcacatattcaatatatttaaaatattgctgtttgataccatgccaaatattaccaaaatgtgcattgagggaataattttctctctaagaaataacctcttgttcttaagcgttagttagggacttgtgtggttaagcattccttgaaaggataggaaatctatctagattgtcaaacaagttgctacagagacagctgaatcagagaaggcttcccatgactgatttgtggtgtggattttgtccatatgcttcacatatggccataattattgtgaacatcataaaacaatttatgaaatacactacaataggcaaaaatatgaaaaattgatacaaattaataaatggaaagcagttaagaaaggattaaaatgagaaaaaaataaaatagttcaaaataaattagtgtattttaaaagaagtgcctttttttaaaaaaagtgaaagaattagaaaacagaaaaataaaaatttaggagtaaaaaatagtgataaaattacatacaaaataaaagataaaatgctacaagtaaaaagtttataacatgtaaaaacctgcataaaatacatctcatacattctgcaatcataaaagcacatagattgtacaatgagaataagaattaaggattgaaaatattgagtacagattataatacaaaactatggaaataaatgagaccaagaaaaacaaacacaaaaacaaaagtaataattattagacaactagttagtaaaattaaaaagtcatagggccgggcgcggtggctcacgcctgtaatcccagcactttgggctaccgaggtgggcagatcatttgaggtcaggagttcaagaccagccttgccaacatggtgaaaccccatctctactaaaaatacaaaaaaattagccagacatggtaacatgcgcctgtagtcccagctacttgggaggctgaggcaggagaatggtttgaacccaggaggcagaggttgcagtgagccaagatcgccaagatcatgccaagatcatgtgccaagatgcactcatcctgggtgacagagctagactctgtctcaaaaaaaaaaaaaaaaaaaaaactataaaaattaagatgtcataaatcaagataatttttaaaacttttagaaaacatatcaagatataaatttgggtgtaaatttggatataaatttggatattggatacatttggatactgagatatgtggatcagcaaagtcaatggcatgaccttagtatggtgatcaaaataattctttatagtagaaattactaattccataaaagaagaaactagtttacacctatctgaatacacttatctgtctatattttaaaggttaacatttggaactacttagaaaaaaaatctttataaactcttgcagtggagtggaaagaaaaacattatttccattttagtataaagtgaagtataaacgcatgattatgcacgtcaagataaactatctcagtttggatttttttttatgattctgttttagaaaccaagaatagtcttcaagaactaaaataatgaactctgtgagtcaaacaaatgaacatttttattatgatatgaccttttagtctgtttggtcctgatactggtgtgatgtccttttctggataaagaataaataggtcagctcagtaatttctgaataccaaatttagccttccttttgtttttagttcagcagaggaaaatgatatggcaaacagccttgagaaggtaggaggatgagtctgtgtgtgctattaatacctacattattttgtccatacaagagtcaaacctaaagagacagcagaaggaacagtaggttgagtcataggtgaagaggttctggggtacagctggggacacagaatgaaccgatgtctgaaggatgagatgtgcggatccgggaactggtaatcaggaaacttcaatgttgttctatagaagatgaagagttgtagatgaaaatgcctattttgcgcttcagttgtcccctcaaggacttgtcccctagggagacatcaggaggggacagactggctttggctttatcctgcttttcggtagccaaggtctgtttatagcactctcctctcccctgccttggtgctgcatgtctttttactgtccacagcctcctgatgcaccaagaacccacacacacaaccaccttctccgctcccttcaaagcaccatgtgctaaatctttgatctctgctcagattcccagtcttaaactgaatctgatgtcagctggattgaaaagaaaagcaattaaattatactaattcatatgagaagtgtgaataactgataaccccacccacttccaatcactttgagaaaaatttgcattgtaaaataagacatgttaatcctaataaatattcaattaatagttcagtcaatatgagaaagtaagataaagattaaaaaaagtcagggattgtgaaaaaatttttgggcagaaggaacatatttaatgacttctaagtgtttatatactttatttccaaattctgttcttgaatcctgggatatactttttagtgcctggtcagatatagtctgtgatttttccacctttctgtgtattaattagtgtaatgttttaggtaccagatccatcttggttacttccttgatgaaagttttagtgctttttgacaacacaaattatgagtataatccttgtcctgctccaatttctttttaagtcataagaattgaattcttgctcactagagcaattggttgttttttactttttggtagaacaagttctattttgttaaatgcacagctataaacaagggttaaacgacctctttagatgaaacaaaaacaaagccatcaacagaactatcccccttgtaagaaagatatatgcttgtataacttctattgactgaaggttataatatgcatatatttgatacacatatttatctctaatctttgaacatcccccactaaattatgaagaaactctagtacacagcagaggtgagatgtttcatgctgatacctcttgttctccaagttaatcttttcctagaaataaagacactgtctagagtgtcaaatccaaagaaatgaacacaaaattggaaagttactatatgtgaatttaaagtgcaatgagaaagatgccctggagagaaaaggtgacactgggcaaacaggtatagaagcagcctgaagagaattctggaagcaaaagctctaggttgcaagtgaatgatgcccagtttctactttacaagcctacctgtttcctgcttttgtaagtgcatcaaagaaagtaaagtatattacccatgactgggcctgaattttaactgtttttcttacttgaatgtgactttagacaagtatttttaactctctgtgctttaattttctaatatgtaaaaataggtttaaatatgtttactctgattaatttacatagtctttggaagaatcaaataagatgatagatataaaagttatttatatgattaacttatttaagtccaagattgacattccttcatagaatttctctgaagaaacattcatagcattactatttatattgttaaatttttacacccactaatgtgtttatatctataagaactgccagaactgccaagtccagtgaataatgatataagtaagaatatttttgttgttgttgttttatcaataattcttttttttttcttttttggagacagggtctccctctgtcaaccaggctggagtgcagtggcacaatcttggctcactgcaacctccaccttctgggttcaagcgattctcctgcctcagccttccaagtagctgggactactggtgcccgccaccatgcctggctaattttttgtactttagtggagacgaggtttcaccatgttgcccagggtggtctcgaactcctgagctcaggcaatctgccagcctcggcctcccaaagtgctgggattacaggcgtgggccactgtgcgcctggcccatcaatatttcaataaatgacctgttttactgagtctatatggtgagctagtgtgcggatattcaattaatgattcactgcttttgtactaaacagacagtattttgcaaatatagtttataaaaatagcttgcagtaaagtatatgttattgttatggactgaatgtttgttcccccaactccaatttatatgttgaagtcttaacctccaaaacagttgtatgtggagtgtggagatgtggtctttggtaggtaattagatttagataaactcatgagggtagggccctcatgaccgatgagcctttacaagaagagacatcagagagcttgctgtctttctttctctctatatatacattcacaaggaagtcgcgtgagcacgcagtaagatagaagctgcctacaaatcaagagaagaggccttagaatgaagcccaccttgttggcaccttgatttttgactttacaggctccaaaactgtgagaaatacatttccgttatctatgatatttgactacagcaacctgagctaagacacttatacaaccctattttgttaaatatcctaatgtgtgtatactaagaaaacaaaaggaggaatagacaccaatcttctaacaatggttagcactagaatttaagaatttagggctcttcacattttacactataaatttgtgtattatagtaatatttttaatatgcatgtaatacccttctgatttaaaaaagaaaaaaatacatttatttaagaaataagaataaaatcttagaaagaacacttaagtttagagtcaaatgactgatatttttcttgattgttttgcttaaaaactatatagggaagatactcaagttgcataaacctcaatcccttcatctgtatgttatatataacaatatttgccatagccaaggtctgcaaattttgtggggaaattttgtgagagataaaacataagaaaaattttaaaaactatgaaagtacttttcgtaacttattgtaaataagttagtcattaaatttctaaaggaaacatatttctgaataagagaaaaaaacttctagacatgagaattttaagaactagctagcaatacacaaagatgcttttaaaaatgttattcatccatatgaaaaggagtggaaattgaaactgttaacatttttaaccacgtctggaaacaaagagaactagcctattattctgagatgtcacatatttccaatgataaggttcttatctttttttatttgagaaaaaaagcattattctgatattctctctctgctaagcttatctttttttcttctttccaatttctctgcatttctgtctttgaatgtgtatttcagaaaattgagagagttaacatccttagctctgaccagactagactaattcaaggtctgtgtttcctcattctttcaatagttcagtaagacttattgaccaagaacaatactcggagttttcctatgaaaaataatatgtgctattaaaaacaaacaaatgactcatttctgtctgctgtgttgattgatggtcaattaactttagcagtgcctgcagtgagatatcaaaaacaagctaagtttgactttgagtggcttcactatgtatttgacagatctttcactttgaaaaaagtagtcccattttcctgtcacttgccttcattgcattgtgggagtaaaaaccttggtgaaaccgaggtcatatatagtattaaatttaaaaaatatctgacattgctatcttagaggacaagttttctatggaataactggcaaccacagctaaaaataggtctgttcttggtgtcatcttttactcaacaaataaatacatcaccttgttagaagatatatggatactccgtcatacgtacatgatcacaaacacctaacacttcatattttccatttgcggattaggatagaaaaatttccaataaagaaaattttaatgttacaggctttgagttgtcactgccatttgtttatttgtttgtttcttgtctgagatggagtctcgctctgtcacccaggctggagtgcagtggtgtgatcttggctcactgcaacctctgcctccaaggttcaagtgattctcatgcctcagcctcccaaaaaactgggattacaggtgcacaccaccacacccagttaatttttgtatttttagtagaaacggtgtttcaccatgttggccaggctcatctcaaactcctgacctcaagtgatccccccgactcagcctgccaaagtgctgggattacgggtgtgagccactgcacctggcctgcagatttaaaaaaaagtatgcactgtttcacattaaagtataaagtcgatctgatattctatgaaatttctttagtctatgcttcttttagaaaaaagcaaataagggcagaattctctctctaggttctctacattccagattaactgagagttccagattaattagataagaagtatatatataaaacacaggttccatataaaatttaaagtagtttttttctgattctgtgaagaaagtcaagggtagcttgttggggataacattgaatctataaattacacaatagcaaagacttggagccaacctaaatgcccatcaatgatagactggatgaagaaaatgtggcacatatacaccatggaatactatgcagccataaaaaagatgagttcaggtcctttgcagggacatggatgaagctggaagccatcattctcagcaaactatcacagggacagaaaaccaaacactgcatgttctcactcataagcgggagttgaacaatgagaacacatggacccggggaagggaacatcacacaccagggcctgttgaggggtggggcctaggggagggatagcattaggagaaatacttaatgtagatgacaggttgatgggtgcaacaaaccaccatggcacttgtatacctatgtaacaaagctgcacgttctgcatatgtatcccagaactttaagtataatttaaaaaatagaatgtttctactacaatacaaatttcctgagtgtgatgtattatttaaccttttcagtaaaatgcaacatcatatgggacttctgtaaaacaagtatctgtgcctagaatagtttttggaaaaaaaaaaaaacaggaagatgtgaaagtctaaactgataatgtagaaatgaaaatggagttaaactagactagttattctttcaaaatgagaatgctttattttaagaaaaaacaattttctaaaaggttatttgactgcttagtggatttatttgttgaattttattttgatattagtgttgagatataattcacataccatgtaattcacccatttaaagtgcaccatatcaggccaagcctggtggctcatgcctgtaatcccaacacttagggaggatgaggtaggagaatcatctgaggccaggagttcaagaccagcctgggcaacatagtgagaccctacaaaaaatttaaaaataagtcaggtgtggtgttgtgtacctatattcccagatactcagaaagctgaggtgggaggatagcttgagccctggaggttgacgctgctgtgagccaagttcatgccactgcactccagcctgggcgacagagtgagaccctgtctcaaaaaaaaaaaaaaaaaaatttaaaaggtgtacaattcagtattttttcatatattcatgctttcacaaccatcatcacaatctaattttagaacattttctttcctgctaaaagaaaccctgcatggattagcagtcaatcagcattatcacacactcccattgtccagcaggatccattgttaatctgcattctgtctctatagatttgcctattgtggatattttatgtatatgaatcacacaatatgtggccttttgtcactggcttctttatttaccgtaatgtttttcaaggttcatacattgaaaataaaagtcattccatgtaccaatatgccatttcttttcattgttaaataatacttcattgtatggatatgccacattttactgatccattcatcagttgatagacatttgcattgcttctactttttggctcttgggaataatgctgttgtaaacagctgcctatatccacaataggcaaatctatggagatagaatgcagatttacaattgatcctgctggaagatgggagtgggtaataatgctgattgactgctgatcagtgcagggtttctttaagcaagaaagaaaatgttttaatattagattgtgatgctgctgtaaacatttatgcacaagcttttgtgttttctattctcttgagtacgtaaataggagtggaattgctgcatcatatagtaactctatgtttaattcccagtaagaatgtagtgaccttactgttatgggttcaagacacaaattgactcttggaatcaagtggagagtcctttctataccaagctcacatgatggttaattttatgtgtcaacctggctaggctatgggcaaacagcctaaatgtttctatattgtacttgttagatgtgattagcattttaatcagttgactttgagtaaagcagattgcccttcatactatgaatgggtctcatgtaatcagttgagggctttaagagcaaagaccgaggttgcccagatagaaggaattctgcgtgagtttccaggctttgcactcaagactgcaacactgactctcagacttttcagcctaccagcctcctcgctgattttcgacttgccaggccccacactcatataaaccaatttcttaaaataaatatctctggatatatatccatcctcctgacctgtttctctgaagagtcctgtctaatataccacatgatttaagattgagggagatgtggtttcacacaagacatcaaggttctggtaaaaaggacaagaggtacaaaatacatgttggatgataaaatcaaagtggatactactaaaaatcttctaatgttttaatctaatatccaacttgctctgaaaagttcgcttgcaatgtcactttcgatattaatacacacaataataacacaagtattttatttttttgagatagggtctcactctgtcacccaggctggagtgcagtggtgtgattttggctcactgcaacctccgcctccagtgttcaagtgattttcctgcctcagcctccctagtagctggaattacaggcacctgccaccacacccagctaatttttgtatttttagtagagacggactttcaccatgttggtcaggttggtctcgaactcctgacctcaggtgatctgcccacctcagcctcccaaagtgctggattacaggtgtgagtccccatgcccggccaacacaagtatcttttaaaagttggaggagagctatgatgaatatattatgttttctttctctgctctattaagatattattagcatctattacttattttccatcttggacatttttgaagaaacacagtcattggacagcatagaaccaatgtgttttaatgtataaaatgattatggtgtatgtcagatctacgagtttgggtataagcacttcgtagatgttgtccagagtgggaagtctggggtgcaagtaaaaataggcatacagagagaagtagctacaaggagcagtcaaatacttctctaataccaatctcacaaaggtttccatttattttatagttgtacagattcccaatgaatcccagtatgtgaatttattagacattgcaataattattatctaaaaataactaggagctcgtctactaagtatcaatatacatatgtacacataaacatatacacacatttggtctgagtcttatgggatctggcaagtgctaggtggacatgttcagaagtgtttctagaagataccaagaaatacggaaatataggaataataaagcatagtatataaacctatgcaaattacagtaaattttattaaattccccttatgggcaacactttgggtttggcacttaggttaaaaaggtacatgagactgatgacatctcccacagatgtaaaattcttgttggaacagacaacagaagcattgtttcaatcagtctgctttactttgcaagtagccacacatccaaatcactttgagttaaataaaaaataaatatatcacaatgtcacatcctaaggtagggaggataaagataacttaattggcaagtcctgcctctgcttcccttgactctcttcactttgcttgttcttatgtgcagtggtgtggacctcatatccaaggtttaggatttttagaagaaggagaacccgataattctaagttttagccttccatgtcagagtcttggatagtacctgtcattgaaactaaaaacagtctctgaaaccacaaggttgctatacaataaaaagggagaatgaattactatggaaaaagcatcaattttcttaataaatataaaaacacaaatcatgtgtgccaaatttaagaaaggaaacataattattactacaataactctgagaaaataatgaacagatttagaattaatgggaagtcttaatggaagatgtatgtgaaactgttacagtaaaggtaagagttagaaaagagagaatttcagatatatatatgtatatatgtatatatacgtatatatgtatatatgtatatatgtatatgtgtatatatatgtatatatgtatatgtgtatatatatgtatatatgtgtgtatatatatgtacatatgtatatatatgtgtgtgtgtatatatatatcctgagcaaagacacagagacagccttgcacaggtgtgtttaagagacagtgaataaaccggattgtctgaacaccatgtgtggagcatttgacagaacccagattacaaaaggtcttatgtacttgtttgaggaattagtattaatcttttgacagcaaattatacgattgtacagaaaaatcaactgatgccatctgaagcctaaattctagtttgctactaactttgcaacctctggtaaaccatgtaaattgcctaggtttaaattttctcattaataaactgagtaggttggaatatgtgattcctaacttactttccaaactttatttccttttgactctataaaactctgaaatgacatcaatatgaaagttttcagcaaagaaggaatacagaaagcactggattagaaaggcaggacttacgaaagtgtttgaaccactttgaatgtaaaggatgtagcttcagggggttcaggtaggagacaattattgtttggtatcatgagataagaaccctaactagaactgaagctctgggaatagaaacaaaagaatagttgattttgaaaagaaaaagtttctggagacttaagacttttgacagacttgatgatagggaataggaaggtgaaataaatcaagatcaatctaggaacatgagcctgagtaaggtataaaacataaaaaatatggaaactaagcaggagacggtttggggaaaagatatcattgagctctcgaaataaagacagccatcgggctttagaacacatactgaaatgtggctgataatggtggacatgagactcattcacagagggggcaatgagtgataagacaaaaataaagataagatcagaaacagtacagaacaaaatggaaagaggcaaaatgataattcaaggctatgtccatatttaagcagtcaatatgaaggggaaatttaagaagggaggaaaagagagctgtgttctgaaactgaagaaaaccaagtcgaggctgcaaatagctcacagagagcaagaatagagacatggatattaaatgtggccaaaaggagaccaaacataggtgaccctgaaaaaaagagtttgagtagggtgagaaaagtagtactacgtaacaaggagtaagagaccggaaagtggccaatgcagactcatatttagaaactttggttttgcaaaaaaaggtcatgatagggctaaatctcaaaacagaaaagcgtgtttgtttgtgctcagggaggaaaaatcagtacataggaaaagaagtttaaaagagggattcattaatagagaaaagtagcaggtgatgcgatagagcttaagacaaagaacacaagtgtgggcggagccttcaagagaacctgacacaattcttatagggacatactgaggtagggagggaagttgcttttggagaaattttggttttggttgcagaaaatatcgagtagctaattgaattatcattgttactttgacacctgttaagcatgtattatattccaggaaccatgataagtgctttctgcatggaatttaattctcacaatgatcttatgagataactaacatttcgtgggataactcacattatatagatgataaaatgtaaggcttaatgtttaggcaacttacctaatatcacaggacaatcaaggtatgatgtaaagccagacctgtctaactctgcttttaaccattatccatgtccttctgttatgttggccttaatctttttcataaattaaaagagaacatcagccgggtgcgggggctcccagcattttgggaggctgaggtgggaggatcacttgcgcttaagagtttgagaccagcctggtcaacatggcaaaaacttgtctctacaaaaattagccaggcgtaatggcatgtgcctgtagttcaactatgagggaggctaagatggaagaattgcttgagcccagggggttgaggctgcagcgagctaagatcatgccactgcactccagcctgggtgacagtgagatcccatctcaaaaaaaataaataaatacaataaaagaggacatcatttgctgacatttagagtgagtgtggcatatgtttgtggactagatttgtaacctattttattacttagaaacatagtctagggtggacataaaatatgaaagcttaaatatacctgagccctaaatttctatcttgaacagagctgggaaaacaatgataagaagactcgttgttgccttacccatgaattcatgactttgctattctccagtagggagcagcacacaaccacctatgcaaccatttactctaccgcaaacaatacaagacaaagaaaaccttttgaagattcgaccgtaagtagtgaagaaactgaacctctgataattgggtcctgccttcagaaagcatttaatgaaatacgtagattatagttttgccctttattgcattatatatgcattagttaaaagagctattttgtcaatcctatttgagaatcgtaagagagcttcttagaaatgctcttgattatagattgatgtaaagagcaaataaattttaacttaatatcaaacataattcttaaaattcagagtaatgagaaaaatactgtaaagtcaatgcttggacattgatgcataaaagatatttcagcatttaaaactttgaagtataagaaagtactatttgtcaatgattaaataaaaaaagacacaataatgctataaaatgaaggttttattttttgtttgttttgcgttttttttttctttttttttttttttttttggttagaaggccactgggccatgccaagtttttgttataaatatgatacatcctatgtttgtgattttatgaatttggttcataacattgctattacattgaacactttgtttcaaaaattattttggggtgttgaaggtacaattactaccaaatggaagaaaaatcatggttgttgctgaagacacagaccagaaatgtaaaaatggaagagaaattcaaatcatctagtgactaagctttttggtttaagataaatattatgtttctggacaatcttacatttttttactcaatgagcacaacattttaaaattaaatacactagttctggctttagaatgttcaaaattaaccgtaagaaataagctttgttgtgtaggggtcaaggcctttggccctctggaggttcaaaaattcctgacatgaggcagattaataggagaaaaggcatacacatgtatttgacatgtatacagaggagccttcagcatgaagactcaacccccagtaagatactgaagcttatataccaccttgaggttgtagaaagacagttggttcagagcatgggaagaaacaggttatgctgttaaatcaggtttttgtggcaagataggtgatgggaggggcagaataggaggcttgcctagcaaaggtggtcttgctgtgtagacgaaaactgttatgggaaaggggtcccgatccagactccaagagagggttcttggatctcacataagaaagaaattagggcaagtctttacagtaaagtgaaaggaagtttattaaggaagtaaaggaataaaagaatggctactccatagacaaagcaggcccgaaggctactggttgcccatttttatggttatttcttgatgatatgctaaacaaggggtggattattcatgcctccccattttagaccatttagagtaacttcctgatgttgccatggcatttgtaaactgtcatggtgctggtgggagtgtagcagtgaggatgaccagaggtcactcatgaccatgtgggttttggtgggttttggccggcttctttactgcaaactgttttatcatcaagatctttgtggcctgtatatagtgctgtcctcctatctcatcctgtgacttagaatgccttaactatctgggaatgcagcccagtaggtttcagcctcattttacccagctcctattcaagatggagttgctcgggttcacatgcttctgacaaaacctcagaggtagaagccctcagagagattaggtggtgtctctttttggaacattaaaggtgtcagactctcggctaatctatcctagatccaggaaagggcctagaaacggatctaggaaacattagctgcattaatggagattctctacagatgcaaatttctgccacaaaagactgctttgcagggccacttcagtctgctggccctgtggcagccatttcaaaatacatccaagaaatatattctgcggtaataaattgtgacttccttcagtttagcaaccaaacatgagttttatatattttattgttagagtaggtagctagtcagacatgagcaccgcaggagagggagcccccctaccccccaccagaaatgtcaggtgaccatcaagtgatggtgaagtggttgttacctgtctctctaagataattggccacagccaacaccaggaaaaggcagtctcccaattaacacaaaaaacctgaaactagggatcagcagcttcctgataagatcttaggagttaggcaagtgggctcaagcacacacattaagaggcaaaatggtagagtttaactggtgtatggccttctagtgatattcagctggtaagggaagaacgcctcaaatgagcatgcatatagtttcactaaaaacactgtgcatgctcctctcccaagtgctggcaggacactgtgcatgtggacagcccacccaaagggaagaatcaggggagaagggacacatgaccccagatgaatgccaacatataaaaccccaagtcaaaggtcatacagggcccttgactctctcaactcacctgctcagccctctttcaagtatactttcgttcctgttctaaactttttaataaactttcactcctactctaaaacttgcctcagtctctccttctaccttatgcccctcagtcaaattctttcttctgaggagcaagaattgaggttgctgcagacctgtatggattcactgccaataacatcgttggtaaattcttcttactacctgtgattaaccattttctgttgctgaggctctgacacctcacctggaaccagtgacacagcctcaggaggtcctgacacgtgctcagggtgattgggctaccgcttggttttatacattttagggagatatgagacatcaattaatacatgtaagatgtatattggttgagtccagaaaggcaggacaactcgaagcaagggcttccaggtcataggtggattcaagaattttctaattggcaattggtttaaagagttaagttattgactaaaatcaataggaaggaatgtctgggttgagataagagtttatggacagcgaggttcccattatgcagatagaatccgtggaagggaatatttcttaccagtcttaaagagtctgttctatcagtcttaaggcctctgttttcatgttaatgttggtcaactgtgcttgaattccaaagggagaagggtataatgaggcatgtcagaccctcatttcccatcatggcctgaactagtttttcaaattaactttagaatgcctttggctgtgaggaggagtctgttcagttggttgggaggcttagaattttgcttttggtttacttctaataaagtttttggattttttataatttagttgaggtgtaattgaattgaaatacaataagctgcatatatttaaagtatataatttaatttgctgtgacatctgtatatgtctgtgtaaccctcaccttaataaggataacaagaatttccataactctgaaaagtttccttgtgccccttgcaactcatcccttcttctgccttgtcccaaggcaatcactaacttgctttcagtcattaccactttcttcacaagaatttgtaagtggactcacacaatttgtagaaggtataagaatggtgaataagcagatgaaaatttcaatgtttgtagtcatcagggaaatgaaaactaaaactacaatgagagtaatatatgcttatttgaattaataaaatgtaaaaggttgatgaccaaaccatgtgttggcagggtgaagcaactgaaattttcatacatgggtgtgggaatgtaaaatggtacagccgctttgggaaacagtttgaccatttcttcaaaagttagatacacctgtcatatgacccagtcactccactccagagcatttactcaagataagtgaaaacatgtcacgccaatacttttacatggatattcatagcagctttatttgtaatagccccaaacttgaaacaactcaaatgtcaatcagtatgtgcatggataaataaattatggcatatcaatacaatggaatattgcacagtaataaaaagaatgaactattgacacatgccagcaacagggctgaatcccaaagtgtgtacatttttaaagctttcctgcctttaaatcagaggttttcagtgagggagagtgaagaggcaaaaaaggaagaagggagatctggcttattgtaatcatgtaaagactttttccctaaatgtacacacaagattgattccatggagtatatcaggcagagaaaaacagaaagaatgctaatatatttgcaacttctttccttgtctcccttcctccatggaaatgtcaaacatgggaaaaggagaactagatatatttaactttcttggcaagtcttttgtcaaactacacagctttcagcttttcttaggccaaatgaatcctagatattgacagcatgaaaatatccatgatttttaagtatttctccaaaataggagagacccatgatgaataatagataggaaaccctattgagcaaatagatttactagaatttccaggcccacatagaccaagcaaacctgagagccacagtccattttcttttaagtaatattactttgtagttgttctaggaagtaatattacccaaaagaaaaaagaagaaacatcatgagttaatgcaactttgagctatctaagggataacaaaatcattctagtctttttattaagacttttacttccctatagcataatttctttataattggtcatcctgatagtgacaggaggcagccaaatgcctaggcagataggggcaggtacccggtgaaacctcacctccaagctgaagacagtttaaacctgaaatccaagctacaagctaaatcctgggactagattgagaacttgtcctcctgtttggtgtgctttcctctgattaatccccacccttcacctattttacatatacctaccctttcctaattggttttctatgcttttgtgcccacctttgactggtgtttttactttaacctttgttacatactcacaaaccaatcagcatacactccccatcctgtgcctataaagaccccagactcagtcagtggaggtggaaatgaactgactttgggaaaagacaacctgatttttgggaagattaccagtatacctttcctgtcccttctctagctccctctcctctgagagccatcttcattggtcaataaaattctctaccttcaccatctttcaacagtccatgtgacttcaatcttcttggatgctggacaagagctcaggacccaccgagtgtgggtacccagaaaggctgccacaccagccctttgccctcattggtggagggcagctgccccatgtgctgaggcaaagagccaacagagctgctaacacaccaccatccatggacagcagaactaaaggaacaccgtaacacccctttctggggcttcagggtcacagtcaccctcgcatggtcgctgccacattccccttgaggcgacatgcctagtctggctatgggccctgcatagagcttgttcctgtgtcggcaccctgcacagccagccaggtcctggactgactcactctgatgctccctcccacaaggggttgagtgcagagggccaagtagaggaggtgcccctgccatgagtccagcaaagggaccaagaaaaatcctgcatcaatcctttcataaagctcttccaatttcagttgtcctcttactatatattcagtcataagttttctttttgcaattcattctgagtgaaatgattgctgttcttgttattatggaaggttcttgattatggatttcagtgtggtatgtttgtctagatgcttccaaccggctcatgactactgtgacctttatttgttctcccgaaaagcaatcccccactcatctcaggtttgtaattagagccattaaacctatgtttttctttactcttttccttttcccatttcaatttcatctttcattgtccaataaacaaatctgctcttcttatttttcaagttgataatatggcacatattcagtgaatcccatagctctatgtatgacctagacaagggcccctgtccctcaaactgaccttccacatttgcatgcattccctatgtcttgttcctatatttttgttttctccagatgttttataattgcttccattgtctctcttacaaaagaagacccccccccataatagtaattaaaagcaatcgtctgcttagatcagctagaccaacatatgacaagcaaaacctcttagataataataggaccagtatcttcctccagacttgaagaaggcagatttttgggaaagtcatgatcagcatacacctatcacaaactgaaagacatgttagtaattgcagaaatttgatgaaaagtagagggaaaacaaacagcttcataaactttgcaacaaacaggaagataattatattttgcatttttttttaatgtgggaagcattttaatctcattgaagtatttatttctgtaaaacatactatcagaaatttgtaatttagatttaaaaattaagtttttaaatatctgtaatcaaatccaattaatgcaaaagagtgattttagtgtatgaattaatatatatcaattatagtaataaattaattactattaataggcataatgactcaatctttcacacaatccaaaaatataggttctagtattattagaaatctacacataggagactgaagctcagaaaaaataaagtaaattggaaaatataaacaaggtaaagcagcaacaaaaattcattgtgagagtattcttatgcaatcaaatgcataacagtgcaaatcccctcccagaaggggagagaaatgtctctaaattattgttctggaatgtttcttggaagaaagatttctctatccatggaagtaaattaaagagtataaattttctacagaggaagtctgtctccatctttccctggctctctgtttataaaagccttcctaaaaagatagtcgtagagcaaattggctgttatgcctgaatgtggaataacgtaagagtttaatggagaattgtctctcaacaaaaagcagttggactatcctcaatgtatctataaaggtgactaagttcagaaaattaaggaagtttatagagtttgtgacatagtttggatatttgtcccccaccaaatctcatgttgagatgtgatctccagtgttggagatagggctgggtgggaggtgttccggtcattcaggcagatccctcatgaatggcttgggacatccctttggtgataagtgagatcttgctctgagttcacatgagatctggttgtttaaaagtgtgtggcatcccccaccccccaccttctctctttcttgttcctgcttttgccatgtgatatgtctgctccctcctgctttgccttccaccatgattgtaagtttcctgaggtctccctagaagctgagcagatgccagcaccatgctgcttccttaaagcttgcagaaccatgagccaattaaacctcttttctttataaattacctagtctcaggtacttctttatagcaatgcaggaaccacttaagatattttcagttatctgagagttacccttgaaaatgtataacaggctcaaggtgatagttccgagaatttagcagcactagttgcaggactttggagcattaacagatacaaagactagttcaggtgatactgaggcgattgctagttttcagatattacaagaagggtaggtatttcatgaagcatgagagaaaaaaataaataaaagaagtgtcttctaaaagaaggaacacaaaacaagagagggaggaggaagtggagaaaaaagaaagagaaagagacagagagggagaaaaggtagcataaacacccaatgggttaattttgcccactgcccagatagatctgattcattaagacaggaaaattgcaatagagaaaatgtttaattcatgcagggctggctgaactcttggtgttgtatattctatgagttttgacaaaatgaatgacttctacccatgattataatatacaaactagttctacggccctaaaaatcttctgtgttttgcctgttcatccttccctccctcaacctggcaaccatggatttttttactggctccagaattttgccttttccagaatgccatatacttggaatcatactgaacataatcttcttagattggcttgtttcacttagtaatatggatttaagttttatgcatgacttatcatagctttatggctttatttttaagagctgaataatattccattgtacctcagtttgcttattcattcatctactgaaggacgtcttggttgctttcaagttttggcacttatgaataaagctgctataaacacttgtgtatggggctgggagcagtgatgcatgcctgtaatccaagcactttgggaagccaaggtaggcagatcacaaggttgagaccatcctggccaacatggtgaaaccctgtctctaccaaaaatacaaaaattagctgggcatggtggcgggcacttgtaatcccagctacttgggaggctgaggcaggagaatcacttgaacccggaaggcagaggttgcagtgagctgagattgtgccattgcactccagcctgggcaacagagtgagactctgtctctaaaacaacaaaacaaacaaacaaacaaaatacaaaaacacttgtgtatagttacttacgcccacatgtaaaagtacatttgtgtatagatagttatgtccacacataagaactctgatgaaaaaaccaaataactaaataaataatgagacattccatgttcatggataggagtactcatcaatatgtcagttcttcctagcttgctttatagattaaacacaattccagtaaaaaccctagcgagttattttgtagataacaacagattctaaaatgtatatggagaggaaaaagtatcagaatagccaactgaaactttacttcttaggatagagtgacctcatccaagctccttcaatgtcagactggaaactgggaatctttcagaggcttttcagtgtactttttgtcacttctgtgtttgtaaaaaggctgcagtcacaaaaataacagctagtttgatgtttaatatgtaccaggtattgtgttatgtactttatatacattagtatacctcttataacaaatcaatggattaggaaaccattattagggtcatattaacaatgaggaaactgggtcaggcatggtggctcacacctgaaattccagctgcattgggaggccaaggcaggaggattacttaagcccaggagtttgagaccagcctggacaacatgatgagacctcctctttacaaaaaattgaaacattagctgtgcatagtggtgtgtgcttgtggccccagctactcaggaggctaaggcgggaggattgcttgagtctagaaggtcaaggctgcagtgagccatgtttgcaccactgcactatagcatgagtgaaagaatgagatcctgtctcaaacaaacaaacaaacaaacaaacaaacaataaagaaactgaagctcagcatttaagtcacagagttacagagttagcaagtagtaaagcttaggtttgaacttgtagtagagcctgggtttgaacccaaggagtctggcttcagatcttacattcctgagcaataggctgagttgattcatatcacacaatattacttctttcaaaggtagcaggtgggagaaggaaggagttaataacaggatttctctcacttaatagtgtctatgattcctctaagggtttcactgaataaaggcacctctcttattgcagtttattcatcataagcagaatttcataatttttctccttattcttatttatatcatgttgtactaatctgtagaatattaaaatcactgtcatttattactcctgcctcaaattttttttctgaaatcattgctgccatcttagaaaacttacaaatttatagcaaaaaataaatgagagtcggtggctcaagcctgtaatcccagcactttgggaggccgaggcgggtggatcacgaggtcaggagatcgagaccatgctggctaacaaggtgaaaccccttctgtactaaaaaacaaaaaattagctgggtgcagtggtgggcacctgtagtcccagctactcgtgaggctgaggcaggagaatggtgtgaactcgggaggcggagcttgcagtgagccaagatcgcgccgctgtacaccagcttgggtgacagagcgagactccatctcaaaataataataataataataaacaaataaatgagagtgtaaagagaggttcctttcattctattcattttgacaggtcacctccttcttgtttaattctgtttgagatatcaaaggcatttattcacagcaatgcaaaaggtatacactgggttttgaaattcattaataagtcttcaccctcctttggtataatggcccttggattttatcttctgccattcatctatcctccagctacatgcttgtttttctcttttaatttgcagactcaaaggagtgagtcacaattttatctcctttcctatgagtagaatatttttgtccatccttaatataaaaagtaaaagtgataaaggcaaattacatgctttgattgttttgcatctctgcttgaaaaattatttttaaacccttcttaaatgaaaaatgttattaactaatttaacacagagattattttaaagccagtacactccacctttcagtaaataatgataagaatgttattgcatgttacttgaactagtgtacctttacttgggttaaaatagcacaccacgtttaaagtaatcggatggggatgattataaagtttagagcactatatcttcatgattttgaactaatctgaatttctattcaaattttaattctttctcctgcattttatgtcattctcattgatttttacatgtagatatggagtggaaagccattatgctcagataagtctcattcaaatttatttgataatcattgagaattgtgatgttcgggaactctaatgagcactttggattcactatttcattcagctttcatagaaatccatgaaggaaggtatagtcttccattttagttgagcaaattcggtttaaaaaaagttaaattttttattggtggttaaatttttaactaaatgggagaactagggtgaatcatctggtgaaattaaatcacacacttactgaatagagggggaaggagagacaactttcaacatgctgtggggagggacaggacttatgaaaccttggtagagagtggtgttagagcaggaacactagcttcattgatggagaggctcagggtgtatttaacagaaaataaataaacgtaaaagaagtttaaaaggacaagtaagaaagtagagatgattgttattttaaatttgggacatataatagttgaagcgttgaatgtcatttgaattcaacacttcctttatctctctcatctaaaaaggaaaaggtgccactcactgctgccatcagcctcttagtccttaacttaattaactcatgactattattttgccattactgtcagctgcattgctttgccaaagctttgtcagtgatatctgcatctttaattccaatggatattttccagacctcaactgaattgagctttttccatacttactacaattaattgctcttctctgatttcgaaaaattctttcctgtgttgcatcacttcacatcccctagtctgaatcttacttcttttattgctctttccttttcagtttcctttgcaatatcctcctctttgccaagtaactattacagttctaaggttatatcccatgctctttttgcttcctattctatgtccttagacagtctcatttgcaccagtttttattactatctacccttgatgagtcacagatgtctgtctccagtccagatttctcctctgagctccaaaccagaatttccaactgcctgctcaactctactgggatatattgaaagcctccaaattaatcatgttcaaaaccattctcatctgctcttcctcccttcctcaaactcgatcctcttctactgttccctacctcagcaagtcacaaccatctccaaaacgacccaccatcccctaccacatcttatggtaatgaattatcaacaagatatgttaatttggcctccagaatacatcatacttctgtctgcttttcttattctcctcccttagtgccctcattcaagttattattacaccctttagaagcattttgaatagttgcccagtcatatgtacaaccatactctttctccctttagtcattttcccacaggacaaagttatcttctcaaatttcaaatctcattatactatccactgagcacttgtttttaaactaaagacaaaatttctaatgtatcttaaaaggccctgcatagtctaatctttccaacttcacttcactctattctctcccttcctctttgagctccagccactgcagatttttacacgctctgtgatttttctcacctcagggcctttgcacatgcacttcttatagccttgaatagttctcttctttgatatcataactgaagcctcattcccaattcaaatttacttactcaaagaaaacttcctaacccctctgactagatcatcacttatgtattatgtacatataggataatatctattgctttcatagcagatagtgcattttatatgtattatgttgctaatttatgcaatggctttcttcctcttagactagaagctccatgaagttgaactcatacttgtttttgctcatcattgcagccctctaatttggcacggtgcctattctgtatagcacgtaatgcatattaagtctatgaatgaataattgaatgacttaacatagtcaaagttagaaaggtaacctttatcctacaattccacttgagatacatagtgtataccccttactacagtaactattttaagaacagacactagttttatccactcatatttcctgcaactgtctaagtttgagtacagtaagtgctttgttcacaggtaaactgaaataatataagtggaaataaaacaacacaaaccagtgttttgtttagatatttaatgttaaaagcaatgtctcccctactgcctaatcataagaatcacaaattcttgggtgttcttcagagcaacagaatcagggtagaaaaccagtgaatctgaatctgtaaatctgagaaacagcggtttaatagtgctatatatttatattaataatagacatagtgattagaaaaaactgacatcgttcacacatgtcttaagggaagctatgttcttcttttcttcttaccttcctttctttcttctatccattagtttatattgatacagtccaaaaataaagtttatttatgacagacctacaaatgttctcttcttttttcctgattcatatgtacattttgtattttatctgaccaattttttgctaagggcagagatatgtttgtcctcctctgtgataaggaaattattactcatgtcttgaggtaggagagacactagttaaggttgaatgctgatagtgtggttgtacctgataatatatgatttatcctaatccacaatggtgcaattgtgtcccatacattttactgcatattcttttgggaaatcttaacctaagtactaccatttttctaggttcaactgtgtgggctaaatggtctggaaaatagctaggctgaggaagccaggttaagattattacaacagcattttagtgaaaaattagagtgtcaaggaagaaacatgctcagacgaataacctcatattgattttttacaaagggacaagtggtttccaagagaaagggagagagaatcttgtcttttgtttggcatgttaaaatgatgataaatcagattaataacattctaatggttccaattttggaacaatcaagatttctgcctgtgtgggatttgggtttaaacattacaatttcatattttaaagatagccatctttatcttttgtaacttaaagatagccgtctttatttcatgctcaattcaccacgtagagttaggataaaagtcaagtccctgaagaacactaaggacttctccttacccagtgctttttttccataaagaaaattgcagtacaaaatctcttcctatattatctaagctctattcagaaaagaagagtgctggctgctggcagaagcccattatccagaaggtggccttaccaggttcaggacaatactccctccctgcgaactggcctttgtcagtcatcaaagctgcccttaactgtgagaaagtctgtttcccacgtatgtgatttatctaaagggacacaagtggtcccccatttcattgaaatttagtttgggaccactttatgctgaacagaattgaaaatgaggaagtagaaaaggtcttttccaaaaccactcacaaagtccatgcaataatgttattgatgttaacttatgtaatatttcccaaactaaattttctaaaataagagttgcataagtacaagttcaaaaaagaaggagttcttatactgtgttccttttttgaagatgcatagcagtaaagaaatatgttgaactttatttaaccttgtatgtcaaaatcttatttgaggaaactaatcccttgcagattaccacagactgggcggtttataagtagcagaggttgatttctcacagctttggaggctgggaaatccaagatcaaggtactggcggatttggtaacgcccaattcctggttcatactagggctgcctgctctctgtgtcctcacatggtggaaggggtgaggaatctctctggggcctcttttataatggcattaatcccattcatgaagcctccaccctcatgacctcatcaccttccaaagacctcacctccaaatactatctcagtggggattaggcttcagcatatgaatttctggggaacacaatcactcagtctacagcatgttaggttgaatgtttgttgtctcaatatgaggaaagacacctcatattgaaccttaatcattacacagtaacttttagggtgcccattcatatagttatttactaaaaattgaatgaataaatgaatggattagtggatggatagaggatagatgaacaaataaattaatgaataaaaataatccataggcccaacacaatgaatataattatcaaatataattatggtaaagatggaataagagttcctaaagtcagatgttactggtaagattaaccaatatttgcaatagatacaaaaattctgtcagatcattcttttaatcaatatgttaacctcttagaggatgcttcttctgaatctttttccattttacctctattttcttcaaatcccttccccttccccaaccacgtcatctgctatactacaaaacctctttatattttggctgggagtggtggcccatgcctgtaatcccagcactttgggaggccgagatcggcagatacctgaggtcaggagtttgagaccagcctggccaaaatggcaaaaccccatctttactaaaaatacaaaaaattagctgggtgtggtggtgtgcacctgtaatcccagccactcaggaggctgaggcacaagaattgcttgaacccgggaggcagaggttgcagtgagccaagatcacaccactgcactccagcctgggcaacccagcaagactccatctcaaaacaaacaagcaaaaaaaaaaatgaacaaaaaccccccacaaacctctttatatttttatcatacaacataataattacatgttaactgccccctgcattaataattattaatctctaccacgtaccaggcaccaggcactcttctgagcattccacacatattatctcattcatttctgtattctgagcagtagctgctattattttcctcattttatagatgcaggtactgaagagttaagggcctcactctaagctgtgtagctaataagtgagaaagctgagatatcagcccagatgtctaactgaagaacccttaattgtcactactcttctctatttataatctctccacactggagaggatgttcctcttattctttttgtctttaaaagcaagggcttttttgctcctgttgactaacattagcttctcatatacataagttcctataacaatgaataaaatgaaacccacatgcctacattgaaactccgactattattgcattacatagtaactattgttcatcataatgattacaagacactaagaaagggataaacaatgttgaaaatattctgcctcagaagacagaatagtctataacacagttaaactattcattatgctttaagataccagggtttaaaagaaacaaatccccttatagtctaaaaacaccctatttagtaaaaaaaaaaaaatcccatgtgtagtcaggtgttaaaaataaataatgtcctttgagttctggatcccagttttattatattctacttacacaacttgcatatctacacagagtttttactgtcaaaatttatactcagttatacttcctcgcttcatgacgtctcttattggaattttaataaaatatggccctacatgagctactcgatgaagtgatttaaactaaaacatgtttcccatgcaaccctaacatcctccgtcagttgatggttagagattaatgtcacaattagtatgtgggtatttaatatgccaacctcctgggtttggaacactcataaaatgctatgagctcagctgggcattttgttatcatagatcacaaaggtaatataaacagacatctgctgggcctctgccgagacagagtttgaagatagtcctctcatggagtaagattttatttaggcttaaaaaaacaaaaaaaaaaaggctttcaaagtggaaacattgtttcagcaggtaaatatcacaatgcattttgtagactattacatgatcataagaaagtcaaattgtgtacattcaccattcatgttctgagttcaataaattccaagctggttgcaatttggtctggttattacacatggggaaaaatttgcctcttcaaacctcttttaaaatagaaagtgacactaaccacatttttggaatttaaatacaactaagagatagcatagactgagtataggaacagtagaaatttattgaatctgtgagaagtttttaattcaatttttcagtaatgaaactccatgaattgtgtacaaaaaaaggtacaaccctcaatcaattggacttaaatttgtgagcttgaagaggactaagtaaatgctagtcttcactagttaattttttagaaaacacttatatatttggcaaaaacgttttagattttcatgaagcatgagctgacgtagttgactatattcagcaacttgatgctttacagctagaagacaaaacccttgaagtagctaggcttgatgaatttataagtttaaggaacaatgatagaagaaacttgaaaattttatgatgagttccctaagttacacacacatgctaggcggaggttgcagtgagcctagatcgcaccactgcactccagcctgggcgacagagtgaggctctatcttaaaaaaaaaaaaaaaatgtatatatatatatatatatatatatatatatatataaaatatgtaatataaatgtgagaaattcaaaggaaaaaatacattcatattacaaaaaactacaaataagagttcccctattatctacttataattgtagacattagaaagtcattaacctgtttattagttaccaaagttatattgcaaggtttgaagtgtaagcattttccaaagctctgtgataaaactttaatcaggtatatatgccttgttatctcttggaatgttacagacagtggtcatttatagtagaggttgttactagctttaatttagtactgatattttggtgaaaatatgttttaggtttgtaaagtggttgagtaaacagttcacaatctgtcctgacattaaagagacaaagactatccttggaaggctcaaagatagtaagggaaaaagactattaaaaatagagttgtatatttaaataggttacactgtagttattgtaaaaatataatttaaaagttgtaaaacaaaatgtttatggattttgaaggttggttcctttactattgtattttgttgctccaaggacagtgcttcatatgtcataaatctgcttttgcaagcagttagactgaaaataatgctcctaaacacatttcaagattcgtgctttttttctttttcttttttttttttttttttgagacagagtctcgctctgtcgccaggctgtgcagtggcgtgatctcggctcactgcaatctctgcctcccaggttcaagcgattcccctgcctcagcctcccgagtagctgggactacaggtgcacgccactgcgccaggctaatttttttgtattttagtagagacgggtttcaccatattggccaggatggtctccatctcctgacctcgtgatccgcccgcctcagcctcccaaagcgttgggattacaggcgtgagccaccgcgcccggtcttgtgtttcttatataatggacagataaatagttacagacctttttgatgtgctgcacttttgttatcaaaagactaaaaatccacttgacttgtgtgtcagccctcagttcagcagtcttacctcaacgctttgagacactgaggtggatctctgtttacagaaacatctatcaggtggcaaaggcaagggttgtgttgctttctttaacatggctttaggattctaccattatttctttgaatagtgaagggtctgatttcctctctacaagcatgtataacttttgttgacaccaatgaaattgggtaaatggctttgggagaacagagattgctgacatttatgtagcattatttggaatataaaataaatgtgtaaagcttaccaattggaaattttaccaaatgtactcaagattttttaaaaccttgaattgggtagaaaaaaaatgatggccttttactcatagtacatcactttctttagacatttttattattcctccctttcccaccaaaagcattaatacagaactgggaaccttaacacctacatacatacacatacatacacatgctctgttacacatgtgtaatattatttaaatgtggattgtctgttttgcgtactagtcacagagatttacctgacgttgttatagtgataaggcctatgaagaaggaagtacaagttgttcagagatcacataggacagatagtcagccaagaactggctggtaaaggaagcacttcttaaaaaagtaaaaacctaaaagttgagttagttagtcaaccaacagggagaagaagaatgttctgggagagaggatgtttgcaattgtatttataaaggtaaaagattgagctagcaaggtaaaaagatgccaggtagttaagaacatttaaacagtatggcagctggacattgttataggcattagagtaccatggaagcatttgaagttgtgtcatgtagttgcactgcattttagaaagagcatctggcagttgggtgaaaacactggaagtggcaagagtggaggccaccacagtttaagaaggtgtttcaggaatctctgcaagagagatgaacaagacaaggggcagtgatgatgcagaaaagcagatcattaaaaaaaaatttagaatgagaatgtagaataaacaaaacatgttgaataatttgaaatgtgaaagaaaagaatacgccaggcacagtgactcatgcccctaatcccagcacttcgggaggcaaaggtgggtggatcccttgagcccaggagttcaagaccagcgtgaaacacagtctctactaaaaatacaaaaaaaaattagccaggcatggtggtgcacacccatagtcccaggtacttgggaggctaaggtggatcacctgaacccgagaagtcgagactgaagtgagcagtgattgcccaactgaactccagcctgggcaataggagtgaaactgtgtcagttaaaaaaaaaaaaaaaagaagaagaagaaggataaaaactaatccagcttaaataactaagaggagggatagacttggaggtaataaatagtggtttgtttttttttttttttttgaaatgttgagttttatttgtctgtatatgtttgaagagacaggaagatatgcatgcagggatcaagagactaaccttgtctaaaaaaaaatgaagccatgaaagacttaagatttctcagaatgtatagaatgagaagagaagatggcctagtgaatattagtaatactaacatttacacaatgatcagggaagcttgaggagaagaaacatgagattcagcagaaaaaccagggaattatggcattctggaagtcaagagtaataaggacgctctccaggagacctcggtaaacaatcattggctaatttttttattaattcacattcattcattaagtttctattttgtgtaaagagcaggtggggaaaaacccatatctggtctctgctctcagggagtgcatagtaatatgaagaaataaaaataagttgaaaaattacacacataaatatttctttgtaaactttaataagttgtaaagagtaaaattatgggctagatgtggtggctcatgtctgtaatcctagcattttgggaggccgagagggacagatcacttgaggccaagagttcgagaccagcctggccaatatgttaaaaccccctctctactaaaaacactaaaattagctggacatggtggtgtgtgcctgtggttccagctactcaggaggctgaggcacaaaaatcactttaatccaggaggtagaggttgcagtaaagccaagatcagaacacttcactgcagcctgggtaacagagcaagactcttcttaaaaacaaaacaaaacaaaacaaaaaaaaacaagagtaaaattatgaagacccgtagaagtacatacaggcgaatgaacttctattccgtgaagtttgagaaccttgtcttaagaagtgaactctaacctaagatttgaagaatgagtaggcgccaacagggcttgtaggggagagggcagtcctggcacataatcctgcaagtggactttgatcctgcaaaggacagaacatgtgaaatcagggccactttccctgagtaactgcactcctgaaactttattttaacccagaaattatctcagcttctaggagttttaaaaaataaaatttaactattacttttaggcaaccagctatgcagggaatgtagacctatattgacaaggatattgaagtttgggacatttccacgtcccagtggaggtcactatggaaaatatggactcatcatttattaatttatgaaatactttttaattctcttacgtaggtgagatactatgggtatgaatgaatgccactttattcctttcaaaatcacctttattatttttgttatgatttttgggagctaacatatattggcccattttatgtgttcaattcagtgatgtttggtaacttaccaagtttttacattattctttaataaaatgtttatacattaattcattttccctcccttggatgacacgagatgttctaccaggcttaacaatgaaatgttgcccttgtgaaatctttcctaggggcaacattagatatctggttcttttccccaggaataaataacacttttaagccttcaatttaaacctaaaatgaaaaggaaatcacaatttttaaacataaaagtcatattttaaatgttcattaaaaatcttttgcataccattcctcttcctcattttagtaagagttaagacaagcttactctggtatcagttttcaaaagaaattgccgagtcacaagctgaggttatgttggtctgtggtggttgtttaatctactctgttcgttcataggtaagaaaaactaccacctaaaataaacgactgttcaatgtctcacagcggattggtgctcaaactgggatttaaaattaagtcctcaaacatagcccacgcttccctacagtgactgtgtcacccatcctaggagggaaaatatagttcaggggaactttttgccacagatttacaatgaaataccggcttagtgatttgctgttggagtctaagtttattgaagccttctaggagtgcagagtccaaagtataactgcatatgtgcttccactactattttaaggtaaagaacatcctaggaaaaacagcaaagcagcatggctgtggctttagatcatcaagcagttgtaggggagaaaagcaatatcttttcctcatctgtagctaggttcaaggctgaaacccctataacaaaagacagggtagcaagagaaaggcatgcaaatttagtagaagatttatgtgacacaggagtcttcagaaattaagacccaaagaagcagggaaaactatgtgttttaatgcttacattgaatgaaggctggacagttgatatggtttggctgtgtccccacccaaatcacatcttgaattgtagctcccataattcctacggtgtcgtgggaaggacctcgtgggaggtaattgaatcatgggggtgggtttttcccatgctgttctcctggtagtaaataagtctcacgagatggttttataaagagcagttcccctgcacatgctctcctgcctgctgccatgtgagatgtgcctttgctcctccttaaccttctgccatgactgtgagtgctccccagctatgtggaactgtgagtccattaaacgtctttttctttataaattacccagtcttgggcatttcttcatagcagtatgaaaaatggactagtacaacagtcttgtggaagtatgattgaatgaaagaggatatgatctaatggtaataagctatggggacgttagcaaggcctgttcaaattattctcggtttctcggtgtctttatttctttccttttggtataggaagtatccctctagaatgagggctttctgacctactttaaaggaaggtcagagaattcttttatggcttgcttcagggaagaatggtgagagaaagtcagagagatcttcttctttaagctgtcttctcaaatgccaaagtgctatattttgtggtacatgtcctgaaccctgtcacagtattatttgttcttttttaaatatgaaaaggaacacaattgtgaagatgaaataagcatttgtgtctgttttttatacatttatttatttatttttaagacagggtctcactttgtctcccaggctgaagtgtggtggcaccatcatagcttactaccacctcaaactcctgggctcaagctatcctcccacctcagcctcccaagtagctgaagacaacaggcacgttccaacatgctttgctaagtttttgtatttttaatagagacagtgtcttactatgttgcccaggctggtcttgaactcctgggcccaagcaatcctcccgccttggcctcccaaagttctgggattacaggtgtgtgccattgcacctggcctatgtacatttttattatacaattctctgccttttgtttccaaaagtgtaggtgattatgctattctgccacatgtatcattgtagtgcacaccatatgtgggaataaaaatgctaagtgattatttcttgaatagaggctaagcatttgtggattcaggtggactgacagactcacggacctctaactcctagggaaattaaattgtttcttttgctggtaaattatctcacctaccttgtgctttatataaatgtacacttgtataccaatattttaagtgtaataaaatattcagacttttaatgaataagatgattgtagcccagattatcttgttctttggcattcaggatagggtgctttatatgataaactttcttatgctaactctaagcgcaatcatctagttcttttctcccaggtaaggcttttaatgtattaaacataaatattctccattaattttgatattgtaatgcaattaatacttgatcatttttatttttcagaggagaaaacttacagcagtatactttgaaaaaacaattttcaattacatatgtgtgcttggttttgtcccaaactgaccactttagaaaatataaatgtctttcacataaaatactggctttgcctgtgtctcatatgttattccttatctgaaaggtgtaataattagaagaccattactgtcccccatgaattaaattagggtctttttatttcctttttctttcatttgactctatttattacttaactagtgtgacaaatgtggcttaaaataaaaacgttgctattattaatgaaaaatgtgctggtcgcagcagtggtgataaagaaaaatgtgacagagcactcattttcctcttgatttggtggagtggtcgctgggaaaaagttgtaataaacagaataatggaatggttaatgttttagcagaatgggattttactttgatttgctgaaaagatatacattaataagcagtcaattgattacaactcacaaaacacagttgtcaggcatcaaattatatttctcctactagtctctgtgagcaaatcaagattttaaacacaatacagataactgaaagacacactttacaaaattaataattacttagactaaaacaaaatgaccaaaaaagtaagaagatcctaaaagaacgatgtatctgtgtaacactacaaatttggagcagcttcagtagcttccttaatcataaactaaacttgactaaaatattacatattatgttttcagaatgttataatatactactgagttaaagtcaaaaaatatactatgattcttaacaagattttattatttgtttcactaaagttattggtcatctagatgtattgtttttaatatttggagggaaaaacctgtgatgtaagtgtgcccccatgtggctatagattggtttgtaagaatgtctgaagcattaatggaaagggggcttcaattggttatattaatattatcttgttaatatttactccatcccaagcacagagttgtttctcctgtttttaaagtttttctaagatacaggattctcagtttcttccataattcttacaatcatattatttttagtagtcatacattttaaccaataggtctgcttctaattctgaagtgtataacatagtaaagacacataaatcaacacaaaagacgtatgtttcctcatgtctaaagtatttggttaagtcaagcctaagtcattctctccaagtgtttaaaaatacattttataagtaaataggaagacgtatctggtaggaaattggtattaggacaggcctatggcctgagaaaatagtttgctatttatgtgatattttaataagactattattaagtctattattaagagtatatttgttcataattttttttaaccaataggatattggatattcatagtcaatgttggcgattccacagaatttgaaaccccttttccatacagcatctttgtggagttgattgcttccataatatatatgtgtgtgtgtgtgtgtgtgtgtgtgtgtgtgtgtgtgtgtgtgtgtattttatatatatatatttttttttttttttgagacagagtctcactctgtcacccaggctggagtgcagtggcgcaatcttggctcactgtgacctccacctccagagttcaagcgattttcctgcctcagcctcccaagtagctggaattacaggtgtgcgtcaccatgcccaactaatttttttgtatttttagtagagacggggttttgccatattggccaggctggtctgaaactcctgacctcaggtgatctgcccacctcggccttccaaagtgctgggattgcaggcgtgagccaccactcccggccacttccatattttgacacaaaagtatatctttatttaactcactagtcactaatcccaggatgcaaagtctaacttattggccagttgatgcttctggaaaattgctgtgagggttggttgttaatgaccccactgtatataagcccacatcttgtttctgaggtagtgcagtgtgttggcattataatcatgtttgagcgagtttgaatggcattcatttttgtttgtttgtttgagcatgtgactgagcagcaaccgcaaaaagcaagggcaccgacggcacagatagaagcctgagcctcagcttgaaatgcatgttttcattttaaccaacattactgttctcagtggaagtttcttcagggtagaagcaaacttttccatattttattttgttatatttaaaaactagccccaaatgctgtgcttctactctaactttttgtattaaacttttaaaagtgaaatctgaaataattaaattttaaaggttgcaatcattaaagaattaatacaaacatctatttaatttttttctttactaaaaattctcttttcttaattagaattcattatttagcatggcaatatttgtgatgatgaagaaaacttctttaagtgaaatcataatattgggaggaatttaacggttttctttttaaaaataattcaagataacttccattttcattttggtcatttaacgtactgtttaatgttctcagagaacaatatttcagaagtaaatatttatgcctgtcacttttgtgcacagggcaaaatgagttatgtactttgtttgtttgagatggagtctcgctctgtcaccaggctggagtgcagtggcatgatctcagctcactgcaacctccccaccttccaagttcaagtgattctcctgcctcagcctcccaagcagctgggactacaggcatgcaccaccacacccagctaatttttgtatttttagtagatacttggtggttcacatctgtaatcccagcactttgggaggctgaggcgggcagatcatgaggtcaagagttatgtacttctgaaaagcaaactgaaccatttctgaccccaccctttccacctacattgtctaaaaaatgaatcctaaacttaagtcagtaacatttcaaatgatatattttcctttatggaagagtctcttcacacttatggaagaaaacaggttgatgtagagtgggaagggaggaaagacaaagcgatgaatgaaatatagtatttgtaatatttatttaaaatctcataatattgaacgtcttctagcaaaacgttggatggttgtcatacagatagtgattcttagctagaaaacttcatggaatgcctgaactaaatgattgctcatgcttttgttcatgtgtgcttgatatcttggaatttcaaattaattttttaatataatttttaaaatttgactgtatttgttgataattgctctttgtttttgggaaaaaaagccacaggcacttaagtgaagattattcattgagttatgattatctttatgtgtttagaaggaaaatacatcatagaaaaatgaagtagcaacactgagagacagaattatctaaatccacctaaaccgcagtttggcaaattgtttaacttatcttccctgcaactcacctagcttataagaatttaattaaatatttttaagagtcctagctgacctaatattctgactatatatcattttccagaagtatagaaggataaatgatagtgagacatgctttttttttttagatggagtctcactctgttgcccaagctggagtgcagtggcgtgatctcagttcaccgcaacctctacctcctgggttcaagcaattctcctacctcagcctcccgagtagctgggactacaggtgcatgccaccacacccagctaatttttgtatttttagtagagatggggtttcaccatgttggtcagggtggtcttgatctcttgacctcatgatccaccggccttggcctcccaaagtgctgggataggcatgagccactgctcctggcccagacatgctttaaaagtatgttttgcagggccagacatggtggctcacgcccgtaatcccagcactttggaaggccaaggtgggtggatcatttgaggtcaggagtttgagaccagcctaatcaacatagtgaaaccttgtctccactaaaaatacaaaaataagccgggcagtagtggtgtgcacctataatcccagctactccggaggctgaggtgggagaatcacttgagcctgggaggcagaggtttcagtgagctgagattgggccactggtctccactctgagcaagagtgagaacctgtctcaaaaaaaaaaaaaaaaaaaaaaaaaaaagtattgcaaatggtagacaatttataaaaagaaaaaaatcacctgtaatcttcatagataacttgatttagtttgtaaagcaccaacttggttttttaaaaaggaagactttgaccattagaataaaatatgatagtcagaatggaccatgcagaaccaagggaggagctcaacatttaccttctaaaaatctgcttgttcttccttcccacttcttattcacaaaacaaaaaacatatgagtgctaaaacattaaattatttttctctcttgaagtccagagttgtcatcccaaagcccatgtggtcgtcagttgtcataatgttccatgccaatctggaataaaatgtggggaatgggcgttccattaaaaactattattcacttataaagccttacattgtgtatgtgaccatatacttccccctctcttcaaccagggtagtgcaaaaaaaaaaaattaataaattattgaaattttcaactccaagagtaaattcagcattaatgatttttttaaagaaaataatgtaggagataaaattgaatatatttattttgcaaatgtaatttcatattaacaaagaaatgtatagagaacatttcatttgcagctgcctaacagaggggtaattgactaataaatgcctcatgcccttttaaaatagactttccaggccaagagccgtggctcatgcctgtaattccagggctttgagaggccgagaagagaggatcacctgaggccaggagttcaagccaggctgggcaacatagtgagacactgttactataaaaaaaactcacaaaaaacaaaaaacttagctgggcatggtggcatgcatgtgtagacctagctactcaggaggttgtggtgagaggatcgcttgagctgaggagttagaagccatagtgagctatggttgtgccactgtactccagtctgggcaacacagtgagaccctgtctcttaaaaaaaaaaaagtctctacagtactggcatggctacattatcaacaaaaatgaatgcctctcaaaatctggccaatggaaataatattattccatatttcttcattattctatgattacaaatagtctgcatgtagaggtttatttccaagaaaatccagtgtcattgatatgtactgttacagttaccaaaatatatcagtttttagatataaggacatcaaagacactcccattccccatgttccaaagaaatttaaacttatccagatatagatgataacacataaatatttttgtgggaaaactttttgctttacaatgctagttatatgtctagataagttaatgtctattcaaactaaacacgtcatacagcaccttttcttttatattttgaaaagcatacatgagcaagagtggaagagaaaatagttgattagaaaagcccacagtcttttagattctctttgattattatatctgtaactgcgtcaaacacaaacttgacattttgggtgtcagtagcacaggtcatgtgggaataaatttccttatcttctttttttaaattcaggtctagaaactggttcttgatgtagtttcctgcatcttcaaatgtatttggcccttgttaaacaaaatatttgaagaagtaaagattaatcatatgttacaaagaataggctataaataatatcagcaaattttaggattttactttgatatacaaagtattgcaaaatcataaaggcaacggtcaattatcagggtgctgggaactatgctcacccctttgggagctcccggtggctaaaaggtaaactttgcatcaaaaagctcaaaatacagtagaaatcccaaaatatttataaaacaaagtgagtgatacaaacttacgtatacatcaaacactgtgtgtgtgtttgtgggtatgggtatgggtgtttttatacaaattaaaagagaaaaagaatggaaaaggtagatgactaaggcacagaaggagatggtatttgagctggactttgagaggtagctacaacagagaaaagtaagtgaaaacaaaaaagtgaaagtgagaattgtagcactagacttgagggtagggtcgggaaacagactgagctttgaagaatctacttcgatagaaatgaaagatttttgtagaggaattgtaggaaatcaagtagaatagatgttatgggctagattatagactatgttactaacaaaacaaaggagttaggatgcgatataaaaggctatagagaggtactcttcactgatgtgttatatagcagtaatacaatgaaggctctgcttgagaaactttagtccaatagcaggatgtgcaatgaatcagttgagaaaaggcagaaataaaacaagtaggctaaaaaatacaggactactaaaaatgacctgttgatgggctttataacagaatatgctttaaggggacttgacacagaatagagcagtagcataaagactttctaaaaaataagtctttgtttcctactttattgtaactagaaacaaaattccttgaaggacaagctttaaagccatataacatggctaaaatccaaaacactggcaataccaaattctggtaagtgcatggagttataggagttaattgcttgtggaaatgcaaaatagtgcagtcactttgaaaggcaatttggcagtttcttacaaagctaaagatagtcttaccatacaatccagcaatcacacttctaggcatttacctagaaacttatgtctacacagaagcttgcacatggatgtttatagcatctttttccataattgccaaaaattgagaggaaccaagatgtccttctgtagctgaaaggataaactgtggttcgtttaaggaacagaatattaatttaggaataaaaaaattagctatcaatccataaaaagacatggaggaaacttaaatgcatattgcaaatgaaagaagacagtaagaaaatgctacatgtcatatgattccagttatattacattctggaaaaggcaaaaggatagaaacaataaaaagatcagtggttgccaggagtgtgaggagggaggaggcatgaatgggggaacacaggggatttttaaggcagcgaagctgttctgtataacactgtaatgctggatacatgacctgcatgtggcaaaacacatagaactgtgcaacataaagagtgaaccctaattaaatgatggacttggccggggacggtggctcatgcctgtaatcctaacactttgggagggcggatggatcatctgaggtcaggagttcaagaccagcctggccaacatggtgaaatcccgtctctactaaaagtacaataattagccgggcgtggtggcgtgcacctgtaatcccagctactcgggaggccaaggcagaagaatagcttgagcccaggaggcagatgtagcagggagctgagatcgtgccactgcactccagcctgggcaacagggtgagactccatctcaagaaaaaaaaaaagatggactttagttaataatgtaaaatgtgttaatatcaattcatcaatataattcatcaattgtaacatatgtaccacaccaaagcagttctctaataatagagaaactgtaggaggggatgggaaagaaagtacatgggaactctttgtactttctgttgaaacatttcatttctctgtacactagaaactgctctaagaaataagtcctgttatatatataatataaaacctttaattatgagtttatatttaattagtaatcaatatatttgaatattatttgtaatatgcaaaatatattattatacttaatcacatgataaatgtatgaatatattataaatatttataattatagaaaaaagatataagccctaattgtaggttgaccaatgtaagtatttgttttgataaaatgccatggtcctagtaacatctgggcaaccttacgcacctaagtggtaaaactggatttgtatttttgtttaaatcataaatatggctgggtgcaatggctcacacctgtaatcccagcactttgggacgccaaggtggacagatcacctgaggtcaagagttcaagaccagccttggcaaacatggtgaaaccccattactactgaaaatacgaaaattaactgggtgttgtggcgtgcaccagtcgtcccagccactcgggaggctgaagcaggggaatcatttgaacccacgaggcaaaggctacagcctgagcgacagagcgagactccatctcaaaaaagaaaaataaatatttttcttatgtaattttattaccaatggaatatccaactatttacaaaaataaataaataaataaataaaattctttctgaaggagaaacagcccttctgtgggatttcacacttacaatcgctgactaacaggattagcactaaaattccaggatccacgaaaaccggaaaatgaagatgtcattattcattctcaaattcattcatgctatatctctagaaacaactcagagattgaagagcctctgagatctactacagcattacaaggtttcagtaggagatacattaaaaatgccaatttcgaataagatttgcattcctgttataattttgaagacaattcaggttccaatgtcatttgataaagtctatagagtagcaaccctggtccatctaaccccttccagtttattttattagggttttgctttaatgtacacaatgtagagagggttcttctttatttgtaagattttttttccagtttggatcataaagataactcaaaaatgatcataagcctcatcctcataagtattaaatgtcaagatccagataggaaatatatatttatacaaaaatttatttctatggaactaaaagaaaaaaatcttaccagtgtattctggaaagcagatactaagatgcaccttggttaccttttcttgaaagatatcttttttgttgaggaacaggacaatggaggttgttgaaaaatacttgtgattacagatactgttgaacaggtgaaggctttcatgcattctattctgttaggtatcagaaatgagaatgggtaggattattatttgcaaaatgtgaatgttgagcatcatgaacaaggatctagaactaacataaatctttggcaaaccttcatgagttgggcaatgtggtagtactactgaaaagcacaaagattacttttaaccctggctttgtttttcctttagacttaccacttcttcgtcttccacgaggaccatgtcataggcactaagtgcagcacaaaatataatgcatgtaactccttcaaagcagtgaatccacttctttctctcagatctctgtccacctacatcaaacatcctttaagaaaacatcaaatgaataataaatcttgcaaatatcctccaaaatgtgcattgaggttaacatttagaggtataaatgggtgatcccctatcttcaaaaggtattcttttgacttttattgattataaaattaaatttatttggtcaaatggctgctcaaggactacagagaaaaaacagtcttttaaaattgtctccgtgcaaactagaataaaataatttacacactgactttgagaaactgggaagtttaaaagagtttagagttttggtaaaacattcattagccacagaagattttgataaaagtttagacatattctcttgaatgaaaagaaactgcaagaagattggaagttactgtagttctgatgttatgattcttgcctattttcttaagtctttctacattcatttactcaaacaattattgtttgcattctatgtactagacactgtgctaggtctactagcacaaagatgaaaagatatggtccctatcttcgaagaacgttctgtcttgtagagaaaaaaacaaataagttactataatattatgtaaaaaatattctaatatacaaggtaaaatgtgagcatacagaaagacttaagttagcctgagggatcatgacacttagagaaggtgtttgaaaactcagcctttcctctacttttatattttggtaagagatcattgtggatcgaggactcaattttaaaaactaggagctaggcagtaaaaagttaggttgatatcaaaggagctgtttaatgtttgctgcctcagggctttcacacacagtctctttccttttcctgtgacaaagatttccttcttccttccaaggttgctttttttctcaactatgaagtcttagcatcaatatctcctccataaagaagcctcctggagcgtccatttaaattacacctctctccaccctccatttaccttctatagcatcactttctttcctttatggtaatcatcaatatctatcatctccctaatacaatagcagcctcatgaggtcaggaacgttatctgtattagtaactgctgtattcctagttcctggcaccatgcccaacacataacaggcatgcaaaaaatatttgctaagtaaacgaatagattccatgttaactgaatagagaggcaggaaacacagcaaacatgctatgttctctcatgccttgataacttacacatgttttctataaatatgtgtaagttatcaaggcatgagagaacatagcatgtttggggtaagcaagcaatttatagttttgggaacataaagaataaggtaaaaacactgagctatatggcctaataattatcaatttatccactcattcatcctttattcaataaatatttactaagcacttattatatgccaggcaccaaggattcagccttaagaagcttttaaactggtggtgatggtggtagtgattggtgtgtgtgtttcaaaatagactttagatatcctataggatatccaaaatggattcagatatcctatatggatatctgaaaatagacttaataggaaatatccatatgaaaatagacttcagatatccatataggaagtgtagggggtgggttgtcatttgaaatggagtgatcaggagttgtagaagatagcagaagtgtaaaaacctaaggagatgaggggttgagccaaatggatatctggagcaaacaatgttataagcaaaggtgacagaggaaacagcaagagcaaagtacttcaggagtgagcctcatgtgatcagccagcagtggatttactggtcctttcatgttacatgagaaatgtagatttcatattgcagactatagaagactatgggtgatttttagatagggaattgacattttttgtttgtttgttgttgtgttagatcactttgatctgagtccagaagttgggcttaatgaggaagagattagaagcaaagaaataaagtatggggctatcataatagtttacaaccaaggtattaagtaccaaaaagcatccaagttgtacagacttcacgggtaatagttatatttggagtaataaatgtctaccgatctgattattgaaaataatcaaaagtacaatatattatacttcgtatttcacatatgaaccaagtaaagatatatataactaatattccccaaataatgtactaatgcaaaatcactccattaagcagtagactaaaagagaagatgctcacaatattgaagataatggttaagagttcaatagttaatagtgtggaaatttaaatttggtgtgtataaagaatattatatgtgctactaattaccaaattgcagtttcaggcttgcaaaataaatggaggaaggggaccaaagtttgactttacggttatattatgtgaaaattaaccaatacatttaatttttaaaaattaaacaacattcttacagaaacaaggatgataaatatgcattcagaaatttaaattgttcatgaactgttttgttagtccataaaaacaaccttagtgtttttcagacttcgtaaactggagttttatttctttctttgttgaaattacttttaaagtataaattacatttaaactataaaatgtggtggaaatagaaatagttgagatcatgactttcatgttccacatcaccagttgtaatggattaatcttaatttaacacacctaataagagtttactatttgtcgggtatataagcaccttacagcaattaactcatttaaacctcttcaggaacttgcaaggtaggtaagtttagcattcttattttttcagagggacccttaagcaaattgcctaagaattattatttcagctgatatttgttgaggctgctatgtacctggctggcaccacgataggttcgatagattccgtggctatgatagctatgctgtgaaagttgttaacttgctaagtctatttacttagaacagaggtgcacaactagtactagtgcctgcagttggctctcaaaccttcactagtggacagaaattatcttcactgtggagtctatccttctcccaggccaggcagtagttctatgttgtcaaacaggtcactgggcaaaaaaattaaactcccttcttctgggaggtttcgttcttttcttttaatgaagataatcacctaatgcatttcagatgtagtacatataggctccatttggtcatatatgaatatattgtggatcactttttggcaaagaattgtgatgctgtgattgaacaatgatgattaacttatggatttgggggacctgagggtagagtatacattactaggtttaaactcctggtgggcttttcaaactgaaaccaccctttctaaccccacccacggggtttttaacccataaggatttccatagtcctaatctctttcactctaatccccacctcagggggggaaaataaaaaacccctttccattgcttaatgacaaaccagtcatggagccaagacaaagagtaatggaatgtttgtgctaagggagcccgatgtgccatttccacagcagtgatggcagggctgtaggaatcgaattctaggatgcctcaggtaagttttctccactaagcagaacttgcattagtcttgtcaacctttgtagtctccttttccctgcttttatgcccaattatgccattttctttcattccgattgatatttgtattcttttagtcacattttcaattagattatatattgttagattctattcacatcttaaaagtctgagaaactcctctctttaaggtgactttgtaattgctcagatttcctgcagagtgaccaaatattttacctcagagaaaaatcatcttatttctctcatgctaatagttttgttttttggtgtgtggggggttaatgataaaaataatagtaggaattaagatatgggaactctaatttgtgggttctatgggggacataaactccccaggaggaggaaaaaaagggagcctcatatacttcctacatattttattttctacaacataatgttttcaaatggcttttctccaaatctgaaacatctgaagcatctctgagatgaaaatcagagtaacagcaaactcaatggctatgtcttaatttgctctgatgagtcagcttctttgcagcctactaatgatgtgttaacaggtgtaagaggtagctattctcctcttctgataaatatgtacaactgtgataagtaacaattgcaggaataataccttacggttgaataaaagtcatattggaattgtgtgctctccctgaaaaataaattctaatccatggccttatgttcctcataacaattctttgaagggaaaacagtatttacccatttctttaccaaaatgaagaaactggcctttgagaggctaaggtggtttgttcctaaactcacaattagtaaaggatagaactcacgtactatgacctttagcccagtgctctttcagcatatcatgcagcttctaataaacatgttttaagtggcttggctttctcccaaggaagagaggacaaagattgctcagtcttagcattttgttcatatagataaaatggattctgaaagtctctcttaggttgaatgcttataatcgtctcattttatgactcatttgataaacaatatttttgtgtgtgcagattgacgtaggagacataggtccagggagcactgcacatttctctaatgccatctgctattattgaactgaaatgctcattagcaaatcagatcaatagccagagttttgtttttgtattgattctcttggacactatgttagctctaagactagttacattttgttttgctaatattgtagtcatttatttttcatacttttcagttttagcttttccccaaattttaatttagtccttattttatggaattgtaaagtattactacctatgaaaacaatttggagatccccaaagtgaagtaattgcttatatttttggccgaaggaatattctcccttatgcataaaaatgaaatcaaaacaaaaagctttattgtgaccattctgtgagagacaaaattaaaatcagagaaaacatgtatatttgctgcccggagttttggattggtcaaatataatagattattaatgagggaaatggacatgcttgaatactcttaactccctgaataaaataataaatcttaacttccacgatgttacatggaacttacagtcctcatttgggattttgtgtggggttttttggtcttatttatttaagttttttttttaaggagggataatatgtattttgttattaagtctgacacttgatggacttcttaaagttaaaaaatttaaataactaaaatttatgatgtagctaaaaattgacaggccaggcttttaagtgacagtcgaacactgattatttgttaaattgaccaaggcattaatacagggcaaaccatcagagttttacggctttatattaaacagttgactcaacagttgagttttacagttctagtaagcagtcggcaaagctttgagctttacggtttatgttaaacagttggctaaatattggatcacatgagattattcacatttcatatcagaatagattattataatataatctgcttataattcttgtaaaattattatataatctagagtagctaaaaatcaacaatgctactgcaggtaatttatttgttagatgtctttgcttatcctataagcatgtacttatctttgaaaaatcactttctgacattctctactatgtatatgattacataaaaataaaactcaatctgagtaggaatttattttaaggtattctattgaatgggatttattcaagatgttagtctctatcgcagttgttataatttctcatcatggttacatatgagaccaggtggatctgtgtcttcactacacacccatagcaaatggtctaaccaatctttcccttgtttctggtcttgaaaacagagaatggtagatacttgcagacaggaaggatgtgcacagatgtcttactaagtctcttaaatcctcacaattaaaaaacagaatcaaaagaatttataactgtaagggagccaagctctccaaatcatcagaatcattaataccattatatactttctactaaatgtgtgtgtgcatttgaaacttcaaatgcccactagataattctccgattatttaataatgtaattcataaagccatcacaataaattctgtcactagaatcaattaaacatcatattttataacttattattttggtaatactaaccataaacatgcctgaaacaaatatatagtatatatgagttattgctctatgagatcttataaagactaggaaagccaaattgaaatgtagctgctggatggacagccagattcactcctatctgagatgattcatatgccacacaaatgaccacgatatacacaattcaacgtcatatctcaggaaaactgtagtttcttttatatcatagatctgctcaaacattcttataaacagttatggtaatttatgaaatctaaagctctgtgttgtaataattgttaaccttttttccttagctcccatatagttttaagtcctttcaattctgtttttccatcatggaaaaattagggagaaagtttcttctctataattgtctgctaaatccctgtaaatacatgtctaagttatttgttctgaggaattattctgtaacaataggagggctcacatttgctctgcattttccacttacatagtacattaatgtctataaagataatttattttatcagtttgacagttgcagttctggtttgataagaactctacagtaatttccactgaattagatgatacacaattatgatacagtacattggcagagataatttttcattttggtgttcctatgtaaaattttagagttatctaatttagtatgtaaattgagcctttggttttaaatagtcataagacatcttatgctatgtgaatacaaatcaatgctaatgtaatatattttaacacctgggcacttgctgaaaaaaagttggaaggtacattatttttatacttcctattttgaaatactacagaattgtacactctaaaaccctgtgcacttttggactatcctatttagcacttgaaataaaagctatttaatggtgagaatttattaaaggattaatatatcttaattgctctaactaaacttaaaactgtatttaaataattttaaatagctcctcaagaaaaagatattttaaaatattttgtaacaaaatttaaatatttccaaattttattgtttaaataaagacttgttttcagaaaaattccttgcattggagtaaggaggtactgtatcttccatcctcttcctcactgaaaatgcctttaataacattgtcttgagtcagaggaaaagcaaaggctcttaaaaaaacaagcttgatacctgttttagtatatagcgaagaggtggtagttgcacagtaaagagaatgttcttttttttttttctttttttgagacagagtcttgctctgtcacccaggctagagcgcagtggcgcgatcttggctcactgcaacctccgccttttgagttcaagtgattcaccagcctcagcctcctgcatagctgggattactggggtgtgccaccatgccccgctaatttttgtatttttagtagagacggggtttcaccatgttggccaggctggtctgaactcctgacctcaagtaatccaccagcctcggcctctcaaagtgctgggattacaggtgtgagccaccacgcccagccaagagaatatcgtatcaaaataatttctagctgggcttcacaatccaattcacaaacaccttacactttagcattcatactgtaatagagaattagcaaaaccctcctcattgcttcataaggatc

SEQ ID NO: 2721 - DNA, 4512 bp, Homo sapiens
cccagcccaagtttttagggtggggatccagactggttatacgtaccttcagtccttctcccagaggaaggcagaaacacctcaaagcctgcatgtaagaacatctactgagaaattattttaatcagacaccagctgagtgggagaaaggaaaagaacagagaagaacaaacaaaactcccttggtcttggatgtaagagaatccagcagagatggactggagtttcttcagagtagttgcagtgctgttcatttttctggtggtggtagaagttaacagtgaattccgaatccaggtaagagattataacactaaaaatggcaccatcaaatggcattcaatccgaaggcagaaacgtgaatggatcaagttcgcagcagcctgtcgtgaaggtgaagacaactcaaagaggaacccaatcgccaaaattcactcagattgtgctgcaaaccagcaagttacataccgcatctctggagtaggaattgatcagccaccatatgggatctttgtcattaatcagaaaactggtgaaattaatataacatccatagttgatcgagaggtcactcctttcttcattatctactgccgagctctgaactcaatgggccaagatttagagaggcctctagagctcagagtcagggttttggatataaatgacaaccctccagtgttttcaatggctacatttgcaggacaaatagaagaaaattctaatgcaaatacactggtgatgatactcaatgctactgacgcagatgaaccgaacaatttgaactcaaaaatagccttcaagattataagacaagaaccttcagattcaccaatgtttattatcaacagaaatactggagaaattcgaacgatgaataattttctagacagagagcaatacggccagtatgctcttgctgtaagaggctctgaccgagatggtggggcagatggcatgtcagcggaatgtgagtgcaacattaaaatcctcgatgtcaatgataatatcccttacatggaacagtcttcatataccatagaaattcaagaaaatactctaaattcaaatttgctcgagattagagtaattgatttggatgaagagttctcagctaactggatggcagtaattttctttatctctggaaatgaaggaaattggtttgagatagaaatgaatgaaagaacaaatgtgggaattttaaaggttgttaagcccttagattatgaagctatgcagagtctgcaactcagtattggtgtcagaaataaagctgaatttcatcattcaattatgtctcaatataaactgaaagcatctgcaatttctgtgactgtgttaaatgtaattgaaggcccagtgtttcgtccaggttcaaagacatatgttgtaactggtaatatgggatcaaatgataaagtgggagactttgtagctactgacctggacacaggtagaccttcaacgactgttaggtatgtaatgggaaataatccagctgacctgctagctgttgattcaagaacaggcaaactcactttgaaaaataaagttaccaaggaacagtacaatatgctcggaggaaaataccaaggaacgattctctctatagatgataatcttcaaagaacttgcactggtacaattaatattaacattcaaagttttggtaatgacgacaggactaatacagagccgaacactaaaattactaccaatactggcagacaagaaagtacttcttccactaactatgataccagcacaacttctactgactctagccaagtatattcttctgaacccggaaacggagccaaagatttgttatcagacaatgtacattttggtcctgctggcattggactcctcatcatgggattcttggtcttaggattggtcccatttttgatgatctgttgtgattgtggaggtgctcctcgtagtgcagctggctttgagcctgttcccgaatgttcagatggagcaattcattcatgggcagtagaaggaccacagcctgaacccagggatataaccactgtcataccacaaataccacctgataacgcaaatataattgaatgcattgacaactcaggagtttatacaaatgagtatggtggcagagaaatgcaagatctgggaggaggagagagaatgacaggatttgaactaacagagggagttaaaacttcaggaatgcctgagatatgtcaagaatactctggaacattaagaagaaattctatgagggaatgtagagaaggaggtctgaatatgaatttcatggaaagctacttctgtcagaaagcatatgcttacgcagatgaagatgaaggacgcccatctaatgactgtttgctcatatatgacatcgaaggtgtaggttcccctgctggctctgtgggttgttgtagcttcattggagaagacctggatgacagcttcttggataccctgggacctaaatttaagaagttggcagacatcagcctaggaaaagaatcatatccagaccttgatccttcttggccaccacaaagcactgaaccagtttgccttcctcaggaaacagagcccgttgttagtggacacccaccaatctccccacatttcggcactaccacagtaatttctgagagcacctatccctcgggacctggtgtactgcatcctaagcctattctcgatcctctgggctatggtaatgtcactgtgaccgagtcttacaccacctctgacactctgaagccctctgtgcacgttcacgataaccgaccagcatcaaacgtggtagtgacagagagagtggtcggcccaatctctggcgctgatttgcatggaatgttagagatgcctgacttgcgagatgggtcgaatgttatagtgacagaaagggtaatagcaccaagctctagtctacccacctctctgactatccatcatcctagagagtcttcaaatgtggtagtgacagaaagagtaatccaaccaacttccggcatgataggtagtctgagtatgcaccccgagttagccaatgcccacaatgtcattgtgacagagagggttgtttctggtgctggcgtaactggaattagtggcaccactgggatcagcggtggcataggcagcagtggcctggttggcaccagcatgggtgctgggagcggtgccctgagtggagctggcataagtggtggtggcattggcctgagcagcttgggagggacagccagcattggccacatgaggagttcctctgaccatcactttaaccaaaccattgggtccgcctcccctagcacagctcgaagtcgaatcacaaagtatagtaccgtgcaatatagcaagtagtcaggaccccagctcactttttcatagtcattgtggtttagatccaattcccaccactaaaaaactaacaatgtgatttataacgcacaacttcgtgctcaggtcatctaggagcaaggtgagaaatcacaatgagaaaaataaatggaaacaccactgctaggggagagctctccttagcattcataaacttttctcttatattaggactaaggaactaaaacttgaggcagagtcttctttgtgcctgagtggcctgtagtccatctccagcatgtaactggccttacgatggcaattggcatcattctccttgctctgttttgcttttccatatagctcgagcaaaattcaaaaagaactaaatatgcaatatatgttcatatctatgggaaaaatctaaaatgtgtgccagatgccctgttggtttcacagataacataaataaaaattcaaccacagatttatacaagggttaaccattttttttaagtttgactacatagtcaagtccacaagccatcaagcactcctaccttaattattgcactagagaaaataaattccaaattaggaagtgtttcctaggaggaaaattccattagagagtggcaataggatgaggtttcttcagggtaaactagcaatgcctgagcctgaaccttaatgtggggcctcagttaatatccctgtggagtcaaggattcttctgattctagtgtgtgtttagtgatagatgtagtcttgacgaatattgcttactggtgaggttgaggaatatcacactcgtctttccctttaccactgtggttttgacttaagaaagcaaaactcactaagtttacttctcgaattgaagcaagtgaggcctgacatggttgtcatcactagtggcaaatgaccttccaagtaagcagatgggaactgaattgtgttttcaggttttgtttttagtaggtgatattcattcgtatccagctctttattacatagctctgaagttaaaatgatttacataggccgagctgtggacaaaaaaaaagaagcagcagcttgtagtatgcttaagctttggggaatttttttttaaggggatctaaaaaaatgtttttagaacatgtaaaatgtttaatggtgaaagttggaaaa

SEQ ID NO: 2722 - protein, 1049 aa, Homo sapiens
MDWSFFRVVAVLFIFLVVVEVNSEFRIQVRDYNTKNGTIKWHSIRRQKREWIKFAAACREGEDNSKRNPIAKIHSDCAANQQVTYRISGVGIDQPPYGIFVINQKTGEINITSIVDREVTPFFIIYCRALNSMGQDLERPLELRVRVLDINDNPPVFSMATFAGQIEENSNANTLVMILNATDADEPNNLNSKIAFKIIRQEPSDSPMFIINRNTGEIRTMNNFLDREQYGQYALAVRGSDRDGGADGMSAECECNIKILDVNDNIPYMEQSSYTIEIQENTLNSNLLEIRVIDLDEEFSANWMAVIFFISGNEGNWFEIEMNERTNVGILKVVKPLDYEAMQSLQLSIGVRNKAEFHHSIMSQYKLKASAISVTVLNVIEGPVFRPGSKTYVVTGNMGSNDKVGDFVATDLDTGRPSTTVRYVMGNNPADLLAVDSRTGKLTLKNKVTKEQYNMLGGKYQGTILSIDDNLQRTCTGTININIQSFGNDDRTNTEPNTKITTNTGRQESTSSTNYDTSTTSTDSSQVYSSEPGNGAKDLLSDNVHFGPAGIGLLIMGFLVLGLVPFLMICCDCGGAPRSAAGFEPVPECSDGAIHSWAVEGPQPEPRDITTVIPQIPPDNANIIECIDNSGVYTNEYGGREMQDLGGGERMTGFELTEGVKTSGMPEICQEYSGTLRRNSMRECREGGLNMNFMESYFCQKAYAYADEDEGRPSNDCLLIYDIEGVGSPAGSVGCCSFIGEDLDDSFLDTLGPKFKKLADISLGKESYPDLDPSWPPQSTEPVCLPQETEPVVSGHPPISPHFGTTTVISESTYPSGPGVLHPKPILDPLGYGNVTVTESYTTSDTLKPSVHVHDNRPASNVVVTERVVGPISGADLHGMLEMPDLRDGSNVIVTERVIAPSSSLPTSLTIHHPRESSNVVVTERVIQPTSGMIGSLSMHPELANAHNVIVTERVVSGAGVTGISGTTGISGGIGSSGLVGTSMGAGSGALSGAGISGGGIGLSSLGGTASIGHMRSSSDHHFNQTIGSASPSTARSRITKYSTVQYSK

SEQ ID NO: 2723 - DNA, 440 bp, Homo sapiens
ttgattttagctgacactatagaagagctatgacgtcgcatgcacgcgtacgtaagcttggatcctctagagcggccgcctactactactaaattcgcggccgcgtcgacttttttttttttttttttttcatttggacaggtttattgaagctgagcagtttccccataatctagatgacttcaggttacacgctgtgtggctctctccagccacgagtcctcgtcgccaaatgggatagataaacgtctgttcagtctgcaatataatttggcataaagctgcagccacaagtgggctctgctgctggatgtggatcaggctctctggaatgtttgtttgcacacttgaccttcacagaacatttccaggtggagtttgtctccttcgatccaatgggtccagcctctgttctttttttctcctttctgaatacaggt

SEQ ID NO: 2724 - DNA, 3032 bp, Homo sapiens
aattctttttattattataaaagacatgtaatactgaatagaaagaaaacccacagactggaagaaggtatttataatacatattaataagattattttcatatctagaatatataagtaattatatataaacagttcctacactccaataagtcaaagacaaacaactcaataagaaaaaaatatgcaaaggatttgaatagaacctttaccaaagagggtatctaaatgaccagttaccacaggaaagtttctcaacttcatgttaagggcaggagacagggaaatactgggtagaagagggtggtccccaagcaaaggccccaccctcaagcctgaagacctgtggccctaaatgaggacaggcatttcaggtttcacacccaaaaagttgccttttggcccgccatgccccgctgtcgtacccccatataaatcccaaactccaagctccagaagagacctacaagtgaggagacggagaggcaagccgacaaacaggcctgcgatggcagaatgacacagcagagaaagagaggagggacatctggactccgaggggagtttggccagggacgggtggagaagagtctggccactgggaggcctgacactgggcgaaggtcaccttcccactccatcttgctgacagccacctccaccactcaataaaaagttgccctcatccctcgagcccccgtgtgatccgattcttttgggacactgggcaacagctggggatatagagggctatttcactgtcccactacccatgagataaggaagagggtttgttgagctgattaacacataaaccatttgcagatggcaaagctaaaggagcacactgtaacatacgcccacttgggcttcggaaatcgcagacacccacccctagatgctgctgtgaggccagagcccgaaagcgctcactccggttcccgcaccggtgcatctgtgtgctccccctccccgtaaggggtttgagctgcagggcgacctaactggcaagccgcacacctgttgcatgtccttcaaggggaatcagggatctctcacatttcaattagtcatcaggaaaattcatattataaccacggagaattattgctttgtgttaccagaaaagctaaaattacaaggattaaaattaccaagtatctctgagggtatggagcaacttggacactgctgatagaaatgtcaagtgatgtcaagtgttataatccatttggaaaattgtctaattttatccattacacctaaacataaattatgtcccagtgtttcactaccaagtatgcacttaccagaaatgtggattgtgtttaccaaaaacctcataatataaggcccatagcagcactattcataccagctccaaactaaaatctgctcaaatgctcactaacaggcacacagataaataaaatgtgaactattcaaaaagtggagtattaaatcgcaataagaatgaactatctgtaactacatctaacaatgtgtttgaatggtccaaacacaatttttggtgaaaaactctaaacataagaataaactgcttctttttcattatacaaagtacaaaagccagacaaatatattccatgttcttgaagatcagaatcgtggtctctgtgtgtggggggtgtgggagagggttgagaggcgtattgactgaaaaggagtactggggttttctgggatgtaataatgttcagtgttttgaccttggtggtggtttcacaggtatctttaccttctcaatatccagcatatgatttatgttttccttatacatattacactacaatacaaagttttaaaaatcagcatttcaatttgttgatttttggattattaaacctatttacgtcaaatgagagtgagccagttgcttcatacacatatacaaaaagtatttagaaaactaatttcataaattgctagaaaagcagacccccaaattcatcaagcactgcattcttggcaaagtttgtacacattgtctgggtgctgattgtgaaaacattgcctaaaccaaagttttgtatgtgatttcttttaaagtttctcttatttcctgttctgaggtttatacacaatagacccgaatagagtttgaataattgaagggtttatgaaatccagaggatattaccagctgctgatttgcacataccaagaacatgaacattttccaacggagaatttccctagcttaataagaaaaagtccaagagccggtcacagcattaacatttagtgggagtgcagtgagaattgggtttaacttctggcatttctgggcttgtggcttgtggttgattttttatttactttgcaaaagtttctgataggcggagcatctagtttcaacttccttttgcagcaagttctttcctgcactaatcacaattcttggaagaggagaactggacgttgtgaacagagttagctggtaaatgtcctcttaaaagatccaaaaaatgagacttctagcaaagattatttgccttatgttatgggctatttgtgtagcagaaggtaagattaaaagagactcttttctgaaaactgtattatgaaacatttgctaatgatgcttttcacaggagtaataaaaatttgatttagaaaatgtgcttaagtattctgtaacttgacaattgagtggcttttgacattgttgagtttaaaaaatgtaagaaccttatttgaatggtatatctaaatattcatcataattatatttaatataaaatagaataaaatgttttaataaacatttctgaaaaactatgatctggaataatcatttcccttgtaattatcataaaatgtaatttacttttttgcttaggagataaccaaaatgtattatgtgaaagcattaagaaggatgtgaatatacatagtcaataaaagccatcaaatcataatgattagatttatttcaaatatgattttaactcttcctaaataaaaattcatttatcatttacaactgatattgtcatgaccttagaatt

SEQ ID NO: 2725 - protein, 19 aa, Homo sapiens
MRLLAKIICLMLWAICVAE

SEQ ID NO: 2726 - DNA, 243 bp, Homo sapiens
  misc_feature (130)..(130): n is a, c, g, or t
  misc_feature (155)..(155): n is a, c, g, or t
aggctcggctccggaatcactgcagcccccctcgccctgagccagagcaccccgggtcccgccagcccctcacactcccagcaaaatgggcaaggagaagacccacatcaacatcgtggtcatcggccangtggactccggaaagtccaccaccncgggccacctcatctacaaatgcggaggtattgacaaaaggaccattgagaagttcgagaaggaggcggctgagatggggaagggatc

SEQ ID NO: 2727 - DNA, 248 bp, Homo sapiens
ttttttttttttttttttttttttttttttttttttttttctttttccaatggtcttttattttcaaaggctccactaaaattactttttttagatttctgggctatgggtttttagttgtgaattcaaagataaaagtcaagtagagcactgcatgagaataattcattttacagggcaatcaatcagaatttgcacatttgttatatccgagatgtacagttaggactcaccccttcttccactca

SEQ ID NO: 2728 - DNA, 420 bp, Homo sapiens
tttttttttttttttgcatatggacatacaattgttctagaatcatttgttgaaaaggttgtccattctccacagaattacctttctaaatctgtcaaaaaccagttgtccataaatatgtgggtctatgtgcggacactattgtaccatgcatctatttgtttaccattaaggaaatacaatcctgtcctgatttctgaggctttgtaatagatctgaaattaggtggtgttaaccatcccacatttcctttctattctaacatccttgtggtttttcttgatattttgcattcccatatgaactttaggatcagtttgtccatctctatgataaaagacatcagggatttacaatgagattgtgctgaatgtatacatccacttggggagaactggcatcttaacaacattaagtctt

SEQ ID NO: 2729 - DNA, 1274 bp, Homo sapiens
aggtccaggccaatgataaccttataagaggccatgtcgaagcgcgacatcgtcctcaccaatgtcaccgttgtccagttgctgcgacagccgtgcccggtgaccagagcaccgcccccacctgagcctaaggctgaagtagagccccagccacaaccagagcccacaccagtcagggaggaaataaagccaccaccgccaccactgcctcctcaccccgctactcctcctcctaagatggtgtctgtggcccgggagctgactgtgggcatcaatggatttggacgcatcggtcgcctggtcctgcgcgcctgcatggagaagggtgttaaggtggtggctgtgaatgatccattcattgacccggaatacatggtgtacatgtttaagtatgactccacccacggccgatacaagggaagtgtggaattcaggaatggacaactggtcgtggacaaccatgagatctctgtctaccagtgcaaagagcccaaacagatcccctggagggctgtcgggagcccctacgtggtggagtccacaggcgtgtacctctccatacaggcagcttcggaccacatctctgcaggtgctcaacgtgtggtcatctccgcgccctcaccggatgcaccaatgttcgtcatgggtgtcaatgaaaatgactataaccctggctccatgaacattgtgagcaacgcgtcctgcaccaccaactgtttggctcccctcgccaaagtcatccacgagcgatttgggatcgtggaagggttgatgaccacagtccattcctacacggccacccagaagacagtggacgggccatcaaggaaggcctggcgagatgggcggggtgcccaccagaacatcatcccagcctccactggggctgcgaaagctgtgaccaaagtcatcccagagctcaaagggaagctgacagggatggcgttccgggtaccaaccccggatgtgtctgtcgtggacctgacctgccgcctcgcccagcctgccccctactcagccatcaaggaggctgtaaaagcagcagccaaggggcccatggctggcatccttgcctacaccgaggatgaggtcgtctctacggacttcctcggtgatacccactcgtccatcttcgatgctaaggccggcattgcgctcaatgacaatttcgtgaagctcatttcatggtacgacaacgaatatggctacagtcaccgggtggtcgacctcctccgctacatgttcagccgagacaagtgaaacgggaaggtcct

SEQ ID NO: 2730 - protein, 408 aa, Homo sapiens
MSKRDIVLTNVTVVQLLRQPCPVTRAPPPPEPKAEVEPQPQPEPTPVREEIKPPPPPLPPHPATPPPKMVSVARELTVGINGFGRIGRLVLRACMEKGVKVVAVNDPFIDPEYMVYMFKYDSTHGRYKGSVEFRNGQLVVDNHEISVYQCKEPKQIPWRAVGSPYVVESTGVYLSIQAASDHISAGAQRVVISAPSPDAPMFVMGVNENDYNPGSMNIVSNASCTTNCLAPLAKVIHERFGIVEGLMTTVHSYTATQKTVDGPSRKAWRDGRGAHQNIIPASTGAAKAVTKVIPELKGKLTGMAFRVPTPDVSVVDLTCRLAQPAPYSAIKEAVKAAAKGPMAGILAYTEDEVVSTDFLGDTHSSIFDAKAGIALNDNFVKLISWYDNEYGYSHRVVDLLRYMFSRDK

SEQ ID NO: 2731 - DNA, 897 bp, Homo sapiens
ctgcagggtaatatatttggaagctttgatgagagcctgctggcacgcgccgaagctctggcggcggtggatatcgtctcccacggcaagaaccatccgttcaagcccgacgccacctaccataccatgagcagcgtgccctgcacgtccacttcgtccaccgtgcccatctcccacccagctgcgctcacctcacaccctcaccacgccgtgcaccagggcctcgaaggcgacctgctggagcacatctcgcccacgctgagtgtgagcggcctgggcgctccggaacactcggtgatgcccgcacagatccatccacaccacctgggcgccatgggccacctgcaccaggccatgggcatgagtcacccgcacaccgtggcccctcatagcgccatgcctgcatgcctcagcgacgtggagtcagacccgcgcgagctggaagccttcgccgagcgcttcaagcagcggcgcatcaagctgggggtgacccaggcggacgtgggcgcggctctggctaatctcaagatccccggcgtgggctcgctgagccaaagcaccatctgcaggttcgagtctctcactctctcgcacaacaacatgatcgctctcaagccggtgctccaggcctggttggaggaggccgaggccgcctaccgagagaagaacagcaagccagagctcttcaacggcagcgaacggaagcgcaaacgcacgtccatcgcggcgccggagaagcgttcactcgaggcctatttcgctatccagccacgtccttcatctgagaagatcgcggccatcgctgagaaactggaccttaaaaagaacgtggtgagagtctggttctgcaaccagagacagaaacagaaacgaatgaagtattcggctgtccactga

SEQ ID NO: 2732 - protein, 338 aa, Homo sapiens
MMAMNSKQPFGMHPVLQEPKFSSLHSGSEAMRRVCLPAPQLQGNIFGSFDESLLARAEALAAVDIVSHGKNHPFKPDATYHTMSSVPCTSTSSTVPISHPAALTSHPHHAVHQGLEGDLLEHISPTLSVSGLGAPEHSVMPAQIHPHHLGAMGHLHQAMGMSHPHTVAPHSAMPACLSDVESDPRELEAFAERFKQRRIKLGVTQADVGAALANLKIPGVGSLSQSTICRFESLTLSHNNMIALKPVLQAWLEEAEAAYREKNSKPELFNGSERKRKRTSIAAPEKRSLEAYFAIQPRPSSEKIAAIAEKLDLKKNVVRVWFCNQRQKQKRMKYSAVH

SEQ ID NO: 2733 - DNA, 291 bp, Homo sapiens
  misc_feature (47)..(47): n is a, c, g, or t
tcgtgactatctatcctgaatctaacagtgacttataactaggagantgaattagacccttaaggtatagtgtgtgttgcaaatcactctgcaatggaaacttttatattcagggtaggtttgtgtcttaaactaggtgttctaatcaatgtacaagactttaccatacacgcaactatagtttttctaaaccttcatcattttgtgattctttgagaaagggcttttaggaactttatgttctaaaaaatgtttttaacaataataagataaaagaaaaacctgtgattc

SEQ ID NO: 2734 - DNA, 382 bp, Homo sapiens
tgcttgagtgtactgcacttgggaggtggatgcaggtagatcacttgagcccaggaggtcaaggctgcagtgagccaagatcttgccactgaactcccgctgggtgacagagcgagacccccatctcaaaaccaaaaaaacaaaacaaatggaatcagcacaatagctgtagaaagatgctattagaaaggatggggggaaatggaaaataagtggcagataaagtacccatactaaaaagatgtttttagcttggttgaaaaataattgtcagttctaccactgtgagttcaaagaacttaagaaaatacagaacttcaagcagagatgtagaggattgggtaaaataaggcatggcaaagagaaaatataacatcagctg

SEQ ID NO: 2735 - DNA, 3692 bp, Homo sapiens
ggctgcccgagcgagcgttcggacctcgcaccccgcgcgccccgcgccgccgccgccgccggcttttgttgtctccgcctcctcggccgccgccgcctctggaccgcgagccgcgcgcgccgggaccttggctctgcccttcgcgggcgggaactgcgcaggacccggccaggatccgagagaggcgcgggcgggtggccgggggcgccgccggccccgccatggagctccgggcccgaggctggtggctgctatgtgcggccgcagcgctggtcgcctgcgcccgcggggacccggccagcaagagccggagctgcggcgaggtccgccagatctacggagccaagggcttcagcctgagcgacgtgccccaggcggagatctcgggtgagcacctgcggatctgtccccagggctacacctgctgcaccagcgagatggaggagaacctggccaaccgcagccatgccgagctggagaccgcgctccgggacagcagccgcgtcctgcaggccatgcttgccacccagctgcgcagcttcgatgaccacttccagcacctgctgaacgactcggagcggacgctgcaggccaccttccccggcgccttcggagagctgtacacgcagaacgcgagggccttccgggacctgtactcagagctgcgcctgtactaccgcggtgccaacctgcacctggaggagacgctggccgagttctgggcccgcctgctcgagcgcctcttcaagcagctgcacccccagctgctgctgcctgatgactacctggactgcctgggcaagcaggccgaggcgctgcggcccttcggggaggccccgagagagctgcgcctgcgggccacccgtgccttcgtggctgctcgctcctttgtgcagggcctgggcgtggccagcgacgtggtccggaaagtggctcaggtccccctgggcccggagtgctcgagagctgtcatgaagctggtctactgtgctcactgcctgggagtccccggcgccaggccctgccctgactattgccgaaatgtgctcaagggctgccttgccaaccaggccgacctggacgccgagtggaggaacctcctggactccatggtgctcatcaccgacaagttctggggtacatcgggtgtggagagtgtcatcggcagcgtgcacacgtggctggcggaggccatcaacgccctccaggacaacagggacacgctcacggccaaggtcatccagggctgcgggaaccccaaggtcaacccccagggccctgggcctgaggagaagcggcgccggggcaagctggccccgcgggagaggccaccttcaggcacgctggagaagctggtctctgaagccaaggcccagctccgcgacgtccaggacttctggatcagcctcccagggacactgtgcagtgagaagatggccctgagcactgccagtgatgaccgctgctggaacgggatggccagaggccggtacctccccgaggtcatgggtgacggcctggccaaccagatcaacaaccccgaggtggaggtggacatcaccaagccggacatgaccatccggcagcagatcatgcagctgaagatcatgaccaaccggctgcgcagcgcctacaacggcaacgacgtggacttccaggacgccagtgacgacggcagcggctcgggcagcggtgatggctgtctggatgacctctgcggccggaaggtcagcaggaagagctccagctcccggacgcccttgacccatgccctcccaggcctgtcagagcaggaaggacagaagacctcggctgccagctgcccccagcccccgaccttcctcctgcccctcctcctcttcctggcccttacagtagccaggccccggtggcggtaactgccccaaggccccagggacagaggccaaggactgactttgccaaaaatacaacacagacgatatttaattcacctcagcctggagaggcctggggtgggacagggagggccggcggctctgagcaggggcaggcgcagaggtcccagccccaggcctggcctcgcctgcctttctgccttttaattttgtatgaggtcctcaggtcagctgggagccagtgtgcccaaaagccatgtatttcagggacctcaggggcacctccggctgcctagccctccccccagctccctgcaccgccgcagaagcagcccctcgaggcctacagaggaggcctcaaagcaacccgctggagcccacagcgagcctgtgccttcctccccgcctcctcccactgggactcccagcagagcccaccagccagccctggcccaccccccagcctccagagaagccccgcacgggctgtctgggtgtccgccatccagggtctggcagagcctctgagatgatgcatgatgccctcccctcagcgcaggctgcagagcccggccccacctccctgcgcccttgaggggccccagcgtctgcagggtgacgcctgagacagcaccactgctgaggagtctgaggactgtcctcccacagaccctgcagtgaggggccctccatgcgcagatgaggggccactgacccacctgcgcttctgctggaggaggggaagctgggcccaaaggcccagggaggcagcgtgggctctgccaatgtgggctgcccctcgcacacagggctcacagggcaggccttgctggggtccagggctgttggaggaccccgagggctgaggagcagccaggacccgcctgctcccatcctcacccagatcaggaaccagggcctccctgttcacggtgacacaggtcagggctcagagtgaccctcggctgtcacctgctcacagggatgctggtggctggtgagaccccgcactgcacacgggaatgcctaggtcccttcccgacccagccagctgcactgcagggcacggggacctggatagttaagggcttttccaaacatgcatccatttactgacacttcctgtccttgttcatggagagctgttcgctcctcccagatggcttcggaggcccgcagggcccaccttggaccctggtgacctcctgtcactcactgaggccatcagggccctgccccaggcctggacgggccctccttccctcctgtgccccagctgccaggtggccctggggaggggtggtgtggtgttgggaaggggtcctgcagggggaggaggacttggagggtctgggggcagctgtcctgaaccgactgaccctgaggaggccgcttagtgctgctttgcttttcatcaccgtcccgcacagtggacggaggtccccggttgctggtcaggtccccatggcttgttctctggaacctgactttagatgttttgggatcaggagcccccaacacaggcaagtccaccccataataaccctgccagtgccagggtgggctggggactctggcacagtgatgccgggcgccaggacagcagcactcccgctgcacacagacggcctaggggtggcgctcagaccccaccctacgctcatctctggaaggggcagccctgagtggtcactggtcagggcagtggccaagcctgctgtgtccttcctccacaaggtccccccaccgctcagtgtcagcgggtgacgtgtgttcttttgagtccttgtatgaataaaaggctggaaacctaaa

SEQ ID NO: 2736 - protein, 558 aa, Homo sapiens
MELRARGWWLLCAAAALVACARGDPASKSRSCGEVRQIYGAKGFSLSDVPQAEISGEHLRICPQGYTCCTSEMEENLANRSHAELETALRDSSRVLQAMLATQLRSFDDHFQHLLNDSERTLQATFPGAFGELYTQNARAFRDLYSELRLYYRGANLHLEETLAEFWARLLERLFKQLHPQLLLPDDYLDCLGKQAEALRPFGEAPRELRLRATRAFVAARSFVQGLGVASDVVRKVAQVPLGPECSRAVMKLVYCAHCLGVPGARPCPDYCRNVLKGCLANQADLDAEWRNLLDSMVLITDKFWGTSGVESVIGSVHTWLAEAINALQDNRDTLTAKVIQGCGNPKVNPQGPGPEEKRRRGKLAPRERPPSGTLEKLVSEAKAQLRDVQDFWISLPGTLCSEKMALSTASDDRCWNGMARGRYLPEVMGDGLANQINNPEVEVDITKPDMTIRQQIMQLKIMTNRLRSAYNGNDVDFQDASDDGSGSGSGDGCLDDLCGRKVSRKSSSSRTPLTHALPGLSEQEGQKTSAASCPQPPTFLLPLLLFLALTVARPRWR

SEQ ID NO: 2737 - DNA, 1518 bp, Homo sapiens
tccactagtaacggccgccaggatccacatctcttcccaggagggtggccagcagctgctctctgcgggaggagggaactgatctgctgaagtctcaccaggaagaggcgggaaggcccccacacaccccaccaggctccctctggccccatgtccttgacctggcaaagtggccgcagtctctgccagagaacctggagtggctgtgcctaacagacggctggatctcaaagtctctggttgtttttctttcctagaatccagcctaaggaggcccccaaccagatacccaactccaaggcacctcccacctgcccagggcgcaaatcgtcaacggtcccagctacaatgcaggccgctgggcacccagagccccttgacagcaggggctccttctccctccccacgatgggtgccaacgtctctcaggacaatggcactggccacaatgccaccttctccgagccactgccgttcctctatgtgctcctgcccgccgtgtactccgggatctgtgctgtggggctgactggcaacacggccgtcatccttgtaatcctaagggcgcccaagatgaagacggtgaccaacgtgttcatcctgaacctggccgtcgccgacgggctcttcacgctggtactgcccgtcaacatcgcggagcacctgctgcagtactggcccttcggggagctgctctgcaagctggtgctggccgtcgaccactacaacatcttctccagcatctacttcctagccgtgatgagcgtggaccgatacctggtggtgctggccaccgtgaggtcccgccacatgccctggcgcacctaccggggggcgaaggtcgccagcctgtgtgtctggctgggcgtcacggtcctggttctgcccttcttctctttcgctggcgtctacagcaacgagctgcaggtcccaagctgtgggctgagcttcccgtggcccgagcgggtctggttcaaggccagccgtgtctacactttggtcctgggcttcgtgctgcccgtgtgcaccatctgtgtgctctacacagacctcctgcgcaggctgcgggccgtgcggctccgctctggagccaaggctctaggcaaggccaggcggaaggtgaccgtcctggtcctcgtcgtgctggccgtgtgcctcctctgctggacgcccttccacctggcctctgtcgtggccctgaccacggacctgccccagaccccactggtcatcagtatgtcctacgtcatcaccagcctcacgtacgccaactcgtgcctgaaccccttcctctacgcctttctagatgacaacttccggaagaacttccgcagcatattgcggtgctgaagggcctgggcaccatcatccccatcatcatcatcacccccatcatcatcacccccaccattacccccatcgtcacgcccatcatcacgcccatcatcaccccccatcatcacccccatcatcatgcccatcatcaccccccatcatcatcatgcccacccctcatca

SEQ ID NO: 2738 - protein, 333 aa, Homo sapiens [sequence omitted]

SEQ ID NO: 2739 - DNA, 560 bp, Homo sapiens
ggtcttctttccacgttgcctcctcgtgcagcgctgtggaggaaattgtggctgtggaactgtcaactggaggtcctgcacatgcaattcagggaaaaccgtgaaaaagtatcatgaggtattacagtttgagcctggccacatcaagaggaggggtagagctaagaccatggctctagttgacatccagttggatcaccatgaacgatgtgattgtatctgcagctcaagaccacctcgataagagaatgtgcacatccttacattaagcctgaaagaaccattagtttaaggagggtgagataagagacccttttcctaccagcaaccaaacttactactagcctgcaatgcaatgaacacaagtggttgctgagtctcagccttgctttgttaatgccatggcaagtacaaaggtttatcatcaacttctatacctaagaatataggattgcatttacttatagtgcttgaggttatacttgcccaaccacacacataatatatatccacgtctatgagtatctagatcaaatgttttgcttcctatatgtcaccta

SEQ ID NO: 2740 - DNA, 2600 bp, Homo sapiens
aggggtggttgctgcttttgctacatgacttgccagcgcccgagcctgcggtccaactgcgctgctgccggagcgctcagtgccgccgctgccgcccgcgccccccgcgccccgttcggcacccaccggtcgccgccgcccgccgcgccgctgtcccgctcccgcgccgccgccgccgtttccccccgacgactgggtgatgctggacatgggagataggaaagaggtgaaaatgatccccaagtcctcgttcagcatcaacagcctggtgcccgaggcggtccagaacgacaaccaccacgcgagccacggccaccacaacagccaccacccccagcaccaccaccaccaccaccaccatcaccaccacccgccgccgcccgccccgcaaccgccgccgccgccgcagcagcagcagccgccgccgccgccgcccccggcaccgcagcccccccagacgcggggcgccccggccgccgacgacgacaagggcccccagcagctgctgctcccgccgccgccaccgccaccaccggccgccgccctggacggggctaaagcggacgggctgggcggcaagggcgagccgggcggcgggccgggggagctggcgcccgtcgggccggacgagaaggagaagggcgccggcgccgggggggaggagaagaagggggcgggcgagggcggcaaggacggggaggggggcaaggagggcgagaagaagaacggcaagtacgagaagccgccgttcagctacaacgcgctcatcatgatggccatccggcagagccccgagaagcggctcacgctcaacggcatctacgagttcatcatgaagaacttcccttactaccgcgagaacaagcagggctggcagaactccatccgccacaatctgtccctcaacaagtgcttcgtgaaggtgccgcgccactacgacgacccgggcaagggcaactactggatgctggacccgtcgagcgacgacgtgttcatcggcggcaccacgggcaagctgcggcgccgctccaccacctcgcgggccaagctggccttcaagcgcggtgcgcgcctcacctccaccggcctcaccttcatggaccgcgccggctccctctactggcccatgtcgcccttcctgtccctgcaccacccccgcgccagcagcactttgagttacaacggcaccacgtcggcctaccccagccaccccatgccctacagctccgtgttgactcagaactcgctgggcaacaaccactccttctccaccgccaacggcctgagcgtggaccggctggtcaacggggagatcccgtacgccacgcaccacctcacggccgccgcgctagccgcctcggtgccctgcggcctgtcggtgccctgctctgggacctactccctcaacccctgctccgtcaacctgctcgcgggccagaccagttactttttcccccacgtcccgcacccgtcaatgacttcgcagagcagcacgtccatgagcgccagggccgcgtcctcctccacgtcgccgcaggccccctcgaccctgccctgtgagtctttaagaccctctttgccaagttttacgacgggactgtctgggggactgtctgattatttcacacatcaaaatcaggggtcttcttccaaccctttaatacattaacatccctgggaccagactgtaagtgaacgttttacacacatttgcattgtaaatgataattaaaaaaataagtccaggtattttttattaagcccccccctcccatttctgtacgtttgttcagtctctagggttgtttattattctaacaaggtgtggagtgtcagcgaggtgcaatgtggggagaatacattgtagaatataaggtttggaagtcaaattatagtagaatgtgtatctaaatagtgactgctttgccatttcattcaaacctgacaagtctatctctaagagccgccagatttccatgtgtgcagtattataagttatcatggaactatatggtggacgcagaccttgagaacaacctaaattatggggagaattttaaaatgttaaactgtaatttgtatttaaaaagcattcgtagtaaaggtgcccaagaaattattttggccatttattgttttgtccttttctttaaagaactgtttttttttcttttgtttacttttagaccaaagattgggttctagaaaatgcacttggtatactaagtattaaaacaaacaaaaaggaaagttgtttcagttggcaacactgcccattcaattgaatcagaaggggacaaaattaacgattgccttcagtttgtgttgtgtatattttgatgtatgtggtcactaacaggtcacttttattttttctaaatgtagtgaaatgttaatacctattgtacttataggtaaaccttgcaaatatgtaacctgtgttgcgcaaatgccgcataaatttgagtgattgttaatgttgtcttaaaatttcttgattgtgatactgtggtcatatgcccgtgtttgtcacttacaaaaatgtttactatgaacacacagaaataaaaaataggctaaattcaaaaaaaaaaaaaaaa

SEQ ID NO: 2741 - protein, 489 aa, Homo sapiens [sequence omitted]

SEQ ID NO: 2742 - DNA, 408 bp, Homo sapiens
  misc_feature (54)..(54): n is a, c, g, or t
  misc_feature (56)..(56): n is a, c, g, or t
  misc_feature (61)..(61): n is a, c, g, or t
  misc_feature (313)..(313): n is a, c, g, or t
  misc_feature (320)..(320): n is a, c, g, or t
ggccctcgcactttaagaggctgtgcaggcagacagacctccaggcccgctagnantccgngccatggaggccgcccgggactatgcaggagccctcatcaggcccctgacatttatgggatcacagactaagcgagtcctgttcaccccgctcatgcatccagctcgccctttccgggtctccaaccatgacaggagcagccggcgtggggtgatggcaagcagcctgcaggagcttcatcagcaagactctgggatgccctcgttcattcgctaccggactgggtcactctgggtgctgggagggaagatnggcaccntggttgggacacaggaagagttcttttcaggacctttgggggagacaacacgcttttcattgatctttgggaaaaagggacagaattg

SEQ ID NO: 2743 - DNA, 693 bp, Homo sapiens
ttttttcaatctaacatttatttatttcaggtttgttttttttttggcaactataaattacattcactagtacacctggaattcttcatagtgtgttcaactaaagaataagcaaacacagcatagatcagtttaaaagaaatcatggtacttcttagagcaatttgcaaaaggggaaaaaagtcttaggctcactccttggaaataaatatcaagtaaccataaaaatattcagccatttttcagttattcggggagttcaggcatggtcccacgcagagcatcagagttcctctttgaaataacccagctttgccaatgacatctcttttctcaactgcataacctcccaaaacatctgatcaacatcctgctgtttcacgagtccctgctgaatgtatcgaatgtatgtaaaaaagttacatacagaagtgatcctgtatctgcaaaaaggagaaatataataatagttgcttgagtcccctaatttaattctgtgtttacaggacttactctggccagtgagagcacatttttttggtcctccgcattcaactgcagaagctttcacaaaccggataggttgtaatcccactggttcaatgcttagagtattgttttccacagcccccagaacagccgaagccaacccccctttttgagaaatgttaaacagggaaagaaatcttcccg

SEQ ID NO: 2744 - DNA, 509 bp, Homo sapiens
cacgaggtccgaaggaggggtaggcgctgcccgcgcgcagaggccgcgcccctcctggccccggcttcttggctgtcaaacagatgcagcaacgtcggctcctgccgaggagcccaaggggtcccgggatccgccgcacaggctggcactgcttgaagaggaggctactcggagactgcgccgcgcggtggattcattgccctcggagtttcaaccagttatgagtgagggattggccagaagatcggggcgcaggcaagcaggagtgctctattaggataagcaagtttgacaggaagaagctgctcttctccgaattacacagaggtgatgtgttcgtattgcacgtagacgtgtgtataacaggacctccttccccgcgccccgccaccccgacacacacaggagctgcctaaagtatccttgccttgcagattggaggctccccaaatattttgtgatctgaggatccagctcaagtgaggtgccataggacgtgttcctgagtt

SEQ ID NO: 2745 - DNA, 351 bp, Homo sapiens
gcgtcgacatcctcaaatggaatcaaatggaattatcgaatgcaatcgaatggaattatcgaatgcaatcgtatagaatcatcgaatggactcgaatggtatcatcgaatggaacggaatggaatagtcaatgaactcgaatggaatcatcattgaatggaattgaatggaatcatcgagtggaatcgaatggaatcatgatcaaatggaatcgaatgtaatcatcatcaaatggaatccaaattaaccatcatcacttggtattgaatggaattgtcatcaaatggaattcaaaggaatcatcatgaaatggaaccgaaaggaatcatcattgaatggaatcggtcgacg

SEQ ID NO: 2746 - DNA, 2061 bp, Homo sapiens
atgcagttgggagagcagctcttggtgagctcagtgaacctgcctggcgcgcacttctacccgctggagagtgcgcgaggcggcagcggcgggagcgctggccacctccccagcgcggccccctctcctcagaagttggacttaggcaaagcgtccaagaagttttccggcagtctctcctgcgaggcggtgagcggggagcctgcagccgccagcgcaggggcccccgcggccatgcttagtgacaccgacgccggggacgcatttgccagcgctgcggcagtggccaagccggggcccccggacggccgcaagggctccccctgcggggaggaggagctgccctccgccgctgcagccgccgccgccgccgccgccgcggctgcggccactgcgcgctactccatggacagcctgagctccgtgcggtactacctccagtcccccggtcctcaggggtcggagctggctgcgccctgctcactcttcccgtaccaggcggcggctggggcgccccacggacctgtgtacccggctcctaacggggcgcgctacccctacggctccatgctgccccccggcggcttccccgcggctgcgtgcccacccgggagggcgcagttcggcccaggagccggtgcgggcagtggcgcgggcggtatcaacggcgggggcggcggcccgggcacctatcagtacagccagggggctccgctctacgggccgtaccctggagccgcagcggcgggatcttgcggaggactggggggcctgggggttccaagttctggcttccgtgcccacgtctacctgtgcaaccggcctctgtggctcaaattccaccggcaccaaactgagatgatcatcaccaaacagggcaggcgcatgtttcctttcttgagcttcaacataaacggactcaaccccaccgcccactacaatgttttcgtggaagtggttctggccgaccctaaccactggcgcttccaggggggcaaatgggtgacctgtggcaaagccgacaataacatgcagggcaacaaaatgtatgttcacccagagtctcctaatactggttcccactggatgagacaggagatttcattcgggaaattaaaactcaccaataacaaaggcgcaaataacaacaacacccagatgatagtcttacaatccttacacaaataccaaccccgactgcatattgttgaagttacagaggatggcgtggaggacttgaatgagccctcaaagacccagacttttaccttctcagaaacgcaattcattgcagtgactgcctaccaaaacaccgatattactcaactaaagattgatcataacccctttgcaaaaggcttcagagacaactatgattcatcccatcagattgtccctggaggtcggtacggcgttcaatccttcttcccggagccctttgtcaacactttacctcaagcccgctattataatggcgagagaaccgtgccacagaccaacggcctcctttcaccccaacagagcgaagaggtggccaaccctccccagcggtggcttgtcacgcctgtccagcaacctgggaccaacaaactagacatcagttcctatgaatctgaatatacttctagcacattgctcccatatggcattaaatccttgccccttcagacatcccatgccctggggtattacccagacccaacctttcctgcaatggcagggtggggaggtcgaggttcttaccagaggaagatggcagctggactaccatggacctccagaacaagccccactgtgttctctgaagatcagctctccaaggagaaagtgaaagaggaaattggctcttcttggatagagacacccccttccatcaaatctctagattccaatgattcaggagtatacaccagtgcttgtaagcgaaggcggctgtctcctagcaactccagtaatgaaaattcaccctccataaagtgtggggacattaatgctgaagagtatagtaaagacacctcaaaaggcatgggagggtattatgctttttacacaagtccctag

SEQ ID NO: 2747 - protein, 686 aa, Homo sapiens
MQLGEQLLVSSVNLPGAHFYPLESARGGSGGSAGHLPSAAPSPQKLDLGKASKKFSGSLSCEAVSGEPAAASAGAPAAMLSDTDAGDAFASAAAVAKPGPPDGRKGSPCGEEELPSAAAAAAAAAAAAAATARYSMDSLSSVRYYLQSPGPQGSELAAPCSLFPYQAAAGAPHGPVYPAPNGARYPYGSMLPPGGFPAAACPPGRAQFGPGAGAGSGAGGINGGGGGPGTYQYSQGAPLYGPYPGAAAAGSCGGLGGLGVPSSGFRAHVYLCNRPLWLKFHRHQTEMIITKQGRRMFPFLSFNINGLNPTAHYNVFVEVVLADPNHWRFQGGKWVTCGKADNNMQGNKMYVHPESPNTGSHWMRQEISFGKLKLTNNKGANNNNTQMIVLQSLHKYQPRLHIVEVTEDGVEDLNEPSKTQTFTFSETQFIAVTAYQNTDITQLKIDHNPFAKGFRDNYDSSHQIVPGGRYGVQSFFPEPFVNTLPQARYYNGERTVPQTNGLLSPQQSEEVANPPQRWLVTPVQQPGTNKLDISSYESEYTSSTLLPYGIKSLPLQTSHALGYYPDPTFPAMAGWGGRGSYQRKMAAGLPWTSRTSPTVFSEDQLSKEKVKEEIGSSWIETPPSIKSLDSNDSGVYTSACKRRRLSPSNSSNENSPSIKCGDINAEEYSKDTSKGMGGYYAFYTSP

SEQ ID NO: 2748 - DNA, 1029 bp, Homo sapiens
tctgcttttaataagcttcccaatcagctctcgagtgcaaagcgctctccctccctcgcccagccttcgtcctcctggcccgctcctctcatccctcccattctccatttcccttccgttccctccctgtcagggcgtaattgagtcaaaggcaggatcaggttccccgccttccagtccaaaaatcccgccaagagagccccagagcagaggaaaatccaaagtggagagaggggaagaaagagaccagtgagtcatccgtccagaaggcggggagagcagcagcggcccaagcaggagctgcagcgagccgggtacctggactcagcggtagcaacctcgccccttgcaacaaaggcagactgagcgccagagaggacgtttccaactcaaaaatgcaggctcaacagtaccagcagcagcgtcgaaaatttgcagctgccttcttggcattcattttcatactggcagctgtggatactgctgaagcagggaagaaagagaaaccagaaaaaaaagtgaagaagtctgactgtggagaatggcagtggagtgtgtgtgtgcccaccagtggagactgtgggctgggcacacgggagggcactcggactggagctgagtgcaagcaaaccatgaagacccagagatgtaagatcccctgcaactggaagaagcaatttggcgcggagtgcaaataccagttccaggcctggggagaatgtgacctgaacacagccctgaagaccagaactggaagtctgaagcgagccctgcacaatgccgaatgccagaagactgtcaccatctccaagccctgtggcaaactgaccaagcccaaacctcaagcagaatctaagaagaagaaaaaggaaggcaagaaacaggagaagatgctggattaaaagatgtcacctgtggaacataaaaaggacatcagcaaacaggatcagttaactattgcatttatatgtaccgtaggctttgtattcaaaaattatctatagctaagtacacaataagcaaaaacaa

SEQ ID NO: 2749 - protein, 168 aa, Homo sapiens
MQAQQYQQQRRKFAAAFLAFIFILAAVDTAEAGKKEKPEKKVKKSDCGEWQWSVCVPTSGDCGLGTREGTRTGAECKQTMKTQRCKIPCNWKKQFGAECKYQFQAWGECDLNTALKTRTGSLKRALHNAECQKTVTISKPCGKLTKPKPQAESKKKKKEGKKQEKMLD

SEQ ID NO: 2750 - DNA, 356 bp, Homo sapiens
cagtgaattgaatttaggtgacaccatagaagagctatgacgtcgcatgcacgcgtacgtaagcttggatcctctagagcggccgcctactactactaaattcgcggccgcgtcgactttttttttttttttaacagtaatggaactaaaaccaaagtgattgttctttattatagcaaagtgatagtttttttatttaaaataagttattttttacaacctccttatataaaagatgtttatgaaagaaaaaattgtgtgtgtttcggtgccatttttttaatgcaatgaatgatatccatgaaaaagaacatttgaattttttgttttaaaagacagtgcaaggtatagtgaat

SEQ ID NO: 2751 - DNA, 3162 bp, Homo sapiens
gaattccattttaagttatacaaaactgattaccataagtgcggtcgactgcttttatttttacgttgtgtgtgttggaaaaatgctaaaacatcagtctacaattctatatattgttattaaagattaatccaaccagcaacccaaggacatataagcgatttccactattgcatcagagcactcggcaggaaaggcctagccacggggaacattagaagctacagaagcattgcagagaagagaagatcccccgcgcgtccgccgctgttctaaggagagaagtgggggccccccaggctcgcgcgtggagcgaagcagcatgggcagtcggtgcgcgctggccctggcggtgctctcggccttgctgtgtcaggtctggagctctggggtgttcgaactgaagctgcaggagttcgtcaacaagaaggggctgctggggaaccgcaactgctgccgcgggggcgcggggccaccgccgtgcgcctgccggaccttcttccgcgtgtgcctcaagcactaccaggccagcgtgtcccccgagccgccctgcacctacggcagcgccgtcacccccgtgctgggcgtcgactccttcagtctgcccgacggcgggggcgccgactccgcgttcagcaaccccatccgcttccccttcggcttcacctggccgggcaccttctctctgattattgaagctctccacacagattctcctgatgacctcgcaacagaaaacccagaaagactcatcagccgcctggccacccagaggcacctgacggtgggcgaggagtggtcccaggacctgcacagcagcggccgcacggacctcaagtactcctaccgcttcgtgtgtgacgaacactactacggagagggctgctccgttttctgccgtccccgggacgatgccttcggccacttcacctgtggggagcgtggggagaaagtgtgcaaccctggctggaaagggccctactgcacagagccgatctgcctgcctggatgtgatgagcagcatggattttgtgacaaaccaggggaatgcaagtgcagagtgggctggcagggccggtactgtgacgagtgtatccgctatccaggctgtctccatggcacctgccagcagccctggcagtgcaactgccaggaaggctgggggggccttttctgcaaccaggacctgaactactgcacacaccataagccctgcaagaatggagccacctgcaccaacacgggccaggggagctacacttgctcttgccggcctgggtacacaggtgccacctgcgagctggggattgacgagtgtgaccccagcccttgtaagaacggagggagctgcacggatctcgagaacagctactcctgtacctgcccacccggcttctacggcaaaatctgtgaattgagtgccatgacctgtgcggacggcccttgctttaacgggggtcggtgctcagacagccccgatggagggtacagctgccgctgccccgtgggctactccggcttcaactgtgagaagaaaattgactactgcagctcttcaccctgttctaatggtgccaagtgtgtggacctcggtgatgcctacctgtgccgctgccaggccggcttctcggggaggcactgtgacgacaacgtggacgactgcgcctcctccccgtgcgccaacgggggcacctgccgggatggcgtgaacgacttctcctgcacctgcccgcctggctacacgggcaggaactgcagtgcccccgtcagcaggtgcgagcacgcaccctgccacaatggggccacctgccacgagaggggccacggctatgtgtgcgagtgtgcccgaggctacgggggtcccaactgccagttcctgctccccgagctgcccccgggcccagcggtggtggacctcactgagaagctagagggccagggcgggccattcccctgggtggccgtgtgcgccggggtcatccttgtcctcatgctgctgctgggctgtgccgctgtggtggtctgcgtccggctgaggctgcagaagcaccggcccccagccgacccctgccggggggagacggagaccatgaacaacctggccaactgccagcgtgagaaggacatctcagtcagcatcatcggggccacgcagatcaagaacaccaacaagaaggcggacttccacggggaccacagcgccgacaagaatggcttcaaggcccgctacccagcggtggactataacctcgtgcaggacctcaagggtgacgacaccgccgtcagggacgcgcacagcaagcgtgacaccaagtgccagccccagggctcctcaggggaggagaaggggaccccgaccacactcaggggtggagaagcatctgaaagaaaaaggccggactcgggctgttcaacttcaaaagacaccaagtaccagtcggtgtacgtcatatccgaggagaaggatgagtgcgtcatagcaactgaggtgtaaaatggaagtgagatggcaagactcccgtttctcttaaaataagtaaaattccaaggatatatgccccaacgaatgctgctgaagaggagggaggcctcgtggactgctgctgagaaaccgagttcagaccgagcaggttctcctcctgaggtcctcgacgcctgccgacagcctgtcgcggcccggccgcctgcggcactgccttccgtgacgtcgccgttgcactatggacagttgctcttaagagaatatatatttaaatgggtgaactgaattacgcataagaagcatgcactgcctgagtgtatattttggattcttatgagccagtcttttcttgaattagaaacacaaacactgcctttattgtcctttttgatacgaagatgtgctttttctagatggaaaagatgtgtgttattttttggatttgtaaaaatatttttcatgatatctgtaaagcttgagtattttgtgatgttcgttttttataatttaaattttggtaaatatgtacaaaggcacttcgggtctatgtgactatatttttttgtatataaatgtatttatggaatattgtgcaaatgttatttgagttttttactgttttgttaatgaagaaattcctttttaaaatatttttccaaaataaattttatgaggaattc

SEQ ID NO: 2752 - protein, 723 aa, Homo sapiens [sequence omitted]

SEQ ID NO: 2753 - DNA, 474 bp, Homo sapiens
ccagtggcgctgcgctgactgcaactgcgcgcgcccgccgggtgagccagcgatctgagccaggcgggggcggcccgacctttcccgcccagcctgggtcaaaggaagccgaaagcggcctcagcaaggtgaggcgcccgaggctgcaaaagaccgagcagaactttgcaaagttcgggatgtgctgggctaggtcgctgaggacttgactggcttcctccctccttccctccacctaccttctccctccccctccaccatccagtgggttcgttccgggcctccagctatcagctcccgatctcgtgtttgagggtagcgaccccgatttctgtttgcatgcacagccagcagccctagcgccagatcctaaagctggatatcttttaactgggctaccagcccgggcctcaaagttttgagtgagggccgccaggctcaggccccagcgaagccccgagcgccatggccgac

SEQ ID NO: 2754 - protein, 3 aa, Homo sapiens
MAD

SEQ ID NO: 2755 - DNA, 336 bp, Homo sapiens
aatcttcacattgttttgatcccaaaatgtttgtgttgtccttactcaaaactaggaaaaacaattatgtggtaagaggctcagagccacttacttaaatctcaactagatttatttgtgagaacatctgttttctgatatttagacacttcctcttccattgctgtttcctatgactcatgcacagttatttgttcaggtttcatggaatttcccaagtgtatttacctttgtttggtttttaaaatgtaaattatattgccccaataaatgagtatgtgtgtcagggggactgtggctgggtcattgcatgtggaaggggagttacagaagaga

SEQ ID NO: 2756 - DNA, 1705 bp, Homo sapiens
gggcggcggcgcgcgggtgcgatcgcggagctgtgaggcgcaggcagggctctggggcacctagagaccggggccggagacgtggcagccgccctgcccgccagaaagtttcctagaagtttgctgggcgcgggcgcacgactgactggctggaccatgaacgtgttccgaatcctcggcgacctgagccacctcctggccatgatcttgctgctggggaagatctggaggtccaagtgctgcaagggcatctctgggaagagccagatcctgtttgctctcgtcttcaccaccaggtacctggacctgttcaccaacttcatctccatctacaacacagtaatgaaggtggtttttctcctctgtgcctatgttacagtgtacatgatatatgggaaattccgtaaaacttttgacagtgagaatgacacattccgcctggagtttcttctggtcccagtcattggcctttccttccttgaaaactacagtttcactctgctggagatcctctggactttctctatctatctggaatcagtggctatcctgccccagctcttcatgatcagcaagactggagaggctgagaccataactactcactacctgttctttctgggtctgtaccgggcactctacctggctaactggatcaggcggtaccagactgagaatttctatgaccaaattgcagtcgtgtctggagtagtacaaaccatcttctactgtgacttcttctacttgtatgtgaccaaagtccttaagggaaagaagttaagtcttccaatgccaatctgaggaccttcagagacagtctacgccttaacaagcacatgaaggaaactattttgaatgttctctttggcaacttatccataatttgggatcaaatgttaaaaccagaaaagtgtttagtgtggatttcagcaaaacctgatcatcccacccagaagaccttctcatcaatagatcgcccttaaagacccattgtaaggtcataaaaaacctcggccacctgcacaaagatggtgcctcactgcaacaagaaaccttaaggtgtcttaccgacgaaataaaaaacataaatgattgttctccaaggcctgagggcaagactcatgatgagcaagtcaaccccaatctggaacaatgtccctcctcttagaatgtcccaactaaagaccagttaaaatattagggtacgttcttgtgaatttccactttccaggtagatgaccaaatttaggtggtcaagatataaaggtgtcagctagttttaagtgtgaaacttatttcactttcacactgccttcaggccagaagcaaaccaaatttaccaggtttggctggaggagttttgtgactcatcttttactggtttgaattttttcaaaccagtggctgatacctgccttgtacttagtaccttaataccaataacctaatggtacttaggcgagtaccatttgcacaatcactgttttacttatgagcagatacagatatatccaaacccttacctactaggtatcctgctagggttttcaattccaattcttgtattaagttttttcctttcagttttaggtgcgaaagtaatcagtcaatccaatatcccccatctttgtcttgaaacaaaaactgttttaagacgtctacgttgaattattcagagaattaagcaataaaagctcacacctta

SEQ ID NO: 2757 - protein, 214 aa, Homo sapiens
MNVFRILGDLSHLLAMILLLGKIWRSKCCKGISGKSQILFALVFTTRYLDLFTNFISIYNTVMKVVFLLCAYVTVYMIYGKFRKTFDSENDTFRLEFLLVPVIGLSFLENYSFTLLEILWTFSIYLESVAILPQLFMISKTGEAETITTHYLFFLGLYRALYLANWIRRYQTENFYDQIAVVSGVVQTIFYCDFFYLYVTKVLKGKKLSLPMPI

SEQ ID NO: 2758 - DNA, 284 bp, Homo sapiens
tttttttttcatttacctgggaacttttaattaatagagtgccaatcatattctaggctggtgcaggtgctgaggataagcctataagcaaaccaggcacaattagtctcttatggagcttactgtccatggccagcaggaaatgtgcacctgcagtgcccagtacagaaaccactagccacatgtagttgtttacaattaaattaattatgattaaatacaatttaacatagtctctgcagccacagttgaagtgctcagtagccacaggcagctggtgccac

SEQ ID NO: 2759 - DNA, 428 bp, Homo sapiens
ttttttttagtgtatttttcgtggttggatcaaaaagacttgagtttttaatttaatttattccctgccgttgtagcggggcggggtccctgtgccctggcctgggggaggggaacgcggaacatggagtcgggaacacagccgctcccctctgctctgcaccccactcgtgggggaacacagccgctcccctctgctctgcaccccactcgtgggggaacacagccgctcccctctgctctgcaccccactcgtgggggaacacagccgctcccctctgctttgcaccccactcgtgggggaacacagctgcagcccaccgcggacccccctggtgctccaggttgggtgagtctgagccggaaggggtacgtggtgggcgcccctcattgtgtctggggagacctcataccccatcgcccaccccc

SEQ ID NO: 2760 - DNA, 107 bp, Homo sapiens
gtatcccagagaggggatgtgacccaggccccaggaaagggagcgaggacagcgctggttcccggctccccgcaccatcatggctttgcctctgaggcccctgaccc

SEQ ID NO: 2761 - DNA, 409 bp, Homo sapiens
  misc_feature (51)..(51): n is a, c, g, or t
  misc_feature (53)..(53): n is a, c, g, or t
  misc_feature (57)..(57): n is a, c, g, or t
  misc_feature (74)..(74): n is a, c, g, or t
  misc_feature (84)..(84): n is a, c, g, or t
  misc_feature (140)..(140): n is a, c, g, or t
  misc_feature (156)..(156): n is a, c, g, or t
  misc_feature (159)..(159): n is a, c, g, or t
  misc_feature (169)..(169): n is a, c, g, or t
  misc_feature (177)..(177): n is a, c, g, or t
  misc_feature (348)..(348): n is a, c, g, or t
  misc_feature (367)..(367): n is a, c, g, or t
  misc_feature (391)..(391): n is a, c, g, or t
  misc_feature (400)..(400): n is a, c, g, or t
tgagaagggaggtgaccaccaggacatggctctgtgagtaccacacagtgngnggtnggttggggccacatgtnatcatatcanaaggaactggagaaatacagagacatagatgaagatgtgatcccaaggaccttganccccgaggagctagancanctggactgcnaagctacntgagatggatcctgagaacatgctcctgccagctggactaagacaacgtgaccagacaaagaagagcccaacgggccacttggaccgagagcccttttgcagtacttggagcaacaggcactagaagtcaaagagcgtgatgacttggtgcccttcacaggcgagaagaangggaaaccctatattcagncccaagaggggaatcccagcagangagcagatnacccctgga

SEQ ID NO: 2762 - DNA, 2311 bp, Homo sapiens
gatttaatcctatgacaaactaagttggttctgtcttcacctgttttggtgaggttgtgtaagagttggtgtttgctcaggaagagatttaagcatgcttgcttacccagactcagagaagtctccctgttctgtcctagctatgttcctgtgttgtgtgcattcgtcttttccagagcaaaccgcccagagtagaagatggattggggcacgctgcagacgatcctggggggtgtgaacaaacactccaccagcattggaaagatctggctcaccgtcctcttcatttttcgcattatgatcctcgttgtggctgcaaaggaggtgtggggagatgagcaggccgactttgtctgcaacaccctgcagccaggctgcaagaacgtgtgctacgatcactacttccccatctcccacatccggctatgggccctgcagctgatcttcgtgtccagcccagcgctcctagtggccatgcacgtggcctaccggagacatgagaagaagaggaagttcatcaagggggagataaagagtgaatttaaggacatcgaggagatcaaaacccagaaggtccgcatcgaaggctccctgtggtggacctacacaagcagcatcttcttccgggtcatcttcgaagccgccttcatgtacgtcttctatgtcatgtacgacggcttctccatgcagcggctggtgaagtgcaacgcctggccttgtcccaacactgtggactgctttgtgtcccggcccacggagaagactgtcttcacagtgttcatgattgcagtgtctggaatttgcatcctgctgaatgtcactgaattgtgttatttgctaattagatattgttctgggaagtcaaaaaagccagtttaacgcattgcccagttgttagattaagaaatagacagcatgagagggatgaggcaacccgtgctcagctgtcaaggctcagtcgccagcatttcccaacacaaagattctgaccttaaatgcaaccatttgaaacccctgtaggcctcaggtgaaactccagatgccacaatgagctctgctcccctaaagcctcaaaacaaaggcctaattctatgcctgtcttaattttctttcacttaagttagttccactgagaccccaggctgttaggggttattggtgtaaggtactttcatattttaaacagaggatatcggcatttgtttctttctctgaggacaagagaaaaaagccaggttccacagaggacacagagaaggtttgggtgtcctcctggggttctttttgccaactttccccacgttaaaggtgaacattggttctttcatttgctttggaagttttaatctctaacagtggacaaagttaccagtgccttaaactctgttacactttttggaagtgaaaactttgtagtatgataggttattttgatgtaaagatgttctggataccattatatgttccccctgtttcagaggctcagattgtaatatgtaaatggtatgtcattcgctactatgatttaatttgaaatatggtcttttggttatgaatactttgcagcacagctgagagaggctgtctgttgtattcattgtggtcatagcacctaacaacattgtagcctcaatcgagtgagacagactagaagttcctagttggcttatgatagcaaatggcctcatgtcaaatattagatgtaattttgtgtaagaaatacagactggatgtaccaccaactactacctgtaatgacaggcctgtccaacacatctcccttttccatgctgtggtagccagcatcggaaagaacgctgatttaaagaggtgagcttgggaattttattgacacagtaccatttaatggggagacaaaaatgggggccaggggagggagaagtttctgtcgttaaaaacgagtttggaaagactggactctaaattctgttgattaaagatgagctttgtctaccttcaaaagtttgtttggcttacccccttcagcctccaattttttaagtgaaaatataactaataacatgtgaaaagaatagaagctaaggtttagataaatattgagcagatctataggaagattgaacctgaatattgccattatgcttgacatggtttccaaaaaatggtactccacatacttcagtgagggtaagtattttcctgttgtcaagaatagcattgtaaaagcattttgtaataataaagaatagctttaatgatatgcttgtaactaaaataattttgtaatgtatcaaatacatttaaaacattaaaatataatctctataat

SEQ ID NO: 2763 - protein, 226 aa, Homo sapiens
MDWGTLQTILGGVNKHSTSIGKIWLTVLFIFRIMILVVAAKEVWGDEQADFVCNTLQPGCKNVCYDHYFPISHIRLWALQLIFVSSPALLVAMHVAYRRHEKKRKFIKGEIKSEFKDIEEIKTQKVRIEGSLWWTYTSSIFFRVIFEAAFMYVFYVMYDGFSMQRLVKCNAWPCPNTVDCFVSRPTEKTVFTVFMIAVSGICILLNVTELCYLLIRYCSGKSKKPV

SEQ ID NO: 2764 - DNA, 400 bp, Homo sapiens
gaaaaagtaaagagataataacaaaaacaagagttgagtaggaaggacgtattgaaaaatggaggaatctgataacaagtagtatgaagtcagatttgtaagagtctgagaagaaataagtagagaaaacagaaaatggtgtgaggtttacagtgttaaccacaaagtgaaagcaggcaagaacgtggtgggtacctggctgggtaaaggtcactggcaaagctttggtgtccatagtgactcaaaacaaacaaacaaacaaacaaaaaacaaacaagaaaacaggtatgataatctaccttaggctaaaaaaaaaaggccaaatttcagcctgaaagggcccacagtatgcccaataaagagaagatgctgacatctattaatacatctactatggtga

SEQ ID NO: 2765 - DNA, 487 bp, Homo sapiens
ttttttaatcaaatccagatttctgcctgtagctcttcctctcctatcctaccgctccaaatattaactttttgtggcttcggcctcaaatatggaatgtgtcctgaagctttctaaaacttcacacaggcagaaacttgtaatgaggaagaaacaagatctattcagtccagaaaggaacaataccagatgaggcatgagggaggtatgagaaatatccaacgggattagcgtcaaatcctcgggagaccttggcctttggactaggtcaagtctgcccacaaaaataggaaattgctctgggcccagtgagcaggtatggagagccacagtcttcaaaccacgcaaggggcaaggggcgggcctcatcaacgtgtcaacatggggatggagctgctaagtgaggcgctattgccacagcgagtgtgggcgatgacttcctttctgctttcctccctcactcattctcctctctgactctggaggt

SEQ ID NO: 2766 - DNA, 448 bp, Homo sapiens
gcggccgccaacttcccaaacccatccctccccaccttggagtctaggttgagttggggaaaaagcaccatgggtttgggaagatggtctggtccatgcagagagtggtctggcccttgagtgcagggtaggaaaatgtggggagccacaagctattgttggcaaaaatggctgttttgactatgcaatctcagcacgtggcacccaagccccaggccgatgccccagacagagccagctgccttgcctggagcagaggccacccttttgcttctgcaatgtcttattgtattgagagaagcaaggagggctgaagaacgacaatgttctttaagccttcagatgttggggagatcgtcagcatcagctcctcctggccggcaaggtgctgctcatcagctgccaagactccagtcctggctccagggcctgttgaggatctccagtc

SEQ ID NO: 2767 - DNA, 276 bp, Homo sapiens
  misc_feature (46)..(46): n is a, c, g, or t
  misc_feature (117)..(117): n is a, c, g, or t
  misc_feature (119)..(119): n is a, c, g, or t
  misc_feature (123)..(123): n is a, c, g, or t
  misc_feature (132)..(132): n is a, c, g, or t
  misc_feature (147)..(147): n is a, c, g, or t
  misc_feature (165)..(165): n is a, c, g, or t
  misc_feature (171)..(171): n is a, c, g, or t
  misc_feature (179)..(179): n is a, c, g, or t
  misc_feature (183)..(183): n is a, c, g, or t
  misc_feature (194)..(194): n is a, c, g, or t
  misc_feature (199)..(199): n is a, c, g, or t
  misc_feature (226)..(226): n is a, c, g, or t
  misc_feature (264)..(264): n is a, c, g, or t
  misc_feature (271)..(271): n is a, c, g, or t
tcgcgctgctgctgttcttcgtaggcggagtcggcgagtcgatccnagagactgaggtcatcgacccccaggacctcctagaagggcgatacttctccggagccctaccagacgatnangatntagtggggnccgggcaggaatctnatgactttgagctgtctngctctngagatctngatnacttggaagantccangatcgggccctgaagttgtccaacccntggcggcctctagataaccaaatccccccagaaggcanaatcttngaggc

SEQ ID NO: 2768 - DNA, 147620 bp, Homo sapiens
gatcacttgtgcagtgtcacccaggagctgggagaaacaaagattcctgggccccactgcaggatgctgcattttaacagaccctcaggtgattcataagtccatgaagtcttgtgggttagaaccactaacccacaagcccttgtcatgggatgcagcatgatccacctgggggactgagggcgactgtcttctccagcctcaccctccccacatgcccttgaaaagccactcgagtcctgtgcccaggagccctctcctcctttatcatctgcggaatgtctacccttccttgctggtgcagctcacttgccacctcctccaggaagccttcctgggctccataaagctgagctgcttatgccctcctctgtgtatttaacagcaatttgcttttcattgtgtgatgtggccgaacttcttcattgggcctggggatctgaagccacgccacttcaaatgagtgggagggtgtggaaaaagggcaagtaatggcctgcagagaaaggggcccttcctgatcatccactgtgcatgttcacattcatcaatgacttcgctctttccttttaacctatgaggttggcgttgcccacaggttttttttgttgttgttattgttttgtttcttggttttgtttgtttttgagacggagtctccctctgtcgcccaggctggagtgcagtggcgcgatcttggctcactgaaactctgcctcctgggttcaagcgattctcctgcttcagcctcctgagtagctgggattacaggcacatgccaccatacccggctaatttttgtatttttagtagagacggggcttcaccatgttggtcaggctggtcttgaactcctgaccttgtgatccgcccgcctcaacctcccaaagtgcttggcattacaggtgtgagccaccatgcctggcctgctcacaggttttacaagaggggacactgaggcaaaagtgtcccatggaggctgtgctgctgacaaacggcagagcggctcctgccattcacctgcactgtatctcgggctttgctttggtctactccataaacttcctgaaaaaggtttctttgaaaaagtccaaatttgtccctaataactgaagggtagaaatgtgaaatgggcctactctgggatcaagaccacctgggttcaaaccctaacttggaagctctgggccttgggcaactaactggcctctttcaagttcagttttccctcctgtaggttgagaggtttcaacgagacaacacagatgaaaggcacagcctggcccccagcatgcaggccagtgtttggtaattgatagttttctctcctgtttcactatcctaggtccaaagaaccagaagagtagacagtccttagagacagcagctgtgccggctgcagaaatggagagagctgtgagctagaatagaagaagagaaaggccaaaaaccacggagaaacagagccagacaacacagaggtgaaattcagaaagcgagtccagcacttggctgaagttacaggcccttcctgccctgccctttcccacccaaggccatgcctagttcatgttactaagtctaagaaacagctccagaagtggcatctctgctaaccactagggaagatattgtcgttttttaatgattcaaactctccagggaaccaagaaggctgagggcgctgagttctctccacacacctgggctcaggactcccccaatatctacgtgctttattcctgatcttaacaggctctgaaagccacataaacccgtgcttgcctgggtaccaaaagacccgggcccgggggtctttgttcgggctcggtgccttctccatctaagctttcttggcagtgttactctcctcacactgttacttgggttctcactttctgttcttgagttaatggatgtttgttttcctgaattcacgggtcctttgtaagtcttctatcccataacgtaagatgggggtataaacaaagaagcaagcgctagctgaccttatgtggggcatggttagggaacaggaattccctgtatccagcagggttaagctggtaggaggaaagggaaatgagagaaaggaatcaagaagtgagaaagggaaccagtacctgtcaacaccaacacacacctggtaagtagcagggctggtcttcaaatccaggactatggggccactgcatgggaacagaagcagcttgtagacttcggtggtggggctgccagagtcggggaattaagggaggacaggctctgcagcccaagtgccagatgccaacggcctgcgaaggctctaggacccagctccaaatcagtgctcccggcgccatccagtggccattagggagattgcaagagaaaaaagcatgagaaaagaaaccccagagaagccagtgcctgccaactccagggaagaggaaggaaggagcctggcctttgccctcagtgccccctatcagttgactaccctgctccagtttgacctccccactaggcttcttcctggtgcaactgatgttttctctctgtgtgaccttgggcaggcaactctggcctctaggcctcagtttccccaactgtaaaatgaatggtaaggcaaggtgaggtcacatgccaagtccataggtctttagctcatctgatcctcatggccaggtaagatgatcattcccatccccccatactccagtccctcctgaccacgcatagttcaagcttcactcacctgtaaagtcttccatggcctcctgcggaaattccagccaccgtttaaggatcacctctccaggatttctccctcctctcatctgaagttccctctttctgcaacagtcaggtggacctcagcccttctagcccggagcttcctcagctcaagagtttttctcaatcatcagtttctccctcttcaccaagcctagcaaggtgcccggcacagagtacttaagagcagctgctctgaagtcagtcagcctggcttcaagccccatgtggtaggcagaatggccttccccacaaagatgtacacattttaatccccggcacctgtgatttcacctcacacgacaaaagggactttgcagatgtggttaagatagagagcttgaggctgggcgcggtggctcacgcctgtaatcccaacactttgggaggctgaggcaggcggatcacctgaggtcggaagttcaagtccagcctgaccaacatggagaaactctgtttctactaaaaatacaaaaaattagctgggagtggtggcatacacctgtaatcccagctactcaggaggctgaggcaggagaatcgcttgaacccaggaggcggaggttgcagtgagccgagatcgcaccattgcactccagcctgggcaacaagagcaaaaactccatctcaaaaaaaaaaaaagatagcttgagatgggattatctttgattatcaaggtcatgccaatataaacagaagggtccttataagacagagacgggaaggtcagagtcagagaaagagatgtgctgatggaaactgagtctgaagtgatgtagggccatgacccaaggaattcaggtagcctctagaagctggaaaaggccaggaaacaaaagcctctagaaggaataaagccttgccaacacatcttagacttctgacctaaaaactgtaaggtaataaatgtgtgttgctagccactcaatttgtggtaacttattagagcagccataggaaacatcctggttcagcttcgtactggttatgttactgttggaaacttaacctttctgtgtctcagtgtcctcatctgtaaaatggggatgataaaggcaataattcttatttcactggttccaagtataaaatgaaaatacctgcaaatcagttacaataatgcccaacactaaatatgttagctgttactataagaacagttaatagctaccattaattgagggataggtacaaggcacatgccttagaagaatgtccttgattctccccatcacgcttgggggtaacaattccagtctccactttgcagatgaggaaacaaacacaaaataattttccccaaatcactctaggactggaagcattttaaacttcgttgtttcttacatgcactcgggaaatggtactggtttgtgttctttgctgatagaggtgttttgggaggggttgataagatgacagaaggaaggccacaggctggacagacaggggtcctagctgatacctccttctcttcctacctagtgcaggagagagttaaaatcggtcaaagctcatctatccactcccaccccatccatttaggggttcaattactgcctctcactttcccaccaacgccacccccgcaccccttaccagcgctcagtactagcagcttttgagccagatttgggggcatcatgggataggcgtggccgggagcgaagcgttcagtccgctggggaatggagtggcgcagacttactcagaccccaaggattcctgttgagccccctcccttcccgcagcctgcataaggagccatctgttctcggctgaataaacaagcagggggaagcagcgccgggtctcctgcccccgagcccgacccccgcacaatgcgcctttctccaaggagacgccgcccgggcgccgccacagcacgctccgtctggcttcccctcccccaggcggcgcagcaagacccaaaaacggaccccgtggaaatcagttttttttatttttttaagaacacaaacaagaaatccaacaaagaactgagcgcagcacgcggcgagggcgtgccggtctagcacgtgccccttccctcaccacccgctatccccctgacgccgcagtccgcctaatggtccgggcgaggccaactcagctcaatgccggaagcccgccagcgcctccgccccgacagcccaagccggacgggcccaggttctgcctggccccggcgcaccgatggcgcgcaaggggcaccgtccgtggtgccgcgccccagcccgggtctgggccgtccgtggccctcacttctggttggccagctggttctccagatcctccaggcgcgccgtcagctgggccagtgagcggttaaggaggccgttggggttcgccgaggtcccttcactttccctccagcccgcgccaccagccccaaaggatatggttcagcgtcaggctctcgagcgcccccagcgtgcggccctggaactccacgaggctttcgcattcgcatgggctccgaagctctgtccctgcgctgatgccctcctctgcaagccggacacagagggtcagggggatgagaaattgccctagctttggccctctgatttccctgcactgggcctatggttgagtatatgggctttggatttagagagacctgggctgagtcccaagctaagtagctgtgagatactgaaaaactcactaacctttctaagctcagttttctcatctataaaatggatataatgaaagagtgtacgcattagtggcttcgaggattcattcacctgtgtacgtgtgtgtgtgtgtgtgtgctcacgcacaacttacaagactgtttctcaaaccttaatgctcattggaatcatcaggagagcttgttaaaatatagattctgcttcagaatggagaagaagctcagaaggtacatttctaataagctcccaaatgatgctgatgctcctggtctgtggaccacactttgtgtagcactctccaaataaaattttatgcaatgatgaaagtgttctacatctgccctgtccaaagcagtagctacaagccacatgtggctgtttaacacttcaaatatgactggtgctactaaaggactaaaatgtattttattttaatcaattgtaattaaataggtactgcctacctttttgaaaaagcacagatctagaacactgcctggttcaagtaaatactttacagcaggggtccccaatccccaggccatggaccagtaccagcacattacatggaccagtaccagcccatggcctgttaggaactgggccacacagcaggaggtgagcagccagcatgcaagggagcttcatctgtatttatagctgctcctcattgctcctattacaacctgagctcctttcctgtcagatcagtggcattgttagattctcatgggagcacaaaccctattgtaaactgtgcatgtgagggatctaggttgcaggcttcttatgaaaatctaatgcctgatgatctgtcactgtctcccatcacccacggatggcaccatctagctgcaggaaaacaagctgagggctcccactgattatacattatggtgagttgtataattatttcattgtatattacaatgtaataatagaaataaagtgcacaataaatgtaatgtgcttgaaccatcccaaaaccattctccccaccaccatcatggaaatattgtcttccgtaaaaccactgcctggtgccaaaaaggttggaaaccactgctttatagtgtatttcaactagaccagtgattctcaaagtgtggtccttggaccagcagcatcggcatcgtgtaggaatttatcaaaaatgctaattatcagacaacaccccagacttgctgaattagaaaatctagagttgaagcccagcaatttgtgtttgtttttgttttgttttttgagctctgtctcccaggctggagtgcagtggtgcaatcttggctcactgtaacctctgcctcctgggttcaagtgattctcctgcctcagcctcccgagtagctgggattacaggcatgtgccaccatgccctgctaattttttgtatttttagtagagacggggtttcactgtgttagccaggatggtctcgatcccctgaccttgtgatctgcccacctcggcctcccaaagtgctgggattacagccatgagccatcatgcccagctgcaatttgtgtttttaaaggtccaccaggtgattctggtgtgacctaatttttaggaaccactgatcctgatccaactctatctccccacacatcaacatcttgggggttgggcaggaggccttacaattaaaactggcacatgttttttcttagcagtacataaggtagtgatgaatcttaaaatgaatggtatcttagattcactgaaattctataagcatgtgccattgttaagattacagggaggccaggtgctgtggctcacacctgtaatcccagcactttgggaggctgaggcgggtggatcacgaggtcaggagatcaagaccatcctggctaacacggtgaaaccccatctctactaaaactagaaaaaattagccgggcgtggtggcatgcgcctgttgtcccagctactcgagaggctgaggcaggagaatcgcttgaacctggcaggcagaggttgcagtaagccgagatcgcaccactgcactccagcctggatgacagagcgagactccatctcaaaaaaaaaaaaaaaaaaaaaaaaaaagattacagggaatgacatagaaaaaaaaaatgctacaataaaagtaccttaggaaaaaaaagaaaaaggattacacgtggtgaaataataagcacaatacctgccatttaacctttgaaaacactgccataatgatttaaaagttgtctcttcatcttagtcttatatgtactatgaacaaactgctggaatccagcaaagacccctaacttcacagatttgtttctctaaacaaagggttggagacagggaacagtcataccaccaattgataaagagcttcaaccacaaaacccagacttctcttagaactctagaactagaggtaaccttgggcagccagtgcctctcctgttaccgaagagaaaagttaaggtaggtgtggggtaagtgactcgtccaaagtcacactgcagggcccataagagtcacataggaagagctctgaaagagcccctaatctgaaagagccacaataattagaattggctgagagcggggagggaaggagagttgggggaaggactgtatgtgtatatttgtatgtgtatatacatgcacgtgcatgtgcatgcatacacaaacacatattatataatatagtatatatagtatattatatatactttttttgagacagggtctcactctgtcaccaggctggagtgcagtagtgcaatctcggctcactgcaacctccacctcccaggttcaagcaattctcctgcctcagtgcccaccaccttgcccagctaatttttgtattttttggtaaagacagggtttcaccatgttgccaaggatggtctcgaactcctgatctcaagtgatccagccgcctcggcctcccagagtgctgggattacaggtgtgagccactgcgcccagcccccctacatatatctaaaaaaaaaaaaaggcaaattctccagacccaaaccagccctacttagtctgtttctggagctgcagtctgataaatgggaagaagagtcacatcttaagcctgggctagtgtctaaagtctctagggtaaaagttaccctggagacattccctgtatcacctagagcacagtacactgcatgcgattcaagagtccccttcttcacaggtagagtcagtctctttttcctcagctgagcaccagatgatgaagtagagggattgcacttatgaggtatgttgtccccaataaaaaaaaaaaaagtctttgcatacttaaaatatattcagtcctgccactttgccaagttcataaggttgaattctaacaagttcagggatatatgctgtggctccacttacaaatgctgtctggtgtgccttcaaaaaaatttcccaaattattctgaacctccactgatttgggggacaggtagcctagtctaggatttcttagactttaatatgcttacaaatcacctgagaatcttgtcgaagtggaaattctgattcattcggtctggagagcaccagaaatgtttcagttctaagaagctaccgggtgaccgccctgccgctggcctgcagaccacatttggagtagcaaagctctgtctagtgagcccaacctctggctataactacaaagtgggcagggagtgaataggaaggggagatatcagaggacgggcaatgagagagaggaggagccccgagagagatgcgctcacctggacagatgctgcctctgaggttctccagcaggtgcgtcatggtgccgaagtccggggcataggacacgtgcagttccgctggctccgaggcgatctcgcgcagctccgcctccaccgccttgcccacgcccacggcgtacatgacgatgcctgcaaggccggggtctcagagggtgccccaggcctcgggaaagctgcctcccagcgtctgacccaaccccagcccactgtgtcccatgccaagcccaccttcctccttggcgcgcgctgcccacaccgagatgtcatcctgggagcggccatccgtgaagaccaggccaacacgaggcacgttaagggcacggggccgtgcaccctgcgcctcggagaagctgtgctccaccatgtgccgcaacgccagccctgtcatggtgccgcgttccatgtactccacggccaggaccgcctgcttcacctcggctgcggtgccgtagcgacccagagggaactcggtgcgcacgcggctcgagaactgcaccagccccacccgcgtgccctcgggggacacatctaggaagtccacaatctggttcacgaagcgcttcactagctcgaagttttgtggacgcacgctcttggagccatcaaccagcagaacaaggtccacgtggccttcccggcaccctgcacagccagaaaagcttgaattgagggaccagattctggactggcagcagctgtctatccatctagtcgttcattcgcaaacatttattatataacagacaacatttcctgagtccttcctgtgccaggcagtgtgctaagtaataataattatcaccatcatcatcaccatcaccatcatcatcaccctcatcatcgcccttgacatttattcagtgcttagaacaaaccactctgctaaaagcatctttttttaacaacaatcatagtaatgaccacaataactaccatttattgatcatctactatgtatcaggcacacttctaagcactctaccagtattaacaataataataacaaaaacattatttaccgacagcttaccatgtggtaggtactgggtgaagtgcttatatatattctcaatcctcccaataagcttgaatattgtccccattttctatgacctgaggttctgatggataaagtgattgccccagatttcatagctagtactgactgagccaagacatgaagccaggtccatctgactccaaaacccatgctcctgaatgactctacaatgtcacctcccctattctgagccaggaaagttgctaggcccaaaatgtggtgtgtgttggcgtggggaggttttcaaaggttttgaaataattaaaacataatcctgttccatgaggacagagcagagcaagtcagacatgctatgtgctctggtcaaggaaagtgctagaagagaagatcatgcagggatcccaaggtaggaatagtgtattcttcctggagttgttaaggaaggctgcatggagatgatggccttctatctgatctttgttatgaactgaatgagtgtgtttcccaaaattcatttattgaaaccctacgcctttatgtgatagtctccggaggtgagatctttggaggttaattaggattagatgaggacatgagggtacagcgcttatgagtaaaattactgtccttgtaagagtctgaagaggtcaggcatggtggctcccagcactttgggaggctgaggcgggcagatcacttgaggttaggagttcgagaccagcctggctgagatggcaaaaccccatctccactaaaaatacaaaaattagccaagcatggtggggcacacctgtagtctcagctactccagaggctgtaacaggagaatcagttgagccccagaggcagaggttgcagtgagccgacatcgcgccactgcactccagcccgagaaacagagggagacttagtctcaaaaaaaaaaaaaaaaaaaaaagtcgaagagggcttgcttcctgtcttcaccatgtgaggacacagcaagaaaattggtgtgtgtgggtgtgtgtgtgtaggggtgtgtgtgtgtgtgtgtgtgttggcgtggggaggctttgaaaggtgtgccatctaagaatcagaaaacaggccttctttagacaccatatctgctggcaccttggtcttggactcctcagcctccagaattgtgaaaactaaatgtctagtctacagtactttgatatagcagcctgaatgatctaagacagtcttgaaagatcagtaggagtttgccaaggcagtaagggacagtctagaaggtgagatgcagcacgtgcagaggcttgggatctggggagatcctgacacatccggggaggggcaggccagtaagactgaaatgttcaagtgtggcaggagatgggcagatggagttggctgaagctagatcgtgatgacctaaggcagtggtttcaaaatttttatcacagcccacagtaaaaataataataatgacaatacatcatgagacatttcacacagaactaaaatttcagaaataatataactctttctacaggcagtaaactctatattgtcttccactcttttttttttaatgttggttgtaacccagtaatttgatttcattattcattaatgtggttctgctcaccatttgaaatacttaggggtaagtcatttgatctttctcctgtagtcattggtgagccacagaaggcttgtgcacaaaggaggaatgtgatcaaatatgtatttttaaattaacattgacagcagagtagaggattgtaggaaagagatggaaggagggaatggcacaccctccaatgtcacccccacaacacacacagacattcacaccacagcctaggggccacagcaatggcaaagtcaaggacactccaaatgtgggcaatggggcagaagccaacagaacaccctcccgcccatcactcacggttgcagctcttgccatctgcctgaagttgccgcccctcggggcacaggcagcggtaggagaggccctcgctcacacactggaactcacagccatggtccacgccattgcaaaggtcccggactgaaaggagagacaggtcaggatgagtcaggatggaccccaccagctaagatctcttacccctcccacaaatgtaggagagccctcctcaccctgacagctcctcccatcaggctgcaagtcatggccctctctgcagtggcaccgtggcccaccaggggtgctaacacactcatgctgacagctatggttcccaaagctgcagtagtcaatggctggcaggagggaagaaacagcaagatgttgcctctgattggagccctcggaggccacagtccagggtgtggtgggagggtgggggtgttgctcacccctgcagctcctctggtcctgctggagtacaaagccaacttggcagtgacagaaataggagcctggggaattgacgcagtggtgctcacatccatgggtcccttcagcacacagatcaatggctgaggaagaaatggggtcagtctatgcccaggactgcccttctcagctctggtagcacaaccacctaaggaaattttaaagaatacctacgcctgggccccaaccccaaaaatcctgacctaattagtcagggcccctgtcctcaagatgctctctgacttacagaggacaggtttggccactttacctatttgagcctccatttttctatttgcaaaatgggaatataatggaagacagtgattgctattcacagcttccttccatggaagatggggaactattgccctgttgagcatcttgatgatctggataggcaaagatggccgagagctggactggagagaagataattaccctgtataaaaaagtgagtatttggggttcctggaaaggagatgagagtggagagaggaaagaaaaaaaaaaaaaagaacaagagagccagtatgaagatgagtaactctgtgggttgaggctgcctgtgaaaaatcccttgtactaggctgactgaggactttcagaaacaaagctgtctaatattcaattataatgagtttttcgtgtgtgtgtgcacgcgctatgagttacttagcacatacacgcttgtgtatgcccctgcatacacaagtgtgtaaaccaacgaagaggttgattaacatgcatggaacaagaacagcatgtgcagggttgagaaatgagagaggatccataaatcaaatgaatttagcagaggctcacagcaagaggtgacaaccagaagataagcacttgggggatttccagaggtcttggagagagatttgaatgttaaacagtcatcaaatcagagttcaagccaacttttagtttctagaaacaagaagaccccagctgacatctgggttattgggattacatgatttctttttccaggttgttgtgaggctgagagataataacatgtgtaatgctcctagcacaatgtctaatactaacttggtactcagtaaaaaactgaattgaataagcgaggtattctatgccatagcttttcagaagacaaaaatgaagaagcagctcacacctgtaatcccagcactttgagaggccaaggcgggaggatctcttgagcccaggagtgtgagaccagcctgggcaacatagcaaggccctatctcttaaaaagagagagtcttgaaagatttgcaaaggcagaggggagtggcaagggcagctcaggtgagcagcacacaaagagctgaggtgcagagtcaagaatgggtggcatgaggggggacacccacctaattgaagaccccccaacagtatctaagaagagaaactgtaaggatgtgcctgtaagaagacagaaatggccgggcgcagtggctcacgcctgtaatcccagcgctttgggaggccaaggcgggcagatcacttgaggtcaggagttcgagaccagcctagccaacatggtgaaaccccatctccactaaaaatacaaaaaatagctgggtgtggtggccagcacctgtaatcccagctacttgggaggctgacacacaagaatcacttgaacccgggaggcggaggttgcagtgagctaagatcgcaccattgcactccagcttgggcaatagagccagactctgtctcaaaaaaaaaaaaaaaaaaaaaagagagagagaaaagaaaagaagaaaacagaaacaagtttgggaggttgattagagactggcctgaaaacagggagaaagagggcagaaagcacactgaactgtgggctcccaccagggacttatgtgaccccaggcaatacctttctttcttaggcctgtaaagtgatggaggtgtgcttttactgccaaaggcccttccagactcattggtctgatgttggggcaatggagagccaaagaaggttcaggagcagtgagattgcaggacagggatagctgtcatccaaacagctcttgttatctgctgctagcttgtagcctgggttgcaggtgcagtggaacatggcccaggcattgacacattggtgctggcaaccatgtcccccctcagcacactggtccttccctgaggacacacaggactagaatcagtagggaacagatgggcagaagcctccaacaagagagagctggatggggatggggtcagaggcaggcatcaccctcaaatggctttcagaaggaaatgactaatttgagaagggccgtaccaagtgagagggcttagggaaagaataaggcttaaggagcccctgtgagtaggctcagaagaggagacactcaattagacacgtcagtgggctgggacaggactacacaggggcaggagtgggtaggaaggtggagaggtgctaagtcgaggtgggcggaataaactcaaaacagatcagaacagatcttgcagcatttgtgggaggagctaagatgataatgggagaagtcatccccatgtgggagggccacgactctttggagcagccgatccctcttagctttgagaatcactggttccgtgtgtgcagggggttggtgctggaatttgacattaagcctgtggtaagctgtggcgggtagggcaagaaattataggttgctccttgttgatggaggctgagcagaagtggtcagagctgaaatctgacacagcctgcggtaggtcagggcaactctacctggaaatcgcggggccacccccacgggatgggatttactgtggtgggaaaggaatccaagcatttggattgagagttcgagcttcactccagcgccctcctaactcaccacacagccggctctggaactgcaggccgaactcctggatgaggtcgaaggactctacgaggaagacgtgctcgtctagcgggggcgatgccatggcgcgcagggagcccacgtccgcgcgctgcacccccaccgcgtaaatttcaatgccgcgggcgcgcgcctgtgccgccacctcggccacgcggtcctggggccgcccgtctgtcacgatgacagcgacacgcggcacgcgctcctctggcggtcgcgcgccctcggccacactgaaggccacgttcatggcgtactggattgccagtcccgtcatggtgccttgcgccagaggcaccaggtcgcggatggcgcgctccatgtcctcgcggcgagagaacgcgcggagagggaagacgctctgcacttgactcgaatactggatcacgccaacgcgcgtggcgttgggacccacgttcaggcctcggaggaggcccatgaggaactgccgcatggtctcgaactcgaaagggcgcacgctgcgggagctgtcaatcacgaacaccagatccaggggcccagtgtgacacctgggacctgcggggagatcagggaggactctcctaggtcagcaaagcctcacctccgaggagaccccctaggaaacccaggggaaatgccgctatgccgacataacagcgcccagcacagcaaacgcagattagacagatgcactcgcccggcatgtgcctagcacctgggctaggagatttcacaaattccctcatcttacagatctgagggctattctgaggcggtattacccattgacgagggggcaaggaagcgtcgcaaactcaaagcctgcagggaccaggcagggaacatggatgaactggttgggttaggacgctggagacccaaagagcccctatcactcctaaattgggcaggtagctgcatccaaatgaggccatgcccctgcgaattggatgtcagcagatccctggtttttcaagagaaatactaaacagggatttttatgtaaaatttcctggtttttttccatgttttcaaataatttttccaaattaaacaccccatgggcagttctgcatgcgcccaaaactaagccacatcctacagatgaagaaactgaggcccagaaaggtgaagtggggaacttaaacccagtcccatatgttccaaagcccttgcttccctctccccagcaggaggagctggctgcagagggaggacctgcttccgctcccctcctcccactggtgagggctgggccccagttcacctgtcaactggagctgggtttcccagggctgaagaaggagcagcaacacgggccagcaaagaaggcctctcatggcgcttggggacagagaatggaggtgtcagagcctggagggaggaaggaaaatagaaaagcaacagtatttacagagctcttattctgggtgataggcacttggagggggaagacagttacaggtttattttactaatctctctatttttgtgtatgtttgaaatgtttcagaattaaaaaattctcatcacagtgggattgctgggaaacacaagagattctttttttttttttttttagatagagtcttgctctgtcgtcccggctggagtgcagtggcatgatctcggctcactgcaacctctgcctcccaggttcaagcgattctccggcctcagcctcccgagtagctgggattacaggctcctgccaccacacctggctaattttttgtatttttagtagagagcgggttttgccatgttggtcaggctggtctcaaactcctgacctcaggtgatcctcccacctcggcctcccagaatgctgggattacaggcgtgagccaccgcgctcggcccacaagagaatggtaaataagaatagatacatagatacaaatatgcaaaatttaaacagaaaaaaacaggtcttccttaaatgtcaggcacagtgttaaatgctcttcacgcattgtggcatttaatcctctctgcaattgtaagactaaggctgtgattgtcccccatcatacagacaatgaaattgaggctcagaaaagttaagcgctggtacccaaagtcattcggccaaaaagtggctgcggcaggatacaatcccacgcctgctagtttctgtgagccagcctgggcgtttggtgcctctcctcctgccaggcgaacctctgcagacagaagcccttccccacctcggcccactcccctacgcacacaggcttctgtgtggctgtctttgcaactcgccaacccccccagacccctccacacacacaaacacagacatgcactgcccaaccgcaggcggcagggaggggctgcgccctgttgcggggctgagcgtggtggcgtggcagcgagtggaccaaaacccactgcgcacgagaacgcgcggcttggcgcctgtttcccgcctgctctcaggagcgaccgccagggggcgcccgagatggcagggggcgtgggaagcccacatctgcccagcaggtgcgcccaccccgagcaaacagggggccggggcccggggccttggagataaggcctggacaggatataacccgcgcaagagccgaggagcaggggtgtgcagggttccagcgacagcagcactggactcgtccagagggcggcgggtgagcggctggggccccgtggagccaccatggaccccgcaggggcagcaggtgagcgcttaccctcccgaggccccggagacgccccgtgagaactacgaaggaccacccccccaccccctccccactatacaaataggaaaactaagccccaaggaggcagcccgccgaactgcaaaagcaggattagaacctagggctcctggttccccttctctctcttgaggccccctggcgcctagaattcactaaacctcatttccttccagctcctaccccaccgccgcgccccatgctgaagctgtgttagccatttttctgttgctgtttcttggcagagagggccagctgcccctaacccaacagcagctccgcccccgccccccaattccgtgaatgcgcctattctgagcgaggccagtgcctgcttctcactccaggcgaccttctcatcccggattcttctcccttttcccctcccaggcctggtagaagaacataaatcctctggcagggcccgtcgtgggagggtgaccaagcaagatgtggcagcgctggtggaagtgggagggcggggaacccttgtcaagcttgggccacaggcaaagccaacatccctggacagcatgagggctaaggcacaaggggcctctgccacctcccatactttcctacccggagatgcctctgggcccctaaatcttggttaaggttcccctcatcccattcttggtctgagccaacttctcacctggcaccctgcctccaccccaggaatcctagaaagtcaaaatagcaaatgcctcaaagttcatcacctttccaaacccctcattctacaaagaaaggaactaggtccagagagggtagtgtcttgctgaagggtacatggcgatgtcgtggcaggactgatactagaacctgggattcctctgaggagttaatccttgcattaaaaaaagaaagattcagagatgccctgaggtgaggttgagggagtggagcagcaagggaggagaggcctgtaaataaattctcaaaagtcccttagggacatttcagggggttcctggagggatgagagtagaaaagggatgatcctattttgatggctttgagggtgggggctcgatttggaaaggaccctgcagaagtggggaagggcactgcaaatcagatagggcaccctaggcagcgtctctgctaaaatacactcgcctgacctggcttgatgcctactcccctgcagacccctcagtgcctcccaatcctttgactcacctgagcctgcaggacagatcagagatgcagctgcagagcgaagccgacaggcggagcctcccgggcacttggaccaggtaacggcggcgtggcagcgtgccctaggtggggactgccaggcagctggagcacacagaggcaacggccgcatttaacccagggctggcgggtggggaggggaagtgcaggctgcaacccctcccactggcagggagggatccccccttcctcctgagggggggcaaacccagcaccccctgctcctaccacgcttggagctgcagacagggctagctgcgggccaggctggaattcagctacagcgggagactggggagaccggggcagccacactccacagccggaattcattggaagcttagaaggcacttccctgaggagagccccaaggggtggagcggtcctggctgtggctgctgcctgtctggcctggctttcgagggtgcggtcttgcgctgtcccctccaggagtgaggagagactctggtcctgccaagaggaataagggctcagaaggacagcctcagttttcatggctctccttgggcctcaacctgctaaccccccaaatctctcccacctcccctcctctacttgctccctgcaattgctcgggcctacccacccacaccgctcaagacccccaggttaagaagccaccagacctctaggctctaacctggctcactctgcaggaccaatgtcatctgccttgactcctgtaatcaagggtaggaaagcccacacagcaacaggccacttctcatgggagaaagggaagaatatggctttggccccagaaaggctcagattcccccaggccatcccccatcctgaggacaaggttttgggcccttttctgtttgcaggcaggaggctagagagcgctccaggccaggagcccaggaaaggctctcccttcccctccctcctcaccccccaccctgccttccccagggtggggaagcttcatctctaccaattccatcagccctaaaatactcttctccatcccaaggccagtataagtgcagcctttgtgtcacagccacgtgtccctatggccctgggctccaatgggcatgatgccagacccacagagtggaacctgggtggtcccatgggttccatgcaggcttcgttgagcaccttgcagcctaaatatttagcctacaatttgcagccaagtctcctccttacctaatgcttcctcttcctgaccccacaggggcaggatatagagcagccccaccctcccactcactctaaccccctgctcacttcattttactcaacctgagtgcttggaccctgtgccaccttgacccttctccctcctgtggctggtcgacctgcctgccctactcccaggtcatccccagagcacaccaccattctgaggggaggcgtgcgcaggtgcctgcagcaacagtgtgaacagactgtgcggatcctgcatgccaaggtggcccagaaatcatacggaaatgagaagcggtaggtgcctccgcagcccctcccaggtctctgcaactgtcagccctatgcacctcctccatccacccattgggcctcttttagacgcagagcaggcctcagggctgagatctcagctattggtcgaccagggccttgaccctcagccaccattagcccccactttggtctatagttctacagcaggagattccctgtgaatctcctgtctccattcattcactcattctcccattgattcacttattcattcattcaacaactacttactgagtgtttgtcatgtatgcaccaggctctgtgggtactgctgggcactgggcatacagctgaacaagacagaaacagcccctgctctgtagcccacactctcactcaagtgtggaagagacagacagtaaactccccacaagtcaggaaacaagatacttgcagattatgatgagcactagaaggaaaactgaacgaggccatttgacggaaactgaaggcaggggggacattagctagaaaggtcaaggaggttgagagaccttttgggaggtaacattggaactgaaacttgaatgctgaaatggagccagacaggagaatatctggggaaagcgtgctacaattagaaggaacagaagggccgggcgcgatggctcacacctgtaatcccagcactttgggaggccgaggcgggcggatcacctgaggtcaggagttcgagaccagcctggccaatacagtgaaaccccctctctaccaaaaaatacaaaattagctgggcatggtggcgggcacctgtaatcccagctgctcaggaggctgaggcaggataattggttgaacccgggaggcggaggttgcagtgagccgagatcatgccactgcactccagcctggcgacagagcaagactcagtctcaaaaaaaaaaagggcaacagaaaatgggaagaccttgaggctgtaccaattaggcctgtttgaggtacaaaagaaatgacagtggctgaaatcagagggaggagttgtaggaaacaagtcagagaggtaagcaggggtcagatctcaggaggactttgaattttaaaccagtggaggattttaaggagttaacatgatttgactcatgtttttaacaaaacactctggccagcctggtggctcatccctgtaatcccagcacttcggcagacccaggtgggcagattgcttgagcccagaagttccagacctgcatgggcaacatgacaaaaccatgtctgtacaaaaaacacaaaaattagatgggtgtggtggcttgtgtctgtagtctcacctactcaggaggccgaggtgggaggatcagttggggaggcagaagttgcagtgagcccagacagccgagatcaagttactgcattccagcctgggcaacagagcaagaccctgcctcaaaaaaaaaaaaaaagaaaaagaaaaagaaagaaacaggaaggaaggaatgaaagaaaaaaagaaagaaagagagaggaaggaaggaaggaaggagcactctggctgctgtgcgaaatgggaaggagatagaaacagaactttctggaaatagaccagtttgaaggctgatgctgtggtccaggcaaaaagtaatggcggctgggatgaagggcgaggtggtaaaaagccagtggattctggatatattatattttgaaggtggagtggacaggaccttctgatgagttgaatgaggggtgtaaaaacaataaggtttggctatgaatggggtttacagtcgtgaaaaagcgttgcggggagcgggaggaggaaacgaaggttctgctgggtttatgctactaccttgccgtgcttacaggagagccaagtggagatggatgcacgactccaacactcacttatctccgcaggttcttctgccccccgccctgtgtctacctctcggggcctggctggagggtgaagccagggcaggatcaaggtgagggcggaatcaagggctgccggccgcctgctctgtagggaggaccacgagattgggcccgagacggggcggttcgcaggcgcagtctccccgcgccctctggcggcgagcgctaagcttgcctggcacctgcgtcctcccgagtccttgcagagccagttcgcgtccctttccagctcaccaggcgggggaaacggggcccacggtctgcggttacatgggactggacagcgcgtccggcagcgccactgagacgcagaagctgaatttcgagcagcagccggactccagggtgagagcgcacgggaaggggtccgattcctgctcccatccctgcctctcctgggaaaggagggctcctttactcccctccgaaagccaagagataggtggggagaccgggaggccggggtcctgccttaaggccgagcctgagagcctggatggtggagcttctggtcacctccgacggggcggacgtccgatatctgggagaggttggttcatccgacgggggagggctgggatgagatggccctgtacctgtgagccccctaggaattcggctgcgccaagaccctgtacatctcagatgcagacaagaggaagcactttcggctggtgctgcggctggtgctgcgcgggggccgggagctgggtaccttccacagccgccttatcaaggtcatctcgaagccctcgcagaagaagcagtcgctgaaaaacaccgatcgtgagcagggcggggcctgacccccggcccgggcggggaggtgcaaccaagcccagaacggctaaactggggcgcggaggtgggggtaggctgggcttaggggtcagagtggaaaaggtggagtcggagccgagaggggaaggagtctggatgagtgggtgcggcccaggcctggggatgagaagagttggaggatgaaaagcagagaggaaagggacagataccaaattccaggttgggagttggggtcccagagcagacaaaagttgaactaggcaggagttgaactagggacagactaaaagtgacataggtggggcacggtggctcatgcctgtaatcccaacaatttgggaggccaaggtgggcggatcagttgatcccagaagttcaagactagctagggcaacatggcgaaatcttgtctgtaccaaaaaaaaaaaaaaaaaaagaaaaagaaaaattagcctggcatggtggcctgcacttgttgtcccagctacgtgggaggctgagatcagaagatcacttgaacccaagaggtcgaggctgcagtgagctgtgatagcaccacggcagtccagcctgggtgacagggtgagatgctatctcaaaaaaaaaaaaaaaaagttttacttttgtttgttgaactgaaagatgtccagacagcaaaggaacaggcaaaggttccaaagcaggactgcagcaggtcctggaaaaacagctgtgaactgggaatgcccagtgtatctaggcctgtgggcacattagccaggccggcacagggacagaagattggaaactgtctggaaagtccaaggaaccaagccaggacagggcactgatagcaccaactaaccttaaccctcaccctgaccccctccctcaccctaaccctcaccctaatcctaatccttaccctcaccctcactctaaccctcaccctaatcctaaccctcaccctcaccctaaccctcaccctaaccctaaccccaatcctaaccctaaccctatcccctcaccctaaccctgaccctcaccctcaccctaaccctgaccctcaccctcacagtgtgcatatcctccggctcaaaggtctccctcttcaaccgcctgcgctctcagacggtctccacacgctacctctctgtggaggatggggcctttgtggccagtgcacgacagtgggctgccttcacgctccacctgggtaatgacatctgcaggccctggagctgggcacttcacatgcattagcttatttaacctccaccacaactccttaaggaaggtaaactctgccccatgtgattaaggctcagaaacacaaaaagacttgactacagtcccagtgagctggtgactgttccaagctattctgactcccttatccatgccctttccccatatatcaactaagctgcctgcccccaacccctgcccccagggcagacatttgtgaggatggcctcaaatggcctctccagaattagaaccttcagttggctcccctgagtaccaagctttcccgcagggcccatgtgtgatgtgaggaagagccagaggcaacaaggcagggtttaaggcagaagcttgggggccgctgaaaaccttgtcccttgctttttttgtcccccagctgatgggcactctgcccaaggagacttcccaccgcgagagggctacgttcgctatggctccctggtgcagctcgtctgcacggtcaccggcatcacactacctcccatggtataggaagggagggcatgcctggaggggtcccctcagatccatgcagagaatgtggcacacacgggcagggctggagagtgaggccccaaggcatggagacacctgttctcacccagtgtcgcgtaggaccagacagaagtcaaagggcagggggaatctgctagtgcctgtgtggctattggagtagcagacagccggctaggagggcagcctctggacgcccgggctccttgccaccactgttcttaccatccttccattgcagatcatccgtaaagtagcaaaacagtgtgcgctccttgatgtggatgagcccatctcccagctgcacaagtgtgcattccagtttccaggcagtcccccaggagggggtggcacctacttatgccttgccacagagaaggtggtgcaatttcaggtaagaagcagagaataccagcaccaagtgtcctggaaagggagaatgcagagaaccacagaatgtaagatcatcaccctcaccatggttgctacttcctgagcagcctcccatggaacattaaaatcatagactcccaggacagaatcataggatgtagaaaaatagtaataagtaatagtatgaagcaatattccttcccaaagaattttagagtcataaaatattgggatatagccaggtgcggtggctcatgcctgtaatcccagcactttgcgaggctgaggtgggcagaacacctgaggtcaggagttcgagactagactggccaacatggtgaaatcccatctctactaaaaatacaaaaattagctgggcatggcagtgggcgcctgtaatctcagctactcaggaggctgaggcaggagaattgcttgaacctgagaggtggaggttgcagtgagccaggatcacaccattgcactccagcctgggtgacaagagcaagactccatctcaaaaaaagtaagtaaataaattgggatataaaattgtaggatgtaaataaaaatcatgataggtaatagagagcagagaattaatgagcaaagactattcgaagcacagataaagacacagaatgtggaaaattatagaatgtggaaaataataattatcgttaagcagtagtactcccaaaagaatattatcatagaatgttacgagatagaattataatatgtggaaaatagcaagtattattccttccccaagaatattccttcccaaagaatattaaaattgtagattattagagcatagaattgcacaatgttaaaaaaaaaaaaattctggaatcccaagaaaaaagacccttagaaatcagctatcccaggccgggccaatggctcatgcctgtagtcacaatactttgggaggctgaggcaggaggatcacgaggccaggagtttgagaccagcctggccaacatggtgaaaccctgtctctactaaaaatacaaaaaaattatttgggcgtggtggctggcacctgtaatcccagctacccgggcgcctgaggcaggagaatcatttgaacccgggaggcggaggttgcaatgagccaagatcaggccattgcactccagcctgggcgacagagcgagattcagtctcaaaaaaaaaaaaaggaagaaaggaaggaaggaaggaagaagagagaaagagagagagagaaagaaaaagaaagaaagaaagaaaagaaagagaaagaaaagaaaaagagaaagggaaagaaagaaaaggaaggaaggaaagaaagaaaaagaaagaaaggaaaaaagagagagaaagggaaagaaaaagaaaaggaaggaaggaaggaaaataaagaaaaaagaaagaagaaagaagaaagaagaaatcagctagctcaacaagctttcttaacgctaagtgagagaacttaagggcactgtccaagctgaggggacaagtgaaccccagagcctaggattagtatccagttcggtctaacgcagaagcccacgcgccatgctggctccctacactggtggccaccatgagaagcttcggcctcgtccccttgggtctcctcccaggcctctccctgccccaaggaggcgaacagggctctgcttaacgacagctcttgctggaccatcatcggcaccgagtcggtggaattttccttcagcaccagcctggcgtgtaccctggagccggtcactccggtgcctctcatcagcaccctagaggtgaagccgggcgctaggggcgttgggcagggggaccctgcctgcactgggcagtggtggtgctagtgagtggggggcagcgggttcccgccctacttggttctctcacctcacctggtcccaccctcccccagctgagcggcgggggcgacgtggccacgctggagctccacggagagaacttccacgcggggctcaaggtgtggtttggggacgtggaggcagaaaccatgtacaggtacggggtggtgaggcagcctctcttgggccccggggagcaggggaagggggtgcacgcgtcgtcggagtcgccgcagccctcaccctggtgctccacccccaggagcccgcggtccctggtgtgcgtggtgccggacgtggcggccttctgcagcgactggcgctggctgcgcgctcccatcacaatccccatgagcctggtgcgcgccgacgggctcttctaccctagtgccttctccttcacctacaccccggaatacagcgtgcggccgggtcaccccggcgtccccgagcccgccaccgacgccgacgcgctcctggagagcatccatcaggagttcacgcgcaccaacttccacctcttcatccagacttaggcgcgcccggtagccccggctgcccaccctggagggctgcgcccgcgccaggcgcggggacgtgtttctgggttctaggccctgcttccttgcccctttgctgcagaagggcagctgaaggctcaccctagaaaccgggcctggtgggtcttacccggctcactccctcccttgtccttacacatacaggaagacaagacctgagtggtgctgtctttgtgtccgtcgtgtatggctctccctgtcttcatttcttctcactctgtctctaaacctctctctctctcccttccccctcagtacttagtctacagacctatgtgcgtgtccctatccttctgtccttttctctcttcagctctccctgcctctcacacacaattttacatgccccgaggagccaagtttgggacatttaccctccaggcatctgtgtcccctcttgaagagaaaacacacagcttcacacatccaggcatagggggcaagctcttggggcatcaggaccctggagcaccaggtccttcctggaatattagatccacctggagcaccgggtctctctaagtctcacctggggaattcggtcccacctggggcaccagttcccacctagagcactgtgtcctgccctagagcacaaagacctgctcctcccgagactctctctgactgcagccaggcatagtacctttgcctgtgtttgctccctggtccacagatttggtggctgggcaggtgcctggacagtgatgaggtcttgccgccttaactgtcccccccagtcacttctcccacaggcccagcaggacgcagtcctgaggatcagggattctacagctgcattaaaatcaatcctatccaaggcagagtttggtctgtatgagccacctccccaagtgtgcctcccccaaccctcgcaccaacacacaaaagaggggacctgcacagaaagaaaagaaccacaagtctgatggagcagagagcctaccttttggacgttttctagaggaggaacagggtgcagaggcagctggcatcctgagtccctgtccctgccctggggttgttaccctactagctatctctccatcccaagcaagggtgcaccccaggcccagaggtgaccacgggaccctttcaaaacaaagctttcccaggatagccctgggcagaactcctgggattgactgggcagtaatgtagttgagaggggggcctctctgcatggggctgatggacagaatcacaatctattccccaccagcctacccaccctaggtaccactctacccagtctgtgctttatagggaaggaaaaaaaaaccaggcagaacactggcttgggctattggaatcaaggacacagataagtatcatgggtgccagctacctgcaccagcctctggtggtgcctgatgggaaaactggtctgaaatgtgggttctaggttctaaccctctggagaagagcttgccctcctaaggaagagctcatttcttgtaaaactcctcccccagggtatggaaagtcccatgagaaaaaagaaacgaacaatacgcagaggagaggaaatggggtatgttctttagccttcccaaagtcttgactaagttctgccatctgccatcagcaggctgcaacccactgtgaggggtgaggaagaagcctgtggcccctgaaggtgaatcttggctgaggaaggcagcaaatgagttgaatgggaaatgtccctgaaatgagcgcctgactcaccgtccatggtggtgttgaagcaggcagccaggagggaggaggctgagaagagtgtcatagcgcaccacatggggaattggggctcaagcgctcatcgtccagccctgcccccaaagtcttcctccaccactcctcaaggcaggagtcccagaagccaataatctaggttggaccaaaagcccagacccagccatacagctctgtcttagtcctcacccatctcaggggatcctataacctttggtgtccccaaggtatccatctggaagtctgtgaccaaagctccagccctggcctagcttctgagttccagctgctgaaactgtccttggaggtcttccttgcactgagtctgaagccatctaacatcaaactcctttccctctccacctgccttgcagcaccacctctagctccttcccccacaccacccagtcacccaggcctaaggatcccacccccacttccacactaccatatgcctcctgttttcctctccctccactactgccctgccaggtcctgtgtcgcctcttccaaaatttcccaaactactctaggtagaactagctatataatttgtgggccccagtgcaaaatggcccgttgttcaaaaattattcaagaatttcaattcgactgaacacgggattaaaaaaaaaaaaagaacttcaagacagccacaggaaatgatgaaaccaagtgcaggggccttccaagcacaggctgcacaaccacgaagccagccctggccccaggcttttttcttgtattcccacagaccctcaatgggaccatatcgactgcctgctttggatcaaaggttttacctacatgcccattgtctcctctaggctgccatcttcatggggaaaggagctcttatctctgcatgtcctaaagggtgcatcacaatgcctcgcatgttgagttggtgctcaataaacagtgaattgcattatatggcattggcagatatttagatattgctaatgcaaagtgaaaccggcaggtggcactgttctccacccgagcattaagttctcattttatttatatttaaaaaccgggccttaatcccagccctttggtaggccgaggcgcaaggatcacttaagcccaggagttcgagaccaccctgggcaacataacaagaccccctcccccatctctacaaaaaaatgtaaaaatagggccgggcgcagtggctcacgcctgtaatcccagcactttgggaggccgaggcgggcggatcacgaggtcaggagataagagaccaacctggctaacccggtgaaaccccgtctctaccaaaaaatacaaaaaattagccaggcgtggtggcgggcgactgtagtcccagctacttgggaggctgaggcaggagaatggcgtgaacccgggaggcggagcttgcagtgagccgagatcgtgccactgcactccagcctgggggacagagtgagactccgtctcaaaaaaataaaaaaataataataataattagccggtgtggtggtgcacgcctgtagtcccagctatggggtgggggcggggggatgctgaggagggaggatcactggagcacaggtagtggaagctgcagtgagctgtgattgtgccactacactccagcctgggtgacagagggagaccctttgggggtttatgcacagaattctacatacttccagggaatttcctaacactaaaacccatttatggattaatttagtcctctttatattagaatcatttgccacgctataaaaattaatataccgggccgggcgcagtggctcacgcctgtaatcccagcactttgggaggtcgaggtgggtggatcacctgaggtcaggagtttgagaccagcctggccaacatggtgaaaccctgtctctactaaaaattcaaaacattagccaggcgtggtggcgtgtgcctgtaatcccagctactcaggaggctgaggcaggagaattgcttgaacccaggaggcagaggctgcagcgaactgagatcacgccactgcactccagcctagggtctctccagcagagtgaaactccgtctcaaaaaaaaaaataatactaataatataccggccacgccatggaacaattctattaacatctctgagtgtggagctcaggcatctgtattgtttgaaaccctcccatgtgaatctagtgagcagccagggttaagaatcatggccctagtcagtatttcctcctcattttatagatggggaaactgaggctccaagagaggaggctaaggtcacagcagatggcaaagcctacaattgattcaaatcctgcactcctaccactaaatctggggctctgagtttctcttcattctcattctaccacgctgctgtgtgtaggtgacatgtgtgttgcagagggtggggatggggcatgtagtgaggataaggcccaaatctccaatttaccagctctcatgctgcctggtgttccaccattattaacaagctagttccccagtaagtaccgaccttggggtttctctctctttctttctttcttttttttttttaacttctattaagttataaccacagcataggtaaaattctctgacagcttccccctgggtagggcacagacctgtgaagatggcaagggaaagaggaagtggttttaagggaagtgaaacccataatacatctataaggttgtggccaggcatggtggctcacacttgtaatcctagcactttgggaggccgagccaggcagatcacttcagatcacttgaggtcaggagttccagaccagcctggccaacatggtaaaaccccgtctctactaaaaatacaaaaataggctgggcacggtggctcacacctgtaatcccagctacttgggagactgggacagaagaatcgcttgaacccaggaggcgaaagttgcagtgagctgagatcacgccactgcactccagcttgggtgacaacaagactctgtctcaaaaaataaaaaatacaaaatgtagccagacgtggtggcgtgcacctgtagtcccagctacttgggtggctgaggcacaagaatcgcttgcacctaggaggcagaggttgcagtgagccgagattgtgccactgcactccagcctgggcaacagagcgagactgtctaaaaaaagaaaaacaaacaaacaaaaccatctataaggttttgccacagaccagctcagaacagcctcctagacaggcttggccctgttccagaccctaagggacaaaggcaggcagggtagcagtggcacaataatgcatttagagggcaaagtgataaacccccactacagctggctgcttgccaccagatgggcactttcacctttgctatctaatgtaaactaatcataaaccttgtggcatcccatcatatttacaggtcctcaaggagagagaattatacaggttgtatatatagggcagaaatcttgcaggccatcttagaattctgtctactccccaaacaacatagcaaatcataagtaggggagatgtgtttcacttgtaggccttcccacaccccatgcaggcattgtcccatggttttgctacctctgaagattggcaagatcatgaacaaaaagtgggcccatgcctggcttctgtaatgtagtggttatcacattcgcctcacacatgaaaggtcaccagtttgagaccgggccaaaacacgagattttccccctaaatttagtgagtttaatcgaggttggaaacaaacagaaaactagttaaacctgtgcctacattttggccgggtgtggtggctcatgcctgtaatcccaacactttgggaggccgaggtgggcggatcgcatgagatcaggagtttgagaccagcctggacaacatggtgaaaccctgtctctactaaaaatacaaaaattagccaggcattgtggcacatgcctgtaatctcagctacttgggaggctgaggcaggagaatcacttgaacctgggaggcagagatagcagtgagctgagatcataccatggcactccagcctgggcgacagagtgagactccacctcaaaaaattaaaaaacaaaaagtggaccaatagtgtccaaaatccattttgcatccactgcccaattctcagaaatattatatattatcagaaataaccagagttggctctccagacagataaagccctagtcgaggttgaccactgatggggctatgtctgccagcatttaggatggcttccaatgagtcttgtatccaggtgctcctgcccctgggtggtctcctgtcacaatgaatagggctgacccatgtgacccatgcaatattatggaagagatagtgggtgacttccaagctaagtcataaaagtcactgtagcttccacttggtggctctcttggatcgcttgttctgagagaaaccagctgccgcatcacgaggactgtcaatcagctctatgtgggtccacgcaatgaggaactgaggcctcctgccaaaatagccagcaccaagttgtcagaaatgtaactgagccatcttggaagtggatcctccagcccagtcaagctttcagatgacagcaagacctggccaacgtcgactgcaacctcacaagatggagccagaatcgcccagctaatgctcctgacttctgactcacagaaacaatgtgagataatatttatgttgttataagcccctaagtttgggggtaattttaaatatcaatagataatatgggggtcttctttttttttttttctttttgagatggagtctcgctctgtcgcccaggttggagtgcagtggcacgatctcggctcactgcaagctccgcctccccgcttcacgccattctcctgcctcagcctcccgagtagctgggactacagacacccgccgccacgcccggctaattttttttgtacttttagtagagatggagtttcaccgtgttagccaggatcgtctcaatctcctgggggggtcttcttaaactaatactttacccaaaaagatggcactgatgatgagaacaccatatattgagcacttattgtgtgctaagctctgacttgcctccctataggctgttggatcacaaggtaacagctggtaaaagctgaaacccaaacccagaggtcctgactcagtctcacaccatccaaagcagccctaacaggaatttctacaactggaaatgttctgtgtctgcaccacctgatacagtagccactagccacatgtggctgttgagcacttaaaacaaggctagtgcaactaagaagcagaatttttatttttacaattataattaatttaaatttataatatagccacagttcccagtggctaccatagtggtcagcacagatctaacagatgtgagggccttctacaagacacaagttaggagaacagagacccactcaacctcatgggactcagaaaaacagtgtggcaaagtctcaggagagatttaagctgccacgagatttaagaccagaatcactggttcagagggggtttgcaggggcatgaacagcccccagtgagggagccttgggtgatataaaccccttgataggcagtgcagttgttagcactctagagcccgactgccggggttcaaatctcacctctacaactggtaagctgtgtagctttgagcaaggtatttaacctcttagatgcagtttccctatctgtcaaatggggttactaatagcacctactctgtggagatctgacaattaaatgggatctggtataaagccctaagaatgggttcctggccacatggtgtgtatgggagggtttgctccaactaccaccaattcctgtttgcgtcctttccccaaccccagcaaagtactgggcaacatggtgccaaaggaagatcaccaatgtccaaggacctgaaattaaggttcgactctccagacacactaggggcaggttgccctcttggtaacaaggatcttacccacctcacagggttgttatagtggtcaagaaagatggcccatgctatttccggagactgccagccagcctggctgcagcagtggcctgagtgaagcaggcggagacagtggtgcggagagcccacatctagatgggtgcctgccgctcagcagctctcttgttgccatgcaggctgacagttgccaattttttttatttctttttcccaagaaaagtgagaaatctggatttttatgagaaacctcctgatttctatggatggcaactgacgcaaagatttttgtgtttgctatttaaacacagtgccacctaaacaaaaccttgaagtaggggtgatatgctgcataggccatcagggtgcatgttctgaagtcttccctcttctctaggccccttcctgccttcttacctctctgcccccaccctctgcccacccccggcatgtctggcaccccgtaggggatttggtccggggagtttcttcatgctccactgagatcaaggggatacagagcccaaaaaggatgacttgttatgaacgaaaatgacagaggcaagcagtttagaaagtaccaggttttattatctttttatcaaaaaaaatcagtaacagacaacagtgtgagaggtgcctacagaggaggtgctcactccaacacagcccaaggggaagggcactgggggcagaagaggacccagccagctgggaccctgggttgcagtggtgacgggagctaatggccactggtgcagcaagggagggtggttcccctcaccgcagccactggggtcaggaggagacacgacctgcccaggctaagccaccaggcctcccctctcaggagagggagggtcccagacaacaggccccagctggggcctcatcagccctcccccattcccccccccctacccagggagacaagggtcgtcccagcacagctgaggctgtgactcgttaagccagtttagttctctagaatagtgctgtccaacagatggacatgctctcgctgtcagtacagtagccatgaactacatacagtgacgcctctagaaacgtggttagtgcaactgaggaaggaatttttaatcttatgtgattttaattggcttaactttaaacagccgcatgtggttactgtattggatagcacagccctagagcctgaagaaagcaaaccaaagaacaccagctgggtcccaaacagaaggcagaaagggtagaaccatccacctcaactattccagccccatcagaaggcaccaggaacagggcaagagaaaaaggcaaaaacccacccagccacatgaaaattcactcactcaaccacccagcaacatcaaactggaaacaccacactatttcctgaaaaaaatatatttatctatttttctagaaccaaggaagaataataatatattataagaacacagacacaaatatcccaccatccccttcattatattttgggatctgctaaaaaaaaactatgtttcggcaaaagctattttataagaggaagcagcttcagaaagggccaaggccatgaggagcggggtttaaagtataaaaaaaaaactggggaaggggtttaatgaaagagaacaaagaaagaagaggggaagggaggccctatctaaagctataaatagtaaaaaaaaaaaaaaaaaaaaaaaattaataaaaatcatctctccggctcttctctcattttcaagaaacaaacaaaaacaaaaacaaaaaccattaaatacaaacttagcaggtgctgtggaaatgtgcgagagaatgaagacacctcggcacctccacactcttgcccaggcagagatatacactctgcacaaaggaatgaacagttaaaaaaacgaacaaacactaaaaatagatttacaaatattctataaatccatttcagcataaactctcagctcttttccccatcctcccccccaaataaaaaaggttgatttccaaaagtcacttgaaagagcctagaatggccccaggtatataccacagagattcccgtagtgtgatcacaagtacccatttacagaaacatctcaaggtgcaggtggttctagttccttcccccatttcctggcagagagaccggctgtgaaaggaagggaggaaggccactgggggaggacctccagccaggactccacacaacatccgttagccccctggcttcagaggagctctggatgaggcatggtcagtatgggcttgagggcggacctagattcttaactggaagtttaagaagtgatccaatcccagtcttgccttcagaaaggccaagttgaatccatttttctgccagggcaactgaggcccaaagctcaagaagaacctggcagaacagtagaagacaatgtctcttctgaacacttcaaaggtaatcagagctggagatactgacaagtcagtattaggttgacctcaccctaccctaatgtccacccttcaaaatcccctggcttccctccccgctaaagtccaagccagtgcccacaagcaagcttcacgcgtagaactcattggtgggggctttcttgtagatgggtttcttgcccaggtcatagctgccttcatccttcttcttcatacggtacatgagcagtaggatcaggaagacggcaaagaggatgcccacgatgccacccacaatcagagctggagaggaggagagagaagaggcgggggtgagagctcctcatcaggacctaaggatgaacccctctttcccccactgtcagttctcttacaaccagacatcctcaccatcaccactgcctgtgccaggcaagctgatgccttatttaagttgacctcatgaccccagttataagaagtgggtcgttggcattttaagtcactgaagaccacagggctagtggtaaggccactcctttttctttttgagacgaagtctcactctgttgcccgagctgagtgcagtggcgtgatctcggcttactgcaacctccacctcccaggttcaagcaattctcctgcctcagcctcctgagtagctgggattataggcacgtgccaccatgcccggctaatttttgtatttttagtagagatagggtttcactatgttggccaggctggtcttgaactcctgaccttgcccatctcggcctcccaaagtgctgggattacaggcgtgagccaccgcactcggccaaggccactattttaacccacatctgcctgaatctaaagcctaggctctttccaaacaccacgcggactcccctgcaacagtctagcactaactgaaccaggaacaggagaaaaccgtaggctatggaaatccctgtagacatatttatcctgcagtccttagcacagggcactctctagctctccctgtgtgcatatttacctatatagcctacacttcatagacaggtatgtacattcaaagtgcacacatgcagaacatactaattccaaactcttatgttacaattacatacagaactcagtagctaaggcctggtttccactcctacctctcctacttcctggctgtgtgatttggggcaagtttccttcatctccctaccgcaaaatgggaagagccatacctttctcatacatttgtcctaaggattaaataaattaatccactcaaagtgcttagaacaatgcctagtgcatagcatattctcaagattcattaactgtaagggtttaaggtttatatctgtgtcccgaaccccctgaatcaggtgtgcacaacaggaggtgcttaataaatgatactttcaggctccgagaggagaacctgcctagtgttgggcagagatgggcttctaacagtgagtgggtctggcctgtccactctgccaggtggcctgaatgactcattcctgtttgctaggggcagggatgcttcatagaatcccttctgtggcagattgagttccctaattcggtcttactcgggctaagaagattaattttccatccctgcacacactacaaatctatgtacacaatggggacagagtggcacagaggagtcaagcaaggttctttcttgggtaaaatcctatgaaaaagcaacaaaaaagtacccccaggaggtgccagagcaagcacatggaatatcaggcatcaaccccattcttgtctctatcacctttccctctgatgaccccagttcctccacgaggccctgggtctgcgctgggatgccccacagggtcaagtttcaagcacaggctcagaagctgactgtggtcctcagtccaaatgccaggtctgccacttccagctttgtgacttcggataagttctttagactgagttttgtgttgtacggactcaatcaggggcacaggaatcatacagcatacagcaagcatttaataaggctcctgggtgctgattaaagcttctggaatgggggattccaccacaccagctaacaatataacttttcacatgaggctcttaggcttgtataattctcaaatggaagattaaagagataacctggcttcagttcttttcttactatgtggcctaaagcctgggcctcagtctccccatgtataagaagcaggtgcttagattaatcagtggttttcaaatttttctttagaagcaatagcacctttagttaattagagcaaaaccttatgcaaatccaaagtcttatgcaaatctttttacttctgaaagaaaagtaaaaagaactttggctcagataccaggaagccagggtcagggctgaggtgggcccagtcatcaggggctgtgctcccaggaaccctctttacaagaggcaggtgagaccttccatctgtcctggatgaagccaggctctgtccctatagctcaagcctccttggagctgctggctctgttgattcccaggagacaggagttacccagcatgggcccagggtgcccacttgccaggccggttcatccaggctggccctcggccatgaccttggggagttccctccatcccttttgtcaacacctgggacaaagcattcctcaccgcacattccagtaaagaactctcaactgaggccaaatcggaatagccctttatagtgtgcaaagttatttcatattttatttttcatggactcattatatcaaccccagaaggtatcactgtacccattttacagataaggaaactgaggctcatcaagttcgaaagcttctcagccaaggtcacaaggctgccaagtgatagagtagggggaggggaagctaacccaattcgaaggagcctccagacttacaagggaaattaacttttaatgattaactcccagatgccaaacttatacagtgaaagtcctttgcaaaataaatgagaaagacttaaggcagaagaatgactcaatgcctattttccagaagactttgataggtgctttttcctctccctccaccaggctgcacagtcagagccaccccataaggaaggtgtagtctttcaatgttctagggcaacctgaataggcaaaaggaaggggcaccaaggagcctcatggctggaggcatccctgcctgcaggtgctctcccccgctgagccccattccaccttcaaggcatcttataagcagcatggggacttacctgccaggacctccgttctctcaaagatgttgctgccctgcacagtgctggacattgacaccttgttggacacatcctcactctcttcaacgggtgagattctcttggggataacctcattctcctctagtttcttgggttcggtggggacttggctcccagaccctgccctctcagggatatggttatctagaggcacctggatgggcggaaaggagaagagacactcagcgtattttggaagagactcagggcaggggacagggacattcagccaggcagagaatctggttctgccatattcagctgaaccatatggtcctggagcaggaattggcaacactgtctccacaattatgctgccaaaatccttatccccaacttttttagtatatctgtcccaaatgaaaaatgaatgcacccaagggaacagggaagcaggtgctctcctgcactgctggccactggttattctagagcaaccactctggaagcaatttggcaaaaccttagacatcgcttgccctttaaggtggcagttttgccctggaaactctattgtaaggagctcttcagagactacgtgtaaaagatgcttgctgcagctcctctgcctatgaagtagccattcttttattcctttactgtcttaataaacttgctttcactttactctatggactcaccctgaattctaccttgtgcaagatccaagaaccctctcccttggggtctggatcgggacccctttctggtaacatctttctggagaaccacagaagggatgagacggaggagactcccgaatcaaaggaaatggactgcagcactgattggaggactttggatatcaccttttgtcagaactaagagttatgaatggccctcaccatactggccctttctgactgaacccctctctaccatggatacaagaggccctaatagttaagcaggaatatcatcaccctattcagcatgaagaagttatagaagatggatctttgtccctctgcaacccttaggattaagggttttcttacaaaagggagggggaaaatgtcaggtgtttgaaccagagtgcctacatcttgaataggggctgggtaaaataaggctgagacctgctgggccgcattcccagtaagttaagcatcctacgtaacagaatgagataggaggtctgcacaagatacaggtcataaagaccttgctgataaaacaggttgcaataaagaagcttgccaaaaaccaccaaaaacaggatggcaatgaaactgttggtctcactgctcattatatgctaattatactacattagcatgctaagagacactcccatcagtgccatggcaatttacaaatgccctggcaaagtcaggaagttactctatatggtctaaaaaggggaggagcccctagttctgggaattgcccacccctttgttggaaaactcatgaataatctaccccttgcttaacatataatcaagaaataaccataaaaatgggcaaccagcagccaatgccactgctctacctatggagtagccattcttttattcctttactttcttaataaacttgttattgctttgcaaaaataaaaaagatgtttgctgcagtgttataattttaaaatgttaacaaattataagccatttttccgtcaataaagggaatcaggtaaactattacgcagcctataaaaatgacaagagcattaaattatgcagggaaatactcatgaccagtctaagtgaaaaacgcagttcatagaattatatatatatactttttttttttttttttgagagggagtctctgtcgcccaggctggggtgcaatggtgcaatctctgcccactgcaatctctgcctctcaggttcaagcgatcctcctacctcagcctcccaatcaagtagctgggactacaggcgcacgccactgtgccaggctaattttttgtatttttagtagagatagggtttcaccatgttggccaggctggtctcgaactcctgacctcaggtgatctgcccgtcttagcctcccaaagtgctgggattacaggcattagccactgtgcccggcctatatatatacttttctatcaatgctaggaaatagctataaatgtagagaaaaggagttggtgttgacggtgactatccctgcagggaggatggcctaccagcaacctacaaaatgagcctggggccagatttgtttgtttgtttgtttgttttaacacagtctggctctgtcacccaggctggagtgcactggcacaatcttggctcactgcaacctctgcctcctggacttaagccattctcccacctcagcctctcaagtagctgggactacaggcacatgccaccacacctggctaatttttgtattttatgtagagacaggtttcatcgtgttgcccaggctggtcttgaactcctgacctcaagcctcccaaagtgctgggattacaggcctgagccaccatgcccaccccagggccagatttttaaaaagccttcccgcatagtggggtaagacccctcacttattctgcctatgggggctgtattttctgcctctcccaataggtctgctatagaggagcaaagtggaagaggcagaagcatgtagctacttaccaagggatggacaacttcagggccgatcatggagtcttccaagtcatctgtaaggtcagaatagctgtgtgagtgaggtccattaccccaggaaaatgaccccttcagccaggactggtgggagctccaccttacaaccagcttccaaatgctcaatgtccagcaagcgagcttccccacccctacttcagtcatctcatctgtaaaatggggctcctcagacccaccccctggctctttcacaggaatgtgtgagctggcagctgggcagaggcttcatcagctctaaacccttgctctgcaaagtgtggatccaaaaaccaatagcaacacctgagagctggttagaaatgtagaatttcaaggccaggcgcggtggctcacgcctgtaatcccagcattttgggaggccaaggcgggcagatcacttgaggtcaggagatcgagaccagcctggccaacatagtgaaaccccgtctctgctgaaaatacaaaaattatccacgggtgatggcacgcgcctgtaatcccagctacttgggaggctgaggcaggagaatcacttgaacccggttggcagaggttgcagtgggccaagatggtaccaccgcactccagcctgggcgacagaacaagactccgtctcaaaaaaataaataaataaattccctccatacgtattcctaaatacatttttcccaataatgggctcgtaacaatatatcattaacatctttccattacaatgcttaaagagttacattattattttaattacttctattcaatgaatttcatttattttcaatagtctcttactgttgaatgtttaaaatgttcttatctaaaaatattgtcatgatcagaaaacattaaagctaatatttcacttatttaaaaagagtaaaaataattcattggttaaaaaaaaaagaagaagaaatgtagaatttcagggctgactgaatcaaaatctacttttttttttttgagacagagtctctctctgtcgcctgggctggagtaccgtggtgccatctcggctcactgcaacctctgcctcctgggttcaagcgattctcctgcctcagccccccgagtagctgggactacaggggtgcaccatgacacccagctgatttttgtatttttagtagagacggggtttcaccatgttggttggccaggatggtctcgatctcttgaccttgtgatccgcctgccttggcctcccacagtgcttcaattacaggtgtaagccaccgcgcccggccaaaatctacattttaacaagatccccagggaattaacttttgagaaagaaaactctaactgcaatattaaaacatttcctgggcgactatgtgagatgatggatatattacttaactccactgtagtaacatttttactatctatatgtatcccataatatcatgttgtatgcacataatgaaatttatttttttatttttattttttttcaagacagagtcttgctctgtcaccaggctggagtgcaatggcgtgatctcagctcactgcaacctctgcctcccgggttcaagcaattctcctgcctcagcctcccaagtagctgggattacaggcactcgacaccacacctggctaatttttgtatttttagtagagacggggtttcaccatgttggccaggctggtctcaaactcctgacctcgtgatctgcctgccttggcctcccaaagtgctgggattacaggcatgagccaccgtgcccggccataaaatttattttttttttaaaccaaacacacacgtactgagtgcttggtaggtgccaaaagctttaagtcagttcagtccccacaacactgatgtactatctttattattcccattttacagattagaaaactgaagctcagttcacacaggatggaggcttgaactcaggaccatgtgactccaaagctaaaacttgcaaagctaaaacttgcaatcattaacacctctctgcacataggagggacacttattagctgtctggcctagaggccttgggcccttcacccgcccccacccccactgaagcagggacttgttcttggtttcccaactacatctctgcccactcatgccccctcccaccccatccccacttctaagctgctacttttccttttttgttttgagacagggtctcactctgtcacccaggctggagtgcagtagcatgatcttggctcactgcagccccaacctcctaggctcaagggatcgtcccacctcagcctcccaagtagctgggactcctacaggtgcatgccaccacatccagctaatttttgtgtttttgtagagacaagttctcaccatgtggcccaggctggaacttttcctttcaaaaaaaggaaaacactctatgggtcctccttccccactcccaccctgtcctgccacccatcctaccctcaccccacccccaccatgccctgcagaaaagagaagagcttatgaggacacgttcaggctggagctcagaaaacccagagctaccaatgacttcaaagcagcaaacagcttgtccccaggggctctcagggatggaataggttaatccattacttttgtttcccctttttttgagaaggaagaagggcactctaggaaaagtcccacaaaaatccaagtctcaaggcatggtcaccctcctggctggtgaagccaccactccctccagctttgtgcctacgcctgcccagcacaccttccgtacccagatctccagagccagacagctcaaagtcatcagattcctgcccgggccccactacatcctcatcgtctggtagggctccggagaagtatcggccttctaggaggtcctgggggtcgatgacctcagtctctcggatctaagataaagaaaggagacacatcagccaacatccccagtgctccatgacagctgatgcccaaaagctagtgaagtgggcattcagaaactagaaagagaccaggccagggcctggagacctgcgtcctggatcccactctacctctaactcaccgcgtgtccttaggcaagtctctttccattctgggcaaataaaaatagtacatgaggctgggcacagtggctcacacctgtaatcccaacactttgggaggcggaggcaggcagatcacttgaggtcaggagttcaagaccagcctggccaacatggtgaaaccccgtctctactaaaaatacaaaaatcagctgggcgtggtggcttacgcctgtagtcccagctactcgggaggctgagacaggagaattgcttgaacccgggaggcggaggttgcaataagccaggatcacgccgttgcactctagcctgagctacagagtgggacccccgtctcaaaaaaaataaaaacagtaaatgaggtaataatcaaattattaatatggctagatatcctttaccgagcacttgctatgtgctgggccctgttttaataactctggaggcatgttattcacttctttttacagccgagggagtcattttcttttggtgacacagctggcagatggaagagcgaggattgcatacgcagggctgcctgacttcagagccaggagtctccatgcacagggccctgggatgctacactccagggctctgtgatgcagtggcagctgattcacacaggacagggagtgggctcctggttctggtcttgcccagtccaggatacttttcccagctgagtcagtctgggccgggacagacagggctgcctcacgcacaccctaagacagcctcaggtcagggcgctgcccagacctgatgactcaggagtgtactcctggattcagtcttgccttccaaacatctcccacagatctactctgctgccagcaccatgcagacaccgagaggcacaatccctaccctcacagaccatccactccagtacccataatcatcactcagccactaccctgtggagacacagctgatcaggacagagtctcaggtccactcccaccaaaccgcttgccaaaagaaagtgtcaaaggtcccgggcagccctacagtacatcagttaccctgctcccatcctgtagctccaccgagtgggaacaatgtaccctcaagagcacaggaaacatttggatgcccatcacccttcctccagcttctgggctcaggcttctgtttgcccagagaacagcagctctgagcaaagttcattattctactaattaattcaaacactaaagtgcctagtatttgccaggagagttggggtttttcattaagttcaatacaccatgcccctcccgctgaaagacattcccatcttctccagacgccataactgcaggagctgggggtctgcttagaatcacagaatgccaggacccaaggagctcctgtcctcccgtttcacacaacttgaatctgagcccggaacagggcagggacttgcccaaggtcacacagagcgttcgctacataactcaggatagaaagaggtcaggtctctgtttcggacaccccaggcagtccttcactcagctgagactgccattgacaaaggagggtgtctgagaaggaacatctgtccctaagataaggttattatcattgcaggagaggcccaggaaagctgcttcagagccactcctgtactctccccactgggcttctggggagaggcaggtggaacctgaccctcatgcaccctcttccacccccacagagggagaatgctggattcccggaagggagcggggtcaggccacaaggaaggcagtggccaggaatcactctctcccggggagtggggagaatgctgaacgcttggcacccgtgggggtggaaagccagagaggttaagtgctgctcagagatgacttcatgactcgggaatcaggagctgccgggctgctggtgctggaattcaagcccccgcacatagcccgtgcctgtggctttggtttggcagagcaggaggaaggctcctcatggctgcccaagtgcctatacctaagggcagggtccctgtgctcctacctccatctcctgtggcaaatcccccaagaacccaagtgacaggccttaaccaagcacacagcctgtctaggtccttttaatagtccctttttgcagagatggaaacaagggctcagaaaagtaaagtcacttgtccaaggccacacaagcaggaagtagccacactgggccagaacccaggcttcactgacctggacatttaaccacaaacacataaacacacgcatgaacacatatgtacacggggtcaccagcctgccccaggctccaagggagccctgttaagtaggggggtcaatctagccgggagaaagaaagaatggtacactttggccagctgttgaccaggtcaaagtcctcaacaggggctgtagttccatcaggagacttgtctcaggctgagagaccttttcccacccctcactgcccccaggagccatggaaggttgtttatgcatccagcctctctttcagtatgtgaaagtgctaagaggtatttcaaaacaacccatgggattagcatgcccactggctgttaggaattacctccgttttacattagagaaatgaaggctatgagcgaaagtggggcgtgaagatcttgcagccaagtcagcagcaaaaccaaggctgaaaccaagatttattcccagttcagccctctttgtgggcacctgttcatccttaacccttcatttttatactcagtttccaaaaaagaaactagtctagtctgaagtcaccccggggctccgcggcacggcctggattcgatcctatttcaaagctctgaaaagatggagtcttcaaaggctgcatttagatgagcccaggatttccctcctacagcaagtcaaggggctgggaagaaacttcttccagctcccagtggtgataggaggacacagggaattaaatctctccttgagctctggaagccccctctctgccctgttttggtcccttctccacccatgacctctgacaagagggaaggcaactccaaagtggataagagccatttaggactaggccagcaagacgggaccaagccccgtgggattgtgggcaatcactcttttttgtgtaaaggttgggaaggcaccaacggtcctcctctcctccgccctcttttcagataaagcccattgagtctggggtgactttgaagaaccaggccacccagcagccaggcccagccctgaccagagatggaccccgccctgctcctggctaagaatgtggtctgttctcctcagctcaccccacctttgcccaggcatgtgtgttcgtgtgtatacatgcacaggcaccctctctgggctctcaagtctccttgtatctttgtccctttcatgaacacacaacagaaattaccaactaagtaagacagtggtggctaggcacagtggcttaatcccaacattttgggaggccaaggtgggaggctcacttgagcccaagagtttgagatcagcctgggcaacatggtgaaaccccatctctacaaaaattagccaaatgtggttgtgcacgcctgtggtcccagctactcgggaggctgaagtgggaggatcacttgagcccaggaggtcgaggttgcagtgagctacgatcgtgccactgcactccagcctgggtgacagaggaagaccctgtctccaaaaaataaaaaatagggcaatgggcctaggtcccacagactctgctggccctgtggctggtggggatctgggattagtgcctgggggtttagagatactacattcttccccagactgttggggagaaagaagggaggggaagtgctcttttgttctacagaaactaacacctgccaacagaaggtatctgattttataacctagcaaacagacaagacaagggattttgccaaggtcatccaagcagctggcagcggagatggacttagaacctaggtatcctggctcccagactggaattatcttctctccccttccagggtgttggctgcccctaagggtctcagcaaatccacaggcagcagctgtcattacagttatactccccatctagtcttttggctataggcatgaagctacgaaaaggtcctatcccaaccctatccccaaatcctatggcttctatcaccccaggaaaagcatgagtgactaaaaggagtatccactacatgccaagcaccatgctgggtactttgtttatacaagttcatttaaatggcaaaacagccttgcaaggtgctctacccattttgcagatgagaagactgaggttcagctgagtcacttatccaacgtcatgcaactagaaagctagagctgggattcaaatccagatcttcctcaagaacacgtcccaaccacaactaggcttctcactgccacccactcttcacttctctccagcctaacccgccagtccacaacacactggctgggccagggctccagggcaaccctgtccctgcctaggagtaaacaaaggtgaaagtgatatcacttaaacaaaggaacagaaacttggctggggcaccagagaggagttcagggtcagggcttggataactgtgaactaatgagagcctctcccgacctggctcctccccaggggaggtagggtcggggacacacttgacccttctttcaggaggcaagaccagaagggtaataactgggcaagccaaatttagtggggagaggggatggtgagtacctggggctccaacacctggacccaccagaatgatttctagcaggagacccccagcagcgtacactactcgtaactgttcttccccaccccacccacttcttaagggccagacattccccagaatggctaaaacctggggcccacaactgtgactctaccacccagagtggttgtgcatcaaggcagattcacaagtgtgagttctgccacttcctaactatatgagcttgggagtttatttcatctctgaaatcctcagtttcctcttttgtgactagggctggtagcaccttgcagggtgatgaggattaagaggaatgcatttgtgtgtgcaagggacccagcacgtgatcaatgaatagtggctgtgattaacccctacctgccttcctcctggccagtgggatcagtgctcaaaggatcagaggcctgggaaaacttgcagaggcagttctgttgctggaaggaagctagcctggggacagggagatggtgctttgcaaactgtaaaggaatataatctataataggttatcattttgcttctgagcccagagacttttcaacaaccaatcaggtcccttcagactgtgaaaaaaagatacagagatagtcagagacctgcccaaggtcacacagctttgaccacctgtcctaagcagacagaggtaaagaccatttttattttccccgaaggtgcaaatgacagtgaccagaaacacctgaaattctacttggggacctgggtccccagggacaaaataaataaataaaaatctagaaggtaaaaagaaactacacaccaatccatggtctggtgctctggtgcctgaatggttaaaccaggtctgggggtgggggtggagtgagggttcaaatgtcgccttcaaggtcgggttactctgaacacaatcactcaggagagagccaggcctggcactgcctgcaaccagcttttcaccaagcctcagggcagcccattcccacagcaagaactccaggatcctagggtgccagctagaaatgggggaagggttcaggagcctctggatgtctccctgccaggagctgacccagcacccttgttactaactccctggatgatcgtggacaattcccttctctgagcctcagttttccaatctgtaaaagacaggtctcaaagagacaagcctccctctgtcccagcccagtaaccaagctgggcattgctccgattaccggtggagacagccaggagggggctggctccctcagggcctcagagacagaggtgcattgaagttggagcttgtaatctaggcagcagatccgaaatccctgctggatccgagggctagggaggctctcgggatgtaaacaaacctcctgtgttctcagagcagagtagagagcccacgctgcagccttatctcagctgattagatcagccctgggtgctggcttcctgcctcttcccagcctccctcaccgacccccaaggaagccatcctccagaccaggtcagtctgtcccacagacggctccggcagggcttctccaaggcaaggagtatccccactctgggtagccgggccagccatgtgccacatctgcccccacgcccagaggctagagtgacaccgccagtccccgcaggcctggccactgactgctgggcttcaccaagtcactgtttccacacataccagcctctccctgcctcccctttccattaccccaggtgtcacctgaccagcagcctcttctactgtgccagagaaaactggagcagccgagctcccgggcctggaggacagggggaggggtgagatgcagcctgaaggggtgggggccgctgaataggaaggtctgggctgaaggtgggggttgggggaagcaggaggcaagaacaaggctgggaagtgggggagggaggaaggatggctgtagaaaggtcaaagccagaaagaactgctgagatcagagtgaccttttggggagtactgcagccccctgaaaaggataaaaaggtctaaaccccaataactgtaactcttagtttacattttcaacatatgcacagacaccacctccccaaagccaaactctggccgggttaagaaccctcgtctaggtgctaataaagccagaactttacaagtttgccaaacagcgatgatgacctttgagtgccacaggtgttttatagaggacactggagttcacatcaacaaagtgacgtattaactgtgtgtgtccctgggtgagcagcagagctaggacgggggctggagttttctgtaccctctttttcagtcacccagccttcagcagatgggaccagagaggccccagtgagatgcaagaatgtgcccaaggtcaccactgtgttagttaatgacaaacaagcccaagaagtcaggcttattcttctaaggttaaatgagaccccaactgttgacatatgtgttctctctcctccctctctagggcaccatgcagtgaaaacatacgagaaactggcttttcagaacactgtaccttttctgtccaccaacaccccacccctcaaagtgctatttgcaatcactcagcctccttaagggtagaaactctgcccctccagcacaggagggtgaccccaggtcctggacagtgtccagagtggtctgatacccttggcaaaccccctgccccctctccctccaggctgcaaactgttcagcatgaggctccagcaaatcccagcaggagaggtggggctgcccagaactggttcttgtttaaacataaacccattcgataattagcaaacagcccacttctaagataaacaaataggagatttggactccaaaagccccaccctagatttctcccttcccacctcccagctgtgggggtagataagggggataagggggatggagaaagctttccaggagacctgggctcagaatcttcagagataggaccccctggcatgaaggtggcctgggcaaggaagggaactgtcactaagtaacacctcctccctaccaggcatggtactaggtgcctttatttacagccctgtcgtctcctttaagcttcgccacaccggtatcatgatcttcttaacagaccaggaggctggggctcagaggtggagtagcatgactgaattcatgtagccagtaagaggtggacttcgcacgtctggagttaagtctgtgtaacaccaagccaatgtttcaatgccctctggccagccccaggaagcaaagaggagtcctcacaaacatcagaaaatcctggggtcacaccaaacctgaacagtaccagcttttgctctctgaaaaaatgcaggccagttgcagcctcagttttgccttaaagaggaaaaaagtactacctgctctgcagaggtctaaagcccaattttgaggactggctgcacaatgtacaatgtcaaagtctacatgcaggcaaggggctgtgaaagtgcgggacctagtacaaacatgtcctgtatgtcccctcgagccccggacactgaaacagtgactcccaaaggacaaggtaaaactctgagctcattccaacacccccaccacagagctgtcctattagccaagagtttgaaaggaaatgggtgactcaggcaggctacgctagcatgcagtgactcacagcgctcggtccagccccttaccccaattttaagcattcatttggaaatcacactcgcctgtccagtccgggaggttgaaggacagctaggagccaacttctcccaacagggagatggggctgggagcccagcctggcttccccagctcctcattcaggcaggctcagcactccaagtccttggaaaagccctctgtttctaggagctggggatggcaggagctgaatgtccccccgccaccccaacttctcttctgagactgggatttgtttagactcttcaccaaggaggccagcaaagggcccctcccctcatcaatgggctctctgggcaggaaggacccttggaaggcaatggtccagcctccttattttagagttggggacactgagacccagagacagggcatgtttgctcaaggtcacccagcaacgcagaagtaggacctaaggtatctaccttcaaacccagcaaatttcctcatctggaatattctgaggacactcaaaccagacaccttgccctatcagaaggacctggttctgaccttaggaagccactgcattgttccgagcatcaatttcctgtaaaaatagagaaaatggtacctcgcagtactgggagatactcatactagcaataaataacagtaatgaaccatttagaataaagttacatgcacgaatttattcattcatacaagcatttcctgagtacaaactaggggacaggtatttcacaaaaacaaatagagcagagttcctgccctcagtgtgcggggggagagagggagggattcagcatttggtggagtatgttaattccctcaagttaattccttcaagagagagacctcttttgaatagtaggtacttaagttattaatcaaattgagagatggaaaggactctggaggctaccctgttcaaacctttcattttaaggtgggggatgtcagcccagcggggaaagaggcctccccccaacctcatggaaccctccaaatcatggcccaaatattttcgtgggtgtttgataactccctgggctcaagaagtcccaagagctctcactgttcactcaagggtcctagaagcccctaggcttccgcccccacccctactcccatgtaatcaagaagaggacgctgtagaagaccagaaatgtccttaagctaaagtacacttgataggtgataggtgggggacacttccccacaaccgcctgggcccggggccaagtcagtaggctgtgcccctgggtaggaacacctttgggtggaggggactcccaaaacaaggctgcctttaattggcctgagagggagtggcaggaaggcagatcagggaatgctcccagctggacaggaagaactggtttagtatagcaagcccagccaaacagaggagaggacagctgggtactgagcctgggttcccttccaaaatatgggggtggtaaggggaatgatggaacagtcgggggaacaccacccacaatgggagggctactagtcagagatcctggggtcctggatgccctctactaacccaaagtagtaccattttacctctcacatttgggaagtgggcataatagaatccccatgtgacaggtctttttgtgaggacaaaatgcaccagatctgtcatataaaaagtactctatcactcctaactgctattagcaaagtccttctccctgggcctcacttttctctacctgcaaaaagaaaaggacacgctggatcatctcttcagtccgagccaaccgtgactatgtctgatttttccaaccacaatctagaaaagagggaggggacaggccaaaggggaagccctgtgccccagttacaggcaggaggtctgtgacattagccaggaaggggagagctgaggtcaggatgagacttgacacctatctcaggaagcagctgcccagggctgatgtctcctgcagctgatgggtcacccaggcaggactgacacagtccccttcccccaaactacatccttcagaatgcccccaggacacagctgactgctcagcaccctgaagcacctgaaggctcagcagcccctgggaggaaactggcatgtgactgggcacacggtgacctcagcaacctcctgggtcctttcctctttttccctgtactgcctaggtggtatcccttcggatgcttccccagttgcttgacccgacacatccttcagggcctagtttagagcactgtgctagaggcagaaggcttgggtcctcagccactaacattttaggcaaggtagcctttggtttaggttaagtcatcacctcactctggccttgtttccttccacctcagaattcctttgccttccagcctaaaatctcaacctattctaaacccgtctttagttaccaacgatgggacacctggagtagcacaaagagtagaagttaagctaaagcagaaacttgaaagcctggctgcctaaatttcaatctgactcacccatttattgtgtattaactgtgtgaccctgggcaagttacttaacctctctagcctcaggaccagtttaagaacagtacacagtaagattgttgttggaattaagctcctggatatacccattagaaagttattagagcaatgtctggccccccgacaaaggcgctccacgtttgcaatcatcatggcatgcctggaattgtgctggaagtattgcctagggtctcattcattcctcaagaagagcctgcaggcagaatcaaccttccgctaagtaaattcagaggaacaggagccccaaggctttcaaagaaattaacattaatggttaaactgcaaggactcactcgctctgaaaactggggctaaagggcacaaagggggcacaaagctcaggctgtgggggacagattgccttcaccagtaattcccatgccccccaacttcccagatgagattgcccccctcctcctaagccggctgcgggcatggatagagcttctgctggcccagggacagctatgacggaggccagtggacagtgagaaggaaaggtttccctgggctgattgaggccttctctcccccctacccccttcacctcactcaaggtggatgcttcaattttcttatctgcaattgagaaaaaatgaacacacttcttgcagaaagcagaggctcagctcctggctaagtgttgagtctaaaccattcctctcctctgtcctcgaaaagagcagagtccccaactttctagaaaccctaacgcagtgtcccctcttgccccattccctcagacccttggtgcagtattgggaagagattcagaagggcaggactttgccctaagtcacaagtcaatgacagagctggggccagaactgaggttagggctcagttctccttggtgtgtgaaagagggcctcgcacaaccctaaaaccctcccccttccgagtacacgcagccccccgacccccagggccatctcggatcctaaagctgtctgctctgggcgccccgagagcgaggaggggattcagcgctccaagcctgccccagggtcaccagggaagggacgagggtgtgggagttgaagagttgacaccggcttagtcactaacgagcccgtagcccgcggcggggctgaggcccggggaggcgggaagagcaacaggcgaggggcgcacggcgcgtgaagccatcccggaggctggcccgtgaccccggagcaaagtttccaacaaagtttcccgggcctcggtgtccggttgggggtagcgtacccccgatctgcccccccccatcccacgctccgacgaacaaaggaggcaccggcctgcgcccccgcttcgcccccagcccgggaacctccaagcacccaccgactcggcgactccgcctacgaagaacagcagcagcgcgaacagacgggcgggggccatggcaccgcggactggagaaggcgcgcaggctgcggcgagtggccccgggcgggcgcgccacccatcttataggcggcctaccggccccgccccggcccgcccccgccccgccgcccgcaccccgcccggaattccccagtggaagcgaggcctgcggggcactgcgcccgcccgcggagttggaaaccccaagggacccgccctgcccgagcccgccggctcctactcaacccctagtcctaccctccgggaggtccaactccctttatttatttgacccactgccaggcaggtccccagagatcactgcggctaaccccattttatagttggggaaactaaggcccagggacgggaaggacttccctagggtgttgagtttagaccagccttcataccgggtgtgctcccctctgaagacacagaacttcccaaatgggatgtgaaccgtgttaagacaggggacagcaaactattctgtaaagggctaaatattttaggttttgcgggccatacgatccctgtggcaactattcaaactcgagcgtcgtagctcaaaagcagccataaatactaaaggaatgagggcagctaggtcctaataaaacattatttatagacaccgacatttgaatttaatataattttcatgtgtcacgaaatattattattcttttgactttattcccaaccatttaaacatgcaaaaatcggctgggctctatggctcacgcctgtaatcccagcactttgggaggccgaggaataggaggatcccttgagcccaggaattggagaccagcctgggcaaccataatgagacccccatctctacaaaaagtttttaaagaaattaaccaggcattgtggtgcacccctgtggcccagctactctggaggctgaggtgggaggactgcttgagccagagaggtgaaagttgcagtgagccatgatcgctcactgcactccagcctgggtgaccgagtgagaccctgtctcaaaaataaataaataaataaataaataaataaataaataaataaatgacattttataataaaaatgcaggccggatgcagtgagtcatgcctgtaatcccagcactttgggaggctgaggcggcggatcacttgagctcaggagtttgagaccagcctggccaacatgctgaaaccccgtctctacaaaatacaaaaattatccaggcatggttgcctgcgcctgtaatcccaactgctctggaggctgaggcaggagaatcgtttgaacccgaggggcggaggttgcagtgaactgagatctccccactgcactccagcctgggcaacagagcaaaactccgtctcaaaaaaataaaaaataaaaatgcaaaaaccattcttagcagtgggctgaacaaaaataggcggtgggcctcagccactctgagaccactctgacgctggtctcagagtggctgacgtctgttctaagggcttcatctaccagattttgaactttttcaaaagtttgatctctctgagaactggtctgcaagtttatttccattcttagggtaagcttccaccctttataagagaaagttgtgtgtcctccttacccttcatcctcctaacagtgcattggtgggagcaggttgagggaagaagtggaggggggtgctatatggagactgtaaaattctctgggtccccaagcacacgtactgttggaattattgcagggtgtgaaggtgggcattctacgatgatcgaagtacaaaagaagcctaaccctgtctctccctgacttatgtataaatctttctaagggtgtaacatagccttagaagtaggacattttggccactgttggcatattatgaattcatatactttgtggagtggagaattggtagtgacttccctttttccacctcttaattattatcaaagaataaaagtctcttgtggcagagaaccttggcagtaaagcaaacttcaaatgctgaccacggggtttccacagatttaaaggtaagcaatgactttcagtggtttttaacatgcttccctaggatttggaacaaaactgagaaaatgaagaaatctcatgccagaataagaaatccttttgcaagttaaatggtttgcaatctttgctttccacaaaattgcaggggggcctaatctagttgtcagtagatagatcattaaatatagaataggtaactgtgattttagttatctattgtcacactgttgtaacaagagttcttctgttcctaccaacttttataagtttctcagcacttacagccagtggtgtgccagtaaatgtttgacaattggctaggggaagtggcgagtgctaatttgccaatttctgtagtgtaaatactaccagcatggctgatttcaagctaccaatgagatgtcactgaacatggagctgggaagatatatttctaccacacagatacaataggtgcaaataatctcaaaagcatggataacagtaaagtgtagtgagataattagtaagtgatgagttttgagtatttatttcctttatggttttgtttttgtttttgtttttttgagacggagtctcaatttgtcacccaggctggagtgcggtgacgcaatctcggctcactgcaacctccgcctcccaagttcaagcgattctcctcagcctccagagtagctgggactacaggcacacaccaccatgcccggctaatttttgtattttcagtagagacagggtttcaccatgttggccaggatggtctcgatatcctgacctcgtgatctacccgcctcagcctctcaaagtgctgggattacaggtgtgagcaactgtacccggcctcctttttttttaatataattgtatgttcatataaattaatttttagtaatagttatgtttaacaactggctaatgacataaaaaaaaaagcaacaaaaaaaaaacaggatctctctctgtagcccaggctggagtgcagtggcaaaattatggctgattgcagcctcaacctcccaggctcacgagatcctcccacctcagcctcctgagtagttgggactagacatacgccaccacgcacagctaattattattattattgttattgttattattattattattattattattttggtagagacacagtcttactatgttgcccaggctgggtttgaaggcctgggctcaagcagtcctctcaacttagcttcccaaagtgctgggattacatggcacccagccacaaaatttctaaaaattgactttcatgaaccactacaagatggctttaccacaccatggtttgacagctataaaaaatgaaaaataggaataaaattattgctaaaacctgtttcattctagcaatattcgttgaggtgtttgtttgtttgtttgtttttgacaaagtctcactccatcacccaggctggagtgcagtggcacaacctctgctcactgcaaccttagcctcctgagttcaagtgattcttgtgcctcagcctcccaagtagctggaattacaggtgcacatcaccatgcctagctaattttagtatttttagtagagatggggtttcgccacattggccaggcttgtctcaaactcctgacttcaagtgacccgcgtgcctcggccttccaaagtgctggtattacaggcatgagcgactatacccaatctcatggaggttttagtgagctaattggagagaaaaattgccacagccacctaattaagacaggtatttctaaaacaactttactttttctacttaataattatttatcaaagtttgtaggactggtttagagagtgatgtgatttggatgtttgtcccctccaaatctcatgttgaaatgtgattcctaatgttggaggtggggcctggaggtgactggatcctggggcagatccctcatgaatagtttagcattatccacttggtgataaatgaattctcactctcagttcacgctggatctggttgtttaagagtctgggaactccaccttccctgtctcttggtcctgatgatgccatgtgagatgtctgctaccccattaccttccgccatgattggaagtttcctgagcccctcgccagaagcaaatgctggagccatgcttgtatagcctgcagaactgtaagccaattaaacctcttttctttataaattacccaatctcatatatttatagtaacgcaaacagcctaacacagcaagcatatatttatgtcaattgtatactttaaatatgtatagcttattttatgccagttgtaccttaatgaagctgtttaaattattgcaggactttttaaaagagtcatcagtaagcctctgacgcattaaaaaaaaacacattatgataaaattttgtggtggaacatggagtagaaatttgacttcaaatagaaaaagaaatgatgcaaaatgtctgactcttagaaaagagcttgttcatgtattttttaaatggatgattgtaggtatcgaattgctagggcatttaatttaactggatacatttaaaagagtgatgtaattgttttacttttacgtgtataaatttacaatatgccagaaattacaacctttgcaactatttaaacttttgatgaaaaatgttaagctatcaactaaaaattatgtcaaggagtacctagtcttaaaataatcatttacagagtacactagcaaaaaaacaaaaacaaaaactgaaaacagctcgtttagagagttaatggaagttcttctataaaactatcttaacctcctggaattaaggaaataatttccccttccccaagttctgagaatctctaaagggatgcaacatgtttgaatataattatttgtggatgtatgggtctttaacctgggctccatgactgggggcagaggacacatgcatggtcagtactcctctaggttatgtgtctctgcatacattattttggggcaagaaacttcagattctttctttatatccacaaaaagaggatgtttgggggatcctccttttgggtgatcctgacccccaaagagttaaaaataatttgtccaaaacctgagattctttgagaagttttattgggttcttctttggcctccaaaaaacaaaatgcagtagtcaaaggtttgtaatactgaataggagttcctaatttcctgcatggggctgaggtacaaaaacccaaacaaccaaacaaaacccacagtgtttacagccagaagttcttcattaaaatcctgtttccaggacttgccaactggaggaaagtttgtgagtccctttgctcctccctacaatggagataattccctcttgaactaattaggagaatggaataaggtgaagtggtgaacacataacatatactcacctatgttgggtccagcactctttctgtatattctaacctgagattgagtgagtctgagagatggcattggtcaaacactttacatcctccccctagcttcctttcaagcaaaaggaaatgatctaggacatcaacaggcagccccctcccatggagctaaaaaatgagctcagacccagcctatagcagaggtggtgtccctcccccttttctcagacttcctaggccggagttaaccaaggctaggtgcacacctggtacatccagagacaccttaaatgctaccttctcctggaatcctccatcctcttcttttaattctcatttcttcctgccttgaggtttctaggactctatctgtcccactctttgggcaggcatccctttctcactcatgttagttttaggtgaagagcacagtcttcaaagttaaagagacctagattgcaatcttggtggtatggagcaagacactttttctctctgtgcctcagttttctcatgtgtccccccatgtaatttgagggtcattatagttcttaacatcataaaaatgttaagactacagtgcttagcacaatacggagcatcaaagtgttatctatttttataatcaagggggcctccccataagagtcttgacttactcccctccccagcagctcctcacacatggttaataacaggtaacacattactattttcagaacagaaaaaggattgggccatagggctctcgcccaggatggtgccaaccctttctggtcttcctcagtttatgtaaatctctctccagctacagataatgacagcttagagtttccaggggctgtggaatgtccagccactgccttgcataaccacagaaactaagaacactaggcccagaagggtcctctcaaatcattcagtccaacagtacccgcattataagataggcaaaccgaggcccacacggtgaatcagcatccaccacaggcattttgaagaattctaaaaataacacctccaattactctttccacttgctttgctttatttttttgtcgtaacatttcccttacctgccatcacgcacttattcttttacttgtttattttctgttttctctgccacatgtaagtttcatgagggcaagaacattgttgtgttcacaactgcatcccttgcaccttgtccaaggtctggcagaggtttacattcagtaaatacttgtcgcatggataactggatgaatgccatttggacattttcccttagaggctcagatgtagcaattcactcacttggtcatttatccaaaaaacatctgatgaatatcttgtatgtgagaagctttttgataaatcctggtgaacaagacctgtccgtgttcttaagcagctccctgattagcggacaatagctgccagctatacagtagactgaggatctactatatgccaagctgtgggctggcaactttatatgcatcttctctgtcttagctcagttcttgcaattgcgaggaaacatgcctcactcaggactccttaagaaaaggcttaggagttattaggaggaccgggagggctaaaggttaaaactgaaagggaaacatcaaggactgagatgatgccacagactggctgactcatctcttgctctttaagcctgcttattctttctttaagagtgtctcttctttttcctggatgtgtgcctctctctcttttactgacttactggttctctcttctagtctaaattttgggaggggaccacaagactcattggcttggccaatggccttccttattccttaagtaagcgcctgcagcccagaccactttttggattactatttggcctagaggttgaacatttagcttctcacataccctgagcagagtgtatgtttaatcagaagggagtgttgagcatcatcttcacttggatgctgtgaagtaagtagttttatctctattttacagatgagaaaacaggcggagcaaggagaaatgacaacaaaaccgtaactgtaacaaagctgccctaacccacctgcaaatctacaattgagaaatccatttctgttgcccctgagatttgtggggtgtttgttaagtagcaaaagctgactgatacaagattcaaactcaagtttctttgattctgtctgcatcaccatgctgtctcactgaacttacagccctgattcctgttcctgattcccaagtgtcctgtcctaaaaggagcagagataaatattgtattcatccattttctgatgttataacagaatcccacactgttggtgttctgagtatactgacattccttgacgctagattttatattgttgattgacttgtttatcatctctctcctctatgagattagagtattttctctttattcactttattcatttatatccataccacctggatcagtttctggcacataataaatgctcaatgaatatttatcaagtagatgattgaatgaataaataatgataaaaaggaagtgtaaaaaaacaacttttcatcttaaaacaaggccctgagtcctttaaggtcagaataaagaataatttctaggtagggacagaaagtttagtacatgatggatggggtcaagaatcaaggtaagaaaacttgaaggtgtgaggctgggcacagtgtctcatgcctgtaaccccagccctctgggaggccatggcatgaggatcacgtgagcccagaagtttgagaccagcctgggcaacatagtgagattccttttctacataaaataaaataaaaatagccaggcctgatggtatgcacctgtagtcccagctactcaggaggttgaggtgggaagattgcttcagccccggagtgtgagcctgcagtgagatatgatagcgccactgcactccagcctgggtgacagagcaaggacctgtctctaaaataacaacaaaggccgggcacagtggcttacacctgtaatcccaacactttaggaggctgaggtgggcagatcacctgaggtcaggagttcgaaaccagcctgaccaacatggtgaaaccccgtctctactaaaaatacaaaattagccgggcatggtggcacatgcctgtaaatcctagctagtcaggaggctgaggtaggagaatcacttgaacccaggaggcggaggttgcagtgagccaagatcacaccgttacactctagactgagcaacaagagtgaaactccgtcttaaaaataaaataaaataaaacaacagtacaacaatgaaaataatacaaataaaaattaaaatatagtttcacaactatttacattgtattagatgtttagagatgacttaaagaatgtgggaagattgcatagactatatgcaaatactataccattttatataaaggatttgagcttctctgggttttcatatctgccaggagtcctggaaccaaccacccatggatgctgagggatggctgtactcagaggtccttccacccactgtcatgcctggcatcatccaccctgcatagatagagggtttgcagaaaacccctgatcattagacacagaacacagaaaaccagtttcctgactccctctggtgtgaaggaaagaacagggaggttggggtggaaagttagagtggaaagacagacaccccagatgtttcttaacttttgattattccagctgacaagacatgccacacctcaatgtgtactgagtgtgagtcacttccttctctaagcctcaatttccttacctgtaacatgtggacaatgtttatacctacatccctggggctgttgcaacaataagatgaggtcaggtagatgaaagctgtatgtcactgtaatgtccagtgcctttttttttttttgagacagagtctcactctgtcacccaggctggagtgcagtggtacaatctcagctcactgcaacctctgcctcgcaggttcaagcaattctcctgcctcagcctcccaagtagctgggattacaggcatgcaccaccactcctggctaatttttgtattttttgtacagacagggtttctccatgttggccaggctggccgccaactcctgattgcaggtggatccacccacctcagcctcccaaagtgttggaattacaggcatgaaccaccttgcctggccttcagtgcgctttttgttacacactgagaaggaatagtgtgtggagtcaaactggcctgggttggagttcagctctaccactcactggcagcatggctctgggtaaatgtcccttctctgagcctcaggatctgcatgtgttcagtggggctattaatagttctcaactcacaggcttgttttagaaattaaataaggattaaattatataagtgcctgtcatacagtagatgctcagcaaatattcctccccaaacacagacacaaacagcacttaaagcaacctgggtaacaaaggggttttcggtctggaggagaaaccaggcagctaatgagctctctctccagttttccttctaagagaggaactcactggccagagcccaggatggtcaccgatgtagaggacaggcagccaactccaagcctcccacgtggggtttccaaaaacctgtgagcacagagttgcataacgtgtccctgagacacgtgtttctactgaagtgtcttcatcaaatattccctgaaaggaaacatgtgagcagggcagtagggcagcctagcgggggaggaagggagagggggaggaagggagagagggagggatctagagaacacgacagtaggggtgagaggaggaagagaaggtatcacatttaatgtgctcttactatgggccagccaccgggcttgacttgtctgatacattgttagatccttgccataaatctgagatcaggcatttccgttcccacattccagaggaagaaataataacaatcatattaacattgctgaggttaacatagtgcccactgcatatcaggcagtggactaagcacacatttgaccctcaggacagcccataacatgggtactattctgaactccactttatagaagaggaaaccaactgagactcagagacatgaagtaactttcccaaggtcacccagcaggacagcaagacagccagagagccaggattcgaatctaagcagggctctcaagcctatgggcctatgggagaacatttcccaagggatttatgggggtggatccagaaggtgaccttagcgattgtccttacatgcatgcagtggggccccagtgtgaaagtgacgaaagagaccaagtgaccagaggcactcccctcccctccacccaaaggacagtttgtcccagcttgtggcttttcgtcactctgcctctgacctgaagtttaacatttcattcataagtttggaaccacagacttggcagcgtaggaagaaccctcgtagaccagctagctattcaaatccaatcccctcatattacagatggaagaaaaccctgaagccggaatgtgactcgccaaggtcacagagcagttttctgttggatgaaggagccggtttagggtcaactacagatcatcttgtgctgtagttatcaaatgtgggtgcacctctgaatcacttggggagctctctaaatacacagatttccacactctgctttgggagacttgaactggacttaggtttgcaaacaaggactggaaatttgaatatccagtatgttcctcaggtgattcagatggcacagggccatgacagcatctgcaagtcggagtccaatgtccctctttcatttgatagtttgggatactgggacccaccaggggactcgcccaaggtcacatagcaagccagtggggctctagttcagactctgtggtctgaagcagactgcttgtggtcaaatttgaaaatgggccaatgaagctaaacaaaggggttgccatgattttccccagctcttggtttccttcttggatccaaattaagacggaggatgatgtacatttccgaagcttggcaaggcgggaatccaagaactgaactcccaaaggggaaaggaaagggcaggaggttagcttgcacgcccagtggggttttcccagaggtgagctccggactccagggatgacatcagacattccagccagccctaatatcaaaagctacctgtgttttctagttcagcagaatgggtaggcagggcctttcctattgggaggagatggggtggagtgggcccagctgtgacgtgaagggagcagagcccaggaagagccacgcattccagcatctgcaaggaagacagctgccctgggtattgtcaacctctgcagcccttttctaagcctttcctcccatttctccctaatccctcaccccagggctaactgagcagagagattcactgccccttttccacttcctgctactccaccacctattttactatctcccttcctttatttccctctccctccctcccttcctcccttctttcctgttcttttattctaaaatggcatcttggctggacacagcggcttatgcctgtaatcctaacactttgggaggccaaggtgggaggattgcttgagcccagggttcaggaccagcctggacaacatagggataccctgtctctacaaaaaaataaaattaaatgaaaaatcaaaaaagccaagtgcgggccaggcatggtgactcatgcctataatcccagcactttgggaggctgaggcgggcagatcacttgaggtcaggagtccagaccagcctggccacaatggtgaaatcccatctctactaaaaatacaaaaattagctgggcatggtggcacacacctgtaatcccagctactcaggaggctgaggcatgagaatcgctcgaacccgggaggcggaggttgcagtgagccaagatcatgccactgcaccccagcctgagcgacagagcaagactccgtttcaaaaaaagccaggtgtggtggcacatgcctgtggtctcagctattcgggaggccgaggcttgggcctgggagtttgagggtgcagtgagccatgattgcgccactgcaaaccagcatgggtgacagattgagaccctgtttcaaagaaccaaactaaaccaaaccaaaactaaactaaaagtcatcttgatgtttggagtcagttgtcctgaatttgaatctcagctctgctccctgtgagctctctgacctagagagtcacaccacctccccccaagcctagtttcctcccctataaaaaggggacaatagctatattttcagattgtgagaattaaacaagatcatgtaggcacttaagaaacagatgttttctcagaaacactagatcatgtgcataatcagtgaactagaggaatttgaatacatatttgttggactgaattgaggtgcctaaaagaatggttgagctggaaagcacctaagaaatctttgggccttaataactccccaactggagtccaggggaactgttcagggtatttccaaatgataaggacaatcgcacactctcaataaagtctcaagtttctttacttttgtctggaattgtatcagctcaaggtgataacacggctaccacaagctgttcagaaattctgattggcagttacatggctctttgatacgtttttttttttttttttttgagacggagtctcgctctgtcgcccaggctggactgcagtggcgcaatctcggctcactgcaagcttcgcctcccaggttcacgccattctcctgtctcagcctcccgagtagctgggactacatgcgcctgccaccaggcccggctaattttctgtatttttaatagagatggggtttcaccatgttagccaggatggtcttgaactcctgaccttgtgatctgcccgcctcagcctcccaaagtgctgggattacaggcatgagccactgtgcccagcctaagttttttttttaatgagaaaataattactggaaggtagattaaatggtggaaaacgttaatcatgtccaactcctcatttcataaacagggaagctgaggtttaaagaaggaagtggcttgctggtcacactgggtggcatagctggccctaaaacccaaattcttttcctggaacaacttacttcccgtctttccacttcagagagggggaacctaggatcaatgaagttgatgggttttcgtctgctggagtaggaataagtgagttatcgatttgctcttgctttttctgttcttaactcattcagcaaatatttactgactgtccactattcggatttggaagatagataaaacagtcatggcagcagagagggtcaggatttactcctatgtgcgacttcagaacctgtgcctttttccactggacacccacattttaaaacacccactactctgccttctaatatagttcatctgtgtctcagggcaggggctgtcttatatatacatgttctagccttcctgccaccgagtaggtgcgaaatcaatgttgtagtgttgaggaaacacttgaattttatttatttatttatttatttatttatttatttagagacggagttttgctcttgttgcccaggctggagtgcaatggcgtgatctcggctcactgcaacctctgcctcccgggttcaagcaattctcctggctcagcctcccgagtagctaggactacaggcgtgcgccaccacgccccgctaattttgtatttttagcagagacggggtttctccatgttggtcaggctggtctcgaaacaccgacctcaggtaatccgcccacctcagcctcccaaagtgctgggattacaggcgtgagccaccgcgcccgaccaacacttgaattttaatacttactttgctactaactgtgtcgttgaaacagtatgttgctttccttctctggcccttagcttaactatctgtacagcgggaacattggcaaactcctacgtggaggagcttgcaggtccacttcaagttatcagactctaactaggagaaaacattgagaatttaggctgaaaataacgacacagtttatcacctcgttaattcccaaacatcattaccgcgtcctaagccaccccacttgcctctcccctagccgccttcctttaaaaaaagaattcccctctagagggcgcgcaagctctgcggccttcgttcctctcttccgtttgccttcactcttccttctgcgcatgtgctcagttcgctatccggctgcttgtacctggttcaggaggttcaggcagaggttgcacccactacgcctgcgcaacctcagccccgcccctccgctgctttccccggaaacgtttctttcctacgcagccgctcctgccgccgtggtcgctggagctttgcctctctaggccggcagcgcctctcctccatggtcctgtctgtcagcgctgttttgggagcccgccggtgaggccgggccacgctcagacacttcgatcgtcgagtctgtcactggtgagtagaccccagaggagctcgtgtacgggcgggggccgcgcaggcggaatgggctggatttcccctcactctgagaatgggtctgtctgccccgccttccccctgactcttggaatgggctcaccccttggttccagtccctcctcccgggcggggcgacgttgccatggagacaggccgctggctgaggcccggctcgtgtccctgcagggcatggcgggtcagttccgcagctacgtgtgggacccgctgctgatcctgtcgcagatcgtcctcatgcagaccgtgtattacggctcgctgggcctgtggctggcgctggtggacgggctagtgcgaagcagcccctcgctggaccagatgttcgacgccgaggtagggtccccggactggggcgggtggggtctcggcctccccgagtaggctttgtggtccatcactactgtgctgtagacgtggctgggtcaccttctttctttgtagccctgggaaagggatttcacctttctgagcctcagctgcctcatccataaaatggaatgacagcagaggctgattagtacaaagaaaagggcctggatgttaatacaataaacacgtctgtgttccaggcaactctgatacatttcctttctgatactctgggaaagtgacttgatttctctgagctaggttctcaggtgccacatcggagagaggggtggataaaagagcattcgtgcgggtacagtggaaactgcctggactttggggtcagacaggcgtccgtttaagatccacttactagctgtgtgacctggggcaaatgtcacctctgtgaacttgttttcctgtcttcaaaaccatgagactagttgcagagaggtcgtggactgcaatataaagagcatgtgctttgggttcagaaaagcaagggttcagtctaggcctaaacatataaaactagctgtgggaccttgggcaagttgcttcccctttctgagccttttctgaaaagtgggccggatgctcctaccatgttgccctcaacaaaatgttacaaggcccagaggggtttaggaataagaaggtactttgtaaagtgtaaaggaggcctataagttgttacatctaagaggcagctgtggcgtggtgatgagcacagttcttttttttttttttttttttttttgagacggagtctccctctgtcgcccaggctggagtgcagtggcaggatctcggctcactgcaagctccgcctcccgggttcacgccattctcctgcctcagcctcccaagtagctgggactacaggcgcccgccactacgcccggctaattttttgtatttttagtagagacggggtttcaccgttttagccgggatggtctcgatctcctgacctcgtgatccgcctgcctcggcctcccaaagtgctgggattacaggcgtgagccaccgcgcccggccgagcacagttcttaaagccaggagacctgggatggagtccttgctcctgctgcttgttctctgtgttagcccttgggcaagttattatccaaaaagtgataagaattaaaagaagaagaatggctttgtgaggtttttttagggataatatgagattatgtatgtcaaagacctttctttgtcagctgaaagtgtggtgcagatgtttggcatttgatagtattgtgttggatagtggaggttgcacacccaccatatgcctagttgtagtctcgtaggagactctatgctcctgggaagagctgtgggaatgccaggctttgttgaagagccatatgatgcacacaacctgagttctagcctagggatcagcaaacctttcctttaagggtgaagtagtaaggattttaggtcacaattattcagctctgccattgtagcacagaaggctgctatagacaaatatataagtgaataggtgtggctgtgtttcaataaaaccttatgtacaggagcagatgccaggcctatggagccatagtcagctgaacgctgttctagactttactcttgttgtttattactttgggcaacttaacttgtctgagtttttacgtcctcctttgtaaaatgagaataatccctttccacctgctgtgagaaacaaatgaaatcccataatggatgtctatgaaagcacctattggaaataggctgccgtacagatgtagggaggtattatcttctgtgctctgggaagaatgcttgttccttaggaggcttgctgagatcctggggctctgccaagtcacttctccagtatatttccatttgtgattccccctcagatcctgggcttttccacccctccaggccggctctccatgatgtccttcatcctcaacgccctcacctggtgagtatcaccagttttgctatccagcttttgggctcttagtgctgggactaacttcctaagtttgaacatgagacaggctggcacttgtttctggggagtggtggagtaaagtgggtgacagaggccagttctgggaccagctgtataatgggcctccttccattgctgttttgacttacctggaaagctcttatgtcactatgtttgtgctgcctgcaagacaacttccatctcagataacttccctgatgtggagtgagctgagaaaggattcgaccgagaggcaggagaactgggttctgttcttggtttgtgtgccattggccaagttacttgccatgggcctcaggctcctcttttgtccatgagggtttggactcagtgatgtctaaggtcacacgtaatcattgcctgtctcttaagaggcagtttagcatagtggtcaaggtgtcaggctctggaggcagactcatttggcattgaacctcagctttactactagtctagtgactttggacaagttaatctaccacagttgcctcatcagtaaaatggggctagtaatattacctacctcatagttgtaaggattaaataagttaattcacaagaaggacttagaacagtgccttgcatgttattattattcttgtccttacaccggaggttgaaaactggtgggctgactttgacctaaatttgtcttccagataggttctatttggcttacatagatgtcagcccacacatggtgtttaaaacatttttttcacttagttgaaaatcaggctattttatataaaaatccagatttctggcttctcttgaataatggaatgactgactgattccaggccaaccttctagcatgataagatttgcctagatgcaagtagctactgcccccctttagctagaacatgtatgcttcagggtgtcatgatccccaccaattcctaggatcccctagtgacaattgccatcgatcatcaagctcatactcagtcagcttcactcttgacattacccgccaggttcttctaggcgtctggtatcataacccttgcttcacacttatctcgtcacttctgaccactatgctgccgtcctaattgtccctaccctcccaaataacctaaggccaggacaacccagtgacaactcactgctgtcctctccccacagtgccctgggcttgctgtacttcatccggcgaggaaagcagtgtctggatttcactgtcactgtccatttctttcacctcctgggctgctggttctacagctcccgtttcccctcggcgctgacctggtggctggtccaagccgtgtgcattgcactcatggctgtcatcggggagtacctgtgcatgcggacggagctcaaggagatacccctcaactcagcccctaaatccaatgtctagaatcaggccctttggacatcctgctgacacttgggccccttaacaccttgggctgctcagaccctccagatgaggtccagcccagatctgagaggaaccctggaaatgtgaagtctctgttggtttgggagagatagtgagggcctgtcaaagaaggcaggtagcagtcagcatgacagctgcaagaatgacctctgtctgttgaagccttggtatctgagaggtcaggaaggggacctctttgagggtaataacagaattggaaccatgccactcttgagccacaatacctgtcaccagcctgttgttttaagagagaaaaaaaatcaaggatatctgattggagcaaaccacttctttagtcatctgtcttacccccctgggacagctgttacctttgcagtgttgccgaatcacagcagttacctttgcagtgttgccgaatcacagcagttctgttggagaaacgcttggtttccggatccagagccacagaaagaaatgtaggtgtgaagtattaggctgctgtcagggagaggatggcagatggaggcatcaagcacaaggaaaatgcacaacctgtgccctgttatacacacgttcatgtgcacccaagaacctatgactttcttccagttccttctaccaggtccccatcctgctgccagctctcaacatagcaggccataggacccagagaagaatcccagcgttgctcaaagtctaaccatcataaagacactgcctgtcttctaggaatgaccaggcacccagctcccactggactccaattttttttcctgccttatttagaattctttggcgggaagggtatgatgggttcccagagacaagaagcccaaccttctggcctgggctgtgctgatagtgctgagggagataggaatttgctgctaagatttttctttggggtggagtttcctctgtgaggggcttgcagctatccttcctgtgtatacaaatacagtattttccatggttctgcctgcacttactttgtaatgccacggttgagattgagagagatcagcgcagccaggcaagggaactttaaagaattattaggccaccttctccctttcctggaccccagagtcattcctccatttggttaaaatactcagtgcagggaactcttacatcctgtctccttcacttgcagcgtcccctgctatgcctcaggtgaaccacataattcttgggtttccgttcctacttgctagtgatttctgaacatgttcaatggagcggcacacagtctagacccacttccgcattgaaaccttcactgttcctctttggtttcttcagagctttcccaagagagctgtcagttttcagctgtcagtaacacaaatgagtttatggtaacacaaatgagttttgctatctctctgagaagctcatctgacctcctgactctcagccctacagagtagggagttgatgctgacaggatgaagatttaggaataaatatgcctgggaagagactgggaaggttctagggtgaggcacctcagtaactcatggtaccttggccaagttggaaggaagcagtttgttaatgaggcacagtaatcctggctgcagggtctaggaggtaagaccagctgggatgaccttccctgggttaatcaatttccctctagacaacacaaactgcaggcatgtgactaactttgaaagaacacccatcatgtggctgctgtcacccttgaccagccgtggtggtggttactccatctgtggttggagcgcctctttgggattcacttcaaggtcttgtgcctatttttctgcatatcttctgtgatgacaaatctctgtcccctgagtgttaatttgatttttagaaatggccaaaagtcacgtgatccaaactttttttcagtaatatggagactgagctgcatggtagttggggatcaaaaatatgtgaccttaatgagatttttatgatttctaaagtaacaataaaagcagtttttagagttgagttccagagagggcagggcaatggcagtgacatgtttgtcattttaataataaataacatctattgagtgcttaagaggtgtccagcagtgtgggctgagtgctttatgtctcttttcaaaatcttcacaagaaccctctgaagtaagaagtaacgtcatctgtatcttacagatgagggagctgtaaggaacttacccaaggtgactttttaggagctggcagagccaggatttgggctctaatagtgatattaataagctcattttgaagaggtcagtagttagggatgtataagttctgactggctaaacagtctggttaaatagtttatcaccttataatcatatcttcttgtcctgtcaatttttttaaataccgaggatgaatagtactttataaacattactagctttctaagaaaagctgatatgcagtacattaaatatagccagagatttccttttttttttttttttttttttttgaggcagggtcttactctgtcacccaggctggagtgcactggtgtgatcttggctcatcatagcctcaacctcccaggctcaatgatcctcctgccgcagccccccaagtagctgggactataggcacatgccaccacgcccagctaatttttgtatttttatttttatttttatttttttagagacagggctttgccactttgcccaggctggtctcgaactcctgggctcaagagatccacctgcctcggcctcccaaagtgctgggattttacaggtgtgagccaccaagcccaactggccttttttttttttgaaacagagtttcactccgacttcattacccaggctggaatgcagtggcccaatctcagcttactgcaacctctgcttcctgggttcaagcaatgctcatacttcagcctcccaagtagctggaattacaggttggcaccatcatgcttggctaatttttgtatttttcatagagacggggtttcatcatgttggccaggctggtctcgaactcttggcctctcaagtgatccacccgcctcagcctcccaaagtgctgggattacaggcatgagccactgtgcccagcattggccagagattttcagatgatcttaggaatgtgggaaatctatttccaaaggataaaggaaggtacctagataagagagtactagcccactactgagttggcatatctcttaactctccaggtgtctgaagttgacctccctttttcccacccaccacctgaactctggccattcagagagaaaagtggagactcctacatagctgatggtcagaatagtttataacccttaaaggaggacaggaaaggaaaaagggatgtctggctcagagggtacttctaacccctcgctctaggcagccctgtccatatcagtgccaaatgagagccacgatggcagccagcagacatcagggggtacaatgggaagctccaggactcccagcatcctggagggtacacagctcaaacagtctcccctggacaggaatccccttggactccttcctcagcaactcccaggtcagagtagcttccttctgccagccccagaaggcagtcagtgcacaggtatgcaacacctccttgtaccggcagcccagggaccacggagtctcagaggtagggccctggggacctagggcagaggagtagggatggaatcaaggtacaagagaactcctctgtggagagattaaaaaccactgtcttaaggttttctgttgtaaagtaataaagggtggtagaaatagcattgaggcaggagggagtagagggagctgagggttttaatccctgccctgccgctacctgggcaagtcacagtcataggtccaattctggaaggctttagagagctgcagtggagtgcaaagtcctggagtcccattactagctgtgagatcttgggtaagctatgttacctcccttacctagatttcctcatatgtaaaatgagggtaataatggtacttatttccctgggttttgttttgtcttgttttgttttgttttctggtaggtcaacacttacttctttaaaatggaaaaagtgttccctccctggttttattgtgaagatgcaataagatgtcacgtgtaaagcgcctagcccagcccctggcacgtaggaagtgatccataattctagacaattattaggctaccgtcccccctatccattttacagaacagggacatttttcttctgagcctgtgttttcaaatgttgggggataggcttgccagtcctctaggtaccactaccaagtattgagctcctatctggcatgtactgcaaagtgatttatgtgtattcttactcagtccaataaggtaagcactactatttcccccattttgcagacaaagaaacagaggattgggagtaaacaactttttccccattacaaagttggtaagaagctaggcctgtctgcctcatctgcttttcacgttccagttatgtttatgtgtgatccagacaattgtgagacggacagtcttagggatctaaatgccatattagcaaaaggttgtgaatgtaaacgtacgtttggcttgttaacaagcagctagttccataaaggtgagtagttaggtagctgctgataagtgagaaatggagccgggactgactggccacagggctttattatgatggccgtggtgtggcgtgggaaaaggccaaacatttgttcaatgccccacaaactggcttctcctacatcaagcttgatttgcttaaacccccctgaaacagacattagtatcactattttataaacatgaaataggctcagagaggtcatgtgacttctaaaaagtcactcaatataaaatcagattcaaacacttcaattttttcccagttaactgttaagcagccatttctagggtggcctcctccccaaatctgtgttactgggcccagaggaggagctttaggttgaaatggttaaacaaagagagggtggtagtggggagaccctggttgtggaattgtgggaggcaggtggccagaggcctaagtgccggggcaggtgggatgaggtggaaggatgtactgctgggattccctcactcccagacctgccccttgctgccctggccatgctgggtccccgccttcgtatacagccctcccatatattcagtggcgttcccagtgggcaactggggcccaactccggctctctggagcaaagtggaagttgccagtctcactcaggcccaacccaatccagcctccacttggggctccctgggcaggcccccacgaaggctagtgcaagggagctccccagaaagggtcagattttttagctgggagggcgctgtcttgactgcccgctgacagcgcactcaggacagaagttcacgcaaaggttgatggaatggaagagtgagtagagattattttcgaaagttgatgggattgaaaatacccagcaagggaactgcaagggagactgttcaggaaatgggctggagtgcaagctgggtgggaagaccgctgaaagtggttactggggtggaatttgcacgggaattagcggggtggtgggggcggaggtaggcaccgaccgtaggggagctccaggaagattgcgctgggagcaggagctcgggagcacgcagcagccactatgaggtgctaagcagtccccgcgctgtggctccgcccaggctggtccgcgcggcagctgatgcccagtcttggtgcccagtaatggtggggaggagtgtgtgagtgggcggggtgggagggggggagagtccatccaatcgttctccctctgtcccaaactggagatctatctgcatcgctgccctgacccccaatcccggagagctctgtgcccctcgatggctccactgctctcccgagggcgcccactccatgcagcctgcctctggggaatatggaggtcttcgtccggagaaaactcgggctcccttggctttcctctccccaacggcatggttaggaccctgtgactcctaccgacagagggtgaccccggccagatggggtcgaccagggcttggggttgaggtcttcagattgagggtggacctgccatgtcaccctggagcagtagagatgcagtaccagctccccctcctgatccggtgccttctgtgatctgtgaccaaggcaggacacatttggaggcccagctgacatccactttttgacaccagccacagtgcaatcagtttttgacaatcaatttttgacaatcaggtcgcaatgcacgcgcatgacctacagggtgctggggctattccgcctgcctcgtgacttctgagcaggctctcatttcgccttttccctttcttgggaaaatggaatggggagcaaccaggagcccttgctcctgccactttctagctgagtgagcctgggcaagttacttgctgcctccgcgccgcggtttcctcttgcgagctcgcggggcgattgtgaggcactttgcacccaggaagcacacgagcgccctgacttcacagagcgcgccactcaggagactagctcgcggaggtgggggaggggtgctgctcgctggcttctttggttctagactgaccttaggggcctcggggtgggggtgggggaagcctgaagtcgcgacacaggctccctctaccgaaggcctctttccttcatccttcccagccccagacaaacaggcagagtaagcagtattcgtcttaggtgccatatggaagatcttatttgtagactcgtgaatttcgccacccattcctccccttcagctgatggcgcgatctccaccctctgctcgcacctctggctctcgtccaggtcacatcaacctgccagcagaaacctcggtgttaggcgctaagactgtccccagggggcgctggtcgtttggggagcgggcgcagggacaagggtgctgtggtgtctggtaggttggaaatgcctttgctaaaaaggaaaagcctccctttaagctagacccggtgggcactcacccccttcctttcgtgggactttcattctcccacgaaagggctgcggtattttcttctttttttgctaaggaactttctgctcagagtaaatctttttttcctttctttttttttaagacagggtcttgctctcttgcccaggctggagtgcagtggcgaagtcacagctcactgcagcctcgactcctgggcttaagcgatcctccgacctcagcctcctgagtagctgatactacaagcgcaaggcaccacatctggctaatttttaaattttttgtagagacagtgtctcattatgttgcccaggatggtcttgaactcctggcctcaagcagtcttcctgcctcgacctcccaaggtgctgggattacaggcgtgagccaccatgcctagcctgttcagagtaaatcttatttgaggcatgaatcaatcaaacataaatagagagttgaattgatcttagagggaatgggatgcagcaaagccctacttgaccatctcccccctcccacatttggaaatccttaaacccacttatgtaggcctctgactgtgagattcagagccacagcagtttccacctctgctaaggccttcaggcagtgagatggctcacttcagtgcccctccttccacacatctcctagctgtatcctgagacgcctcaacctagtcactacccttctgtatgatgttggtctaaggcttccccctctctggacatgaaggcggagcctcccagcactaccagccacacaccactcaagactccagatcctgaaccctgactctggggcccagctctgggcctggcttggggcttgcatctcacctagcctggcagtgttgttgtcacacccaccttgtatggatgccacataggcatttcaagtgatgcggagcagaagcgggtgcagcggcgcttgacccaacgcagggtggaggatctgcacatcaccctgggcgccgggaggtggattcgtgtgggcagcccctcaaaccagatccactggtcggctacatccagctgcttcatgtgccccatgggagttctattgcggtagggcttaatgaagatgactcgggggccctcggtgagtggttgcctcccctggactccagggttcaagctatcatccctcgatgtccttggaacctcaggctctatatgcttttctttccgtggcattgccgccaatgacgttttctccttgttcctcatccctgactgcacctgggacttccactccttgtactcttttttcttagggtcccctgtggactctaatttcttggacttgagttccttctcggagcacccgatctcctggaactcttcattattttgttttgttttattgcaggcactgttttccctggcagggagaggaaaggcagtcagcacagcaggaccgaggccctggttcccgagacagttgctatgtagccagctcaggggagcctgttaagaaaggctagaggggcctgcaaagaaacttctctactgcccagaggccttgtgctggtgtgaggaggtgtgatgagcactagcagagggatgtgagagattgggaaggtgaaagccatgactagtagttaaggcccctaagaatgaatattgtctacatcatctgccactagattagggttctgtctctctggacttcagctgggagggtgaacagtccagtagtttttctaaattgtgctccaagaaccttagggttctgaggaggtgtctcaatgtcacctcccctgacccactggggcaggatacctctccccagctcataacaacacaattggggcttggaaatagatatttgaacagaggtttcactgctttaataaagttggaaaactgttcaagaccagcctgggcaacatggtgagactctgtctccatacaaaaaaaaaatttttaagttggaaaatgatggggctagatgatcctgatccttctagctctatgtttcctgattgcctgcgactagaggccaaatcagaaagaggagcccagaaaggtggccttgacagaaatattaaatgctgagactttcccaaagggtgtctgtaacagactgggccccctgcaaacccccagtggcaacaccatcctagccaagggcgtggagagagatgaggccttgggctgcagataatggcaatactgtgatgataataatggctcccgctgattgagtcctcgctctatgccagactcgggacccttacaacttgggatccttactatttctgtgaagtagaaggcagtgaaacagagtggcttacagagcacaggtgttggattcagacaaacgggctcagattctgcttctgcctcttaccacctgtgtgatttgggcaagatatttaacctctcagagccttagcttccttatctgtaaaactaggataattctgtctacctaacaggattgttgtgaagaataaactaaatgggaaaattcttaagtgcttaacactgtaggatggtacttagcaggcaccaatcaatgttagctttcttaatactgtcatgtgacttatgaggaaacggtttgaacttgtctcggaggcatggtaaaaaaaaataaaaataaaaataaattaataaagaaaccaagcctcagcaagattaatcttcagatttcaggggtcagtctgcaggtgactctctgggttatattgacttgcaggggaggaggaggaggagtaacctgtctgtctcagtgccccagggtgaagtgagcaccacaactggatgattacaaccattgttatggccacagctctaatatcagacaggaatggcttcacatcctagctctgccacttatcagttgagttaactgaatgagacaagtcacttcacctcttcagcctcagctctccagcagtaaaatagagttaataaatacctctctcacagaggctttgtgaaaattagacttgttctctaaatgccttagcacaatgcctgttcccagaaagacggcatttgggtccattatgggggccaggccccagcttacccagaggagatgcggagaatctttggaacactgagcagtgaatgccaacaccttttggccagcttatgcagttcttggatccggcggtttgagctcttgagtagcttcaagagcgacaagttttttaacacctgccagggtcaagaaaccaggtaaatagaagcttcagctttcctggacagcctccctctcccctgcctgcctctggctccgctcagccaagggccggcctgctggctcccctgggccactcagcctggcaaccaggggcagtactgcatgagtatatgagcttccccaagctggggccaaaacagggcgtctcaccgttctcagacggttccgctcaattactttgctcacaggctgctctgtctcgtcccgcagtttctcatcttgcatctgagggacagaggataagagagacataaacccagaggaatcagccaggtgtggtgcctcatgtctgtaatcccagcactttgggaggccgaggtgggtggctcatttgaggtcaggagtttgagatgcctggccaacatggtgaaaccctgactctaccaaaaaaaaaaatacaaaaattagcgaggtgtggtggcatgcgcctgtagtcccagctactcaagagggtgaggcaggagaatcacttgaacccaggaggtgaaggctgcagtcagctgagatctcgccactgcactccagcctgggcgacagagtgaggcactggaggaatcctcctgaactcctccatgtgcctcttcatttggctgagcatggtttgaccaatcctaggctgggagttttgtcatcttggtctggggacagaactgggagaccattttaactctcctgacctcccttcacccttcaccttttccttttctcccatgctggaaagcccctttccttggcatggtggattctttgttaaggtcccctctagggactcacccccagggtctagtcccaagtctgaccttggaaaccctgctgttcttgggcctcttctttgctgatggactcatgctggggctgtgagacctcagagatgaatggagcaacaccagtgccaggcaccaaccctgttcctctcagttcagccagcactcaggctgggcatcagatggtggtgctggctctgtaccacctgcagctgtgacatcactgaaatgtgacagtagcagggctgggtctccaaggagtgtatgtggcagaggtgaggggtagagggtgagaaagaaatatagacaataggcgacagacagctgtgtgcattgtcacaacctccctgtggggtaagaggattatcccctctttttaaatgaggaagccagggttcaaagaggttgaataatctactcaaggccacactagatctagcccagctagatcatagtgggctggaaacctaaccaaggtctgatagtcaacccatgaaaccagggattcccaaaccatgctcatccattcagtcatgtcgcctgttttgactgggcgcctgctacatgccaggtgctttttcttttctttctctttttttgttttttgttttttgagacagagtctcactctgtcgccaggctggagtgcagtggtgagatcttggctccctgcaacctccgcctcctgggttcaagcgattttcctgcctcagcctcccaagtagctgagactacaggcacccgccaccacgtccggctaatttttgtatttttagtagagatggggtttcaccatgttagcaaggatggtctcgatctcttgactttgtgatccgcccacctccacctcccacagtgctgggattacaggcatgagtcagcgcgcctggccttgccaggtgctttttctaagtgctagaataacagaaaattcttgccctcaagcttacattctagtggaggggaaacagtgtgtgtacttgtaaatgtttaataattggctctctgaagcaaaatgtatatgtgtttgtattataaattttactgatagaaatcaacaaataatagaatcctataatactctttattgtaacttctattagtgagttgcttcttatagtatgcttttcttggattttgcctaacccctccatttatagccaacctatggttgtaatggataaacaagtataataccaacattaatgtttgtattttcatttacactaaacagtaagaagaaggtgaaaaagtgaaacaacagagatattgaaatttaactcatttatcaatgatttcattgacctatttgctgaattagaccatagtttttgaatactggagatatatttctcagattctttttgttatttacaatcgaatagctatgggcaggacacttgcttatgttttctctttttttgttgtttttggggggtcttttttcagatctacatatgattcatatatgatatatttctactctacagatatacagatataaagaatcctaagaacatagataatagtaaaaggtagtaaaaaatagaaagtgacaagtttaagcatttttcaccctatgtttttaatatcacttatttaattggaagttgctatcaattacattttaatgatggccgtgcctaacaaccagcctgcagaattcctagaagtgtaacagtagacttgtgagcccttatgagttagccccagcacgccaatgctacatcagatggaaataagtgcctggagaacagcaaccagggtaaagggaacagggagggcagaggtagagggtttggtatattaaaaaggtggtctaggaaagattcaccaataagatgagatttgagcagacacctgagagagagagggaagaggagaatgaatggtggtgggagaagatgaggcagagagggagtcgtggtgggttaggcagatcacaacaggctgtaaagggcgctggctgccctgaatccctggtgcccagctggctgcatcagaatagtatgaagagcttgtgaaaaacatttttgtgggcaccaccccattcagcaggccagtcagataaccaatcaaatgtgggacccactccacaccattccacttctagtggggagagatgtacatgcacggggggtgggtgcttagctctgaacggaggggtgaggggccaaccctacctaggctgtgggacagcttctcacatataaatatcctttcttattcaagtgaaggttaggtagtgggttaaactgctgctgtggcctaggaaagaaagcaatgtggtaatttggcaaggaagacacagagggtgcaccctctctctctcctgtctacccccatactccttggctgctctgcctgctcagacatacccctccttgcacacaatttcagctctgatcaactggacttcactgaacaatgctgctctgaggccctggtgcctggtgggctgtatcagaatcacctatactcactactcaactcctgagcttccagggctggggaatcactgtgtgctaggcactaagggacagcaacattataggcagagcatgcctctgagttcacaggccaaggggataggtaccccagaaggtagactcctcaagggcagggatttgtgtccgttttattcattgataagccaccagatcctagaacagtgcctggtggacaatgggtgcccaaaaagtattttttgaaaaatgaaataaatagcatgatacgggtaatactgagggttgtaggagcacagaggtggagcctcccaacccagcctgaggatgtcaggggatcttcctagagatggtgaggaggaatgaaggatgagtagatgttggccaagcatagcggtatggggcaggtcgagggaggtgggcagagcattctcaaaagagggaacttaaagaatatgagtgtggaatggaattatgttgtacattggatgttgctagattagaaagcagtagccaagagtggcaggggtgaaaactggagaagtgggtaaagagacctacccaatgacacacagctggtaagccttgtggactaaatccaagactcttgaatgaaaacctccactctttttttaaaaaaaaaatatggcataataagatatggataacacaaaatttaccttctaaccatttttgtttttgtttttgagatatagtttcactctgtcgcccaggctggagtgcagtggcgcaatcttggctcaccacaaccttcacctcctgcattcaagtgattctcgtgcctcagcctcaccagtagctgggactacaggcacacatcaccacgcccagctaatttttgtattattagtagagacagggtttcaccacgttggccaggctggtttcaaactcctgacctcaagtgatctgcccacctcggcctcccaaagtgctgggattatgggcatgagccatcgcactcagccctaaccatttaaaaaagtagttgggtgacattaagtaccttctctttgtacaaccatcatggatatccatctttaaactttttttatcctatggaattggatctctgtattccattaaataataactgcccatttttacctcccccagcccgtggcagccattgttctacttcctgtccctataaatttgactactctaggaacctcatataagtggactaatacaatatttgtcttttttttgtgactgccttatttcacttaacatgtcttccatgttgtagcatgtgtcagaatttccttctcttgtccgggcacggtggctcatgcctgtaatcctagcactttgggagaccgaggcaggtggatcacctgaggtcaggagttcgagaccagcctggccaacacggtgaagccccatctctactaaaagtaccaaaaatagccaggcatggtgacgggcacctataatcccagctacttgggaggctgaggcaggagaatcacttgaacttggagggtggaggttgcagtgagccaagattgtgctacttcaccccagcctgggcaaaagaacagcactctgtctcagaaaaaaaaaaaaagaatttctttttaaggctgaataatattccattgtatgtataggccacattttatttctctgttcattcatcgatggacatttgagtttcttctgcctgttagctattgtgaataatgctgctgtgaacaaagatatacaaacatctcttcaaggccttgctttcagcttttgtgtatatacctagaagtggaattgtggaactgccgaatcatatggtaattccctttttaatgttttgaggaaccaccatattgtttttcgcagtggctataccattttacatccccaccaaccatgtacaaggattccagtttccctatatccttgccaacacttggtattttctgtttctttgatagtagccatcttaatgggtgggagttccactcttttgttttatttcctctcatactttgttctttaatttctttagttaggtttactgggatatattttatatacagtaaaatttaccttttttagtatacagttctttaagttttgacaaatgcatactagtgtagaataccacagtcaatatatggaatggcttcataacccccctaagttccctcaagccacctctttgtagttaactcctcttcccactcccagccctggcaacaaactgatgtgtgttttcagtctttatagctttgccttttccaaaacaccatataggtggaatcatacggtatgcagccctttgaatctgtatttctttcacttaagatttgcacatgttgggtatgtcaataatttgggtttttttcattgttaggtagtatttcattctataaatatgccacagtttgtatgtgtaatcattaaaggacatctgggctagtttctggttttcagtgattatgaataaagttactaaatacatttgtgtacaggtttttgtgggaatacaagtttttatttcacttggatacatacttaggagtgggattactggatcatatggtaattatatgtttaactttaaaagatactgccagaattttccaaagtggctgtaccattttatatttccaccagcaatatattcaaggtctagctgactcacattcttggcagtatttggtactgttagatttttatttgtttgttttgtttttagccactctagtaggtatgtcatcatatcttatagtagtgttagtttgcatttccctaatgacgaataatgttgaacatattttcatgtatttatttgccatctgtcttttttgatgaagtttttgttcaagtcttttgcccatttttaggttgtttcttttaaatataattgtgttgagtgttcttcactaattcaggatctctttatcagatatatgacttgccagtattttccactagcctgtggtttatcttttcgttttcttaactatctatttaagaacagattcttaattttgatgaagtccaatcactttaatcacttttttttttttttttttgagatggagtcttgctctgtcacccaggctggagtgcagtggcgctctcttggctcactgccagctccatctcctgggttcatgccattctcctgcctcagcctcctgagtagctgggattacaggcgcccaccaccacacccagctaattttttgtatttttagtagagacggggtttcaccatgttagccaggatggtctcgatttcctgacctcgtgatccacctgccttggcctcccaaagtgctgggattacaggcatgagccaccacacctggccactatcactttttttaaatgggctatgcttttggtgtcatatctaagaaatatttgcctaacctgaagtcacagaggcttatgcctatattttcttttaaacattttatagttttagttttttaaatttagatatttgatctattttttagttaacttgtatatagtctaaggtgtggattaaggttcttcttttgcttatagatatccaattattccaacaggattttgttttgttttgttcagagacagagtctctctctgttgcccagggtagagtgcagtgttgcactcttagctcactgcatcctccgcctcctgggttcaagtaattctcctgcctcagcctcccaagtagctgggattacagatgtgtgccaacacagctggctaatttttatatttttagtagagacagagcttcaccatgttacccggctggtctcgaactcctgacctcaagtgatctgcctgcctcagcctcccatcgtgtgagccaccatgcccagccccaacatgatttttttgaaaagactacctctctcctttgaattttaaaatcaacttactgatttctacataaaatcctactaggattttgattcacctttggattcattgttctgagtcattccttcctttttctgtgcatttgcagttgagtttttttctcaatctgcttcctgcctgtagaattttgggatgcaaaggcctctttttactttttaagattttttaaaaatttgaaatgattatagagtcaaagatgttgcaaaaatagaaaggtcctgtgtacctttctcccagtttcctccagaggtaacactggacaaagctagtacaatatcaaaagcataaaatgggcagtagtacaatatacaaaccgtgttcagattgtaccagttttacatgcactcatttgtgtgtttcatcaccataaggatctctcttgtgccatctatacctccctcctccattcagtacctaatccctggaaaccactaatttgttttttgtttttttgtttttgtttttgtttttgagatggagtctctctctgttgcccaggctggagtgcagtggcacaatctcggttcactgcaacctccgcctcccaggttcaagtgattctcctgcctcagccccctgagtagtggggactacaggcgtgtgccaccatgcctggctaatcttttgtatttttagtggaggtggggtttcaccatgttagccaggatggtcttgatctcccaacctcaggtgatccacccgcctcagcctcccaaagtgctgggattacaggtgtgagccaccgtgcccagcctgaaaccactaatttattatctactctataattgttgtcatttcaagaatagtatatgaataaaagcaagtgaaggtattaaaaatgttgtatgagtggaatcatacagtgtgtgaccttttgaagttggcttttttcactcagcataatgctcttgagatccaagttattgcatgtatcaatagtactttaaaaatcacagaaagtttcaaaaaatatacatagaggttttgtgtaccctttgctcattttcctccaatgggtgggaaaatcttacatacctttggtataatatcagaaccatgtataaattcaggtaaccaccatcacaatcaagtatagaactgttctgttatcccaaggcttcctcatgctattcatagctacagtcacccctccttcctctcaccccaatccctaaaagtcccacttcatctctataattttgtcattttgaaaatattatatacatggaatgatatagtatgtaacctttcaagattggcttttgtactggcttttccatataatgccctttatatccacttaagttgtatcagtagtttttccctttttttgctgagtgctattacatataacacagtttggccattcacccattgaagaatgtttgtttccaatttagggctattatgcaggtttttgtctccacacataattttcatttctctggaataaccttcaaggagtatgaatgctgccaaacaattttccagaacatcagcaatgttcatacattgatagaccttctctgcattttgacttgcttttagaatggtcactattttattttagctgttttaataggtgtgtaatgatatcttaccatagttttaatttacatttccctaatggctattgaagtttaatacattttaggccgggtgcagtggttcatgcctataatcccagcactttgggaggctgaggcgggtggatcacttgaagtcaggagttcgagaccagcctggccaacatggtgaaaccccctctctactaaaaatacaaaaattagccgggtgtggtggcatgcacctgtaatcccagctacttgggaggctgagggaggagaattgcttgaacccaggaggtggaggttgcagggagccaagatcatgcctctgcactctagcctgggcaacagagcaagactctgtctcaaaaacaaacaaacaaatgaacaaacattttaatatgcttatctgccatctctgtatcctctttggtgaaatatctgttcacttcctttgcccattttctaattagactgtttggatgtttgttctagaaaaagagtcttgctctgtcacccaggttagagtgcagtggcatgatcatagctcactgcagccttgaaatcctggacccaagtgatcctaccaagtagctaggactaccggcgcttgccaccatgcccagctaattttttttctttcaagacagggtcttgctgtgttgcccaggctgcttttgaattctcctggcctcaagccatcttcccacctcggcttccaaagcactgggcacaggtgtgagccactgtgcccaacctgtttgtctgtatttttacttttgagttttgaaagttctttatatattctagatatgagtcctgtgtaagatgtgtgatttgcaagtattttctttctaaatttgtatgtcttttatttccttttcttcccttattgtactagctaagacttccagcactacattgaatgaaagtggtgggaacagacattcttgccttatttttgatcttgagtggatatatgacacatatagtatatgtcactaacaatggaataccaaaatatatgaggcaaaaactggtagaactccaaggagaaatagacaaatcccattatagttgaagacttcaacgaccctctttcaataattgataaatcaagtaggcagaaaatcagtaagtacatattttatctgaataccaccatcaatcaacttgatctactggcatttatagagcactccatccaacaataatagaatatacattctaatacaataataatagaatacacattcatatctagctcacatggagtattcaagagatagtacattctgggccacgaaacacactggaacaaatgtaaaatgatagactcataaaaagtatgttctcaaaccacaatggaattaaactagaaacccataacagagagagctggaaagtccccaaggtatttctagaataaacaacacactagactagtaggtagcacatggatcaaaaaaaagtctcaagagaaacttaaaaatatttttaactaaattaaaatgaaaaatatagtttaccaaatttgtgggatgcagcaaaagccatgcttagaggaaaatttatagcattaaatgcatatattagagaagaagaaagatctaaagtcaatctaagcttcagaaagaagaaactagagaaataagagcaatttaagcttaaagtaagtagaaggaaataataaaaatcaaagcagaaatcaatgaaattgaaaaccagaagatgatagagaaaatcagtgaaaccaaaagctgtctctttgaattatcaataaaattaacagatctctagccaggttaaccaattttttttagaaaaagaaagatacaaattaccaatattagaaatttgtttgtttgtttgtttgtttttgagatggagtctcattctgttgcccaggctggagtgcagtggcgtgatcttggatcactgcaacctccgcctcctgagttcaagtgattctcctgcctcagcctcccgagtagctaggattacaggcacatgctaccacacccgtctaattttgtacttttagtagaggcggggtttcaccattttggccacgctggtctcgaacacctgacctcaggtgatccacccaccttggcctcctaaagtattgagattacaggtgtgagccactgcgtccagcccacatgtattatttagaaatgtggtgggatttttggattaatagaagtgtatttaagcaggaatacataaaatcgtcattgctagacttaatatgagatgttaaatgtttgatccaatttttcttcctggataagcttttctttcctatccctaccggatccgattccacatagagctactggatgagtatttgataatgggtctgaaattgggatagacatgtgctgatcttacacaagtccaacaaattaagccaagatgtttgatgagccctcgatgaatcatcattggttagggtcattgtgctgattaagtacccctgtttaaacccagatttatggccaaatgctcaggttgcagtttgtggaggtatgtcatattcagctggattgagggtcatgggcagaggggccaggtgtgatggagtatagtttgggagagtcatcttggtgacccagtgcacaactgcgcctcttgactcatgtattattcagaaatgaggtgtttaatttccatatgtttggagatttacctattatctttttgttattgatttctagtttgatttcattgtgatctcagaacacatgctgtgcgattttgattttcaaaaattccttgaggccgggagcagtggttcatgcctgtaatcccaagtctcttggatgccacggtaggaggatcacttgaggataggagttgaaggctgcagtaagccatgatcggcaccactgcactccggcctgggcaatagagcaagatgctgtctctttaaaaaaattttttttagttgacttttattctgtgacttaagatatagtcttggtgagtgttccataagcatttcaaaagaatgtgaatcttgttattgttatgtgaagtattgtctaaatattaattagattcttttgattgatggctttttaaagttcttatacatccttgctgctttcctgtctagtgtttctttttttttttttttgagacagagtcttgctctgtcgtccagggtggagtgcagtggcacaatctcggctcactgcagcctccgcctcccgggttcaagcaattctcctgccttagcctcccgagtagctgggattacaggcgcccgccaccacacccggctaatttttatatttagtagagacagggtttcaccatgttggccaggctggtcttgaactcctgaccttaggtgatccacccgccttggcctcccaaaatgttgggattacaggtgtgagccaccatgcccacccttctgtctagtatttctatcaagtgttgagagagatgtgttgaagtctccaactttaatagtagatgtctattttttttttcagttctaccaatttttgtttcatagatttttaagatctgttgtttggtatgtacacatgtatgattgctatgtcttctttgtgatttgacccatttaatatctttttttggccctggtgattttctttgctcagcagtctatttcatctgatattgaaattgctaactctgctttcttttaattaatctttgtatggtgtatcttttttcatccttttatgttcagtctacctatgtcatatttgaagtgagtttcttgtagagagcttattttgggtcatttttttcactccgttttgccagtctcagagttataaagtatatttatagactaccggcagttaatgcaattatttgttagggtttaagcctgccatttgattgttttcttttcattccctctgcttttcattcttctcttttatttctctactcttcctatgggttaaacagtttttagaattccattttttttatctatggtgaagtgttttttttaagtgtatctctttgtgtaggttttttagtggctgctttctatattacatcatacataacataatctatgaccatctactggtatcgacacttttgccactttgagtgagggatagaagcctgacctctatttaggtccctttacccttctcctttcataatgtaattgtcttaaatatcttcattacataaattgaatccacatcagaccatgttatataatttctgttttagccatcaaacataatttagaaaatgcaagtgaagaaggatagcccatcatatttacccatatttttattatttccattgttctttcttcactcctgatgtttcgggttttcttctttcatcatttcctttatgtttggagaacttcctttagccattctttcacggtacagcaggtcctcaaataatgttattttgtttaacgtcatttctttataatgttgatgagaaaaaaaaacaacaactgattcccagccatggccactgtctgtgtagagtttgcacattctcgtcatgtctgtgtgggttttctctgggcactccaatttcctcccacatcccagagatgtgcacattaggttaattggtgtatctaaattatctaaattatccaagtatgagtgaggggtgtgtgtgtgtgtgcgtgcacgcattctgtgatggaatggcatcctttccagggtgccttgcaccctgagctgccagaataagattcagccacccaggaccctgaaatggaataagcaggttggaaatgaagaataagtgaatacaaattattgtaaaataaaaatttgtaaagtatataataatcatacaaatgcataacagtaaataatttggtataagagcactcagccagcctgccatatttattattgtttttgaactgcatggtggtaggagatactccttacaatttttgctctgcaaagatttattccttggtttaactcaccaccatgatgactgctgtcactcactgcttatactaatccagcatgacctcactttaattacatcaccaataggtgagtaaataatgaacttccctgttttattaatctttcttaaatgtatgtatagctcacatttattttaatgtttaatactagatgtgtctgggcatttatttagaagcgtggtattgtttttgtgaccagaagtatgctgtatggacttaccttgttaatatcaattagtctacgataaacttgctttcattatacatcattttggttaaagttgcagtttccaagaaactattgatgacattaaggacttactatagttcttcagttaacaaattatgttagtttttccttcatttgagaatgtcttgactttcatacctgaaggattttttcactttgcttagcattctgggttgacggttttttctttcagtacttaaacatattgtgccacttctttctggctttcacagtttctgatgagaaatctgctgcaatttaaattgttgctgtattattggtaaggttaatttctctgcaactgctttcaagactttagttttcagaaatttgtttatggtgtgtcttgtatggatttctttggtttatcatgcttggggtttagtcagcttcttgaatccgtgtgtgtatgtctttcatcaaatttgggacactttcagctttatttctttgaacacatttttagctccaccttttttttttctcttcacctaggactcccatgacacaaatgttaaatcttttgttataatcttccatgttcctgaagctttgttctctctctctctctctcatctctagatcacctgatccagcaggtgatctgcccacgttggcctcccaaagtgctgggattataggcatgagccatcctgcctggctgaaatcctctttttatttgtactctttttatccctgcaaatctaaggtgatgtttttggatatataatcctttttaaaacttgtgggtcactttgaatcttattcaatattactctgttagacaaaagacatgcccacagatttctttgcaataagcccttctctactctaggcttcggctgagatggctaagagacaacaatcagccgtaagatttccagaatcactattgttttgatttggaggatctgtgagacatatccataatttgtttagactctttaaatatgactgaatagtattctgaggcactgccttaagtctttctgagatgttaacaaaatattttacattaatattcttttttttttttttttttttttttttttttgagacagggtcttgctctgtcgcccaggctggagtgcagtggtgcgatctcggctcactgcaacctccgcctcccagtttcaagtgattatcctgcctccgcagtagctggaattataggcatgtgccaccacgcccagctaattttttgtatttttagtagagatgggcttttaccatgttggccaggctgtacattaatattctcagtttcatatttggaccaggctttcctggcagtgccctgtatttgagttttgctaggaagccatttttaaattttactatcatctgctatttggagaggataagcattttctaaatcatgaagtcttagctctttcatgtttaacattctttccttttaaaaagttcagcgtttttcaactcgagccctattgatatttcagctaggataattatttgatgtgtgtgtgtttggtggggggattggggtggtttgaggggggctgccttatacattgtaggatgtttaacagcatccttggcctctgccaactagatggcagtagcaacctccccagctttgacatctaaaaatgcctccagacattgccaaatatcccttgggaggcagtgtcactctcactggagagctcttgctttagtttatccctttgctcctccctttcactataggcagcaagaagaaagcaggtggcgcctttaacattttgcttggaaattgctttacttagatcatcaaattcattaggcacattttctgttttccactttattgaaggcaacagggttgctaatttttgtgtcacagtatagtttccaataatatttacttcacttgtctgggtatggtggctcatgcctgtaatcccagcactttgggaggccgaggcaggtggatcacctgaggtcaggagttctggaccagtctaaacaacatggtgaaaccccacctctactaaaaaaaagccgggtgtgatggcatgcacctgtaatcccagctacttgggaggctgaggcaggagaatcacctgaacctgggaggcagaagttgcagtgagctgagatcaacaagagcaacactctgtcaaaaacaaaacaaaaaaacaacaaaaaaaaccccaaaaaacaaaaaaacagaaaaacagtatttacttcactttcctgcataccctcactgcaccttatctaagggccgaggcttctttaacagcttcttcaaggtgctttaggtttttactatactcttctcaaagtccaattctaatgccactcctgcatattagagtactgttacagcagtactttacccagtaccaaaatctttcttttcccctttaaaaatttttttctttatatgttccaatgaacagaattttaatatgttacctattgctgcataataaactatcccagaatttagcatcttaaaacaagaagtatttactatctcaaagtgcttgagtatcaggaatccaggagtggtttaactgagtggttctgcctaagtttcccatgaggtttcagtcaaactgctggccagggctgtaattatcccaagattttactagggcaattttatcaatttccatactcaatcatgtggttgctggcaggcctcagccttcatgggctcttggccggaagcttcctttccttgccatgcgggcctctctatagtggctgttgacaaaatggcagcttgcttctcccagagtgagtgaccccaaaaatagagtacacactaaagacagaagctgtagtctttttttttttaatttgaattttagaagtgacataccatcatttctggcatatcctgcgggtcacataggtaaactaatggtggcaggaggcagacaggttcctaggtgggaaggggtgggtccttggtgaaaccccaccttcaagccagggatgacctgaagcctgacagccaggcctccagttctgtgtggagtccactacctaaagtgagaacttccttgatgccttttggccaatcagatggtgctttttcctgacccggccagattcatggactcgttgggactacctgcctgcagataggagctacccactttgggtctcctctcctctgagagctgtttggtcagccgataaagctgttctctgccttgctcaccttccagttgtctgtgtaacctcattcttcacggatgctggtcaagaactcaggacctgccaaatgcgggagtaaaaggagctgtaacactttcctggccggctcgctgaggtgcaggtgggagctaaaggggctgtaacacgttcctggctagctcgctgaggtgcaggtggtgacacgttcctgaactgctggagtgaagagtggagacccttctggaggcccagacctcgggattctccgagccagagcggtaacacactagttctcctgccctctgccagcgccaggctgccaccccatgcaacaggaagcagtggcggggccaggccagcccaggagccacaggccggagcagggtggcaggactgaaagagcagtaacacaaatgggctgaaactccaccccctgaaatacagcacccccacctcgctgagcggctgccggtgatgagaaagagagaagagctgcagcccttctgggggcccagatctcggggctccctgaggcagggctgtgacatgctgtaacaccctctttggggctctgcagttcctggtgtctcagagctttcaggtgccactgcgttcccctggtccagacgctggtgcctatagcagaggtcgcttggggtaggtctggtccagccagagccttgcatggagctggtgcctgtgccagtgcctggagctgctcacgtggctgcggcagcttgtgtgcctggctctgtgtggtgactggacctcacgcttgctcacacacccccccaccactccatgcctggcttacccttggtaggcatgggatccgggctgcactagccaagcacagcctgccaggtgagtgggcagaacgagtgggcacaagcaaaactccagcagaggcaccaccagccacagaggttttgcactgaccaagtgacacccaaaggatcccgtgacataaccttggtacagtgtaggagaggactgcccggatgtacatgataggtggtaaggaacattgggaggtgttttgtggctgactgtggccacaaaaatttccattttattccatccaatatgtttttctttttttctttttccttttttttgttttagagtctcgctccgttgcccaggctggagtacaatggcgtgatctcggctcactgcaaactccgcctcccaagttcaagtgattctcctgcatcagcctcccaagtagctgggattacagatgcatgctaccatgtctggctgattttggtatttttagtagagacggggtttcaccatgttggccaggctggtctcgaacttctgacctcaagtgatccacccatctcagcctcccaaagtgttggaattacaggcatgagccactgcacctggctgtttcttcttctttcttttttcttcttctctcttcttttttcttcgtcttcctcctcctcttcttctttcttcttcttcttcttcgactgagtctcgctctatcacccaggctggaatgcagtggcatgatctaggctcactgcaacctccgcctcctggattcaagtgattcttgtgcctcagcctcccaagtagctgggattagaggcacccaccaccacgcccagctaatttttgtatttttagtagagacggggtttcaccatgttggccaggctggtcttgaactcctgacctcaagtgatccgcccgcctcggcctcccaaagtgctgagattacaggcgtgagccaccacacccggcctattttattatttttttgagatggggtttcactctgttacctgggctacagtgccgtggtgtgatctcggttcactgcagccttgacctcccaggctcaagcgattttcttgcctcagcctcatgagtagctgggactacaggcatgcaccaccatgcctggctaatttttgtatattttgtagagatgaagtttctgccaatgttgcccaggctggtctcaaacttgtgggctcaagcgatcctcccagctagtctcccaaaatgctgagactacaggcataagctcctgtgcctggttcaacactttttttttttttttttttttttttgagacagggtcttgctcagttgcccaggctggagtgcggtggtggcatctcagctcactgcaacctccacttcccaggatcaagttatcctcctacctcaggcctccaaatagctgggaatacaggcatgagccaccatgcccagctaatttttatattttttgtagagacgaggttttgtcatgttgcccaggctggtctcaaattcaaggtcaagcgatccacctgcctcagcctcccaaagtgctaggattacaggcctgagccagtgtacccagccatgtattttctaatatcccttggacttcatctttgactcatgttttattttgaagtattgggattgtttttcagttatctttctgttattatttctatttaattctgttatggtcatacaacataatttaaattcttctaaatttgttgaggattgtttttgttgcccagaatatgatgaatctctcattgaatgttgtatgtgcagttgaaaagaatgtttattctgctgttggtgggtaaagtgtcatgaatataattaggagaaattaatgatagtgttaaggttttctatatccttgcttttttggtgtacttattttattgattattgagagagaagggttgaattatctaggtgcaatatagattttttctgtttcttatttcaggtctactggtttttacttcatatatttttgaagctctgttgttagtatatacactcttatgactgttaagtcttcttggtgaattgaaccttttattattaaataataccacttttcctccctggtaatagtccttcttaaatctactttgtctgatattaatactgtcactccaacttgcttggtttcatgtttgtatggtgtgtcttactccattcattttttttttagggatccaattcctctacacatccttttacttttaacccatatatttctttatatttaaagtgggtcttgtggacaacatattattgcctcttactttgctcccaatctgctaatttgtcttttaattgattgtctttttactgatacactggattaaaatctatcaccttgttatttgttttctaatctttcatctgtgctttttttcttttttcttccttgatttggattatgtttcgaaaaggaaaactcccaatctcatgggtgctgcaagtagacaagatgtattgcatctgattgaaatagtttattattcatagcacaacaaacagtgtgaacatcagcatagttgtattggttcccctggtcctacattcaacagatgatgcagtgagcccagatgcatggtattcacacagtgggtttgcattgtagctgagggacctaggcccagcactttttattttattttattttattaattaattaatttatttgagacagggtctcactgtgttgcttaggctgctctcgaattcctggactcaagtgatcctcctgcctcagcctctcaaagtgctgggattacaagcatgagccaccacgcctggtcccaggacatttttatagcaagcagtaagcaagcctgccttggtctgagaaatgatctcacctctcaaaactctagctgtactaacaatcctgaacaaggacccaggtgaaagagaggtctgggccttgtgatcttgacatactcagcaagacacgttggacacaagtggcctagggaggaagcctcccaacattagaaaaaattattatatgtacttgttttcatgttcaacagtcattttaaaaaataaattttattgtatatgtttaaggtatacaacatgatgttatggaatacatagatatagtaaagtgattactatagtgaagcaaacgaacatatccatcatctcacatagttacctattccagcatttttatgattccattttctattattggcttgttacttacacctctctaaaaaaatttttttagtggttgctattgaatttactatatctttaatcagtctatcttcaaataatgttataccacttcttatatatcataaggaccctttaacagcatatttcccattcctccatctcctcatttttactgttgttattgtcatacatttcacttttatatatgctatgaggccacaatgcattgctttagtaaagcagttaccttttaaagtgagtaaaaatgagaaacaatgtctcttatatttacctttattctatctgtttccagagatcatcatttctttatgtagatccaagtttctctcaggtatcatatttcttctgcttacagaacgtccactggtaatgaattttctctctctctttttttttttttgatctgaaaaagtgtatttccttcatgtttgaaagatgtatttgctaggtatagaattctggattggcagttttttgtctttcagcattttaaagatatgactctattatcttctggttatataatttctgatgagaagtcttctgtaattctttgttcctctgtagggagtgtgcctttttcctctagatgccttcaatattttctctttatctttggttttcagcaatttgaatatgatatattaggttgtgtttgcatgtgcttctttgttgtgtttgtatattggcatttaatcttttctggattctgtgagtttcttggctctgtggtttgatatctttcattatttttggaaaattattagctattatatctacaaataaatattgtatctacatatatatatttttttttctctgtttcttctccttctgggatatgaatcacttatatgttagcgcttggatatttgttctggtttttgtttgtttgtttcactcttttctttttctgtttcaatttgagtattctctattgacctatcttcaagttcactggttatttcctcagctatgtcgagtttactgattgatatagtttggttgtgtcaccacccaaatctcatcttgaattgtggttcccataatccccacgtgtcatgggagagaccaggtggagataattgaatcatgagggtggttcccccatcctgttctcatgatagtgagttagttctcacaagatctgatggttttataaggggcttcctccttccccaggcacttctccttgctgctgccacatgaagaaggacgtgtttgcttccccttccaccatgattgtaagtttcctgaggcctcctcagccctttggaacagtgagtcaattaaacctcttttctttgtaaactacccagtctcaggtatgtgcttatagcagtgtgagaacagactaatacagtaaactggtattggtagaatgaggtgcagctataaagatacctgataatgtggaagcagctttggaactgggtagcagatagaggttagaacagtttggagggctcagaagaagaaggaaaatgtgggaaaatgtggaacttcctaaagtcttagagggctcagaagacaggaaaatgtgagaaggtttggaacttcctagagactgttgaatggctttgaccaaaatgctaatagtgatatgaacaatgaaatctaggatgaggtggtctcagatggaaatgaggaactagctgggaactggagtaaacttcacttttgcaatgcaaagagactggtggcattttacccctgccctagagatctgtagaactttgaacttgagagagatgatttagggtatctggcaggagaaatttctaagtggcatagcattcaagaggaagcagagaataaacttttggaaaatttgcagcctgatgatgtgatagaaaagaaaaacccatttttttctgggagaaattcaagccccttacagaaatttgcataagtaacaaggagacaaatattaatcaccaagacaatggggaaaatgtctccagggcatatcagagacctacacagcagcccctcccatcataggcccagaggcctaggagggaaaaatgatttcctgggccaggtccagtgctcccttgctgtatgctgcctcaggacttggtgccctgcatcccagccactcaagccatggcaaaaaggggccaaggacagctcgggctattgcttcagagggtgcaagccccaagccttggcagcttccatgaggtattgggccagcaggtgtgcagaatgcaagaattgaggtttgggaacctccgcctagatttcagaggttgtatggaaatgcgtggatgtccaggcagaagtctgctgcaggggcggagccctcatggagaacctctgctagggcagtgcggaagggaaatgtggggtcagatcctacacacagagtccccactggggcattgcttatggagctgtgagaagagggccactgtcctccagacccccgaatggtagatccaccaacaacttgcactgagtgtctggaaaagttgcagacactcaatggcagccatgaaagcagcagggagggggtctctaccctgcaaagccacaggggtggagctgcccagggctgtgggagcccacctcttgcatcagtgtgacctggatatgagacctggaatcaaaggatattattttggagctttcaggtttaatgactgtcctattggatttcagacttgcatggggcctgtagcccctttgtttgggccaatttaccccttcaatttctcctatttagaatgagggtatttacccaatgcctataaccccattatatctaggaagtaattaacttgcttttgattttacaggctcttaggtggaagggacttgccttgtctcagaagagtctttggacttggacttttgggttaatactggaatgagttaagactttggaggactgttggaagcacataattgtgttttgaattgtgaggacatgagatttgggaggggctggggcaaaattatatggtttgactgtgtccccacccaaatctcatcttgaattgtggttcccataatccccacatgtcatggaaaggaccaggtgaagacagttgaatcatgggggtggtttcccccatccttttcttgtgatagtgagttacttctcatgagatctgatggttttataaggggcttcccccttcgctgggcacttcttgctgctgccatgcgaagaaggacgtgtttgcttccccttctgccatgattgtaagtttcctaaggcctccccagccctgtggaactgtgagttaattaaacatctctcatttataaattacccagtctcaggtgtgtctttgtagtagcgtgagaaaggactagtatactgataagcctgtcaacagcattcttcaaatctgttatatgtatgtgttttttcttatttctagcatttctctatgtctctttttttgtagtcttcatatttctgcaaaaattccccttttgttctttcatattgtctacattttccacaagagcctttcatattcacgtattacttatagttgtcttaagttctgtgtcagataattacagcatctgcatcttgcacctggtcttgctttctctctctctctctttctctttctctctttctctctttaatatagaaacagggccttacgatattgcccagactggtcttcagactcctggcctcaagcattccatctgccttggcattccaaagtgctggattataggtataagccaccacacctggactgctttgtctcttgacagtaggtttttttggtattttaaaagttgtgtgtgtgtgtgtgcgttgtaatttttgtttgtttgtttttgagatagagtttcacttttgccaaccagactggagtgcaatggtgcgatcttggctcactgcaacctctgcttcccaggttcaagcgattctcctgcctgagcctcccaaatagctgggattgcaggcacccaccaccatgcccagctaatttttgtattttcagtaaagatgggatttcactgtgttggccaggctggtcttgaactcctgacatcaggtgatccatccaccttggcctcccaaagtgttgagattagaggcgtgagccactgcacccagcctgtgttgtaattttttattgaattttggacacagtgcttataatagtaaggactgagttcattattatttatgcctggaaattgtcgtatctcttcttctcttaggccattagtgtgggggattcagtcagttttttcaggagttgaattaggtttgagttttgttgtttctatgattacttcagtgtctatatctcctacaaattttatgtagtcatgctagctatattgggtctttagtaattccataaaaattttggcctggcatgttggcttacacccataatcccagcactttgagaggctggagcaggaggatcacttgaggccaggagtttgagaccagcttagacaacatagcaagaccctatctctaacaaaaaataataataataataaaataaaattagccatgtgtggtgatgtgcatttgtagtcctagatacttgggagactgaagtgggaggataccttgagcttagtgagtcatgactgcactactgtgcttcagcctctggacagtgtgagaccttgtctctgaaaaataaaaacataaacattagctgaactcttctaacctacttgtaaggagagcttgtctttctcttgctacacaactgagtgagtgcctgcatcccgtcacttcctggaggctcctgtccttctttggaatgctggttaattggttgctctgcaaccttaggtctctgataagtttgacaaaagttgtgattttgtaaattacccaacaatttttaaaaactgttattagtttgataatgatgctcttcccaggtttctgcatcctagatggaagccggagtctcaagccgtctaccttttcacggtgctattcaacgttttggccacctactcctggcctgctgcttgggtctttcttttgggtgacacccttccagtttagccccctgaaatattttcaggttagatgtttccccctctccattccttctttatggcaaatatctgacaaagagaagggacagaggttcctgatctttcttcatcttgggctcaaaataatccatggagtcgtgttctgaaggatacatctgggccaggcgcagtggctcacgcctataatcccagcactttgggaggctgaggtgggcagatcacttgaggccaggagttcaagaccagcctggccaacagggcaaaaacccccctctaccaaaaatagaaaaattagccaggcatagtggagtgcacctgtaattccagctactcaggaggctgaggtgggagaattgcttgaatccaggaggtggaggttgcagtgagctgagatggtgccactgcactccagcctgggcaacagagcaagactctgtcaaaaaaaaaaagggatacatctctgaaaatggggacatgactgggagtgagctaagctcttatccactgtactcctgacttggccctcattttctgtgctagaaaattagatgaagtatctactctatccattaatgagaaataagaatcaaaccaacccaatgaaatagttcttagaagatgaaaactacaacaggataaaaggggaacaggcacaggataaaagggttgtaagcacagtctctagaggcagtctacctgggcttaaattccaggtccatcacttactagctgtagggcctgggacaagttccttcacctctctgtatctcaacttctgtatctgtaaagtggaaacagcaagaggattaaaagggttaatttttgtaaagcacttataatagtgactggcacataataagctctgtggaagtgttaacaattagggcttacttcctataatttcagaaatttgtggaagacagcagttccctccctttctcagaacccattaccatcaaaacagctaacgattactgagcatttccaaagtgcccaagtcctgtaactaaccattttatataaattatcttataagagggagggattaattattcctctttagtaggtaagagatcaaggatcagagaagtgtttacccagctggctagaggaatcaataggtttacaacccaagagggtctgactgtattgcctgtgctcttaaccattgcatttgttgcctcccacaaactagtttccatgcttgtaaactagtgggaaaattgcatgctgtatttatctcacagggttgttttgagatcccaataatgttaagaggcagtgctttagtgtacagagtgctggtcccctgacagggaaacctgaatgtgtcaatgatttgttcacacttccctccctctgcacatgcccttctccctcttttctgcttgttgaactcatgtcttcaagacttagctcagatatcagcgtccagattttattctaacagtggaggaatttaggcaacgccgcgtggcgggggggtcgaggggggcacaccagacttgtgttctgaaatgacagctgacttgtaatgcagggaatggagtgtagccgggccagaatgagtacaagaaaaccagatagggccgggcgcggtggctcacgcctgtaatcccagcactttgggaggccgaggcgggtggatcacgaggtcaggagatcgagaccatcctggctaacaaggtgaaaccccgtctctactaaaaatacaaaaaattagccgggtgcggtggcgggcgcctgtagtcccagctactcgggaggctgaggcaggagaatggcgtgaacccaggaagcggagcttgcagtgagccgagattgcgccattgcagtccgcagtccggcctgggcaacagagcgagactccgtctcaaaaaaaaaaaaaaaaagaaaagaaaaccagatagaaggttactgcattaggagcccaggcgggaggtggtggggcaaacggaaggaatggtggactggaaagatatttaggaaagagaatcgacaggaaatggaggtgtattttaatataggcagcgagggagagggaggtggcaaggatgactcctagttcctgacttgctcgcggatgtttgtcgaatgaatgatccagtgaccccaaggcagaagtatctcagagagatccccccactcccctccccgcacccgtcaccacgctgccttcggagctctgaccgtaagggggtggatggaaggcaggaggaagggaatggccacggagtcttggtccaggagctgctagactggacacttctagcactggtctgagccaggagacgctgcgaaaagagggcaaacgtttctcctctcgcagttgccgcctcgcccctccacccccgcctggccagcagcgcagcgcccctcttagcaccgtggaggtgctggctccttgccggcgtcggggggcgcggcgtagcggcccacccttccagctctgacccgcccggccggcccggcgcccaccccgcccagtgtgcttggtaggttgggcggcggctctgtctagtcccagagccaggaatcaggggcagccgggcgagtcccagggcaggggtcctccgccgccttgcacctgccctgctgggcggcaccgggtcagtgccctgccccctcctgcgggtcccaactctctctttcccatcgtgcgtcctctggagaagtgcgcgcgtgtaagtgtggcgagtgtggccaagggtgccggaggcagggttcgggtgcgtagtcgttgcgtgggcgctgcccaaaaggcgcagagcatcaagtgtgcgtgggcagaaccggcgcgggcgcccgccgcgggtctgcgcggggcgggggcgcagcaagtgcatccgagcgagcggagactagcgcaccggcgtcggtggcgagggtggtgcagaggagtccggctgggcggagggaggaaggatgggtgcgggtaactttttgaccgccttggaagtaccagtagccgcgctcgcaggggctgcctccgaccgccgggcgagctgcgagcgagtgagcccgccaccgcccctcccccacttccgcctcccgcctcttcctcgttcccggctcccagggcccgtcggtcccccgggagccctggaggcgcagccccaccccggccggcgcggctcgctcccacgcccccgccgcggcctcgctggagcggacggactgagtcagagggggcgccagcgctgcaggtaggggctccggcggcggtgggcgcaggtgccgcggtggaccgcggaggggaccggagcacgaggggaacggccttgggggagcgccctccccccgtcctccgccgacgcctcgtgtccctttttagggaattttttccctcttgctggctccagtgcgggtggggctgagaccgagagggagttctccatttcgctggctcctgcccggcccctggcagcctcctgcccccaaatctcttcaccccctttccagtacctataggtcgcgtaaacaactccctttctccagctctgggctccgcggccccccgggggacagctccttcagtctcgtgagatcggtggggttagggggaggggaaaagagagggggtgtcccagagcccctggcccccgtcagctcccccaccttggcctctccctccccctcctcgctgctggagcacaggctccaggggccctgggtatttttagcgttgtgacctgggcggcagctctaagagcctttcccgggaatcggcgtcagcgcctcgctcctccgccgccagcccgcggccgcacggtctccccagacttccgtggccctgccttggccagtcggggttgggtccctctccacctctgtggcgcccgtggagctggccagggtctgggatacgctgggtgcagatgaggtggggaaggcagtctgcggaggatgacgtctgatcctcaagctagaaactcccttgcctctggtgatgggctcagagcagaacgccgggaaggagatgagcgaatgggaatgaatgcaccgacctgggctggcccatagcctcagtgctctggcagggtctcagcttctcagccctaggggtcaggaggcctgctctgaactggacccagaacccgcctttccaattgctcctcactgactaatggggagataagtcagtgagatgtgtcccaggagggggacgcataaagagctgttggagttcaaaggaaagatggtagtctcctaaatagctcaccttcacaagcagggtcttgtatttgaggcaggtaggttggttatgccattttcagatggggagactaagaccagaaaggtgatttccttaggggcagagcctagtctggaagtcaggcctgtgacttcagagcaagggtttggggtagatggcacatgcgtgtgtacgtgtttgtgtgggtggagagaaaaggaggggcgcgggaggagttgctttagcctttgtctgggttttgaaggatgggaaggggtgggctgcagcactggaggaagggaaccctccaccctgagatctctgtctctatcctatcctgtccctggccttctgaggcaagcggggccaattaaggggaaaacgtacctcctccatttgtgctgaaccaatccctccaacccctctcaggagggcatgatatggagagttgggcattggctgtgttccctgaatacagagtatctctcttgtggtgcctggaactggcatcccctttgtggagcttagggcaagccccgcctctgcatgagacttggtttgtgggacacacttggtttcagggaaggggaaagaggtcaccaagggcagaggtgtccaggccggagccaggggccccactgttgggatgctggctgcagtggggcgccccaagcccaggtcccctctgtcttctctttcgactttgcagctgtacttgttttgctcctctacccgcaggagctgacatggacccaaatcctcgggccgccctggagcgccagcagctccgccttcgggagcggcaaaaattcttcgaggacattttacagccagagacagagtttgtctttcctctgtcccatctgcatctcgagtcgcagagacgtaagtcccaagtcctgagaagagggactggggtagggtagggaggatgtcctgtgggtcctgaatcttgtggcactctctcccctctggttttcttggccctctatgcttctaacttgggacctgacatgtaactctcactgtcctggtgtgcagcttgggtcctcctgacttgcccacttcttgatccgcagcccccataggtagtatctcatccatggaagtgaatgtggacacactggagcaagtagaacttattgaccttggggacccggatgcagcagatgtgttcttgccttgcgaagatcctccaccaaccccccagtcgtctggtatgcccctctgctttggggacttcagtgccagtcagccagagccggatgtcaggctctgaaacgaggctacaaggctgggctggggaagtacacaagtaagggctggaagtgggtgtttctaccaatgaaacagctgcctgttctgattttagggaagttgaccctgagggagaactgggttacacatctctaatccaaaattctgggaacggtcaatctcttctttaattttacatttgttatattaatataattagtcactataattaaaataatgtaaaattgtaatttttatatttggcaacttaagtagttttagtcattataatgatattaatatgtattgagtactttagtaggttccaatactgtactaaagtactttacatatattatctcaatccttacaacgtcctgtcagggtaggtgatataatctctattttataagcaggaaattaggctcagagaagttaagtcacattgtagccagaaggtagataaactggaattcatgtctgtctgactccaaagcccatatgcttaacttgtaagatagatattcttttaattaaaactgctactatttattgatggcttactatgccagacattttataagcattcttaggttttattcccaaaaccctttggggatgtaggtatcccttttattttgcagaggaggaacagagtccttgaaagggaaagtgacttgctcaaagccactcagcagcaataagtgatgtaggtggaacttgaactcttgccattcattgacctgactgtagatcccagacatggtgtaatgacgtggaaggagctggcagtcaggagatggtgatcttaatcctggctctttgctggattggcaaagtcactttggacaagtctctgccccactgtggactttagttactcctggccagataatctttaagagttctctgaagccctgtttgtggcctgaccagcttttctctctgggcagggatggacaaccatttggaggagctgagcctgccggtgcctacatcagacaggaccacatctaggacctcctcctcctcctcctccgactcctccaccaacctgcatagcccaaatccaagtgatgatggagcagatacgcccttggcacagtcggatgaagaggaggaaaggggtgatggaggggcagagcctggagcctgcagctagcagtgggcccctgcctacagactgaccacgctggctattctccacatgagaccacaggcccagccagagcctgtcgggagaagaccagactctttacttgcagtaggcaccagaggtgggaaggatggtgggattgtgtacctttctaagaattaaccctctcctgctttactgctaattttttcctgctgcaaccctcccaccagtttttggcttactcctgagatatgatttgcaaatgaggagagagaagatgaggttggacaagatgccactgcttttcttagcactcttccctcccctaaaccatcccgtagtcttctaatacagtctctcagacaagtgtctctagatggatgtgaactccttaactcatcaagtaaggtggtactcaagccatgctgcctccttacatcctttttggaacagagcacggtataaataataaactaataataatatgccaaccattcgacttcatttttcatattgcaaagatatcaaacccactacatgtctttagctctctaaccgatcccatattcctatcactcactcattccatttattcaagaaatgtttatggaacacccatgctaggcatctggaatacagttttgagcaagacaggctgtactgtatacctgccttcatagagtttactgtttatggaggagaaaatcaagtaaatactacaattcacagtgtaataaatagcatgatgaggaactactctggtaccagaaaataggggcatgttaacctagtttctatggtcactgaagagctgtttttagctgaaggacgattgggagttagccaggcacagtccgtaagccaggcagaacgagcagctcgtgaagactttaaacggagagagcatatccttgaggagctaaaaaacattgcgtttggctgaattgttggatttgaggaaatgaagggagagttaagactgacaaaggtcaggttgtaaaatccgttgaagcctggatcaggtttcagtttgacagctagtaaaagatcatgacttaagatataaagttatttcctcatatagaagttaaaaagtacaggtctacatgaaagctccatcgttactcagcactgggctccttttttgctcttttgcacatggtttgcattcttagcaatatctcacatctaaggtggctgtcaaagccccagccatcatgaccttgagactggcagaaagcaggagaggaaatgggggatgggcaaagagggcacagccagtctattcccatttaggaagaaatttttggaagttctttttttttcccccaagatgaagtcacactctttcgcccaggctggagtgcaatggcacgatctcggcacactgcaacctccgcctcccaggttcaagcaattctcacatctcagcctcccgagtagctgggactacaggcgcacaccaccatgccaggctaatttttgtatttttagtagagacgggatttcaccatattggtcaagctagtctcgaactcctgacctcaggtgatccacccaccttggcctcccgaagtgctggaattacaggcgtgagccactgcacctggccaaccatcctatagtcttccagcagagtctctcaaatcagtgtctccagatagacgtgaactccttggcatgtcaagtgagggggtactccagccattctggctccttacatcctttttggaacagagggctagtcacccagatggggagtttcagaaaggaccaggtttgagaagaaggccataaatttggtttgggacatgttgagtttgagatgtctttgagacatccaagaggatatgttgagtaggcccttgcacccatgcatgtggaatttagataagaggattgagctggaaaaagaaaacgatcagttctcagtgtataggtggtaagtgaagccatgggtgcgaatgacaggagagaatgcccagggagagaatgctgaatgaaagaagaggttataggacccagtcttaaggaacatcaactcatttctcacattcaaaaaaaaaaaaaaaaaatcagtccacctcccttcatacattgaacatcacccatgggatcagtgaccttcagccaaaatcctaaagctttttgtgccacccaaggttgagtgacaaggctgcagtcttcctattgtcccatcctgctctcacccctgcaggaggccagtgtaagtatctgttcctaagtgtttttcctaacactagtgagaaacctgtgggaactccagggaagtaggagtgtccaccagccattccctgtctctaggaagcttgtggagtgaataccttctgtgcaaaagcctctaggtccaagttgagatcatccactgagctgggccagggcccagtcctctattaacttttggggtttttctgggttgcttatgaccttgctgcacatagaagacataatctctgtcctcttgtggcttctctccttccttcctttagagtagcaaggttctatctacctcctgtctgactgtggctgagccatctcttgggctgcggcccatgatcccaatagctttgctgtgcagggcttctcagctcccaggatcaccccccttccttccatggtgaacgatgagaagctagactggcttggttgccgtcaacatgtcaataaatctcttagtagcccaggcacatgatgcgaagattgtggggagcctgccttgagagagggatttacagccctctagagaagtagaattgtttctgagcctatggggagccttcagtttggctgctatgagccccagccctgcctggaaaagtctagtgtcagctgagaccccaggactacttcctagttgggacaataaccttttctcctgccgaaccacaggggcttggctggccttcagaaccatcatctccagctgactgttttttgtttctttgtttttttaaaaaaacttatgggggtttcaaacgtacaacaaatatagaaagaaaaatatcccaggttctcatcatacagcttaaaaaatcatcaaaatagtaccaagattgtatcatctacccaccacatatttttagtggaaagacatttatgataactcttgaaagaaagagtagactataaaacaccatattcaatatggtcactttttaaaaaaatgataatcttcagattcaccatttgattatagtgttgcattaaagttaaaccgtggtttatggcagcccagagcctagctgtctggtttttgaggccacacagtgcctttggaggtgggaggaagatctggagccaactctaagtcaaggagcccagctttcagtctccaagctacagcgtggcttctgatatttgcacggacttgtcatagggtggacatcctgacacacttcggaaaggaggcaccacagctcagaaaaagtttccttagaaggcttacactgtagcaaccccaggagtgcacagaacttgacactgaacagcatggcagagtagggaaaatacagaactgtgctatgatgtcatcttgtttgttcattcattcacacattactgagcacctactatgtgacagtcaccttgcttaggcaacagaaatactaaggtgaccatgagctcttccaggagcagacacagacacaggtaatggaaacaatgtgatgagagatgtagcagaagtacatgaagcctgtagaccactagaggaggagaaggtaagtcttcactagaggtggctgggtcctgaatgatggagatgggcaatttcaaaaggaaaacagagaagtacaaaatagtcataatgatggcagctacctttaaaaaagtattattttgaggtttgatagtgtagactatagtcctagctccatcactcattgtaatctttattatcttagtttatgtacttcttaataataacactcaagcaaccctatcacttaggcactattatctacatttacatattagtgcctaggtgacagggttgagtgttactattaagcacttgctacattccatatcctacatgtacataatttctcatcttaacaacaaccttgaaagtaggtttcttcattatacaaatgaagaaaagtgacacttgggttgatcatgctcatatggattaaaggctggcatagggatttggactcctgtctttctgacatctaagcccatggccttcctaatatttcgtgtctaatggggcaggaacactgaatgcaggcagaatgaaggcataatgagataaagacatctttctgacatttcctttctggaaatgtctggttggttggcgcatatcttggcagacctgcctgacaccaaattggctctttctagaagtgtggtcatgagtgtcaccaagagactgttcatgaaatccttcatgaatgtgtttcccatagggcaggtggaaaaactaaagcatgactttaactttggaactccgaaaaagtcaataaaaagacaagccagtaaacaaaggggtgagggtgcagaagactttaacagacctttcacaaaaaaataaaaattaaattaaaaaataaatggcaaataagcacatgaacagatgcttaacatttttagttaccagggaaatgcaaattaaaaccacaatgagcaaacactacatacatacccaagtggtcaaaactaaaaagtacaaaaaattagaaacttcaaatgctgaccaggatgtggtacaatggagactcatagtttatggaaacataaaatgatacattttggagaaaggtctgacagtttcttataaaattaaacatacacctgctctctgacccagcaattccactcttaaatacctggccaaaggatatgagaaatatacgtctacaaaggagcttgcacagacagcagccttgttaataataaccaaaaactttaaaagtgcccatcaagagttgaatggataaattaataatactacgcagtaataaaaagaattgtggatacatgcaagaacatggatgattctcaaaaacattcttcccatgagaaaaaaaaaagccttacacagtatacatactatatgatttcatttatatttagttctggaacagattaatctattgtgggaaaaaatcagggtactaactgcctctggaaggtgatagaggagcagggattgactaggaaagggtattgctaattttctggggttttaggaatgttctgtatcatgataggagttcgggttacataggtgtgtgcatttgtcaaaactcagtgaatgtgtactttggatttgtgcatttcactgtatgtgaattttacatcaaaatgcaatcgaatactgaactctagttaattatatgcatgcttaactacttaaaggaaagtgtactaatgtctgcaatttactttgaagtgcaccaaaacacaagatggaatgatggatgtatagacaaatatgtggtaaagtacaagtatagtataatgtaaatagtagaatctaggtggtggaaaataggtttattgtaacaggtgctcattctttcaattttgtttgaacattttcgtaataaaagaaccacttatttgggggttttgcagcaaatggagacactagaagctaagaggggcaggaggttcctcttactttgggaaatgcaaattaaaaccacaatggttttcccaaaagtaattgatctttttcagtcaatgtttcctcaactatcaaatgggtaaaatggcagtgaaggagcttcatattattaagcatttcctggtgggtggaatacgccatgaactaggtgcggcctcaagctggttactcgccctgcctactccctctcgtgtcctcccagtacccccttagacccaccagctctgagggaatcttcgcgacctgcgcaggcggtcgctctgataaccgcatcccggtttccgggacgacagcggaagtcacttctcacacgcctttcttattggataccggcttttcatggggccgagcgccgctgggtaggcggaagtagccgcaggcatggcggcggctatgccgcttgctctgctcgtcctgttgctcctggggcccggcggctggtgccttgcagaacccccacgcgacagcctgcgggaggaacttgtcatcaccccgctgccttccggggacgtagccgccacattccagttccgcacgcgctgggattcggagcttcagcgggaaggaggtgagggcgcgagatctgaccagggaaagatttccgtagtgcctgctggctggccggccgtgggatgaaggcaaactttgggggcggggcctaattcctgggtagagttcgggatcctgggtgtggaccccgacgaggtggggatcgtcactcacctgctcccgtttccccagtgtcccattacaggctctttcccaaagccctggggcagctgatctccaagtattctctacgggagctgcacctgtcattcacacaaggcttttggaggacccgatactgggggccacccttcctgcaggccccatcaggtgcagagctgtgggtctggttccaagacactgtcactgagtgagtgcacaccttgggccctgttgcaggccatggagggaatgtggctgggagagtgttgtcatcctgccactgctcttggggacagcacttccagtaggcagcgattccatgggggtagagctggcattggaagtaagaaatgttaccacagatgaataaacttcccaatcctaaaactttcagacctgaggtagcacatgcatatccctggagaggcaaatagcaaacaattaatgcttatttggaggtaaggcagtagaaaactggcaactggataaccttttaaaaggcattcattaatattttttaaatgataataaataccacgaaagccaaccataacatatctgtgggttacaactggccaacaggatgctacatcacagtgttagaggaactgcttttgtttgggagggggcaggtctagttactgtgcctactacaaaccgctatttcccagtggctgctgtggctatcctgtttagaatagaacctttctgtgcagtggttgcaaacaggtctacatgggccacacaggtaaggaatgaataaaggtatttttaaaattgacaaacacaggaatgagaaatatatctcattttcctcttaatcccactataagaaatcaatagtgcaagtatgatataacaagttttagggcaataaaaaggagcagcaggaattgtggcaggctagagagtttgtgtgacattctaacgaggacagctctgccactcagcttctatggattgttgccatgtgggaatagaggcctaatgtggtcagagtcaaatgtttctaaaaattttttgtagaaacaaggtctcactatattgcccaggctggtctcgaactcctgggttcaagcgatcctcctgcctcagcctcccaaagtgttgggattacaggcaagagccaccacacctggcctcatttttcaagagataccagaaatctggaatttaatgtgaaaattggcaaattcaaatatcagcaagtaatttaaaaattttttgagtgctgtgcgggtcaatgttgtgcataccaaatgaagcatgtttatggtttgagtagagctttccggcttcaagtttgccatttttatttgaggcttaaggattggagcagttgaaaagctctgaacatagaattatcaaaagctcctggacaacactaaggaataaggaataagcagtaactccccagcttgccaagactttctctcttgcctcaactctggctcccctaccctttcctgtctactctgctgtcactgtcttccctcagcccgtaattgcctgaaatgtggagcaaatgcttagaattctttctagtgcttattaagttttatgctttctctattactgagagcaaatctcttttgatatttctccaagaaaagaacattaatttaatttgatgtttttatgaaatcctagaacagttgtttttcccatgttcagtgagcttttttggatataagacttctcaccatgatagtagaatcaggacttacctttattcccagagtatacacagggtagtatgcattgttttgcccagcccagcacattcaaggaagatcagtgagctcatttcagctctgatacatgaggcgctttccatggtgtcaggggaagtacatagatgacccagactggtccttgtcctcaagttgcttacagcctagttagggagaaaaggtggtcaggacacgatgctgctgccacctagccatctcccaggagggacctagtaagatgcttggatggtcagaaccgtgactgcacagaggagactgtgcttaaggagggcaggaaaggcttcgtggaggggaggtaagcactggagccggatcatgaaggtaggcagaaagaagttagcaaaggcttgcaaggaaggaagaatcacctgagcagagacccatggggatgcagagatgtccagaggagagtgaggaagaaggggctgagtaggatgagacccagcaagtgggctggctgggggcagcaatgttccagctccatcaactggcccgtctaatagttaagaatacagcctcctcctatcataggtttagcagccagctgtggactttgaaagagggagcagaggtagccccaggacagtgagtggatttgtgtctctatccagtgtggataaatcttggaaggagctcagtaatgtcctctcagggatcttctgcgcctctctcaacttcatcgactccaccaacacagtcactcccactgcctccttcaaacccctgggtctggccaatggtgagataacccctacagccctttccttcttcctcttacctcctgcccaaacctttgcctccttttccctcagtttcctgcttcctcagcctgggctagatcctaagtcccctgtgtgtgcaggcccccaatactgtgccatctctgcatgccttttcccaaggagagaagggagtcctactcccagttgggactgtccagactgtggtgctagaggtggtgtggggagcaggagggtcattcccatctctggaatgtggatcccgaggggtcagagcccaaggcccaccccagacagacctctgtctccctcagacactgaccactactttctgcgctatgctgtgctgccgcgggaggtggtctgcaccgaaaacctcaccccctggaagaagctcttgccctgtagttccaaggtgaggccgcagagcctggcagccgggggcggggggtgtatagagaacctgcgccccatgccaagtgctccatacagggcttctcttatctctttccatctcctccaggcaggcctctctgtgctgctgaaggcagatcgcttgttccacaccagctaccactcccaggcagtgcatatccgccctgtttgcagagtaagtcatggggagtagaggaagctgccatccaggggctcagagaaggtacatgtaaagcatgtggtcagtgtctggctcaggctgagtgagtactgagtggtagatgtgatgacggttattcagggcattggccaagcaccaagaaaacagtggttgcctagcaagcactgaataaatatttgtcatggaaaatagtggttcagaacaatagctatgcgggtgcaattgctagctcagtcacttgccagctggcgtaaccttgggtgaatcatttcattcccctgagcttggtttcccaccctgccacatgacattgatagtagaatccactcctagggttgttgtgatagtttatcaaactgatgcacatacagctgtcagcacggggtctggcacgaggtcaagtgctcaggagtgggtggtagcaaatcgatggatgtgaagatacatagatgagggattgagtctgagtaggagtctttttgggggctgtgtggtgagagtgataccccctcactgctgccatctggcccttgtgatagaatgcacgctgtactagcatctcctgggagctgaggcagaccctgtcagttgtatttgatgccttcatcacggggcagggaaagaaaggtaagttaccttggcaactcatctgtacccacccatgccagccctgccttatctatgtggactaggcctaggcctggcccctgctcagccctgcgctctgtttctcagactggtccctcttccggatgttctcccgaaccctcacggagccctgccccctggcttcagagagccgagtctatgtggacatcaccacctacaaccaggtaacaaggtctccagccacacacacaaacacaccgctggtccccaggaccagcctaccctctctgcttgcttcttagccctgcctttgtgtccccaggacaacgagacattagaggtgcacccacccccgaccactacatatcaggacgtcatcctaggcactcggaagacctatgccatctatgacttgcttgacaccgccatgatcaacaactctcgaaacctcaacatccagctcaagtggaagagacccccagagaatggtgagtgggtggttggttggactgctgggttgcaacggctacagagaaaagactcacaatcccacgtctttgccgttagatgattgggttgtatttagaccagatttccagagtcatatgctgctgactgtagctattccaagctctacgattttgggtaggttcctaaactccccaagcttcagcatccacatctgaaaaatagagtatacttagcaaattggatgagatgatgtgaaaaatggagttagttcatgcatttgcttaatcaaccaaatacttttgaattcatactaagtgccaggcatagagtgttgaataagacagaggacactgcactcaagaaatataagtctactagctagggcaggtgtcagttaattaattacagttgtgttcagttcccttaccaagggaaagagcagaatatcctgagaggacctggattgggttcgaagggggcacggtgttcgtcacgtaagcacttcaatactagcaacctattgtcatcatcgcttgttggctggggaagacagggatgattccagaacccagattgcccagtttcagtggcagggctgttccccatctactcactggcttgggactctgaacatggcctgggcaggtggggtggggagtgattcttacctttggcagctgttaactgttgatatttctttacacagaggcccccccagtgcccttcctgcatgcccagcggtacgtgagtggctatgggctgcagaagggggagctgagcacactgctgtacaacacccacccataccgggccttcccggtgctgctgctggacaccgtaccctggtatctgcggctgtatgtgcacaccctcaccatcacctccaagggcaaggagaacaaaccaagtgaggacctgagtcctgaaccaggcccccagcccgccctctcatgtcctctccaggtcccccaaactctcatttcccagggtagttcctgaagtacctctgaaaagctacacaggcataaagagtaaggaatagtttctcaaaactggaacgggagcctcactgtgccaggttcagaagtaatttataaaacagcaataattaaaacacataatactggtgattcttaataggactgtacaaggacagtagcttcctttttcacttacttttgcctcctttctggagcattgggttttgtgatgattcatagactctttaaggtagggaaagggtttggcaacgttaggcttttgaagctaggaagatagcagagctggagtagatggtgttttgcttccttgggaggggtaaagaggtacagttaattaaatttttttatttctatttttattaaaatttatttttattttctattatttttctaaggagaagataatattagtgcttcctattaggtgccaggcatagcactaaagcacttgcctttctttggtgtagggggagactagtagtaaagtaaaagacctctgaggaagaggttgtaccatatcccaaacggccaaacttaaaaacctttcagtactttagttgattcctatattttcaaacatacggtgaatagtttcacttattttcagcaccattatttgtaccaccttcaaaatctctatttcagacatcctaactgcatattctataggtttttctgttattattcttttaaatcttctcctttggaaaatttcaaacccaaacccaaacagaatagtgtaataatcccctgtacacaccctgcagccttttttttttttttttaagagacagactgttgctctgtcagctatgccggagtgcagtggcatgatcatggctcattgcagtctcagactgctcggctcaagcaatcctcctacctccgcttccctaggactacaggcatgaaccgccatgcctttaattttttcacagaggcagggtcttgttatgttgcacaggctggtctcaaactcctggcctcaagcgattctcctgcctcagtctcctaaagtgctgggattataggtgtaagccgctgcctgctggcatatcttaaagcaaatcttagacattgcatcaattaacctttaaatactttaaggatttttaaaaatgtaaccgtatcattaccacttctgttttcccctgtggtcttaaaaatgtctttttataattggtttgtttaaattgggataaacaaggttctcacattgcatttgctttatactaagttcctctcttgggtgggcacagtggtgcacacctgtaatctcagcactttgggaggccaacacagaaggaccacttgagtccaggagttcgaaaccagcctggacaacattgtgaggctccccctacctatacaaaaaaaatttttttttttttttttttttttttttgagacggatcctcactctgtcacccaggctggagtgcagtggcgcgatcttagctcactgcaacctccacctcccgggttcaagcgattctcctgcctccacctcccgagtagctgggactacaggcgcgtgccaccacgcctggctaattttttctgtttttagtagagatgcggtttcactgtgttagccagggtggtctcgatcttctgaccttgtgatctgcccgccttggcctcccaaagtgctgggattaaaataaattgtttttaattagctgggggtggtgttgcacgcctgtagtcccagctactcaagaggctgaggtgggaggatcacttgaacccaggaggtcaaggctatagtgagccatgatcatactattgcacttcagcatgggcgacagtgtgagaccctgtcacgaaaaaaaaaaaagtttctttttctttaaaattactagactattcttagagcagttttaggtttacagaaaaactgagcacaaagcacagagttcccatatactccctgtctccacacccagaatgtcccttattataaatgtcttgtctttggtgtggtactcttcagtctctcttcatctgtagcagtgcccatgccttttttttttttttttaatgtcatttatttgttgaagaaactgggtcatttgttgtgtagaatgttccacattctgggtttgtccttgtgctagtgtttaacacacccctcctctcctatatttcttgtgtgttggtggttagatttagaaacctgattagattcatgtcccacatttttggcaagaaaaattcccaggtggttctgtgaacttcttcttgcgtcacatcaggcacttggtgtctggtgccccagttgtagtgatgtgaagattgattagccatctgcagcactcctaacaacctctcttgatcgcatcctgggatcactgccctggaaacatcctctcccttttcttagcccctgctttcttcccttgcctgcctggcttctatgctcccaagcccatcttctaggcacccagattgaggctccatggcaagcagcagggacaggggcagcaggtagcctgaccccaggaaagagatgtgggtgaccttgcatgtctccaggttacatccactaccagcctgcccaggaccggctgcaaccccacctcctggagatgctgattcagctgccggccaactcagtcaccaaggtttccatccagtttgagcgggcgctgctgaagtggaccgagtacacgccagatcctaaccatggcttctatgtcaggtgggctccacccccacaggccacctctcatccccctgacctaccctttctgctgcttaccccttgatagggcagccagatgggaacacgggccatctctctgcttctctgtagcccatctgtcctcagcgcccttgtgcccagcatggtagcagccaagccagtggactgggaagagagtcccctcttcaacagcctgtaagtgtgaccacactcactgataacacatcctcagctgcctgctgggccttaacacaggtgaccaggctcctgcaggggagttcagggtagatgttacatcttccaaagagatgtgtagatttaattcaatcctaataaaaatcctggcagtctgtggaatttgtgaagactttataaaatgattttaaagtgcttctagaagaatacttttacttacagcctacatttacttcttgatgctcttaaatatttaatcaagcacttatcaaatgccaagtgcttctgagagcactgagtgtgcaagattaaacaaaacagacttggccctggcctccctttgcttacagtctagaaggaagattctggtctagagagtaatggggttagaggttgggtaggaattgatttactgggttatctaggaaggcttcatttaggaggtggcatttaggctgaaaccaggctaagaaagaagcaaccaagcaaaggcggggcccctttcctccacctcaacaccaggcgtctctctttctttcctttctctctctttctttctttctctttctttctttctttctttctttctttctttctttctttctttctttctttctttctttctttctctttctttctttcttatttattttttattttactttaagttctgggatacatgtgcagaacatacaggtttgttacataggtatatatgtgccacggtggtttgccgtacccatcaacccatcatctaggttttaagccccgcatgcattaggtatttgtcctaatgctctccctccccttgccccccgcccgccgctcccctttatcaggtttagagattgagctatgccttctgttgaaaggttttgagcctaagagaacattggaaacactgtgttgcattgcccaatactgccggaatgaggatggggtgagatggggaggagcagccagtcctgtctcaccgctcttcccctgaccccaggttcccagtctctgatggctctaactactttgtgcggctctacacggagccgctgctggtgaacctgccgacaccggacttcagcatgccctacaacgtgatctgcctcacgtgcactgtggtggccgtgtgctatggctccttctacaatctcctcacccgaaccttccacatcgaggagccccgcacaggtggcctggccaagcggctggccaaccttatccggcgcgcccgaggtgtccccccactctgattcttgccctttccagcagctgcagctgccgtttctctctggggaggggagcccaagggctgtttctgccacttgctctcctcagagttggcttttgaaccaaagtgccctggaccaggtcagggcctacagctgtgttgtccagtacaggagccacgagccaaatgtggcatttgaatttgaattaacttagaaattcatttcctcacctgtagtggccacctctatattgaggtgctcaataagcaaaagtggtcggtggctgctgtattggacagcacagaaaaagatttccatcaccacagaaaggtcggctggcagcactggccaaggtgatggggtgtgctacacagtgtatgtcactgtgtagtggatggagtttactgtttgtggaataaaaacggctgtttccgtggttctttgcctcttgtccttgagtcctgggaagagctggggactggggattgtttgctgagtgcctgaacaggacctcctaccctatgcctgcaaccccctccacaaaaaacaaaaaaccctacctcctcccacctggccggaaatttcttctcctgatctgctccccctgtcctccccatccccatctgattgtgattcccagaactccccgggttgtttgggagtgtttctgaaagcataatccatggccatggaaatgaatcatcctacttcttgggggcattgagagtcagtccacatcagcaagggtagagtggagaggtgggagggctctgggtggtgggtctctaactgtagtgtgcatcagagtcactgggggcacttgtgaaaataatgtatgttcctggggtccagatcctactaattcagttggtctgggtgtggcccagactttgactttttagcaggcttctcaggagctcctgctgtgctctgtcctcagaccacccccaggctttgaagccaggctcattggattgaagcccgccccgcccacctcccttgctggttacataaccctggatttctgtaaaacaagcctttaggcggttgcctcccactgccctcatcttctgtcttttcctctggcacacttggcatcaactgtgtgttatttgcagttccccccacctcctaccccactcagttctcccatcatagtggtttggcctagaatgccctattccaccaaccatgcacacctctcaactgcctggttccctcataaaaccagatgaggctggccgggcacggtgtctcatgcctgtaatcccagcactttgggaagccaaggtgggcagatcacaaggtcaagagatcgagaccatcctggccaacatggtgaaaccccgtctctactaaaaatacaaaaaaaaattagctgggcatagtggcgcgcgcctgtagtcccagctactcggtaggctgaggcaggagaatcgcttgaacctgggaggcagaggttgcagtgagccaagattgcgccactgtactccagcctggtgacagagtgagactctgtctcaaacacacacacacacacacacaccccagatgagaagttgctgcctccgggaagtttcccttgacgtgtccgtgccccacgcctttgcttccagattgccttggacttaacacgtgttccttatcagctggctgctgtcctttgacttccaccagatggtgtgcttcctggaggcacaggttctgtctttcattaagacctgacccatctcaggacatgtaagtgctcaatcagcaaacgctaaatgtattaactgggtatgggctattctggcttgagatctgggatccaagatagggatgggcaaggggcactctggaagctccacatgtgtgagtgcagcagtcttaacacagtggtacaggtgtctctgtagccagcatagatgggctgtgtaggttccttgaagggttttaggagccctcagcacatgcgggtggtatgtgtgcatatgtaggaaggaaaggcggtgagctagtctagaccatgggcaaaggcaatttgttcaaggtgcttttacttgagtttacttcaaaagcagtaaaggagcagactgtaaatgagacaggaacgcaggtgagtggatacacaaagctaagtggtctgtgtagtgtgcctagtgtgggatggagcatgcatagcatggggtgtctgccaagtcagaagagcacagagctgtggcctggctctcttttatacccgcagccctgtcagtacctagaaacgacctccactaccatgccacatgtaacctacgctctggcaacacccacatatttctagatcagacctcctccctggatcttggattcatttacccaactgcctacttgctttctccatttggatgtctaaagacatctcaaattgaatatctccaaaaccgagcttctgatgtgctccaccccaccccaaacaggcccaaccatagtcacctcatctctgtaaaaggtaattcgtgtctttccaggcactcaggccaaatacctttgagtcatccttgtctctctctcatcctgtttgcaccctaccttcaaaataaatccagaatcccaccccttttcaccacctccactattatcagtgaggttttccctggccataccctatttcaaattgctatcctagcacgctacattcacctggggaactgaaaaaatcctgatgcccaggctttacccaaaccagttaaatcagaatttaatgtgggactcacagagtctccaagtgacaccaatgtgtagccaagcttaagaacttggtcttatttttaaagtagtatgaaaacttactgtctctcctaagcattctaacaatggatacttttcagaataagattgtgtaaaacagagaactcacttttaactttataacaatttatgtattgtttgtctttttaaaacaaaagtatatgttgagtttataataaaagtaaaaatttgggccgggcgtcgtggctcacaccactcccagcactttgggaagccgaggtgggtggatcatttgaggtcaggagttcgagaccagcctagccaacatggtgaaaccccgcttctactaaaaatacaaaaattagccaggcgtggtggcgggtgcctatagtcccagctactcgggaggctgaggcaggagaatcacttgaacccaggaagtggaggttgcagtgagccgagatcaggccactgcactccagcctgggcgacagagtgagactccatcttgaataataataataataaaataataatttgatgaagacttaattaaatcaaataggcatctgggaggtctggccccaggtcttcccccagactgaagggtgaccacaggtgagccctttcaatatctgggccttggactcccgctgaggtgaaagtgaccgggtagcctgttggagccagccctgtcccataggctatgggtctcagggtcctctttcccaatagcacttcagctcacttgaggtcttttctgagctggtcatgcccaccaggcagatggcaaggcagggcacagaagctgctgagctccatggtgccaagggctgagctccatgagccagggctgggaggctggaacttatacctgcagaaaaagaagagtccctgtttccacaggacaaaggaaatatcttgtttttgatttcttggaagaggaagcactctgggcaagaggtatgagccgggatgaagtggactccttgtctggaggtggtgctacacaccttggaggggctcctgggagctactgagaatgtcccctaagtcagtattcctgcctcagctgaaatgccagtcttcagcctcatctactgcacacttgagtccatgagattttagagtggtaagtgacctttggggtctcagttttcctatctgtaaagggagtgggctggacaatgaacagctgttctccattcttttgttattggttcccatccagagcctcccagctagttgtctcaacatcccaggggagaaagcatagctctttgtccattggtttatttattcaatttaggaataatgagtgtattgttttatatgaataaccatacttatttaaaagatcaaactaaactaaatagtacaaacaagcgaaatctctccccaaagtctactatggtgctgtgcaacagaaatataatacaagccacaaatcgaattttcaatttcctagtagcttttttaaaaagtaaaaagaggggccaggcacagtggctcagcctgtaatcccagcactttgggaggctgaggtgggcaggatcacctgagctcgggaagttgaggctaatagtgggctgagattgtgccactgcactccagcctgggtgacagggaaggagaccctgtctcaaaaaaaaaaaaaaaagaaaggaaaaacaggtaaaattaatttgatgatagtttatttgagtacagtatatatatcatttcaatatataattaatatgaaataaaaactaatgcaatattttacttttctttatattaagtctttgaaatctgatgtgtactttaaacatttatagcatataacaactaatattagccataactcatgtgctcaatagttgcatgtggtcagtggctaccatattggacattgatgctctaccatataaagcaactatcagtaacttcaggataacctcatcaacattttgttagattgattaacaaaaataattctacaaaaatgaagagtttatggatattgttttccctgaatttttgcatattttcttaatacctgaaggacaattttatggggtaatattttaaaaaataatttgactttttttttcctctttctaggctattgagatttatttatttatttatttatttaagatggagtctctgtcgcccaggctggagtgcagtggtgcaatcttggctcactgcaacctctgcctcctgggttcaagtgattctctcacctcagcctcccgagtagctgggatgacaggcacgcaccaccatgcctggctaatttttgtatttttagtagaggcggggtttcaccacgttaaccaggctggtctcaaactcctgacctcaagtgatttacccacctcagccaaccaaagtgctgacattataggtgtgagccaccgcacctggcccaggctattggtacttactatccccaacttttattctatgctagtaatttgatttgtagctctgacttgtttcttccttgagattttcaatttatttgcagtttttttagtggtgttacctagatcttcaatttatttctttaacactcatttttaagggtcttttaaatttttatttattttaaaatatttatttatttatttatttatttttagaaatgaaatcttgttatgttgtccagggtggtcttcaacacctagcctcaagcaatcctcccaccttggcctcccaaagcactgggattacaggtgtgaacactgaaccactgaacccagcctaatgtcttattttattaaagtttttgttttttaagctgaaagccctcctataaatttttccttttatcagattttctgctgaattcagttatctgtgtctgtttcttttctccagcgtcctttcctttttaattttcttctttttttcctttcttccctccctccctgctttattttctttcttccttataactgtatgtagtatggtgcatagctactctgtcatttcccttcatcttcgtcaggctcagtttgggcaactctgccctgtcctttcgcttattctaattggtgtcagtatattctctttggtttccttctcaccatatctgagatctattgttatttccatccctaccccccaaattgcagtctgaagtttgcctctatacacttctgtggagcctaaagtcatggggttgagggaagaaaggaatgctattggagatgtctcttgactatgatgggcagcctgggctctgctctctggagattttcttaaattcctggaaccacagttggcttcctctagtgacgtgttattccatttttgagaaagtttccctggagctttggatcagccaaccaattagaaatttgagccttggggaatggcaaaccttggtgggctttttatctctgtggagaccccaagagcttgggtgggacttgaattttctggggatgcatcttgactttttgcatgcagttctctaacactcctccccaaaactcatattaaaatttaatccctaatgtggcagtactgagaggtggggtctttaagaggtgattgggtcatgaatggattaatccattcacagataaatggattaatggattatcataggagtgggactggtgactttataagaggaaaacacatagtttagcatgctcagccccctcaccatgtgatgtcctgaactgcctcaggactctgcagagggtccccacaacaagaaggctttcaccaggtgcatccccttgaccttgggcttcccagcctacagaactgtaagaaataaatttggtttttaataaattacccagtttcaggtattctgttaagacacaggacaagaaggctactcagttgcaagcaagagccatttcttatggaaaaggaagtgtgagtcagagtggagccaagaacctctggcaacaggtgcacaattcaatttcagaattgccggggctcagtgattgctctgaacttccccttttaaaacggtagtgaacatagtggtttcctgtgccaatctcgccattgcaggttgggtgcatgtgaggcagaaaacatgtctctttagttcacaggttttcagatggagagaaactctacccacggaacagaacccaagacgcctctttgcagctggacttgatgtagataagctccagaaattggagctgagtttgatgtcaaaataggatgaggtgtttgtttgtttgtttgtttgtttgtttggttttaagacaaactcactctgtcacccaggctggagtgtagtggtgtgatcacggctcactgcagttttgactttccaggctcaagcaatcctcccacctcagccttttgagtagctgggactactacaggtttgtggcaccgtgattggctaattttttattttttatagagatagggtcttgctatgttgcccaggctggtctcgaactcctggatacaagtgttcctcccacctcagtctcccaaagtgctgggattacagtcatgaaccactgcatctggccaagattttttttttttttttttttttttttttttttagtgggaagtagggcagtgggggtaggtggggacgggtcttggaggaagttatattttacatataggaaaattttaactaatctgtctcagtttaaaaacatgtctgcaatttttctggcacttgtcccattgagaattggggtcaatcccctttttgaatctgggctgaccttgccgactccatcatgatcagtagaatgcagtggaagagatactgtgtgatttctgaggctaggtcaaaaaaggctgtccttccatcttgcactcttgggatgctggctctgggtgatgctgatgtccatgtgaaaagtctgactacccagaggccactgctgaaaagaacacatgcagtggacaccggccaacagttccagctgagtttagccttttagtttagcctttctgccaaggccctagacatgtgattgaagccatcctgggtcctccagcccagcccagcccagctgggtaccacagaatgacctcagacatggccacaaggagcaaaagaattccccaactaagccccgcctgaattccagacctacagaatccacgtgcatcagaaaagagttgttgttttgtgccactaagtatggatcctggtaggcaactcactggaacaactggtgagaattttcaggacttttgtattatttcctctttctcctgcacctcttctggaacagagcagttggggataggaccatgacgaaacacatcaagatattctatatttttctgttgctactgctttttgaagtttatggaatgaggttctactgtttcccatggtggtttactgctgctgatttttttttttttacctgttttttttttttctcctatccaattcaatagaaaccagagaatgaacattctattgtgaaactatcctgccatctgcactttactcagtgatatggtttggatttgtgttgccacccaaatctcatgtcaaattgtaatccccaatattggaggtggggcctggtgggagctggttggatcatgggggtggatttccccctttctgttctcctgatagtgagatctcatgatacttggttgtttaaaagtgtgtggcacctcccccctctctctttcgcccactcctgccatgtaagacatgtctgcttcccctttgccttccaccatgattgaaagtttcttgaggcctccccagctatgctacctgtacagctggcagaaccgtgagccaattaaacctcttctttataaattacccagtctcgggtagttgttttttttttgagacggagttttgctgttgttgcccaggctggagtgcaatggcgcgatctcagctcaccgcaacctccgcctcccgggttcaagcgattctcctgcctcaccctcccaagtagctgggattacaggcatgcaccaccaccctggctagttttgtatttttttttttagtagagacagggtttctccatgttggtcaggctgatcttgaactcccgacctcaggtgatccgcccgccccggtctcccaaagtgctgggattacaggcatgagccactgcacccggccattttttgtttgtttgttttgtttttttgtgtttttttttgagacacagtttcactcttgttgctcaggctgaagtgtaatggcgcgatctcagctcactgcaacctctaactcccgggctcaagtgattctcttgcttcagcctccagagtagctgggattacaggcatgtgccaccacacccagctaattttgtatttttagtagatgtggggtttttccatgttggtcaggctggtctcgaacacccgacctcaggtgatctgccctcctcggcctcccaaagcgctgagattacaggcgtgagccaccactcctggtgtcaggtagttctttatagcagtgggagaatggactaatacacccagaagtctatgttttaaatgaaaacttaattttaaatagtacaaaaatatttgtaaggttttttattttcttaatcataaaaagaacataagagattaaataggtgatattaaagaaagaaaaagaacgcccatgttcttacaacactaatacaatacctgtgaacattttgtttctctttcccctacatagcattattttttgtctgttgattgaattccctcccctcccaaagtttttttttttttttttgtattaagccaaaccacaaataagtatcatttatgttagatgccgtgctaggtgctgctgatacaactgagaatatgtcagatacagccccagccctttttgatttagagtctagctggtgaggtcatttaccaaataatgatgcataatcattccataaatacaaatgatggtgttatgaagataaaaagagggtgctcagaaagaactaagggggtacaatttattttattttagaaattcttttagattcagaaagtacgtgtgcaggtttgttgcacgggtgtattgcatgatgctgaggtttgggcttccaacgatcccgtcgcccaagcagtgaatatagtacccaacaggtagtttttcaacttttgctctcctccatccccccttctggaatccttagtgtttattgctcacatctttgtgtccttgtggggatgcaatttagattgaggctcagggacagcttctgtgagaaagtgacctttaggctgagcagaaggaggtggcaggaatgtggagggaagacaatccaggtgacgggaacagctccgaggtggggaagagctcccagtgatggaagaggcagctttgtggccagagctggtcagcatgggagagagtgacacaagggcctgaaagaggacccgtgtggccatggtaagcccattggtgatgaagccaggggcaccaggtggacctggtaaaggaggacagatttcacattcacaagaatcagaatctactgaacgcttttaggcgggtggagacacgatcagcttcattcacttccttcccccatacagtatttacttttcactgaggtgtgatataatgtatccagaaaaaagtgcagaaatgtataacccagtgaattttatagaacattaccagcatcctaaaagcaccccttccactcattcccctagagtaaccactatcttgacttccaactatttgcctgtttttgtactttccatgtaaacgcggtcatccagcaggtgctgttttctatctgggtttttaactcaacgctatgtttatgatgttcatccgttcattacatgtagttgtagatc

SEQ ID NO: 2769 - protein, 580 aa, Homo sapiens
MRGLLCWPVLLLLLQPWETQLQLTGPRCHTGPLDLVFVIDSSRSVRPFEFETMRQFLMGLLRGLNVGPNATRVGVIQYSSQVQSVFPLRAFSRREDMERAIRDLVPLAQGTMTGLAIQYAMNVAFSVAEGARPPEERVPRVAVIVTDGRPQDRVAEVAAQARARGIEIYAVGVQRADVGSLRAMASPPLDEHVFLVESFDLIQEFGLQFQSRLCAIDLCAEGTHGCEHHCVNSPGSYFCHCQVGFVLQQDQRSCRAIDYCSFGNHSCQHECVSTPGGPRCHCREGHDLQPDGRSCQVRDLCNGVDHGCEFQCVSEGLSYRCLCPEGRQLQADGKSCNRCREGHVDLVLLVDGSKSVRPQNFELVKRFVNQIVDFLDVSPEGTRVGLVQFSSRVRTEFPLGRYGTAAEVKQAVLAVEYMERGTMTGLALRHMVEHSFSEAQGARPRALNVPRVGLVFTDGRSQDDISVWAARAKEEGIVMYAVGVGKAVEAELREIASEPAELHVSYAPDFGTMTHLLENLRGSICPEEGISAGTELRSPCECESLVEFQGRTLGALESLTLMAQLTARLEDLENQLANQK

SEQ ID NO: 2770 - DNA, 280 bp, Homo sapiens
ttttttttgttctaggaattgtttatatgtctctggtgagacaagttctcaggacatagacctggggtagaatcacatccgtgatgggaatgtgggatcagctttgggcacagccttggcacgccatccttcatcctatgagtggactgtgtcatagttaaaaaataaatatctaaaactgatacagtatcatttctcaaatagaccaaggaaaatggaaaacaaaataattcagcttttcagaatatctgaaaagatgacattgatattgaacagggac

SEQ ID NO: 2771 - DNA, 1932 bp, Homo sapiens
caggcgccatcgtgactggcaaggggctggaccgcgagacggccggctggcacaacatcacagtgctggccatggaggcggacaatcatgcacagctatcccgggcatccctaaggatccgaatcctggatgtgaacgacaatcccccagaactggccacaccctacgaggcagctgtatgcgaggatgccaagccaggccagctcatccagaccatcagcgtggtggacagagacgagccccaaggcgggcaccgcttctatttccgcctggtgcctgaagctcccagcaaccctcatttctctctgcttgacatccaagacaacaccgctgcagtgcacacgcagcacgtgggcttcaaccggcaggagcaggacgtgttcttcctgcccatcctggtggtagacagtgggccgcccacactgagcagcacaggcacgctcaccatccgcatctgtggctgcgacagctccggcaccatccagtcctgcaacaccacggcctttgtcatggccgcctccctcagccccggcgccctcatcgccctcttggtctgcgttctcatcctggttgtgctggtgctgctgatcctcaccctcaggcgccaccacaagagccacctgagctcggacgaggatgaagacatgcgggacaacgtcatcaaatacaacgacgaaggcggcggcgagcaggacaccgaagcctacgacatgtcggcgctgcggagcctctacgacttcggcgagctcaagggcggcgacgggggcggcagcgcgggcgggggagcgggcgggggctcgggcgggggcgcgggcagccccccgcaggcccacctgccctccgagcgccactcgctgccgcaggggccgccgagccccgagccagacttctcagtgttcagggacttcatcagccgcaaggtggcactggcggacggggacctgtcggtgccgccctacgacgccttccagacctacgccttcgagggcgcggactcgccggccgcctcgctcagctccctgcacagcggctcgtcgggctccgagcaggacttcgcctatctcagcagctggggtccgcgcttccggcccctggccgcgctctacgccggccaccgcggggacgacgaggcccaggcctcctagcccctcgccctgccgtcggggcgcggctgctcacccgcccagcacacgccggggccccaggacaacgcgtttcccccgcggaccccctttcctgccctcccccaaccctcccttggcggctggacggaggggggacttgctaggagcggactcttccattcctcctcctctaggggtgcagctttggagcccagaggtgcgggattctgaccaacggcattaaaactgaggcgagaccgggcacggtgtggctctggggttagaatgggagatgggggtggcgttgcagagtcgggaaggggcgggtcactcaatcctggcctgggggagaatgctggagggagcacgccgctgagatgcccccaccccaggtttcccccatcagagttaagaggaaagaaggctgttcacttactaagcacctactgtgtgctgggacgctgtacagagaccagctcagtcgtcagagaaaccatgaggtggtgtcctgcacggaatagaaggggaaaggaccccagagaagtggctgtgacccgtccaagggcacctggccagtgaatggcagagcctctggcactgaccagctgcctggcctcgggcaagtcacttcacttctctggtcctcagtttcctcatctgtcaaatggggttaataacagaacctacctcgaagagttgtgaggctaaaaagggttcatatgtgtcaagtggttaggacagtgcctggcacatagtaggtgttcaataaatgctagcctttgttactattaaaaaaaaaaaaaaaaaa

SEQ ID NO: 2772 - protein, 380 aa, Homo sapiens
GAIVTGKGLDRETAGWHNITVLAMEADNHAQLSRASLRIRILDVNDNPPELATPYEAAVCEDAKPGQLIQTISVVDRDEPQGGHRFYFRLVPEAPSNPHFSLLDIQDNTAAVHTQHVGFNRQEQDVFFLPILVVDSGPPTLSSTGTLTIRICGCDSSGTIQSCNTTAFVMAASLSPGALIALLVCVLILVVLVLLILTLRRHHKSHLSSDEDEDMRDNVIKYNDEGGGEQDTEAYDMSALRSLYDFGELKGGDGGGSAGGGAGGGSGGGAGSPPQAHLPSERHSLPQGPPSPEPDFSVFRDFISRKVALADGDLSVPPYDAFQTYAFEGADSPAASLSSLHSGSSGSEQDFAYLSSWGPRFRPLAALYAGHRGDDEAQAS

SEQ ID NO: 2773 - DNA, 313 bp, Homo sapiens
ttttttttttttttttttttttgaggtttatgctcattttattataaaaaaatacagaatccaaagttgattgtgacgggaagagggaggcccggtcgccagctccaggcctggcaacgcggcccgccccgccgaccccctacaaaagccctctgcccaccccccaccaccgggcgtgcctcgagccgccggccggcggtacaacaatatatatttatatataatatatataaaacacagagtcaggaaaggcgggtagaaatatgaaatccgtataaatgtgttgtttccttcattaaagtgtcttcgggga

SEQ ID NO: 2774 - DNA, 613 bp, Homo sapiens
  misc_feature (501)..(501): n is a, c, g, or t
  misc_feature (503)..(503): n is a, c, g, or t
cagcacacacatgcacacacagcacacacgcatgcacagcacacatgaacacagcacacacacaaacacacagcacacacatgcacacacagcacacacacgcacacacagcacacacacgagcacacagcacacaaacgcacagcacacgcacacacatgcacacacagcacacacactagcacacagcacacacacaaagacacagcacacacatgcacacacagcacacacacgcgaacacagcacacacgaacacagcacacacagcacacacacaaacacagcacacacatgcacacagcacacgcacacacagcacacacatgaacacagcacacagcacacacatgcacacacagcacacacgcatgcacagcacacatgaacacagcacacacacaaacacacagcacacacatgcacacacagcacacacactcatgcgcagcacatacatgaacacagctcacagcacacaaacacgcagcacacatgttncncacgcaagcacccacctgctcacacacatgcggcacacacacgcacacccccacaaaattggatgaaaacaataagcatatcttaagcaactacgatatctgtatggatc

SEQ ID NO: 2775 - DNA, 358 bp, Homo sapiens
tgtctctgtaatttctttaattattcaaacaatagagcacaaagataacagtttcaagtacattgtgatacacgttttgacaggaatagatatgcatttagtcatgagggaggctggcagcaaccaccatgcatacattttgcacaaactcttggctccgtcaaccctgaatgagaagtcggcgcctcgtcctggcggggctgggctgcaccctcttgatgccctgtacctagtgtctctaagcagtggtttcctttccttgcctgtgaaaaagagaattttaaatataaagcagtggacgcatcttaagaagatggaccaggagggctggggacagcacccagcagcacggacactc

SEQ ID NO: 2776 - DNA, 1218 bp, Homo sapiens
ggtgctttgggctctccttccttctcagacaagatgtcttatcagaaaaagcagcccacccctcagcccccagtggactgcgtgaagacctctggcggcggtggcggtggcggcggcacgggcggtggtggctgcggcttcttcggcggcggcggctcagggggcggtagcagcggttctggctgtggctactccggcggcggtggctactctggcggcggctgcggcgggggctcctccggcggcgggggcgggggcggcattggaggctgcggagggggctccggtgggagcgtcaagtactccggcggcggcggctcctccggcgggggctctggctgtttctccagcggtgggggcggctccggctgcttctcctccggtggcggcggctcctccgggggaggctccggctgcttctccagcggtgggggcggctcctccgggggcggctccggctgcttctcctccggcggcggcggcttctcgggccaggcggtccagtgccagagctacggaggcgtctctagcggcggctcctccgggggcggctccggctgcttctccagcggcgggggcggcggctctgtctgcggctactctggcggcggctctggcggcggctctggctgcggcggaggctcctctggcggcagcggctccggctacgtctcctcgcagcaggtcactcagacctcgtgcgcgccccagccgagttacggaggggggtcgtccggcggcggcggcagcggcggaagcggctgcttctccagcggcgggggcggcgggagctccggctgcggcggcggctcctccgggattggcagcggctgcatcatcagtggcgggggctccgtctgcggaggtggttcctctggaggcggcggcggcggctcctccgtgggtggctccgggagtggcaagggcgtcccgatctgccaccagacccagcagaagcaggcgcctacctggccgtccaaatagatcccccagggtaccacggaggcgaaggagttggaggtgttttccaggggcaccgatgggcttagagctctcatgatgctacccgaggtttgcaaatccttcatgtcttaacctacctggaagaagccattgagctctccggctgcatctagttctgctgtttagcctctttggtttctgtacaactacctcccaaccccagtgcctcagtcaataaatttgcaaattcatgag

SEQ ID NO: 2777 - protein, 316 aa, Homo sapiens
MSYQKKQPTPQPPVDCVKTSGGGGGGGGTGGGGCGFFGGGGSGGGSSGSGCGYSGGGGYSGGGCGGGSSGGGGGGGIGGCGGGSGGSVKYSGGGGSSGGGSGCFSSGGGGSGCFSSGGGGSSGGGSGCFSSGGGGSSGGGSGCFSSGGGGFSGQAVQCQSYGGVSSGGSSGGGSGCFSSGGGGGSVCGYSGGGSGGGSGCGGGSSGGSGSGYVSSQQVTQTSCAPQPSYGGGSSGGGGSGGSGCFSSGGGGGSSGCGGGSSGIGSGCIISGGGSVCGGGSSGGGGGGSSVGGSGSGKGVPICHQTQQKQAPTWPSK

SEQ ID NO: 2778 - DNA, 668 bp, Homo sapiens
  misc_feature (57)..(57): n is a, c, g, or t
gttgttcactggctgtccggggctccgcgcgcgtcgccggcccagctctgtcgctgnaggggggatctgaagccggccgcaggtcaaagagtaaaatgaagtacattctggttactggtggtgttatatcaggaattggaaaaggaatcatgccagcagtgtgggcacaatactcaagtcatgtggtttacatgtaacttcagtgaaaatgacccctacattaacattgatgcaggaacattctctccttatgagcatggtgaggtttttgtgctggatgatggtggggaagtagaccttgacctgggtaactatgagcggttccttgacatccgcctcaccaaggacaataatctgaccactggaaagatataccagtatgtcattaacaaggaaccggaaaggagattacttggggaaaactgtccaagttgtccctcatatcacagatgcaatccaggagtgggtgatgagacaggcgttaatacctgtagatgaagatggctggaacctcaagtgtgtgttattgagcttggtggaaccgtgggggacatagaaagcatgccctttattgagggcttccgtcagttccaacttcaaggtcaaaagagagacttttgtaacatccagtcagtctagttcccaagcaagtccacgggggaccgaag

SEQ ID NO: 2779 - DNA, 479 bp, Homo sapiens
tacggaatctagcgacatcgatagcaggtatctcaaaatgagcactgatgacatttggactcaataatatctttgttgtagaaagttataagatatatatattttaaactatgctactcctcatttatttaggcaacctcatatgcatagagagtgcaaagttaaactgcagccacactggaatttccataattgcccaagaaatcgagtttaatgcagaggctcacacagaaccatatttacacaaagaacagacaagataattgcagtaatgactgggaagaaagaatacgcccatgtggtacaaagtgcaggggtgatgatctgaattacaaaactgtgctatagatcaaaatagagctaatacccaaacaaagaaatagacattattcttttcagcatgaggcagcatttagctccaagctagaagcagaaaaacatgccagacagagaaaaacaggaactagtaaagactaaga

SEQ ID NO: 2780 - DNA, 778 bp, Homo sapiens
  misc_feature (722)..(722): n is a, c, g, or t
aagcttgcggccgctcatttatttatttatttgtttatttttgagatcgtgccactgcagtccagcctggtgacagcgagactctgtctcaaaaaaaaaaaaaaaaaaaattcaaaactataggaaagttgaaagaatactaaagtcatttaatatccacatacccttcatctagattgtatctgttgttaacattttgccacatttgatttatttatgagtatatattttatttttgtgctgaacaatttgaaagtttgctttattcctcatttataaactctcttgcatgtatctcctaagaacgaagacattttctggtataaccaccatacacttatgaggaatattaaaatacaaatacaatactatctccccagttgacctcaataatgtcctttataatttgtcctgtccccaccctgattccatagctagatgtcatagttcttcagtctccttcaatttggaatagtcccctagcctttctccctaccttctgtgacatttttcccccagtataggcctgtagttttgcagaatgtatctcaattaggacatctgtgatgatttcctcttgattagcttcaggttaaacatttttggcagggattctaatgagtgatgtgttttttacgtactacatcacagacgaaaggtaatgttaggtttgatcactccgttaagatgctgttcacaatatttctccattgtaactactntttttcccttttatataaatcagcatataattcttatgctaatacatgaagctgag

SEQ ID NO: 2781 - DNA, 547 bp, Homo sapiens
tgagcggtagcaagctttattgtgaagagcaaaatgacaaagctcccacagcgtagaaggggacccgagcgggttgcccatcactggtcctttctgggggttccttccccaagtttcatagggatttacaggctagagcttttgtccgctattcagtagcaggtcacaataccttcaatcctgctctaatcagaggcatctctgccataacttcaggaggaattgagggagagggggcagcaggagccctctgtgtactggggaaggaaagaattcctggcttatactccctaaagacaggactacactcagatgtggatgaagggcaggaattctaacccctgcccctcaacacacacatccctgctacattccctctttctcactagaaatttgagatgaagggtcctaatcacatcttctgcttgaaacagcagagatttcaggctccacccatagtcaatagaaagaaaggggcaaggggactgtgaagtcctgaatgcccagctctgcgcaggaagacaggcagagccagctgcaaggctgg

SEQ ID NO: 2782 - DNA, 533 bp, Homo sapiens
  misc_feature (461)..(461): n is a, c, g, or t
gtcctgctcagtcgtcagggcccggccaatccggagggcgctcggcgcgtggtcgggggccaggagcgcgtctggcctgcagtgcgcagaggacgcggcgggagcatgttccggctcctgagctggagcctgggccgaggcttcctgcgggccgcggggcggcggtgccggggctgctccgcgcgcctgctcccggggctggcaggagggttcggggcccgaggtgcaggtgccgccatcccgagtcgcgccgcacggccggggcccaggcctgctgccgctgctggcagcgctcgcctggttctcgaggcccgctgcggcagaggaggaggagcagcagggagccgacggggccgctgccgaggacggggcggacgaggccgaggcagagatcatccagctgctgaagcgagccaagttgagcattatgaaagatgagccagaagaggctgagttaattntgcatgacgctcttcgtctcgcctatcagactgataacaagaaggccatcacttacacttatgatttgatgg

SEQ ID NO: 2783 - DNA, 470 bp, Homo sapiens
ttttattcaggtcccgcctcggagcaggcggagtaaagggacttgagcgagccagttgccggattattctatttcccctccctctctcccgccccgtatctcttttcacccttctcccaccctcgctcgcgtagccatggcggagccgtcggcggccactcagtcccattccatctcctcgtcgtccttcggagccgagccgtccgcgcccggcggcggcgggagcccaggagcctgccccgccctggggacgaagagctgcagctcctcctgtgcggtgcacgatctgattttctggagagatgtgaagaagactgggtttgtctttggcaccacgctgatcatgctgctttccctggcagctttcagtgtcatcagtgtggtttcttacctcatcctggctcttctctctgtcaccatcagcttcaggatctacaagtccgtcatccaagctgtacagaagtcagaag

SEQ ID NO: 2784 - DNA, 83709 bp, Homo sapiens
gatctcagctcactgctacaacctccacctcccagggtcaagtgattatcctgccttaccctccacctgtatcctgggattacaggtgcctgccactacatccggctaatttttgtatttttagtaaagactgggtttcaccatgttagttaggctagtcatgaacatctcttggttttctttgtgctttactgagctggaaagaaatgctggattttgtttaatattagtagaaaaaaatttagatgcttatctttttagattaatccataaggaaatgggagatgaggccaggtgtggtggctcatgcctgtaatcccagcactttgggaggccaaggcgggtggatcacttgaggtcaggagttcaggaccagcctggctgacacggtgaaaccccatctctactaaaaatacaaaagattagccagatgtggtggctggcgcctgtaatcccagttactcaggaggctgaggtgggagaattgcttgaatctgggaggtggaggttgcagtgaactgaaatctggccactgcactccagcccgggcgacagagcaagactctgtctcaaaaaaaaaaaaaaaaaaaaaaaaaagaaagaaaagaaaagaaatggtgggagatgagtttgaaaacttgctctttgacatatgtatttgttggcttaggcagagaaaaatactgatcagattttcaattattggaattactctttttaaagtggagaactgaaaaacttttcatgacaatgcctgaaacataggttaaaatgactaattattgttttgcctaatggtaaactggttctcaaagttggcttattcagccaagatattttaagggtaacttctctgtgaaagtgaaattgtgaaagctttcattggtgaattacatttcacttttaattctgtgcaataagattgcaacagaattaaagtgtgagagctgtgaagagttttattgacaataaaattttgaacacttaattcaactacataaaattaaagtctaggtaatttgttatttttcctccttcaaaaaggcccttcaactattgttttcctaagacaatggaagagacagccttatgatatttcacatgatgcaagtcctttgaccttttgttattaatttaattaataataaaattaattttaagcctcttaaatatttatttaacaggattaaaatctttaattcttctttaattctgttaaataagagaatttctaccagcggtcatctgaaatattacagtatgctatctctttagtagtattctggtcatcttgtcttagtgattgtattataaaattttcaaaacaacaagaaaacagttcaatttgtatgcacatttttcagtggattcagattctcaaaatatgctgacaccagaacagaaattactgtaccatatatattcaggtcagctcaagtttttgaaataagtaaatttagtgcagcaaaaattaggcatgtgcagcaaaaagtctgcactcttaatccagctgtgactaaacgaggagtcagagaagaaaaactttttttttttttgctgataacaagtaattaaaatatttacaaatttaatgaattcactgttctcctaagcagcctgaggtgatctatgaaaacggtttgctattcacttgacccagaaaactccacaaaatcatgccaaccaacaggttcaaatctttgtgttcattttaagaacactcgtgagtctgcccaggccatcaagggtatgcacatacaaaaagccactaaatatgtcactttatagaaacagtgttcactattctaatgttacaagggtggagttgataagtgtgtccaggacaaacagtggggttggacacagggtcagtggtccaaaaagagtgctgaatttttgctgcatgtgcttaaaaatgcagaattatgctgagtgaacttaaggttgtagacagagattctctggtcatcgagcatatccaggtgaacaaagcactcaggatgcgccgctggacttacagagctcatggtctgattaaatccataccttaactcccctgccacactgagataatccttacacaaaagaaacagattgttcctaaaccggaagaggtggatccaccggagaaaaagagatcccagaagaaactgaagaaacaaaaacttatggtgtgagaataataaaataaaatacatgcaaacaaaagttaaaaaaaaaatcttgttaattctttttttgttttttgagacacagtttcattctgcctcccaggctggagtgcagtggcgtgatctcggctcacagcaacctccatctcctgggttcaagtgattctcatgcctcaaccttccgagtagctgggattacaggtgtgtgccaccacacttgactaatttttgtatttttagtagagacagggtttctccattgtggccaggctggtcccgaactcccgacctcaactgatccgtccgcctctgccttccaaagtgctcagattacaggcgtgagccaccgtgcccggctgaaatcttaatttattcaacgtaatctctgctggcatttttctaagtgcttggcataatcagtgaatgaagcagatagaatcctggtttgtttataaacattttcaagttaaaacccttcaaagttaaagaattttctcttaacaatgggcttctttagatactgtcagggacctttgaaggactatttcttttctctccaattagagaaaacttactggaaacagtcaagaaacactgatttagatgctctttaatttctctaaggacctaggtagttaatctgagaatcagaaggctcttaggatgagtgtgaaagaagtcagttgatagaattgggtgacctccagggatatctgtctggcacagatccatctggaggcatctcctgttcccacaacagaaggaagtagccctgtggcagaaagtttctgttctcggagcctggcctttctcactggacagtagtgggtcaacactggatattcttgctcttggggtcccttttcctgcgctccatgcagcccatcaccccaccgtagatggagctcaggactggtccattcagtttcactgcctttgcttatactcacgtggcatttctttctccatgagactgtatttattcttaccaatgcagtacaggtgttccctatgctcatctacttcatatttatatagacaattttaagtaattttataagttataaaaatggtcctactctttaattatgtgcctatttttgattttaattgaagaaaaatatatttcctaatttctgttcttattgtcaattatatgaaagtatagatggtttattttatttattacattaacaggtaaagttttaggttctagggatagagtcacaagaaaatgacaataaatggaaagtggagagaaaagagaggctcagtccgcacctcatcatctttgtgtctttttcagtttctcacagtgaggtcttctgatggtttcctataatttttttttttctgaaaatatcccagatgagggctcaagctgcatggagcctccatttatttcagcttagtggtgattactgtcctagttgcctgcaaatgggtcctcatttgccactgtagtctttttaggttccaactttagtaaagatgtgatgtgctggtaaagacctctcaattcctatttccaatgggcctgcctccctacctcaggctgtatctcttaactttcctacatgctggtccccaggactgggattcttgatctcagatcttgcatttgccaacttttttttcccccctggacactttattctaccctggcccagagtcaggtctctgctgttttaggaagagatctccttgaggatggactgcctatctgacctgtgagcactgtccaccctggagtcctcgatgtagtgcttttcccagcccctggatctgtctggaaagcctagatgcttgcttttgctaagtagaatacctcataaattcacttagctctggctctgtgggctacatggccaccatctttaactaggtggcatgccaggtctcagtatctctctccttacctctgcttttctaggaagaatctttattcccaatcatttacctcctgagttttcacagatggagacttttgccccctattactcctacatgtagcttcctctaaagaatattgtgggtgcttctctggctttcattgcaaatgaactattttactacagatatcattaactcaaaaaaccctttactgggttaattttaaacagaaaattttaagaaaatattcaaataaacaaatatataattcaggttagacaatttggtgttgagactggtcagcattatgtaagaaaaaatctgcagatcccaaatagctggattaaatttgtttaatgattcttataaaattgccatgagtaagtaattgaaaaataaagcttcaaaaataaactggcagcagagcacaattgcagtcacattgcttaacaacagggatatgatctgagaaacgtgttctcaggtgatttcatcactgagcgaacatcacagagtgtaattatataaatctagatggtaggcttgaaagtatgatctattgctcctaggctacaaacctgtacagcatgttactgtactgaatactaaaggcaattgtaacacaatgatatctgtatatgtaaacatagaaaaagtatagcaaaaatattgtattataatcttatcatcatatatgtgcattgaactggtttgtgcagcatgtgactgtaattttgagtgaggtttatattggaaattactgtatgcttgctatggtttgaatacgtacctccaaaattcatgttgaaacttaatcttcaatattaagaggtagggcctttaggaggtgattggattatgaaggcttctctttcatgaatgggatttaaggcccttataaaagaagcatcacatagcattcagctgcttcttgctattctgctgtttctccattgttggccccttctgccatataaagacacagcaataaggcaccaccttgaaagcacacagcagccctcaccagacaccgaatctgcttgcagcttgatcttggacttcccagcctccagaactgtagagaaataaatttctgttctttataaataacccagtctcaagtgtgttttgttatagcagcacaaatgagccaagataatacttcaagcaaactgcttttatttattctggagtatatgtaacttatgaagtgtgaaactattctgattcttttgaagattgaggtcaggattcagttgacgctagagatgaatactgattggctatttattggttttacttcaacatcatgtcctacatacaaaatttatataaaatcagagcataggcattaaaagtggaaatattttgttaaagccttgttcacaacttcttgaatttcataaaaccatttaagtcaggggtgatgacttttgatgatcattgaaagagggaatcaacagaaactcccaatgagagcaagataaacaatttgtgtcatgtataaaatgaacaaaacaaaaatgaaaaagagctgttcaatctttttttttttttgtcttctcttccttgggaaaagaaggctggaaaaatagcctgagctaggagtctgaagagccatctatttaactatcatcttcaaaaatatttattctaaatattatcttgactacttaatttttccttcttacttagaaatcacaatgcctgccttgtagtttgttgtaagaagcagacaagtcgtggaatatgaatttgctttgcaaacaataaggtcatagatgcacatgggacatttatacaggagagcagatcatgagtgagcccaggcttggattctgtccctgcaatcttggcagccatgcagacctctttgaatctcaggtttcccacctctaaatgaacttgttctgagttcataggtccctcaaaatctaaaccgttacctactttctagatttctccatagcttcatataaacagatttttttcctaagaatttgttaatttaacctattggattaatactatcattgaaatgtgtatcagattttaagtatcatgattttattcccaataaaacaaaaaattattttctatgatgaatatgcatacaataaaaatgacgagaaatcatttttggtacttgtctgaagaactcatccccaatttttgccttttttgctttgcaaagcacattttcttgtaggaacatattttcagggtgagatgaacaagtcatagttataagttcttttttttttttttttttgagacagagtctcactctgtcacccaggctggagtgcagtggcgcgatctctgctcactgcaagctctgcctcccgggttcatgccattctcctgcctcagcctcccgagcagctgggactacaggtgaccaccacaatgcctggctaattttttgtatttttagcagagagggggtttcaccgtgatgaaaccaggatggtctccatctcctgacctcgtgatccccccaccttggcctcccaaagtgctgggattacaggcaagagccaccgcgcccaccagttctaagttccgatacatgtacttgctacttaagaaaaacatgccgaatttaaagcaaatagtactgtaataaaaaaatctgattttcctgaaaatggtttaattttatgatgtaaatgcaaatcttagaagtaaaaacttttttcaaagaagacttttatcagactcaattagcagttaaatgggtagagagaggatgtcagtgtacgagaagccatatggagttttgggtggccaggagcaggaagtcaggcaggtttggcttcagttgtactacctagagatattttggaagaagctagagtgaactgtgtacatatatgagtttagatttcataagacacttagctttactggagttcactgcagaaaatgagggaaagaaaaatgttctcgatgtatacaaatgccacagacagttgtttttacacctactttatttgatagcttctaatggctgaaggagatttcaatatcaagtagttgtttgtcacaaatgtgcctaaaaataactttaaagatctttgtagggaagcagaaactcttaagtccagatgttttctcaggataactaaacctggtaaaatcacctatatagaagtaaataatattttatggccacatctgcaaaatgaaatatgatcatcttcattgtcgatataaaaacaaatgaaagttatgggtaatttttgataaaatgaattatacaaagcatcatttatatttttatatttggctttgggacataaggcaatatggagaacttatgtgacactgacacaaacacacacacacacacacacacacaaactcaagtactcctctctgcctcatccttattcctttctgagatcagcccataatatcagtaatcctctgctgaactaaaataatatttttgctccaaaagtctgctagggaaaacatctattaatatatgtttttaaatcaaatatttccagaaatgcttacaagtccctttaaatctagcaatgatagcataataaagggcatattctagggaagaaaatgcccacctaaagtagaaatttaccagttaaaaatcacaaaacatcaaaaactattttcaaggattatttccatttacctaataggtttttccatttaaaagttataaaatatttaaaaagagaaaacagaacattcaaataaccttagtttttcagttttacaatcaaggagttggactagatgctattttttttttctcagctctaactataattttagtcaacataagaagacgttaaaatgtgtcccactggttcattcaactgttaatagaaaaaagtggcttaaaattgtgaagtctgaaagtatagccattctaatttacagataacaaaggcaagtcctaggaagaaaagtgaccacccaagggcatccatccattcagagatcaagcaatgtcactgttttcaaatctgcctgatcatcaatattttgctttgttttgttttgttttattaatggttctggagtcccagtccctacccctggaaattttgctttagtaatatggggtgagatcagaaatttcattttttaaagagatcctcaatattctaaggaaccacagatcataccagactacttgggatacactggtggagaggaacagataggttgcacagtccttgggcaggctctccattgtcacacaacagcattttcctaacaggtccgtcattttatgacccagggttcctctttcctggtgttttctcccctctagctggaaagcatattatgagagtgatattacttggtgtctagtttacttttctttgatagcttcctgtggaaaaggatcttcctgaaggaaataagaattaaaagagtagatgtatagaccttagttaccatccaatacaaatcactctagacctttaattccacttaactaccgaaactgtccttacagtaaagtatgaatctagacatcaccatgctacagtcttgagcctttcaaggaagtctgcaatttgaaaattattttctttacctcaggtcatggggtacaatgaagtgaatttctctaaatggttcaaatacatcataaggagatggctcttggaatacatttggcataagaatttcttagtaaaagaaaagcttaaatagagttaatatctaataacataacataattggttttatatagtgacagtagagagcaaagttccttctaaaatcttccatttagaattccaagcccctcgacattcatatttctgtcagttttcaatatagattttatgtgttcactgtatgcaaactgtagccaaaatacacatttctattcctgatgctactgtggatgtcaaggtttagtttaagccttttttcggtagcaaactgtgagaagtataatttcagctttcaaagaaatattattcctgatcttccttgttagtaaaaaagtaacttagtttgttatctattaattttaaggaaaagattagaaaaaggaaaaaaataataaatgacttacctctaagtatgtatgactccatgttaaagcagctaaactaaaagcttaccacaacttaaagaaaaactaaaattcaacatcattcagtttctttttgcatcccatttaggaaatgtttgttgctgaggctgacaaaataaattcatcatttaatcatgtcatttataatgcagtctcatgatactgtctctgaggatcaaatattcagttaaagccatactagactaccaaataatatataaaacatttatgaacattttatgcttgctttacaaggctgatctattaaacttgtgacatttttatttaaaaagaataaacaagaatatcaatggtattattttatccttatatgggttaagaaattatttatgagttgtctttagaaatctaccaatgttagatgtgtgcataattcttctttttcattgtagctgggggccaaggaagtggtcaattaatatttgtactgcaaatgccttaagtggatacctattaaaaggtatacaaaatataaacagtactgcatattttcaaaacttttaaataaacacaaagaatatataggtatacatgttataatttcaaagtcaacactagcacataagtttttcatatctaaatacatactaggatacttcctatttcaacacatgcacctacaaacacatggccatgcacataaccttactttctgccacttgcaacaaagaatatacaatattgtacattgtttcaacttatattgtattggaaaactaatgaggatggcattaaaaaattctgatctaagaaatcaaaatgcaggaagataattattccttagattaaaaacactgaagactgatggaaagttaagattcaaattgcttgtcggaagagaacaggtccgcctgtaaacactcagaatgctctgtttgacaagtgggactagaacttctgtaatatagcaatccaggccaaagacttaaaccatcaatgcttcggatcgcagagaaatggtatagttgtgggtagttctccgcaaggcagggggtgcagatggagatctggatgcccatctggaggggagacgacgatttgctggtctagcaggtcgggaaaatccttttccatgtgaggcgttcactgacatggattcctaggacacaagtaaaaacattcctctcactctctgggtaccaacaataggcttaatatatgatgggtctcaactataagattagtccgttagtaaatttacaagaaagaaaaagcattgaaaactaaagaaggtagttgtctaatatttgtggttttgaatgttttaaagcaattcaattttaatatggaatatgatatttgataattttgtacctttccttacactgacaaattttaatacagttaatctctctgtagaactaatgatgagctcaggatttaaaatttcaagttaaataacttgaatatcatggaaatacagatgtttcttagtgcgctgttagtatgttacagtgttatttaaaaataaaaagataatttatagaagaaactgttcatttatgtcaaattcattgacacttttagaggtgatacgcaaaaggcacacaaaccaaatgattaatctgatgcttttttttttcactatcactggcactatctatcaaaaccttaaaattatcattaaaatacttttaaatacatcttcattctaattactaatacaaaattgctatctcttgggcatgttctgatgagagaaaaccttttccttcacttttcttctctttcttttattttcttccttctttccttttattttaatggaaaaaaagcattccttggtccttaaaattaaaacaaaagtacaaagcttccatgacacactttatacacttggttcttattgacccttcttagaccccacaaagcctgtgctctttcatctgagctaggcagtgaggatggcctcctatttctactattttagccatggtctgacagtaaactgcagtttctttttctttttggagacttattttctagatttgttcccacaggaggaagaacaaaaaacaaaaacaaaaactgctcctgaggatctatagtagagaacctccctgccaaactcccaatgaatgcaaaaagggaaatcactcagtattatttcttgttagttaacaagaattttgtttggttattgtacagatatatctatttcccatctttagctataggaccttgtgggcattgatgggctcaattaaaaagcagagaaatacaaaagcaggatactttctgcaccttataaaaacaggcaagatttctcataagatggatgaaaactgatatttttgcagggtttgaaatccacatagtagttttttacaccagaaggaagcaacttgcataatagtttaaaaccatgctgcgtactcactgcattctatgaaactaggagttctgaagtattggttaataacaacaatatgtcaccttgtaatttttgttagcttcttaaaaattatatgagtaaaagagagtgttgtataactcttctttgtaaataccaatttctttgacctctttttctcttataactaatgaagattaaactctttcataaatagacaggaacaaaaaaagataacagtttacttaaaatgtccatttgagtggggtttttttggtcaatttctatgctaagaatacatacaaataagaataaccttatttatatatactatcttttagttccacagataaaaggactctattaggcactgttttaaatgatgtgtatttcccatattcatattaatgtgattaatcctatgagaaagaacatgagtcaaatgctgagaatgactgaaccaatcatagttaataactgaaaaatgaaaacgattttaaaaatattttccatacacttaaaaaagaacctttaaaataatgaaattctataaattgagtaatgtccattctgagtattttttcaagaaagagcaaacatttgatcttcttcaggttcctaaatccacttactgtatttatgttatcccatttcagaatttttcaaaagttacaatgtactattctcagtgttaaaaactacaccttcaaggttcatgttgagttatatttatttacaaacagggtcaagaggctaagaagagtccaaaacttgtgccctcattctatttatatgaattggacatataaacatgattcagagccattgctaatatggatgctaccaaattatgttatatttgctttctcacctctgttatctttttcggatctattccttgcttcacttcctgtcccccccacacagctgtcttttgctgaaactgttgttccatttggagcatttctaaatgctgacttaatgtggcaccaccactgacatcagaattacatttggtccaattatcctggaagcacttagaattttgcaatgcagactctgttgctgtctcataggttttcagcagcttttccacaacaccataatttgacctgggatcagctgacctcggacggccagacaaattactcggtctccagtcatgctcgtggagcatatttcgataactgcgaggacttaggtgtccctgcatttgtcttactaggcctgttgtggatttcttggtgggattatcaggcacattttccatgggcacaggcatgtgggcattggttttccaaataccggacacatcgttactttgtgatatgctacctgtgtgagtagatgaggtatcacagggcttgagatcctccgatgattttgagcagctgtgattttgctgtattgcctgacaatttctatctgttctaaatacagttctgttaaattcatcagtctttgctgccagcttctcattccttgtagtcctttcaaagccacaactgaaatttctaagtgggctactgctctctgctactgaggagctacagtcattacttacatgaagatcaggatgagatttagcagggtgatctgggatcaccatttcatattttggattactgggggtagagcaggttttctgaaaccacgaagtagaggggctcctttttgcacctatcccaatgtcacatgaccacatgctaagtccaacatcttcattacttggaggcttgctatctattttgacttctggtaccaaagaggaaaagatgataccatctttcgaagttttcccttcatttggatacaacatagacatctcttgttgtctcaaagggaagtgagggttgtaattccttttacttcgaccctcatggggcacccagctgttgtggtctaacctttccttccatctttcataggcttgttcagaatccgagctgggaaaatttcgagaggtgcttcttggaggaggaactggtggagtttcatttctttttaaatcgattgtatcaattccacattttttcgtagaattgctctggagcacattggtacagctcagattcttcctgtttttctgtttttctttttctaaactgattggaagaatgcactggtcattgttgatcatggggtccccatgaggtatattagttacatttggcatttcctggagaaaagaatctgacttcatcctaaacaatgataaaacatggtgtattggttataactttatttagaataagctctcaaaagcaaacatagctaaagcaatgagtttctgctataagaaaaggattcacaactgcctcatacatcatttttacataaatctcccagtcaaaaacttcaagtccttttatggtggaatgaagtctacctctcagtgttatattcaatgctctacacactctgactcaaactctttccaaacttgtctctcattttcactattacctgagacttcacctaccctcagattaaactatgtagtctcctgggtttctgctactggcatttctctctctgtagcttttatcttgccattcccttaccttctctctgcctgctgaattcttattcattatgtaatgtgagctcaagttcttctccttgaatttgaaataacattttaagtagtcagatacaaatctgaataaaagtgcaatgagatatgagtaattccaaatggaaagtgtcatttggtcttgaaaaaaagtaaaaattttttggatgacttgagtaaaaggcatataggattgaagtaaaaggcaaaaggattaaatactatggctactcgaaggaaaatgagtactttgatatggattaattataaagcagagtggggaggataatgaaaaatgagagagaaacattaggttatgtcaaattgtaatgtctttgaattacaaatatcttgaaccttgttctaaagtccatggggtgacaataagaacattatattaggtgtgatttgtaaaagaaaattggcaagtaagtcttttctgagttatattaaataaaaaactaaatatcgcaattcaaacttaatcacactgataaatataaatcatatttatacctcttcaaattataaaagattatgggatagcttacaataaaatgtggataaatacctattaacagagaatagaaaagctaaataggcaaatagaggacaaagttatgtttaaaacatgattggctaagaaaatctattgcaagtcagcacaaaaattctttctgagcttcctaacaactaatgaaaaataagggaatgtaggaagcctactgacccacgaggagagataaatgttgatcctagaataatccatctttactaaacttgtagagaattccaatatatttgttaatttggctaaaacttactgttattaagtatatactgtttccaaatggaaacagcattttttgtggcacgcgtacatgtgtacatatttacaatatgttgttctgaaaagtatgtaggcctccattacataaacacgaattgaagcaaaataaagtgctcttaagcattaaatattttagtagaacatgattatataagcaaaacgccacactgttaattctgacatcgtttaatgatacgtttaactgaattagcccagttgtacactttcattgtccaaatgctcagaatgagaaagaactactttagaggttacttactgattttttatggagggtctaccttaattagacacgaaaaagagtaaagtattactaatagattacaaagagaattggaagatttgctttaagaattagtgaacagagaaatatacaattacagtttctggcctggcgtggtggctcacgcctgtaatcccagcactttgggaggctgaggcagggggattatttgaggtcaggagttcgagaccatgctggccaacatggtgaaatcccgtctctactaaaaatacaaaaaaactagctgggcgtggtggtgtgtgcctgtagtcccagctacttgggagactgaggtaggagaatcgcttgaacctgggaggcagaggctgcagtgagccaagatcatgccactgctttccagccttggagacagagcaagataacatctcaaaaacaaacgagcaaacaaaaaattaaagtttctatctcccaccctagatagtacattttaataactcattagttcttacatgtaaggaggaggcagtttggagtcattaactaaaaacaatattattttttatttacccatctaaaataatcagatgtaccagcctaccttctatggttagaccgctttcgaatttcctcttgaaagctgcataattcttcactcaccttcgcaagttcttcaagagcctttacacatataagcaacagcccgttagcactttgaaatgtaaatatttctttagaaacagttctaggccaatcacatcttacttactgtactgagggcgccagaacagctcttgctgtcttcctcagaagtcctcaggtcaggccaggcctcacattccttttggttgtctgtagccaaaggatccaaaaaccctacttttgatttttttgttgctttttgttccttacacatttgatttcctccactgactaagctctgctctcttttattttcttttctcagaccatctttgtgattcgtccttataaattcactttgtcctaaatcggggtaatttggggaagattctatcactttctctggaatggtcttctcatggtaaagatcaatgatcttagcactttcattgatattgattttcctccaaagctttacttcccggcaaagctgtaagaaaaacaaaacaaaattaaaacttcttttcccctaattcactttgctaatattcttgatactaagcaaaccgctttgagttctctttgccatattaaaatatacttcctgggtattaatgcttcggcctccaaatagtgcctctaaaatatggattagctggaacaagtttgatgaaacataaaggctacttttagtagggcaacacatggatgctaattcttttgactagcaatcaatcattcaaaaataaaataaatctgtatctgtatataaatacagaaacactgtcacaaaattagaatgacctgaatcaattactggccatattatataattgctttcagagagatgcaagaatttaacattaaagtcatagttttcaaatgtctggtcctacttgtacactaacatttaactgtctaaatgcttgacaatctcagatagtaagtcaacttattcttgttccctaaacagtcacttgtcagtcaaaagatgtttcctttggttggtcaattacattgtgagggctagatattactgagatttttaaaaaatctcaaagtgatacacatttttaaaatatttctcatccagattaaaacaaatatgacaataccctacgtgatataatagaactgcaaggctttgatcatctattagtctgtattaaggtagaatccagattacttctttatgagatcttagttgaacctgcacacactcattcagttcacttctgaatagaggaaagaaatggctttctctttaggcttgggtcatgtaaaagcttgtcaaacttcaaaagagactgtcagatgactatcaaagcaaatgactctatgtttaacagccgcaatcaatatctacactacatgtattattcaagtaatataatagatttattgctgcttaatacataccgataactcagttgagagaagcactagagttgatgcctgaaaaatatacagtgtatttatttttctaatgcttacaaatgtattagtatttattgtatgaagtcaggatagcatcaaactgcagccatgaattgattgtttggtccctgccaaattatttgtactgaacttctgcgggcattatggtttgagctgaccttgagggatataagaaggaaccctaaaaagtgacatgttaaatctaaggatgctcttggtgacactgtcctgtttttgcgaagtcatgagtgaaaacaaaattgctttagttgcaaaaccgggaaaaatgtgctattcctgggaaataagtttgccttatcatttgaatttgaaggtatatgcacctgataatttttgttagttactagaaagactcactggtacatttcatatatgatccttcctcctgtcttcagctcatctttccatttttgtttttgcatattttatatcatacctaattttatgccatcttaaattttcttgatttaggtgaggtatgaatcaacaaataacaatgttattgatggaaaactattttgtacaaaggtactatgttacttggtactcagcccttgtcaatggttatctgattattctaccaaaggatacaggcaggagactacagtgtggaaaaaaacaaaacaaaaccccagacgtctataagttctatccagaatttctatctggattatttcaaatttcaaatgatccaagtatgaacatcttggttttgccatagcaaatgcaatgactgtggatagtggctgaacagggaactacgagcatcttaatagccaacactgcatcctctcattagatattatcacttaaagtcactgaagatatatgtgcatacctgggaatctacagttctctagtacatggcttaataatttacatctgatttaacatacagaactttgtgataaatgttaaacaaatacaatcttttatgcttgtggcatgagattatttttccaagtgttgatttcttaattttagtttagttatggagctgtatagcacaggcagcaaaacataaacagcagtacagctactctccaagataaaaaaatatgacagcccgtttgtctctctgatacagaaagggatgttatctctatgaggtataatttgatgtttaaagcatatttcatgcctgctaattgataaagctaatatttaccatagatgaactctatagaattgtcagaataattattggacagtaataaatttaatcagacagcagcttcttttaactacatggctttaaaaaattggctagactaatcctgcatcccttagttattttgcttggatgctagaattgtctgagactgttatgaactgaacttcccaaacatttggaaggcaatgacctaggactacaggtcagtttctgattgcgctggagttttggattctgatttgaccagggaatctctttgttgatccaatccgagtatgggtagaggggttaaaggagcaagcaggacacattttctaaactatagagggacaagaagtatatattctcctttaatccctaatcatacaccacatgcctgccttctcagctctattttagaggaagggcttaatagttacttttcttcagctttcttcctactatgccaattcatattttattcacagtcaattacatggctgttaataagaaacatgactgtactataaacacataaagcacttactttgcctgcaaaaaaggccaagaagtcttaaaataacaactttggtaatgtgcataaaaccatataaagtcaatactaaggatgttaccaaaagaaagcaagataagcataaattatttccaattggtgcaaaagcttgaatatacatcaatgcaaatgcttgaaggaaatatttcagggtcaacggactgagggagggttaacgggaacaaaatgactgtgtcagagtcgtgatatgtcatttttcataactccttttccaataaatatgccactaaatgtgcacaccttgatagaataaatctcatgtctactgccattttctgtttgatatatgatactccttttgattatactgcattatctaacatgtaatttcctttaatagacattactcataaatcttcttaggaaagatctatgttctaatgcccaactataattttgctaatctatgtcccaccaagtatatctttcttgcattttactcctggacctggtatttgaaaattcatgcaaaatacatacctcacttttgataaaaaagctctctagccagaaaataataagttgaaacattatagagtgacatttcaaatgcttaattttcatgcaatgatataaaataatccttacaataccattggataagattatgctatttttgttctagtaaatgtcactgagaaatgtacctcttaggtcgaataaggaaatcaaaaacagtttccaatacaaaacagcccacagaattttcatcctgcacttaaacattacagtatatccaaaacaaattaaagtgtacctcttctattttcttctgcataatcttccattgactttcccattcctttctttcattgtcaaactggtccagtaattccatcttttccttatgccagttagtctctgtgttctcccactgcttatgtaggtccatggcaacagtgtaagtgtcagcaaagaagtgtttctgctcttctctgcctcctcttaactgtttcttggaagcttgaagttgttttatttgaagcagtctcacttgcctttaaaataaagcctaatataaacataacaagagagagttccaaatccatgtgctttctggaaatatattttatcattttgtcgagccattgacataaacaaactataggaaaattggactcaaaagaaaagagatgacaacagtctacttaagaagaagaaactaacacagtcaataaagtaataagtattgtccaaagtttttttccctttctgagaccagacagcaaaattatagtggacaagatgattaaatgcgcatgtgagatgtaatcatccctttaaccacttactctaaaaatagattttttcatgaataagagtgtaagtatacaattcaaatgtatgctcacatctacacactgtgacagattctgctgcaataaaattattctttctgttctgatgcaacctgattatatattcttatgacttaaattcctgaaacagagctggtttgcagtcttaattctatattcagagatcaagcctgtgccaaatgtcattactgtgttacttatgaagaccccaaagttggtagtcaacttaggactgatgtatcatccagaaactaatctaaattataaaaaatatattcattatgtcacttcatcaaggaaaatctagaagcatcaaaactatcctgtgaaatatacgttaaaatttatccatgctctcttttcctttgaataggctatataccataaactgcttaggatattgaatacagggaactgaagaaaacattttgctcagttttcagggaatcctctattacattaagtagtgactgaaataattaactttctagccttcagggacgtgtacttaaggtttgaagtcagaatttaaaataccagctatgtaactggtataagtctaaaatttctgggatttagttttttgcattaaaatggggatagtcatagaactgttaaaaagattaaatggcatactgaatgcaaagtagtttgagaaatttaagaaagttttctattttttgctttacaaaatttcattgtgacttcaattaaaaataattttgtattaaataagtcatgtgcctttttagggggtagaaaagcatgtttaaaatgtttgaatctctgtttaagataattatgcctataagatgtctaactcttcagtcactaagccattatcaaaatgctataacttactggtggcagctaatgctaattacggacaaagatcccaacagtcaatagctttgtgggtgctggcactgccgaattaaggccacatacccaagcagcaagtgccaattttgtattcacagaagataactgcatatttcaaatcctaaatatcagctaaatatcgaacactaattttatttttgtcagactgttgtgaacatacatatctgactagtaaacagttttgaatctgtattttttgagtcacgatcaatgaattagaatagaataagaaatgaaaaatgttagctatatatgcagggttctaccttcaaaacaccctaataattttgggatctatattgttactttactctcaaactatttactaaagatattttgataattttttcctatgtctttggcactagcactattatgattaattcagtcacgaaaaatacataatttcatatctggctattaaaggtgctatcatatctcattttatccatttggccatgctcaatttctgacctcatttctccacctcctctgtcacccctttctttgctatctttcccacatataaaccagtaaccacaagtacttgccataataaatgtcagtgaagaacaaataaaataaagatggtaaagaacatacagagttttggtttttgtttgttttggctaatctaatttccattgatcttgatcttgaatacctagtaatcttttaggttcgtctaacaattcttcataggaaatgcagacagtgcctgtcttgaaactagcagactgctttaaaactatacgtaattaactgtgtggtgaaactaccttgctgactagaaagtatttgccactggaacttcttaggaagaatggtgtggtttgagataataagagataaatgcagatttaaccaaagaaactaaaaaaggatgcagactaatttcaagctacctggaaaagaggagctatgataaatccatgttttatcccaactgtctttaaacattggaaatgttcagaaatcaccataaagtcttttctacaattatgtagcaaatggctccaatttttccttctattcctaactcttcttgaatcgcttccatgctactgttgaaagatgccaggcctttctctttttaacctaccggaagatcattcaggaataccctagatcagtcttgctcttgataacaagactatatctaaacccaggtaacagtcctgaagcagaccgaatcctgcacctatttgcaaagagccaaactcatcccttaatatggagaaggaccaatgtatggagcttttcctttccaggcccagagcaattgctagtgccaagaaatgtaatagttatggatcagaaacaagcctttgcaagaacatttctatagagcaatatctgtgccaattttttgtggaaggatttggccttcttagcatctcagtcttgtcgtaaatataatgttagatgtaacgcagccaaacatattgcttccacctctaaatataaagtggtggggggggggcatagaattgttttggagattaagtgagcaaaagggaaaaatgcttaaaagaagtgcctaaacactgctctggatcatagcaaatgcctgaaaaatacttggttcttgttttcttccttctgtcctttgttccctcccttcctcttcttgtctttcctccctccttccctttctcctctctttctccatctatccctctccatgttgttctctggaaaaaaaacagattattttggtctttattttaaaacgagatagaagcaagtgtaattgtgtgaactctcatattctccatgatcttcttttgccttttttcaaatattttaaagatacatgtcacatatttaaagaaaaaagttttattgttaataaaaatgtgaacaaatcttatgtaaaactgcttttgttataaatctgacttaaatattacaaaaaatatcaaactgaaggggcaactttgtagagatagaatgtttcgtaatgagaagttatggggtaaagtggttcagcagattcaaaaactcaatttaagtgctctctactggggcaaaaataaaagttctttttgttcctagttgtcactcattttctcccacagatactggcatctatgtgggagagaaggaaggatttctgctatctgcatcccctaccccatatctctttggctctccagtttatgttcttccttctagaattccatttcagaataaaaatttattagagcaaatgtaagaggacagagtgagctgcattacttagtcacacaccccaactctaaaccagcattgcataatcccttttaacttacttcccctttccagggctgaaagccagaattataaagagttgtgagtgggttgcataagtatggtgatgggaggcaaatagttctgctagccttccggccctaccagtaagcaaagtttaagagtaacacacaagtctcacaagaaattattttcacccccaaattagcctcagtttggtcatggcagcaattctttctctgaggggtgctccattcttaggacacctgggtcactaccctttcaacctccaactcgcccattgaaaactggactgcatccaaacaaactaaacagcgttccttaggggcagctgctccattgctacttctctctttttagattattgtttagagtacttgtttcttgctgtccttatttccttttgctaaacatatcacttttcacataattaaagatttttcatttataagaggttacatattccaatagaaatgccacacacagtaggtactgctaatctcacaattcctagaagactcatttggcctgaagatgttttgcttctgcttaactttgatggattaggaattccccagcttataacctatcagagtaatgtaccatttacctcctaaattctctatccctttctccaggctattataatcacttgaattatttcaatgaattaataaatctcattcctctctattgttcacttgcaattgaatctttccaaagaccaccatgatttgattttgttagagtaaaagggaaatttttttcattgctgtgtattgctgatttagcacattcctcatgctccaacaaggtcaaagagacactaccacatgcaattccgaatgaatcaactttaccgtttcatttaattatcttcttccttgttttctttacagttatttactcaaattagaaaacatccaagctgtatgcacactgattttacttataaaatgcaaactttaaaagcaaacatttggtttgagtaaacaaatgtctaaaactaaccatcgtgaacaaaagacatagtggtaagtttccctcctaaacgtagattattcaattatgaatggcatagacttcagctcaaattacagaaacactaactctacagtgagtccaccaccaccttagataaaactaaaatttatttttcaccgcaattttcaaataccaagtctccaggattgtgacctttaatttgcaaatgttaaaagtctttatatgaataaaaaaaatcacatttgaataaatatacttagtgaaaatcaatgatgggcaaagtgcttttcaaacaactgagaagcagtgttggaaaaacagtctcaaagagcggatggtactgtcagtccacagttgggaaatccaccctgagcagctgaacagcctttttcctaggagtcagtacaatctgttatgcaccccgcccactgtttttaagcccagacacagacaacagcagagacagatgttgaaattacactccacttaaacagtatccatagtttaaaacatctcaacagcagcccctttgtatcctgccataattagtcacttgcttgtaaacttgccggaaagaaacatacctttcacactggggagaaatcctatggatgctcgaccactggtcaattagcagtggaagaaagtggatggctagctgtcttaaagagaaaagtctcagctcggtgaatctcgattctttacaagaaaaggggatgcaaaataagtccaaccattccacagagcagtactgacaagtccctttgaaaccttcaccacttttacaagtcaaaaagctgctcagcttagtgtcacagcagcagctgagactactgtgacgtcagttacttggaggcggccttcaagccacctcttccaaccagagctctgtaactttagagcagctcatgctctgggtaaacaactccaggtccaggacatttttagcttttataatggagcccagtattttcaaacttgccaaaagagctggttgttaacatcatacaatgacaatggccaattttagatttattttattaggaaagtaaactcatttttttataggcaagaattatctccctccttccataattctttctccttctcagctggtggcaggatgtactctgctgcacctttagaagtttgcatctggatgtggcagaacaatatgtgtagcataattatatatattatgcactctcaaaagatctgtgaaagttatcaaacttctatcttcaaataaaatagaaatggaacataaagtccaacctcttagctctctgtgattctgacagtgtgttgcttttatctacagtagtagcgatgtctttacgttagagaaaatcagagcccatgggaaaggatgagatttcttattgtgggaggacaaaacacacacacacacacaccccaaaaatgagatacctatgggcttattttccactaaagtgtgctgcagccataggaagagaaagcagcctaagtgtatggaaaagctctctaaatcatgatcaaatcagcctgttctgaaatgctaggagatcttgcctccccagcgacattttcaggtttattgtggctttgtacacacatgcatctgatgatatttggtttaatttagtcaaaaaagtctctagagcaattttttgcctaacttagcaaatacacaagtttaaacaataaggtcttatcttcaagtctgaagagcttccctggtgtggtctttaaagtaatacatattcactcacattattttcacctgcttccagataaacatttcatgaggagctaaagtttagtaatagtaacctgctcacagtaggactttaatacatgtaggacaatcaaatgaaaccatactctgtgtctggaaagcctgacatcataatctcaacagcaataacaacaataacagtgatagttatagtaataatagtgattattcactgaggggcaaccctctgcaaggttctgtgctaagtactttgaacagacctttatctgagttcaccctcagagcaattctgtctctagatactgataatctgatcttactgataaaacccaagcaaggctcattgtggtaaagcatcatgcaaaagttcatagaaatgcacccatgtggaggaaacgggtttgaactgttttgtctgattgcaaaccatggaattttgtcatagagatctaagtttcaattctgctgccaccacttatctgtgtgatcttgcagaccctgattcttccttaaagacataattatatttactttaagaggccataagaatatgagggaatatatatagcgccaagcacacaataaagggtagctcatgtctgcctccatgcttatgaggctaggaagaagattctttgagagagggaaagggaggagggagttgcacaaaaacatcaatacagaattgtcttaacattgtttctggccgggtgtggttgctcacacctgtaatcccagcacttctggaggcggaggcaggtggatcacatggggtcaggagttcgagacaagcctggccaacatggtgaaaccctgtgtctactaaaaataaaaaaattagccggctgtggtggctcaggcctgtaatcccagctactagggaggctgaggcaggagaattgcttgaacccgggaggcagaggttgtagtaagcagagatggcattcctgcactccagcctggttgacagagcaagactctgtctcagagaaacaaaacaaaaaacattgtttcctttaccttttcttctactccaaacttcttaacttctatgtatcacttgtaaatcaaactaagactattttgtaaatcctatcgaaaattcagatagtatgtgtctaagttacaagagatgttaggttggactatacttcctaagtgtcactcagtagtacccatttcaatctcttttaatggctgtcccagtgtgattgtcccagggcaatcacaaataattgccctatgttttagaaagaattatgtcattcatacctgatgacatactaatttatttcaatgtatatcagattcaagtgcttcatctgcttcttgtcatggtaaagctgatcttaaattgtacacagaatcaaataataatgaaaatctttgacaaaaagtttactccaagtttaccacttattctagtatttaccaactttttctgttgaagtttatatatatataatttatattatatgttatttatataaaatatataatttccaggccatatttcatacccaaaagacagaaagtaagtcaattaggtgatacggtgcaaagtcaagaaatgttcagcacagcttttgatattttcccttgaaaactttttgttttttaagaaaacttttaaaagaaaatttaccacaattatatacataaaatgaatgcatttaaaagactgatgctggtatactcagccctacagttacattcagacatcttgaactgcctgaggttttcaagcaggtgtcagaatgactgaaaatcttatgaaaaaaatgcaatttgttttgtaatgcagtttttctttaaaccatttgaacatttaaatcttcaaatatgaaattcacaaatgattgccctatgttttagaaagaattacatcattcataccttatgacatactaatcttatttcaatgtataacagatatgtaaagaaatgtacataataacacttaatggaaaataaatgtagaaacactgcctgctgtcaagaaacaaaaaagaaaattctaaaaagaaatggaaaagatctatattaataataatattaaggcacaatcaaaaacattttaaaaagggtaaaagagaactaatgcgtgcataaatgtcactagcaggtgtttccagacttacagaattttagagccagaaagaacttctgaaatcatctagctaaccttctcattttacagttgagggaagaggccctgagagtaactcatctgctcaaggtcacaaagccacttagtggccattccaagaatagaatccaggtctcctcattcctggtggagtgccttgaagttcaaaattccaagaagtgcaagggaagaaaatcgaaataagaatgctggatatgagaggagactgagaagttgatttctggctttggcaaattttaaattcagttttcttctatgtccaaatgagagagaagatactctatctttcaagtatgacataagaatcatatagctgagtatttatttatttatttttgagatgggagtcttgctctgtcacccaggctggagtgcagtggcgcaatctcagctcactgcaacctccgcctcccaggttcaagtgatccttctgcctcagcctcctgagtagctggaactacaggggcatgccaccatgcccggctaatttttgtatttttagtagagacagggtgtcaccatattggccagtctggtcttgaactcctgatctcgtgatccacccgcctcggcgtcccaaagtgctgggattacagacatgagccactgtgcccagccagctgagtatttattactatctaaagaggctcgtgtccttagctaattgtaaacactgggtcaaaataaaaaggcaaatggattttatcttagcagttaaaaaatctgaagataaacatggcaacatggccttaagcatgctagtgccagtacatatttaatctatggttttgtttgcagaatgatcctgaagtgttacaaagcagttactcatttgttctctttatggtatgacaacctggttgttatgagactggagagcttctgatttcttgtttataacgtttttccattgcttattcttttaccctttaaacatatttaacaataaaaggggtactgtgtttctattttcattggaaagaagatagaaaagattgaaaaagagaacaacttttaaaaaaactaaacttgttcttttttgtttgttttagtttagttttgtttttgagatggtcttgttctgttacccaggctggagtgcagtggtgtgatcatggctcactacaacctcaacctctggggctcaagcagtcttccagcctcagactcctgagtaggggaccacaggcacttgccaccatgcccaggtaattttttaattttatttattttttttttttgagataaggtcttgctatgttgctcaggctggttttgaacttctgagctcaaatgatcctccctcctttgcctcccaaagtgctgagattataggcctgaaacactgtgccccgcctaaactcattcttctgcatgttaaagttcaaaggctactataaaggacgtattttaagaaatccttccttcttgaataatgtctgccccttgcaattttcaaagtactttaagatcatgagatctcagttgtttagcagaactcttaaatcttaaattatcttcaattcctaaggtcttgggtacttcaattaacattccatttaacaaatatttgtgaataccaattctgtgccaggttagaccaagaggactcaaagaagaggaagaaatccttgtcttcaacaggtctggtcagctctgaagattccctgaaatgtgacatgtagcgtgactgtttgcattctgagtagcccactacactggtataaattcacaaatttggagagtctctcctaggagtacccacagcattccaccaaggagatcacggtttagtgttactctcactcagtcctagctgcatactataatcacacagagaatgaaaaagaaaaatagtaatgctggaactctccccagacttctgactcagaccatccagtggtgaggtcctggcttcagacttttgataaagttccacagctgattctgtcaaatttggtcctgtgttatttgagttctagaatggcaatttcaactgtgtgttaataaatataattttgatcctcctaaaatactgttttggagtataaaattatgaggatcacacacagaatatttactatccatgtacatgtttggattattacttgccagctaatgtaatatttttccagtgggggatgtttatccttagaatcatgggaaactggctgtctcttctattctgaaggctgaggacacgtcaacaggttttttagccaagcacatccgtcatggggcttatgcgcaggcatttccagatgacagaaatattcaaaagacacgtttgaatgatctgttctttttaggtagtggtccaaattctgaaccaaacagtaacatatttgagaaatgtgggctattttaaaactagaaacagaccttgctcacatttttcaaacttgtttttagcatctcattgtattatttacagattcttgacttggaggatactgataatgatgacaataaaatcaaaaataataaaaaggactgtttgagggctaccttttctttagtgaccagcagagtcctgggaatgcttgtccaccacaagagggccaccctgagccacttacttctctctgctaggatgtttcagcagtaaagcatggctcaggcttggtgagtgcaatttgaaggacacaggaactaatccatattgccccagggagtaactaatccacctatatcttctacgagaaatgttagatttatcactaccgggtggcagcattctatttccaataattgcctagtaaaataccactggtagaggaaataactattggctactcaccacttcggcacagaaaagaagaggtagcacatactaaggactagaaggaacagatcaatatgggtaggctttgattagaggtcaggaaagccatctgtttcattcacagggcatggagtggggaaacaggtggaagatctgaatggggaactgcataggtgggtgttagattttgagcccctggagttcaggtcaaaaggaatatggcatcatgatatgagagggatacagtaaaggatctggaggtaaagttacagaacgggaggcctaaagtcacacttcagtgtagctcctaggcccactctgcagaatcagccagacccattttcagggtcttctgcagaaccatgcagacccattttccatggccaaggtccctcagtaagtccatattagcctataagcacaataccttgatgggtaatttgcccatgaacatctcaaaaattcataaaggaaaaggggttaggaagagagagttacaaaatggtggtatcatgtagggcaaaagctatttcaagtgcaggaaggaaacagtaggtatttagtacatcctcaaaagcagctgtgtctgacccttccactgtattctgatgttgttgacgctatcaatatatattgcaaaataagatttctgcaaccttattctttttttttttttttgagacagagtttcactcttgtcacccaggctggagtgcgatgtcacgatctcagctcactgcaacctctgcctcccgggttcaagcaattctcttgcttcagcctcccaaatagctgggattacaggcacccgccaccaggcccagctgatttctgtatttttagtagagacggggttttgccatgttggccaggctggtctcgaactcctgacctcaggtgatccactcaactcggcgtctcaaagtgctgggattacagacgtgagccaccgtgcccagccaacctcactctttctttatccaactctttttaatccacactactattttgaatccagtcactttctacaaatatcaggtatcttcaaacaaatagctgcatctgaatcaattacattccctctgaagtacggaggctgaatagagacttcagtttcccctcttggacagtttttttcatatcaagatgaggtccaaggccagggagtcctcattttccttgactacctcaactagcttcactacggctttttccactagatgtaatctaagcttatttacaaacgctaaggccctctatgcagtgggccgacagcctcagcaggtacacatttcctttcgggcaaaggctcagcagatacacatttcctttcctgcttggattcccaggagtcacctaatgtccagaaaaaaattaatttcagtaacttgtcatgctgaaacccagttataaatgactgatctaggccaatacacaggatgttctatttaagaagtctaactctattttgtctgtcccggagtcagtgatgcaaaaggagtaacacagaatgtgaaaaaactgtttataagaaagatggaagggagttataaactacaaactaaactgagtgttctgactttaagaaataagagtatataagtcatttctttaaaaaagctcttaaattatcttcccttactaaatcacttgaggcaagtaagtaaactgatgagctgctctctgcccctcatactctcttaatatttgaatgcacaggttaaggcaggtacttttgacataaacttaaagagctaactttaaaggtacatcatgttggacaacctcaaaaagaagtgatgccgtttcccagccttcaataatcacttatgcatatgcttgttaacataagcagctcaactcaaaacattcagaagagactacagaaaataaacgcataaagcacactttttcagagtcagtaatttccacagctccatatctggagtacgcatgacattgtaacacttcaaatagtcaagatactgcaccactcctgaatacctcagggtggtttgccattttcttaagtgagttgatgttctaaacttttctgaaaagttctagtttttaaattagtgtaatgctctacactgttactgtttatttaatgtttatttagtaaaaaataatcatttaaaatcatttttaaaatatatctaaaactttgctgataatttaaataaaaatcatcaaaacaaacgcaaatttttattatctgagtttaatatatgctaaataggaatttggattcaaaaacattgagaaaaacattcaaatatgcaagtcaataaaattttattaacatttttgtaaaggctgaataactgctaacaaccactgattatgtattctcatcttaaactaaatgtttgcaattttatcttcagatgttgagttttgttggtatcttattttgaaaaatagctacagaaaaatacatacaactctgaactaaaaaagttttataatggtaacactgaaattgaataatcaggaaatgtcaatagacttaagtttattaatcataaatatctgggatataagatcagatggggctctttaagacaacagcctgggccgggcgcggtggctcacaactgtaatccctgcactttgggaggccgaggtcggcagatcatgaagtcgggagatcgagaccaccctggctaacatggtgaaaccctgtctctactaaaaatacaaaaaattaggtgggcgtggtggcgggcgcctgtagtcccagctactcaggagcctaaggcaggagaatggcgtgaacctgggaggcggagcttgcagtgagccgagttcgcaccactgcactccagcctgggcgacagagcgagactccgtctcaaaaaaaaaaaaaaaaagacaacacagcctggcttaacagtgagcagtgcaaggtagagatttctgaggtttctctttacatctaaaaagtgttatatttgctgctcttgttctttgatcaagtgggttataacagtactctactcaaaagatgcccccagaaatatttaaaatattacccacaacttcactaggacagacacagactagaactgccagtaagtgcagaaaatacacctttaagcagggaagacatggatgaaaatgtatttaagttacatggaaaggacctttagagattctatgatttgcacacattttcaaaatggcaaacatgaaaaacagccactaccactttcccttctctcaactgatcaactcgaaagtacagtttagaagcattaccacatttaagatattaccacatttattactgtaactacaaaggtgttctgccatgtccaggccatgaaacattctattttgtatgagtttctatctgaaattctagaagtagactgctgagaatatcaggacctacccatgaaatgtgagtttcatcaaaatatgaatgaaattactttacttatcaaaaaccagatcaaaattaaaaacgtagaatgaaatctttcattagacctaattggtttacaactaggatttaagcagttatgtcttcatgcatactgtgttttaactgtaccatatcccagtagtttaataaatggtcgacttttcttactttctggtaatattctccactaccttctcttcaatttctacattcagttatggtgtctgacccaaagcatgactctactagatgaactggactgtagttctatcagaatgcagttacaaactctgcacgaatatttggaattagggctgagctaccaaattgacactccaaacttcgttggcagctgattaaataaccatatcccattctatcacacaaactaaagtgaagattggagaatgcaggccaaaacacattccaggctcaggactgaattttcctttgttttatgagtttagttacttatgcctaaaaatagccaactgaattccttttttcttagatctaggccaaattaacaagaagacacttcttcctatggccaagaatgtgcatacaagggaattttctagaataaggcttgctctgttgagtttactttggtgtgatgtttaaatagcacagcttcaaaggtccaaacaaaagatgacgccttgtcttaataattaagagtctttgctctcttggtgaatcaagaagcctggttgttcctctttcagaaacagcttaatataacaaaaataatgcaagcaacaggatcaaaggggaagatgctggggactctctttctgaggttttgggcaccatctttgtcaacttatcttcccaagtctatgttctacgctttaagagataggtgcaccctggatactgggcgcccattgaacagcttgaagttatagggaaaagatggcaaggaaaaaggtcactttgtgcctgctggcaattttctgaccccaccttccaccaactggtccccagcatgtcccctaagatagaggcagttctgaatgccctgaccctggatgcatttctcattatacaccacagtgtgatggagctgtgtgtgtacacacaggcacaaccgggaagctggtttatgcagtgagtggggcagagtggaaaagagcctccctggaattcaactgttcagtaaagttgattcactaacttcagaggagctgttggaatgatcccatatcccccagaatctgtgagcagcagtcaagtcagtactgcttcagcctactttcctctccccagtatttcacaggagtttcacatatggaggatctggatgaggtttaagtctcatgaaattctataaaataactgcctgtattagtccactttcacactgctataaagagcttccctgagactgggcaattaataaaggaaagagctttgactcacagttctgtatggttagggaggcctcaggaatcttacaatcatggtggaaggggaagcaggcacctttttcacaaggcagcagtggagaggagtgaaggaggaacttccaaacatttataaaaccattagatctcgtgaggactcacttgctatcatgagaacagcatgggggaaaccacccccatgatccaatcacctgcctccctctacatgtggggattacaggtccctccctcaacctgtgaggattacaattcaagatgagatttgagtgggacacagagtcaaaccttatcactgctttaggagttcataggtaagattaatacccctgttgccagaagggcaacatagggaacatgaccatagttcctaaaatgagatctatagttgaggctggtgttttggttagctcagacatctctcctttcctattcaggtcataagttatcactgaggtgtttgcaccatctttgcatatatttaggctgtcagcccatctaagaatgcctagggattttgttgtaataacatgttagatcactgtgggatcatcttgagtcttgaattcagtgtgcacacatgcctgtttctttcagtgggtgtgtgaccctgtgcccacacactattcatcttggttctcttttctgttaggtattactcctatttacctttgattttgtgtttttgaaaacttgtattaatgcaagccaagttttctggcacgaccaccagcgcagaaatataattgctttatcactggaggtgatatcccttctggcaaaggctgtacaactaagtggaaatgctgtagagagaattcagacatccactgagcagctgaaactttaaagtctactcaaacctagacaactaatgatcctatatcttggtatcacatagtttactgtaagctttgttgaggctatatagaatgtgtattttagataattcaaatatctaagagtagtggttctggggcatttttaaaaatacaaatgcctaggtccgtacattttatttcaattagtatggagtaggtccccaaataaaaacatcccagaaattctgatgtgcagctagtgttgataactactgatctagttatttcatttttgattcctctcatgataaagaaagctaaaatgtaaagccagtttcttaaagtcacacagggtggtgaatatgcatgatgcttctgaagtgaataagtgcataccatatcacgtttctccacaaagacaacatcagcaatttggacaagccaattatttgtgatgtgggatttcagggaccttgaagttctgatcccttcctcctaaatgccagtgaacttcccagtcattgtaataacctgcaacactccacacacttccaaatgctctgtaggtggctgagaaccttttaacaggtataactggctccaaagatgataaatatttcagctacatttctgccctcaaacatttactttcagttcctgaaatggtggcctggaaacttatcacggatctaacagacaaactttaggttttaaagtgtttgttatctctgagatgaaaaaattttaaaaagcaaacacctgaattatatataattgattaaacatggcatttatctcatttcattcatttttgtaatgaagctttacctagctctcagaatctctaaaatgaaaagccagaagtgcatattgacagattccaactgttgggtaaccactcctcactccaagtctctcctccccgtcaaaaaacaaacagaaccaaaaaccaaaaccaaacaaatcctatagagagtaagagcagttattctaaactaaagttttagactattgtgaaggtttgtttgtttgtttaattaatactcaaacggatgtgtgggaggatgagactataaataaattatagtcccttgaaagttaaattcctgggattccaaggaccattaccaatagcaacttttataacaaagtttttccacatatcctttttgcagacatgcaagatacttcactttccacagattttcatatccgtcaaccaacctgtgaatatttacaagtatgtgacttcaacaagtgcggagattgctgactcttgggtggcactggataaactatcaatgagatggacagaatgggtcctttgggtagatggagtctatccaggccactttaggtttgaggagaaagggggatgctcaggtttattgaagttagtttatatctcgagagcacctcctgcctgaactatgctaccagtcttggattgtgatctaatgaaattctagaaaatgaccatactttaatgaaattctagagaatgactgtattttttccctattcaaaacaattcacatatcatatttatagagtatttcctactctggaggcaatctattatagaggataggactctaagcaataagttcgattagcaatacacgacttcaagtataataagtaaaagcaggagtggcaggtttggtgggaatctggtcaaatagagtaggatagggataattatttcctaaatgaactaagacctaatccaatctcatgcttccaagcatatctctgtagacaaaacacattggcattacgacatattacttagttttcatgagggtcacatttcatttatttcccatattttttttcagatatttattggatgtcaaaattatcttgttagtttgatgcaacctggcaaagatactttacaaatgtatatactttttggaaatgtgaccaaattgtgaatgtccgtccagcttttgaataataatagtgaactactgagaaataattatgagacatgtagtccatttttatattcagtatgccaattatttatcaagaggagacaaacaggatgaaaaaaagaagtaaaaattaaaacaattcatacagaaaaatgtcacactttcttacctgaaatattttagtgtttgggcttcttattgaatttggtcttggtaagatgagttgtatctttttaaagaaataagcagtcttcagtgtttttatagcattggttactacagaaattatacttcttttacttcttgtcttgaagggtgaacaaaataaacaaactgaaaatactacaatgaatggtaaatgatgaaagatttacagtacaaaaaacagtgtaaaaaggaagacaagtttaaatattgttgtgtaagaaagtgatgaaaataatacaagaatgagaataagtaaaatgataggctggaacatctgggaaggtaaatgcaaagacaaagagaagagttaattaataataatctttaaaacttaaattcacatcaacaaatttaagtagtcattcaacttaaaaaagaacctccaccctcccttaagcctatatctataaaatctgaaagcctaatatacatagcactttctctcactctaatttctattattttccctaagagtataaccgaatacatatcaaaattcaacaagttttatcataaaacgatatttttcatagcaaagcagagcaacatgcaagataaataagcgatagggctgcaatgtttctagctgtaccaacaggcagttaatctaaaaccatgcttctgtacgtaaactggcttttaaatgtcttccgtgtcttaaaagccatgcatgctgttgtacttccgtgggttctccaatggatacaggacaccaggcttgccagaggaaacagcattgcctgttttgtttcataaattatctttcatgtggttaactctgacaaaatgcattggtctttaaatggccaccatacctggccaaagcagctcagtccaattcatccggtgtgcctctacaaatcaggatggaggaaaaatgctggttttccctgttctggaatagttattactatttctctgaattagtgttgccttcaagctaccgtatagactccttccccagtcctgagattctccactatacaactgagagtgattttctctggaaataatgatcatgttatttcaacttatggtaaaaaaaaaaaagtggctttcatttgttcctttccagggggttgtagacacaaaaccatgtctctttaccactggtttctacatttaccagtagttatccatcagttctgttttatttaattaaattaattttttttattgagacagagtctcactctgtcgcctaggctggagggcagtggtgtaatcttggctcactgcaacctccctctccccgggttcaagtgattctcctgcttcagcctccggagtggctgggattacaggagtgcgccaccacaccaggctaatttttgtatttttagtatacacgggtttcgccatgttggccaggctgatctcgaactcctgacctcctgccctctttggcctctgggattacaggcatgagccacagtgccctgccatcaattctgttttagttttattctttcttttttttgagacagggtttcactcttgcccaggctggagtgcagtagtgcaatcaccattcactgcagcctcgacctgcctgggctcaggtgatcctcccacatcagcctccggagtagcttggattacaggtgcgtgccaccacacccagctaatttttcatatgttttggagagacggatcttgccttgctgaccaggctggactcgaactcctgagctcaagcaatccaccctcctcggcctcctagtctagtcattttttttaaatcctaaactcaatatggatcttggctcaaaaaccacatatcagcagttaaatattcctatccaggaccatcttgcagttcatctgctagcagagtaacagagaaaaatattgaccttctaaaataataacgtgcctcaaaatccgttactctttccacaacaattgagggtaatggtgttcagttttccttttaaacaaaacagaggaagaaatggtgactatgtgatggagtcacaaaaacctcagccctgcagaaggacagtgtggaagaactggtgggccgaggccgggggtttcaggccccagcgcggccctgagcgggggcttccctcaagcggggcgcggcagtccgggcgccgagacgccccccagggacgcggctccacgggccagcctggccaccgccgtggctcgcaataggcagaactgtacctgactcacggaaatgggctcctcggcgccgcggtcgtccgcagacttgggcacctcgaggcggtcgatgaaggtctgcagctccttgcggaaggccttcatctgagcgttgatgcggtagagcagctcgtgctcccggatgcggctgccgtcgtcctcctcgtccatgagtccgaacaggtccccgttggccacgtagatgcgcgcctcggtgatgatggtgctcgtgtcggcgatgagccggtcgatggtcttgcccaggcgctcggcctccgagcggatgtccttcatctgctgccgatcggagaagctcttgggccagggcccgggcgccgggtagaaggagcgagtgggcgtgaggcagcggatgttgcgcacctcctccgagtcgctctcgccgccgatgggcccttcgcgcttgcggtgcggaggccgcgagtcgtcgtcgctctccttcttgcccgcgtcgctctcggcgtcgctgtcgcgggggctgccgcggatgcccaggtgcgaggccaggtcgtagcgctgcatgttggacataagcacgcggttctcgtactgcagctgcatgaccttgccgctgagctcgttgatctgcaggcgcgccgccttcagctcctcctgcagggcctcggtcttggcgttgtcgtggtgccgcgcgctgtcgtggccgccggacttgtacttgtacttgttgagctccgccgtgatgcgcttgttctgctcctccaggtcggccacgttcctccgcagcagctccgtctcgtcttccaccagctgcaggtgctgccgcagctccgacagggattcgctctgctccctcatgagcgggttggccgagccgttgaagtcatcgcccctaaggtcgtccagttccgccttcaggcctctgttctccacctccagttcgacgattttcctgcccaggatgttggcttcttcctccaccagccttagccgtagcttgagctcggcctccctagtgctgggagggcctccggcttctcctttgggcaaaggactgtccagatccccataaaaggatctgtacttctggagctcgtgttcaaatctgtccttttctttatcaatcttggccattttctttctcatcaaagcggcttcttccttaacaaactgcagctggcacttcagatcttcattgtcctcctcatttgggggaaaagagggaaaaggataggagatcatttttatgtaaatcaaggaaacaaccaaaagaggacacctggataaataatttttcttgcaatccagatttaatgacagagagaaacagaagcagatactgtgtattttcttcagatcacttaaattctctggcaaattaaagattagaacaatgttacatcctggaagcaaaaaggaaaaggaatatgaaaagagaataactgtggcatcactattcagagattattatatgttgtaactgcatacaactgtttggtgatcatttcagcagtgtttcttttgtttcattattgcagtaataaatataaaatctgttcaacgagcatgtggttcatatgcatttgcggccacttttttgtcacttacactgagccaagtgctgaaaagtgttttacaaatatgaacctaatttaatattcagagtaaacttaggagtagttattacagttcctggtttaaagatgttcagtaaccgttcgaaggttacacagctaatgaatagcaaaggacaaaggtgaaatttgaatccagttctgtctgaaacaaatgctcaggctcttgatttctgtgtcacttaggaaataatctgccccctgtttttattcaaaggaaaattgttttagaggcctgtaagtcagcaaagtttgacattggaatggtccatccaaggagaaactgttaagttttccatctagatcacatttaaaataggttgtactcccatcagtctgaaatggataaagcctggcaaaagaatagtggaactatagaagttcttctcacacattcttacgacaacctcagagcccaatcattaactaaattgaaaagtacaaaaggaggaatggaaatctttctctgagggatattactgaagcatgttattatgtctaaggtcatttctcccaaggacaatttctcaaaattctcttttaagtgtgtactttgagccaatcatataacttctgtgaactttggtttcttcattaaaaaaacaaaaataaaaattctttccttatccagtactcggtcatctgtgtttgagatgcattctggtaaagaaggagcaaccactggtgagaaggtgaggagaataatgagcttctgccagagatgctcagtaaataccacacagagcctttgagatggaagagatggagaacagggcacaggtcttctgtcttcctatctactaatgggaatatgaagaatatgaagggtttgagagctgctgggtgtgcagagcctgaacattacattccatatagtattaaatacttatatcagtccttcaagataggtgatgctatctcccctttaccgataggggagatttattaacattgcagtgcacaagttaataagtgacagagcacagtctatattctggctgagtcccaaactcatattccttccactgcacatgctgcctctagaaaagaagcataaaagaaaaaaaaatagagcaatgtggtaaaatcaaagaagtaagatgtgttgccttgtacactttcctctaggagaggtttagaagaaagaagagaaggactaccagaagagatgagagagccttagcagcatccagagaggagaagagggcatgtcatggaaagctttgatggaagattttttgaggatgagaccaaggacatgttacaatgttttggatcacatcagcagaggaatcaaagatgaccctgaatttttgagttgaggggtctcattggattgtatggccaatagcaaggatagagaatgaataaagaggagcattccatttagatcgctttcaaaataggatgtactcccatcaatctaaaatggataaagttggttctgcctgctgaaaggacagtggaatgaaacttacagaagttcttctcaaacattctcacgacattctcatgacaacctcaaagcccagtcattaactaaattgaaaagtacaaaaggagaaatggaaatggttttgggtgaagaatgtgggtttaaggttttaagaatgctgtctgtgaggtgttccagtggagggatacagggtggaaacatccatcaacagtcatgtagaatctcaggctcatgattagattactaagattacagcttggcacttagagctcaggtctagaagtgaggacgtgtggatgagatgtgtagaggtgatggttgaacctatcataatggtcacagacacaaccaatgaggagaagaaaagaaagggagacatatggccaggcgcggtcactcatgcctgtaatcctagcactttgggaggctgaggtgggtggatcacaaggtcaggagctcgaaaccagcctggctaatagggtgaaaccccatctctattaaaaatacaaaaattagctgggcatggtggcatgcgcctgtagtcccagctgctcgggaggctgagggaggagaattgcttgaaccccggaggcagaggttgcagtaagccgagattgcgccactgcactccagcctgggtgacagagagagactccatctaaaaaaaaaaaaaaaaaaaaaaaagagaaagggggagacaggtaagaaatagtcaaaggtttgggaggggaaatctaaggtcatgtaggccaataattagaaacaatgtttgaacagaaacatgaccaaaaatgatatgctaaacaaggggtggattattcatgcctccccattttagaccatgtagggtaacttcctgatgttgtcatggcatttgtaagctgtcatggcactggtgggattgtagcagtgaagacgaccagaggtcactctcgttgccatcttggttttggtgagttttagctggcttttttactggaacgcattttatcagcacaaataaatgtcaaatatgcttttacataggctaggttttatttgacatgcaagagtagatgagactgggaagccaggtagggttgcatatgtggtggaagtccttgattgcaaggcaaggcctttatttgctagtatagttggcatatactgcaaattgaatctaaccaaaacagcagtgggtgtgatacaaggcacacactgaagcagaataacacttcactgggttatattaagcaaataaaaaagagaatatctgatttgtgtgtatgtaagcgctcctgcccaaaggaatgaaaacaacaattattttaacacttggacatagactgaatataatagagtcattaggagggaaagagctgcatcaagggctaatggtcatggtaattattttatttatttaaaaataaatattttcaagatacaaaatgtgctagtttctgcaatgccaagagtttaccaccctgtatgccaatatgccttgcatcctgatcttgtaacccaactattgtaggctgcattggaaacttggcatagaaatatcatacataattattgataaaaaaaggagattgtatgcaaagtgcctggtccacagtaattgagcagtaaatactttctcctattttccacagtgaaaggtaggcaagaaaaattaaaatgctctgaggtgtgaagcaagttatttcttatttttgtgtatgttaaagactcactcaattgaagatacaaattacatgtgaagaggggaacataaagatatgatgatgatgaaggccagtaagaaatgagctactcctggctttcactttaagagccactactagaaactaaattgcattctaatcgattacatatattaactcatttagtttgtacaacaactctctattatgattcccattttatatatgaagaaatagaggcactaaaaagaataagtaatgggcccaagttcatacagctggtatatgccagagatttcaacctaggcagcctggccctagagctacagttcttaattgctgtgcagtatcatttctctgtaaataaagtcactgtgctgctggaggaacatgtgagaaagagatcaaagaagctgaagcaaattaacaaaatgaaatacaaagctaaatgaataatagagagttggaccatatgaaattgccacttctgtagatcaaattcaatagcatgttggcaattttgtgtgatttcgcatagaaaaaggagacatgggagtatttaaaagcatgtattgaacatgtgcagagtgccaatcactagacacagatgattcaaagctgaataagatggctcctgtccacaaaaatgccctggctaagtaggagagatgaatgcataaacaagaattacaatagaatggtatattttcagtaatacaaatatgtggatcgatggtttgcaaccttgactgagcattggaatcgtgttataattttgtaaaaattgaccattttataattgagatatcccatcagagatagcctgatcagtctcctgaggtgggttttttaaaagtgacaggtcataacctctgaaaataaatgtgttggaaatgatagcagaaacttcaaatgctacagtatacttataaaaaaggaagtttttgtccatgaaataaaagctggtagattgcatagcatcttgacttttttaaggtccctgacctcactgagaaactgattaaagttgtggatgtttttgcagaaagttgcccacatgcatagtgagtggaggtccataaagccaagactaaacagttaagaattcctgcatcagagactatggttgaaaagaataaataaacttttaacacaggaagtgtaagaataggacaaatgtagatacagcgtctactccataaacaaggtaggaaagaagattcatggcaacacgtgaaatgattcacaacaaaatatttagagtgagttggataaagtgacagcaaagacagagtggaaaagctgtagtgacagagtatatttggacttactaagggaacagagagaaaggtacaaaaaatgatatcatggtcttggctgtgagactctctgggattctaaaaatgctgaggtccatacatgttctggtgcaagtaccaggagaaaacagagcaggaacagagcaggtacagagaggaaaaaggaaaataatatatagttaatatgttatgctttaaaaaatgtctgagatcaactttttcaaattttgaatatttaaaatcactttagttaaattatctatctaatgtgaaaaaaaccttgtaatcacaaaagtatactacagtaccatagattccaactgacatagtttaaaggttaatatctagccaagtgcttttggagagttataatgtcagaggcgtgtgacccagaacaactacatcttgaataggagctgggtaaaatgaggctgaaacccactgggctgcattcccagatggttaaggattctgagtcacaggatgagataagaggttggcacaagatacaggtcataaagaccttgctgatgaaacgcattccagtaaaaaagccagctaaaactcaccaaaaccgggaatgacctctggtcgtcttcactgctacaatcccaccagtgccatgacagtttacaaatgccatgacaacatcaggaagttactctatatggtctaaaaaggggaggcatgaataatccaccccttgtttagcatatcaagaaataaccataaaatgggtaaccagcagccctcagggctgctctgcttatggagtagccattcttttattcctttactttcctaataaacttgctttcactttactctatgggctcgccctgaattttttcttgcacgagatccgagaaccctctcttggggtctggattgggatccccttccttaacaatagtgtcatttttatcccaaatgtttcctcttccattttaaaatcttcttcattacaaccattggcacctctttttaccttgaaagcaaagctagtctttactgtggctgtgcttctaaggtttttaacaaacccatgttgagtacatctttcaactttcatttttattcttttgtctcctttcttttgcttctccaatcactggtatggagaattacttcattccagggctctctaaagatataatgagcctttctctcctttctgacttccctctgcaacattcctttctttactttctcctgacactataggaacagcctttctattgaccttattaattataaaaggacaagattagcatcatgagtatagttctcaaatatagcagcgtataaaatacgaatgacatttttctgtgtgcttacaatgtaaagcaattataatagggatgttatggttggctttataagtaaatattctgatttatactacctgtatctacagctacataattgatatgcaaatttgactttgttttgcataagtttatctggccattatatctatttataaatgtagtttgtgattatatacacttagaggtacttggtgtactagttgaaattttatttccacatacctctgtgggagtctgttgagcctttttttcagattttggcaaatctttgcttcctcttctttttaaggataactgaaacaaagcatgaatatatttagttggataaactataattttaattcaattttatgtttttaagtattctagtctcaaacgacaaaaccaagacaaataaaaagagttagttcaataatcataaaaggaggaaaaaaaatcctaaaccagatagatttagatatatttttactttggactaggatacacatcacagtagaatgtagctggcaattatttaatttgagaaatacaggaaacctactgtgaaaatgcagaaaaacaacagacaaaattgattgttgactcaatatgatatatagttcaaatgtaaacaaatgcttgttagcattccacatcactgaaggaaaaaaagtaagttattatttccaatgttgggagttaggttgctataagcttatgaacacacactttcagtgaatttatgtagaatcggaagcacttcattctcccctcaccacacatcacccccttgctcctcctcgacacgtgcaaaatgatagggcatggtaggggttgtagtgaaatggagaaggcatgccccatctcaagaaacaggtggaccagccacagcttcagctcattgtgtgatacaggaatgtgggcttttacaagagaagctgggaatctggattcttatgtaaaatctcccacattttactggctgatcctaattaaaattcaaactaacactttggaagtcaaagaatacacagctagtgccaaactgtttcaaggacaagcgtaatatgatctctggtgctcagttccatttctcacaccaatataagaagaagggtctctgtatgtaaacaataattatccgtatgtatgactgtctaccatatactacacattgagggggagactcaaagtttgattagatactgcatctaccatcaggaagctgaaacttagcaggggaggagacagagaagcaaacaattacagtgcaaattgataaatgctatgctttaggttctgtgaagcaggggttttgatttagtgtggcatcaccaccataaaaatagtgcttgccacatggcaggtggtgaaaaaaatacttgctgaactaatgatatatgaataccaaatcgaggttctgaggtcaaagagaaggacaggggtatagactgacagtaaaaatagggaagccttttccaaacaggagtcttcataaattcgcaaagaaatgaaaattaaattcttcacatgttaatttctaacccatatccactgttaagtaaaggcatacgttcaagcacagaaggcaggggaatactttggtgcaactgctttcattcagtatgaaactgaaactacacagacaaatgaatagcccacgtggttattcatttctagttctttacaggaagaagttctttctgttgcttgtataatcttcttagaaaggaaagcttggggactgactcaccataaccaaaaagtaatttaggaagtaatcaacaaaacagtcccaagaataccaagaataaagtgagctaaactaagaaacctggaacattctaggtaggggctgcctacaagaagcgttgaatttgtttcactaaatacttattgaatgcttgtatttgaattcactcaattatgtgtttatttagtgactaccaatgcacttcataacatacctgtgacacaataataatgaaaccaatgtgatctttgctcttttgggggttctcagcttacttggcatgatctgttcagtctggaattcaacacagtgttatgaaagcaatgataatacaagaacaatattaactgtcattgagccctaattcatgtcaaccccttcacatacattatctcagctaatttttaaacactccttttagcctcactttgcaggtgctgaaactaaagtttacaggggtaacagaagtagatgaataaattatcaaaagcatcagttatctctgtgctcctcagaacagcatcatcagtgtcacccagaaagctgttggaaaagcaaattcttgagattcatcccagaaccactgattcagaaactctgaggatgaggcccagtgatctatgatttaataagctaaagtttgcaaatgtctaaagttactagttggtaacaataacttcagaccttgacccaagtctttctcatatctaactgttagctattagatcactaaggagaaagactttatctaatctagggctagagatggtgtggggagctagggataatttccaaaatgagtagcatcttatctagaatctggtgcatgagtagttagccaatggaagatgaagaggaggaaaagggaaaaaaaaaggcattccacatagaaaaaccatttctgggacagaaattccatatgggtgttacagagtgagaggagaggagtgacatgagatttgctggtggcataagtcagatcttgaaggacattgaataaagattgaattttatcttattcaggtcaaattattgtcctagggtcaacttggagcactaaatgctcctattgagcaagaaatgtcataattagactgtcatagagatatacaaagacacaagggtggcagtacaaatcgctgtgagataaagatgttacatgcaggggtttcaagggaaagtatgttctagttctggaaatgttttttggtctttgtgtttcattcatttcataggtatttagtttctggtctatatgtggtactgtatatatgccaaacacatgtgactaagaaatattgtactctttccccaaagagctaactgtttataatgataaaaaggatgcaattagcaaaaacagtgggcagaactaactcagggcaataaatgaacaaaaagggactgagagggcaaaggaagaagctctaattccagatctggggaatcagagaaaatcattcaagagaactgacttttgaaggatatgcaaaatttcaacagaaataaaactgaacaaactgttgtaggagtaaagatatagaggaatgagtttgcctttcagatgcactaactcctgaaaagaagtgatggaggtagggccactgtagagatggggtaaaagaagatgcagaaaagattgaggtcagcttgtgcagctgagaaatttagactttatcctgtgggcaatgttaaaatgagacctctaaattaatataagagcaatgctgaaattagggcattctttcctaagaggcattttctattttgcttttatttaaatatcactcaggtggagtgttaagctcaaataaagctctgaagtaaagccttccccttgaataaagatacattagctttcaggtgcctttagggctgctactatgtgtaagtatcacatttgcattttcaataaatatttcatattttcatattccagtaagtttatgttaactttctgaatcctatgaaacaaagatgagacatttctatggatacagaaagttagagaaataatgtgagtccaagtagtccctttcctgtgaggatgaaactgtgtaacctccccccttgtcatcctcccccaccatcatccactaaatcttgtaacctctgctaggggagcagttggggaggccacaatgaaatctcagattttcatatttgctggcaaagcaggcacttctctagatggttctctagataaatacgttgaaaacatttattgtccacttcttaattctttacattcccagcctcagcttgtccaaaagaggctgctgttttttttgatcatgagaaggccaggaattagagagttttgccagtaattattttttcacagcaatgatataaaatgggttgtttgttttctaaaaatgttttgagattatcttccttttctcaattaaaatttactccacttagtatgtagcatctttatgttttcagcaattaaaccacagagaagaatgtgcctaacatgctaccaaaagacatattatgcatatagaagtctcctatgctgttgataaaattaaagagagattcatttgtgtggtaattaaatcaagaaggaaactatagagacattaatatttagatcttttgagccctaaatatgtgtcatgcacttttctaagcactttatatgtatctactcattcagactgacaacagacttattgacaccattgtctgaagcacacaatggatttatcgctcagctagctagtgttagaaccaggatgcaaattagccagtttcagagttcccactctgaacaactacattatactgttacttcgacagaaaaaggtgcaatttagatagcaggcttatattatttctgagcatatcctttatggtaacagagcgtgacagcaaggtttggggtactaggttacatatatgacacatgtgcagaagttttaatattttcaacacagggatcagcagaagtgacatacaccacttactggttcttaaatcaatctgtaaatactgtgactatagggtaacactgggagggaggcccagggattgcctgctggaaggaaactgaaaaaggtagaagctctgtctccaacttgtcttggaaggggacagaatgggctcttgttcctagaagtcttcctcttttccttctattacatccttgacacttacccagacagactggcagaggcagaacaggtgaagtgcccagagagcttacttaggaccacattcactctcttccctaaaagggtgaggcaggatcccaagcttcatactaaggcatgatcttaaggtccagaggggaatgtgggtgaagaagaggcacatgccagggtgatcaagctgtatcatcctgtgcaaaatctttcagtggcttcccatctcactgagttagagtcatgctttactaaggtataccagaccctgactacacactggatttattctggtaatgttttataaagacttgaccagatttcaacccagaccaattaaaacagattttgggattgggcccagacattttttcaaagctcccagagtgactagaatgtgtagctggttctgtcaactaccagcccactctatgtggtcaccccaccccccaatcccacatcccaaacaagcccttcaacctcatctcccaccacactcctcactgctttctttgctctagtgtcacaggcatccttgcagttcctcaaacataccaagtatgcccttgtttggggcctttggattatggcttcctctgcctgcaacattcttccatcatatactctcatgacccacttccatagtctcttcagggttcctaataagagagaccttcccaggccatttcatatcaaaaagcaaatccttcggccattctcttcctttgcatattccttgtcttcctaattctgctttttaatttttccccatagctcctctaatctcaccaactgacttgtatatttgtttgtttcaatgtctgttttctcattctgcaatgtgagctccacaagagcaggctcctagaattggtctctgttatagctcctgctcttagaaatatacctgacacaaagtagttgtttagtctatgtcagttcaatgaggaaacagccactgtagctttatttcttacctagatttgttttggaagcgttactaaaagtcaataaatgataacaggtaaacaaaagcccatttgaaaaggtctactttaaaagtagacctttaaaaagctggaatataaaatggaaagaagctggaaaaataaaaatgtcttaggcttttcaacaaaaagactaaagagtcaaaattgtatgagctgaaaagtatttaaaacaggacatatcacatatagctggccctctgtatctacaggtttcacatctgtggattcaaccaaccacagattgaattttttttaagtacaacaataaaaaataatgcaaacttaaaaatgatacagtaaaaaccactattcacataacatttacattgtattatgtatcataagtaatctagagttgatataaagcacaggcataccttgatttattgagcttcactgtattgtacttcacagataccacaatttttacaaatttaagatttgtggaaactctgcattgagcaggtctattcgtgcaatttttctaaaagcatgtgctcattttgtgtctctgtgttacattttggtaattctcccattatctcagactttctcattattattatatccattatgataatctgggatgaatgatctttgatgttactctttcaattgttttggggcacgattaacttcactgatataaattggctaacttaaatgtggtgtgtgttctatctgctccaccaactggctgttctcccatctctctccctctcaggcctattccctgagacacaacagtattgaaataggccaattaataaccctacaatggcctctaagttttcaagtgaaaagaagagtcatatgtctctcactttaaatcaaaagctagaaataattaagcttggtgacgtaggcatgtccaaagccaagataaaccaaaagctaggcctcttgtgacaaacacctaggcctcttagccaagttgtgaatgcaaagtaaaagttctagaaataaattaaaagtgccactctagtgaacacacaaataataagaaagcaaaacagccttattgctgatatgcaaaaagttttagtggtctggataaaagatcaaacaacccacaacatccccttaagccaaagcttaacccagggcaaggcccttactcttcaattctatgaaagtgaaggaagagaggtgaggaagctgcagaagaaatgttagaagctagtgggcattggtacatgaggtttaaggaaagaagccatctccatagcacaaaagggcaaggttcagcagcaagtgctgatgtagaagctgcagcatgctattgggaagatctaggtaagatgattggtgaaggtggctacactaaataatagactttcaatgtagataaaacagccttctattggaagaagatgccatctagaactttcatagctaaaaaggagaagtcaatgcctagcttcaaagcttcaaagacaggctttcttgttgggtgccaaaatagctgataattttaagttgaaaccaatgctcatttaccattctgaaaatcctagggtcattaagaattatgctaaacctattctgcctctgttctataaatgaaaggacaaagcctttatgacagcatctcaatttacagcacagtttaccaaatattttaagcccacttttgagacctactgctcagaagaaaggatccctttcaaaagattactgctcgttgataatgcacttggtcaaacaggagctctgatggagatgtgcaaggagactaatgttcttttcatgcctgctaacacaaaatccattctgcagcccatagatcatggagtaactttaactttcaagtcttattattttaaaaatgtactttataaggctatagctgccaggtagtgattcttatgatgaatctggacaaagtaaattgaaaatcttctggaaagaaatggcattctagatgccattaagaatattcatgattgggccaggcgcagtggctcacgcctgtaatccaagcactttgggagccttaggcaggtggatcatgaggtcaagagattgagacaatcctggccaacacggtgaaactccgtctctactaaaaatacaaaaattagcctagtgtagtgatgcgtgcctgtagtcccagctactcgggaggctaaggcagaagaattgctagaacccgggatgcagaggttgcagtgagctgagatcgcaccattacactccagcctgggggacagagcaagactccatctcaaacaaacaaacaaacaaacaaaaacacacacaaaaaagaatattcatgattgattggagacggtcaaaacattaacaggagtttggaagaagttgattccaaccctcagggatgagttgaggggttcaagacatcagttgaggaaataaatgtggtgacaatagcaagagaactagaagtatagcctgattgtgattgacttgctgaaagctcctgatacaactttaatggatgaggagttgtttcttatagatgagcaaaggaagtgatttcttgaaatgaactgtattccttgtgaagatgatatgaactttgctgaaatgacaacaaaaagtttagaatattccataaacttccttcataaaacagtggcaagttttgcaagaatttattccaatattttaagagattctactgtgggtaaaatgctgtcaaacagcattgcctgctacagggcagtctttcataaaaggaagagccaactgacgtggcaaatcacattgttgccttattttagggaattgtcatagccactccaacttttggcaaccaccaccctgatcagtcagcagccatcaacatccagggaagacccgccatccaactagatgatgacttgttgaaggctaagatgatccttaggatgttttagcaataaagtattttaaaattaaggtatatactttttttagataccatgttattgcacacttaacagactacagtatagtataaacataacttttacatgtactgggaaaccaaacaatagtgtgacttgctttactgctgtggtctaaaacagaacctgcaatatctctgaggtaggcctataaatgggaatatgtgagtagaccagcctgggcaatatggtgagactttatctctacaaaaattttttaaaagttagccaggcatggtggcatgcagctagtcctagctacttaggaagctgagccaggaggatagcttgagcccaggagttcgaggctgcagtaaactataaacccaccactatactccaacctaggtgaccctagactccagcaagaccctgtctcaaaaaaaaaaaaaaaaaaaaaaaagatggactctacttccgtacctcttctaactgaactggccttgtgacttgctttgacctgtaaaatctgttggcagaaatggcgtgctggttctgagtctacccttgagagattgtacaattctgctcactctctcttggaaatctgctaccctgtgttttaagtctgggctggcctgctccatgaaaagtcatgtggcccagatgctcctattgccctagtgaacagccagttaatcctcaatgcagagccttctagctgttatctgaccataaatacatgcatggacctacctgagaccagaatggaccacagaattatgagccacataaatgttgttttaagccacaaagttttgggatggtttgctacacagcaaaaatccactgacacatctaccaaacattcttcaccccgggattaaaaaatacactaggctaataaatttagttcagatttataaacaatatcctgtattcaaattccataaaagcgaaaaaaaaagaatgtaaaaggctaagaggaagagttgagaaggttatcaaacacaagaaaaataaagcttaatgtattttccttgtttttatttctcccctgcctttgccactattttgattccagaaattttttatttttaagacggagtctcaccctgtcgcccaggctggagtgcagtggcccgatctcggctcactgcaagctctgcctcctgggttcacgatgttctcctgcctcagcctccctagtaactgggactacaggcgcccgccaccacacccggctaattttttgtatttttttagcagaggcagggtttcaccgtgttagccagggtggtctcaatctcatgacctcgtgatccactcgcctcggcctcccaaagcgctgggattacaggcctgagtcaccaggcccagcccccagaaaaattttttaatgaaactgagcttaaataaattatttttaaagttcacttttccagttctaaattgcagatgctgcccttactaatagcaggtgttcaattagcaccaaaggtatataggagttaaaagctaataaatttcatcctaacatttaagcttattatatatgaagtgtttcttctatttgaacttagcttttattcttcatttttaggaagaagtgatatatacatcttcacaatgcctttatctatgcctctgatttatatttgttcatcccacccttagttttagcaaactttgtttatcattctgtttctatagttttcctaggcaagagaagaacaataactttaaatattccaaaatttcctacttatgtaaatttacagagttgaagcacaaatacaaagtgaactatacccagaaaattatcaattttaatttaaggattcgattttccaaacttacagtgatagtttaaaaagccagactttagaaaagaatagagaagggaagaaaagaagcattattaattcattgattctaataaataatgttggaagatatgggaaggaaagttgattggcaatttaaatctggaaattgtttccagaaggtaataataaattttaaaagtcctggatttttcactttgactcccttctaaagatggtcatagaggcacatgtcagaggtgaggaggtatatctggcatacagatgtttatgtcatgaaggcagagacctgaatttgccaataaatcagccagccctcttctgctagacagctaaaccctttctccatcccataaggccaggtaccgttcctatcttttgagttatgaggctgccaaacttatttcatcctatctccagtgaatgcctaaataaaagcaaattttaaaagctgagaaaactatttttctgctctaaaaactgatacaatgccaaactaaaatagctgtgatcatggtattattttgttttatttttttaaattaaagaatccaataaattttccttttcctagttcctctattcttttcccatgtgataaagtagatacctacagcagagctcagattgacgacagagttatgtgaattctttatcgttaaggaatattaatgagtcaatttgtagagcatacccttgaaccaggctaccaataaaagaggaaacttttaagtcttttttggtgtgggaatcagaattatcttcacagggccaaataggtttgcatggcccttcagttgtacagtgtctttttaagccattctttggtgccaggaattactttagaacatatctgcccttttcctagtgtattatttggtaataaagcttaaatgtctttaaattggaacccatgctttgtaactattagtggcattaaacttaaaatggcaaaactgcaattacttttgcaccaatttaagtgtacagtgaaatttaggtacatcagaaacttagaaagtaagatgctgaacttaactctagaaaatataagagagcttaaaaaccataggatatcagaaagaagaaaaaaaaatagaggcttctcttgttaatgggatgtggttacaacagaactggaggaaatagcactgacaaaaaactgtaacagttgaggcctacaagatccttgtgaaaacatcccctttaaaagtcaggttagaactccatatgggctgccttgcattatgtagttcatatcatatgatcaaaatatttcctggatccttaggaagaattggcctctgtattttctaagcttctctgggattcatcaagggactcaaggctaccagtgaagtagtttatgatacaattaactctttcatcattgtagaaccttcttttggagcagggtatgggttattagagggtctgtcaaactgccaataataaactgatcacaaagcaagaccaccttgctttaaaaaatcaaagccaacatggtaagtgcttctttaatatatcatgtattatacttggttggcaccatgcaaaagcctcagagaactccacccaagcaaatggatttaagactgggatatttctcagcttagagttttaaaaaatctgagaacctggtggctcacacctgtaatcccagcactttgggaggccgagtcgggcagaccacgaggtcaggagatcaagaccatcctggctaacatggtgagaccccgtctctactaaaaatacaaaaaagtagccgggcatggtggtggacacctatagtcccagctactaggaaggcggaggcaggagaatgtcatgaacctaggaggcggagcttgcagtgagccaagatcaagcccctgcactccagcctgggcgacagagcatgactccatctcaaaaaaaaaaaaaaaattattttatatcttagatccacagtaaagatatgtttattaaactatggatgacaacaacaaatgcagagatgtattctaatttactcttgttaatggattgggttctaaccatcattgcattgagtaattaaaagacacttagaaaattatgtctgggtggtgaccagagttccttaaggcctttgtttataattcaggcaaagaaaaaaaactgtggccaacatttataaggtgaaaggatgagctgtccagtctattctacactgcatctcaaccagcttcgaactcattaatgcagtgaaattagcaacattgttctatcaggattagaatcttgtaagaaatatgcttgaatgtgccattacaagatggcaggacactaaggggtgggcattacatgagtgttttaaaattattctttacacaattacatatttaagatatttcataatacaaatttaaaggtcagagtattcattaatttccaaaatgcactgaaaggatatagaagcacttttctgagggtaattcctggactgggttaaatgtgatagcccacaattacactttaaaatttttggaattagttaccaaatttaaaaatgtaaaccatttacatttgaaaaatccaaatttccagtttcacttgaaacacttgaagaacgggtaaagttgggtctagattatggcatggcaacgctgggttaaattgaatattaagacatacactctcggctgggcatggtggctcacgcctgtaatcctaccattttgggaggctgaggcgggtggactgcctgagctcaggagtttgagaccagcctggacaacatggtgaaaccccatctctactaaaatacaaaaaactagctgggggaaataaatgcatgtacacaagagcatgagataccactgccacaggaataaaatattccacatattaatgaagttaaggaaagtaatcaaagatgaaccagacttatttcctaaagtaatattttttaaagaaaatttaccctgttcatattgttactcaaattgacagaattctgagttaatatagtataaagctatcatttacttctgattaaaatatatctgaaggccaagacaaaaacgtaaacacagtaatatcaaaaactaacatggtagtcaagcattaaccagaatctgagaaaatttttttttaaaaataacatcagtgaaattcaaacaagaaatataagctatcgaatgtatggccttcaatgtgtgaaacagaaggatttgacatgcagaccaatgaaaactagaaatcctgtttcttaaaaggctaaatgtaaatttgccatatgacccagccattccaatcttaggtacatactcaagagaaataaaaacatatatccaccaaggactttcacagtaatattcctagcagcattgttcataataaccaaaagttggaaacaacccaaaattccacctactggtgagtgaatagataaaatatgatatttgcccaatggaatattatttggcaatttacaaaaggaatgaactatggatacatgatatgacacagatgaatgaatagataaaatatgatatttgcccaatggggtattatttggcaatttacaaaaggaatgaactacggatacatggtatgacacagatgaacttgaaaaacactatgttaagtaaaagaagccaaacctaagagaccacatacagtgcaatttcatttatatgaaatgtctagaaaaggtaaattcatagataaaagaagtagattagtaattgcctggaggtagtcaaagggaaggaagaaataggaattaacaataaatgggcatgaagaatctcactactatggtaattaaaatgtactaaaactgatttatagtcattgttgcacaacgtggaagtttactacaaaatcactgaattgtaccattggaaatggattaattatattacatgtaaaatatgattcaacaaagttatttaaaaaatcaatcaggtagctaaaacttctgcaccccaatcatattttccccagtacatgcataagtactgcacagacaatactgtagctctctggtggttaaatattcaaacaagtaggaattaggcaaggaaaaagagctaggtgactagctgtgcaatcaattatgagatatattctttccttatccaaacattcaggggaagaaacataggtagaaaagacttgggagcacccatgttgaggtttattctttttcatatattaaaggtagttaaagaacaactacaaacttcttcaaatatttctaagatatgtctccctcagagtcagtgtacctgagtgctgcagtagcagcctttcctacttcaaacaggccagaactagctgaatgtttactatcatcagtaattgagctggaattgtgcacgtcaagctgttctatatcttggctctgagaaggggcaactaatagcaaatggagagtgagaggaactaagaaaaaaagccacacagtgagtatctaaagccaacattgaatgtataaagaatgtttgacattcaatgatgatattttctaagagaaagaaaaaggaaaaaagaagataaaattgcactgagtcaaaacaaatcaatgaggaaaggatagtcttttcgacaaacggtgctggggcaattcgagatccacatgcaaaaagatgaatttagactcccgactcactctatacatgaaaatgactcaaattggattgtagatctgaatgtaagagctaaatccatgaaagtcttaggaaaagaaaaaacattgaagtgaatcttcctgtaggttaggcaaagatttcttagatgcgacaccaaaaacataagtgatgaaacaaaagaatacaaattggacttgatcaaaattgcaaacttttgcacttcaaaagacactattaagaaactaaaaagacaagcctaagaagaaaacattttcaaatcatatatctgataaaagacttatatccaaaatacagatagagcttaaattggaactcaaaaataagtagaaaacccaattaaaaataggctaaacattgtgaatagatattgcacaaaataagatatatgagtgcacaataagcagatgaaaagatactcaacatcattagggaaacaaatgaaaaccacaatgatgtatcatttgatgcccagtggactaacaataataaaaaagatatacaatcagtattgaaaagggtgtggataaattagaatcctcatccgttgctggtgggaatgtaaaatggtgcagcccctttggaaaacagttggcagtttctttaaaaagttaaacacaaattcaccatatgacccccaaattctaatcttagctatctacccaagagaaatgaaaacatatatccacacgaaaatttgcatgtgtgtgtttataacagcattatttataaaattataaagtatccactgtccaaaaactgctgaatgaataaacaaaatgtggtatatacatacaattgaatattatttggaaataaaaagaaatgaattactgatacacgctacagggatgaacctcaaaaacactggtctaggtgaaagaagccaggtacaaaaggttacatattttattattgtaattatatgagatattcagaaaataaaagctatagattccaaaaatagattagtggctgattggggttagagctaagaacagaaggtgactgcaaatggacatgagagatctttatgaagtgatggaaatgtcctaaatttgggttatggtgatggttgcataactttgcatatttactaaaaaccattaaattgtacaattaagtgaatttatggtatgtaaatcaaacctcaaagctgtaaaagtaaaatgcatcaggatgatttaaaaagtcagctaaaaaaagaaaaagatcccccaaatatttctgaaaactatttgctatgagaaacagaagatagcgttagaaaatattgtacccttaaaaagataacaaagatggcctctatgaactaacaagaaggtcataacgggagatgaagctctgaagactaggaagctgtcaggaataagaaaactcaaaaaggtctttaaaattcaacacaagaatgaaattttgcactgatgtctttaaggagcacaactgacatcgcagaaaattgattccataatattgaaaacaaacttgaaaattatctaaggccacagaggaaaaggattaaaaaatgaaaggatgagaagatagtaaggaatacaaagcaaagaaaatgctaagaagaaaaaatagagcacatatgattatcaaatctataatacaagaaagcttttctgaaataatgaacacacaagtgttaattttcagagtaaaaggtctgtatgttctggacatgttataaacaaagaccatcacctagatatgcccaggtggtatttctgaaccgggtattcttctttagctacccagattcatgcttgctccttctctgccctgctctgtgctccaggaggctgacttctgcaaactttacccaggctttctccccatcggttgactcctccttgggtttggccaatagaaggcactggcaggcacgctgacaggtggaaggtgggagaagagatggttcagagtatttcccctcactacctttcttttacaacaccacatttttaggcagtagctaagtccccttcaggcgatagatcccactgggaggaccctactcaactgttagttttcactggcctctataatactatttcctcagctatgtcttcatttctcggggtggtgatggtttccaagagtagcaagatttttctgaatgccttgccagccctggtttgttcccataatcctgcccatactgctgtgagtaataatctcttttcatttgaaccatcttgggtgaattctgtttcccactggggaactcagattaatataaatgatgaagaaaaatatccataaatacgtagagagaaaataatctgacctacaaaggaataaaagtcagactgatctcatacttctccattgcaaaatgaatgccagggctaatatataataagacatatttttttgactcaataatttcattctgccattcctgtgtgaaatcaaccaaaggctattttcaaaaatacaaaggttcagaaaatatttataagctttttcctgaaaaatcatgtcaagtattatctaatcaatgaaagattagttaaaactatgatctcagaattgtagaagctgtggtttaaaatcattgatagcattgaattgtttgaatacctataattttttttaacttttattttaagttcagttgtacatatgcaggtttgttatataggtaaacttgtgtcatggcagtttgttgtacagattattttatcacctaggtattaagcctagtgtccattagttatttttcctgatcttctccttctcccacctttcaccttcccacaggctttaaaatggaaagtatatactataacaatgaaacatttagtagtaataattttatctataatctcacattaaattaacaaagaacaggctgtagtgtaaggagttaaactaactgaaagaatttttttttttgagatgggatctcactctgttgccaggctggagtgcagtggtgcgatctcagctcactgcaacctccacctcctgggttcaggcaattctcctgcctcagcctcccaagtagctgggattacaggcacgtgccatcacgcctggctaatttttttgtatttttagtagagacggggtttcaccatgttagccaggatggtcttgatctcctgacctcgtgatctgcctgccttggcctcccaaagtgttgggattacaggcatgagccactgctcctggccaagaattttttaagtttcatttttgattttggcaattgggaaaactgagaattgtacatgtattacagaataaaattaacactagtagaattaaaaataggataactactttcagaacgactctagaacataattattctaatttaaacttagccataccgctaaatgaataaacccaatagctacattttacccttgatagataatacttcccatataacagatattcctaaatacacacagttggatcacttgataaagttctatgaaaatttttcttttcttcatatgcaaagaggcagtggatacaactacatactaacatattagttgctcattatatatcagaataaataagcaattggtctaattatttctactattattcaaggttcttggctaatgtaatggtaagaaactgttactttgtgaaggaaagaaaaaattaacagttaattgtattaaccagttacccccatgattaattggctacacaaatttaaataactgagctagccagcagatcaatgtagaatattctgaatttttaattttaagtgcttctaagttgaatcatgctgaatataaatgctccaattaagtgaaatatataagtataaaatggaaaatgttaggaaaggctaaatgacaacttcaaatgtcatcttcaaatgtcatttaccatctggataaagatcaatttaactgatcctgaaatgtaaaaaatggaattaggacagaagcatcaaataaataattgtatttccattcaaattcagtcaggtctaaggtcttcaacatataactgaaattttaatttggaaaatactttccaatatacagtaaaattgcacattatatttactcaaaagtaacatcacaagtatttgaaaacaaaagaactgagtaaattataatttaagaagctaaagatgagctcctatgacagcaatcttatctttctaaacctcttctcttgcccaaacatttattgatattttttatatgtatcactgtgtgtgtaagtgaattaaatagaaatataattcttaaattcagagaacattaaatttagctgtggagtcaataaaaactacaatgcaaactaaattatcttgtgcttgaccacttttgatcaaagaacagttcttctttctctgctactctgtttctttttaggaagcatatttatctagcagtaaggtagaagagagatatttaacaggacaaatcaacatagtcagccctgttgccctgttgatgaatgcagtggcaggtaatgcagccagattatctccctgtccatcaaaacatttgcaaatgtgagctagtggatcctgaagcagtaaggactaaatacaggcctagtggaagaggcaatgggtcagatggaagaagttagcatggctttataatgaagtgagatttaaaggggaatttcagagagtaatagacattcatgaaaaaatggaaagaaaaagcatttcaaagttctgtagaaacagttggggtcctagacagctctaaaattttattctgatagacttcaaaattcttcccaggaattgtctttattagctaacttacagctacgtgatgttaataacagtaacatctgatatggtaccatacaatttataaagcaccttcacatatgttatctcatgttacccttgtgaatagacaggataggaaaaatatttattttcctttaaaaggtgattaaattgagagtcagctattacgtgacttatctgaagtaacatagctattacatttgtaaaaagtgagatagaattgacagacctgaaaacacttttctagtcctatgttcctagtttttgctccaaagattccctttctgtaagataaaatagatttttccctacagccaccttggaagtcttctctcagtgtttactcaaaacattctctgatagaccctagagtattatagaggattatagattctaggagtattgaggttccctaaagggggtaggttatttgtgggtcaggaagaacatgaaagtggcagtggaggggcagcctgagtccttgcagtgaggccacgcagcactgatgactgcagaccacgcgttggaggcagacagacttgggtgtgggcctggcctgctaactggtgacattaacctctctgagccttagagtcttcatctctaaaatgaggctattaacaacataattatacataaactatctagttcagccactggcatgtaattagcactcaacattggtggctactgagccactgcagccctggggtaattttccatatctctccagccaaattagctgctaaatcaattgtctcagacattgaagatatcaagcaaattccaatggatagtctttgggagtgacaggatctgcagtcttctctcattcattaaaccctcattttacattttttcaccaaagcacaaagaagttaaactgcagagctgatgcccaagatgtcagagttgtcttcttgttcttgggttcctgtccccattccctttctcaagaatccaattgtaccttgtttcagggaagacctgttgtttctgggggataaatggaatttgagagatgcaaagtagagtgctagaagtttctagaaggtagtaagttcttgggagatctctatttctggaagtggggtgaggctggagttacccatctacttccttttcatcatgtttgcactgcactaagcaccatggaaagagccctggttcacagccactttttttttctctgcaaaaatcgggcatgaaacaccttgcttaattaccatttattctctttttgaaattacttattgtttatcaactttgtgccctgttctgttttggttgttgtggacacagttaataacatggacttggtcttaataacatggactcagtctttagtctcaaggagtttacagtcaggaaactgtaaacagtttcagcaggaaaaagttatatacaaatcaagtaaaaaataattattgtaatattacagaagaaggtggtctcattgcctatatgctgggtactgaactagatgctgagggtgccacagggaccaacacaggagcggctcttgtcctcttagaactcacagtctggttggtcttgtgaggacttcatgagaagtatttggtatagtaatgtgtatgtgaagctatagtcaaaatacaacctgtatgaggctctttcctattagaaaataattaacttgtgggcaatgactatccacctggtgacattatctgttattccttatacatattatatatatgcttcataaatagttgctaagtgaaagtcaggtccaagtttatatgtttttatttttatgtaaaaggctgagacagaaataagatgctatttctgccactactgggagcaaggccattcacaggcagccaagggtggccatggtagaggggagtggtggagaatagtgtcgtttattactgtcccaaagcctgaacgcaccacatggactatttaagttacaactgtgccctgagaatctcttaaggaagggattgaggttaattgaggtcttttctgcatgaggttgatgtctgtcacacatacaaaggccaagtaatctcaaaaaattttttattatgctcttgaaaacataaagacttgcaacttcaaaaaacatcagagaagtcatagggaataaaaataaatttcaataataacaaaatacaaacatttggatgtttagctgaggatcagtgctggttaatggccacattctgcggtgagagcctggcagccttccaggggcaggaagcaggggcagatttcattcttagaatcatatggttaaaaaccccacctcaagattttctgcagaaattagaatgtttaggggccatcattcaacaccctggtttatttactggaatagatgatgaattcttttgttatcacatggtctttgtagcttcctagagtgtagagccaaggccacatcaaaaggcatgcctggattattagggagtttcaacttgtactcattcccacatatcaggtcttcagttgtaatttctacagcgctaacacaggccctgagtactgagtagcaatggcgagataactgtgggtcttacttcctgtgttaaaaatggaatcaacctaaatgcctatcaattatagactggataaagaagaatgtggtacatattcaccatggaatagtatgcagccataaaaagaaacagatcacatcctttgcagggacatgaatggagctggaggccattatccttagcaaactaacacaggaacagaaaaccaaatactgcgtgttctcacttacaagtgggcgctaaatgatgagaataccttgacacatggaggggaacaacactcattggggtttttcagaggatggagcgtgggaggagggagaggatcaggaaaaataattaataggcaataggcttaatacctgagtgatgaaataatctgtacaacaaacccccatgacacaagtttacctatgtaacaaacttacacttgtacccctaaacttaaaagttaaaaaataaaaaagatacatgttcctcaaatgtccatttttttaaattaaaaaatgtgtatctggaaaaaaactttcagtagggaccttcagtgggtgcaaacttggagtttaatgcaacgctttgccatctatatctttatatcctctgtgttatctacatggccacactacaccaggcattcaagaaatagctgttaactgactatatgaaaaaataattatagtatttaaataatagtaatgaaactgaattttatacctatgaaactttcagggagaacagagatggataactgacaaagtagaaaatgatatatttataggaagcttcgagagcactcagtttaatttctgcatttacatattaaaaactgaggcctataaattttaagttatttgctcaaggtcatagggaatgacagatgaggtctcaaagctagtttctagactccattattcgtgtactttctaacaatcacactcaaattcatggctaatgaaaaaatgactattatcttttctgtaaaattttaactcataatttgtagattctatagaaaagacctgtcaagtatttagaaggctcatttatccatgatggttgcatgtagagtctgtgtataactgcaactttttgttgtactatatggattttcttcatgattgccccagaggcctcacataaaactcagtgttgcttctgtatctggtcacagctaggaaatgaattctttcaatatttggtccccagccttgagtgatactaaactcagagctgtttcataacaatgtacatcccttggattaagtttttcttcaccttcccagcgtttttacctaattttaaaacccttatttcaatagttttatggctttattgtgaaccatttcaaattccccctcccccgtctttatttattttgtttgatacggagacttgctctgtccctcaggctggagtgcagtggcgatcttggctcactgcaagctccgcctctcgggttcataacattctcctgcctcagcctcccgagtagctgggactacaggcgcccacgaccacgcccggctaattttttgtatttttagtagaacggggtttcaccgtgttagccagggtggtctcgatctcctgacatcatgatccacccacctcggcctcccaaagtgctgggattacaggcatgagccaccacgcccggcctcaaatctccttttaaggtaggttggatacagaagtcagtgaagtaaacaacacttcagtaactatataagtaatatacttccatggagatacttaacatggataaattgctaatctcacagagctgagtcactcaaagttcagccttgagcccttggaccaagttaaactggcctcaaagagttcagggttggagacttaactcttatgaatatgcttcatcagcaaaagcaacaaaaatttaaatatacatgtattaaacaatttttaggaagcccattacgttgcatacatcaaaatcaatagatattttagatgggaactgggaatgtactcaacaggagatgcttaatcaggtaaaaacctgtatttgttcagcactttatagtttcaataatatgaagtgcaaaatttcagccaagaaaggaactggaatctgatcaacaacatgagggtgtgccatgctgtcctgtatttttatgtaaataagaaatttgaaatttataataaaagctcattatattgcacaaaaataatccacaaatttctgatctgtgtactactttgcttctaatgggggcttggcatctgggtaaaacagtcatttacatgtgactgaatattaaagatcacttcagagtacatggaactgtatatctaatttcatttaaaaatccaataaaatttataatgcctacataaatacatctttaaaaatgcattcataggccgaggtgggcggatcacaagatcaggagattgagaccatcctggctaacacagtgaaaccctgtctctactaaaaatacaaaaaattagccgggcatagtggcgtgtgccagtagtcccagctgctggggaggctgaggcagtagaatggcgagaacccaggaagtggagcttgcagtgagccgagattgcaccactgcactccagcctgggcgacagagcaagactatgtctcaaaaaaaaaaaaaaaaaaaaaaaaaaaagaaaaaaaatgcattcataacacatggcaacttcctggaagaaaagcttttctatgcttacctgacacactcttcctttttttaaatttagtctcttattcctgcccatgttattcgacaaactattggctctgagaagatatgactaaaataataatgtgtaattgatgcatctaaatatatgtgtggccatttcattttaaaatatcaatgactactgttttattttaaaatgttaagtaaactaccagaaccaggggaaaatatttgcaagaaatgccccattaaaccgtctcttggaatgcttcttcgctgatttatcactcaacatttctttttcacattttattattcaggtaaacattccctattagaaccaagtgtagctatgatcagttctttattttatataagaaaataaataggtaattgtaaatatatagtacagaatttgcctattaaagtgttccatttgtaaagagaatctgggtatacagatatactctcaagggactctaaaaaacaagaaaaccagagacgctgttaaaatttatagtactaattatttttgtgttctagaatgaaagttcattgtaatagataagatctattataccaagtgcacaaaaaataaaagtccaagatagatggtgctatttcagtaggccagttaagaaccctctggagcaaagactgggaaaagttaagaaaattattttcttttaagaatcttgtgtatgggtgaggtatgagacaatataaggagtacagattctgaaaagaagaaagatctgataaacagttctcatcatcatcatcttactctttttctttgctcttctgttggtgaattctttgctcaaatgtctcttatcaacacttcaacaagcaccagaccttaaaagtgacatcagatgacccttcttctcttgatgattacaaggagtttcaaagctttgaaaataaagttcactgctacagcagcggaacctcatgacaggcagtgatcctcaatttaactggagcaaaaactcacctctcacagagaatgcattgtccaaagcctcctccacaacctcactttatcctatttgtgtatgacgttcaaagagctagttgttgtttacatgacataactttaattaaaaacctctgtctctttgatcatttgcaatgttgaaagatagaatgccattttctacaggttacagaaaggtaaaggcattcttctacagcaagaaagcatagtgctggtagcaatcagtgttttataattgggatgacaatgctattaagattcgaaggcagcattcgaagaggtccctcttgtttgcagttggtcaaacatcagctatttcaatacaagcaatgagatgcaatagatgcagctaattacctctatcctgcctctactcaattcttcttactcccaggtgcctactccatcctctcagggggagaagatagacagatagatgtgaggaggtgcacaagaccttgtgcagccaccagtcctgagagcaattggtcaatacccttgaagctaattaaatttttagcaaacagttctaaactgtagcagatggtctattggtcccagcggtgctgttcaacatctatatgactccatgtaaagatctaaaaacttggaattggaggattgcttctctagagtatattctatgattttttgactttactctataactagtgtcttttctcttaatggagagcttggcctggttctacttttctcctttaaaaaaatgacacgaagggatgacaattcatcactcaccaaattaaccaagttggttaacactcaccaagggcttgaatatgttttcattttacaaccaatgaagcagatggttaactgaagttgttgcaagtcatccaaggagtagcttacaacccttatccacagagtaagccagttataattgcagctcagttttaatatttaccgttttagagcatcataaaattaccattgcaaaaatcttatctgaatgaaacatttctgatttctaaacatattgttaaactactttttctatttctgacatttttctgaacactatgaaggtcaacctcaaatggataattatagagaactcctaccagaatattatttggttttcctttattatatttagtatcctccagatgtttatcttccactctttctcccttcctgtttttttttatttctgttccccaccaccttccatcttctcaaatcgtgaatgccattttcctaataaaagattactttaaaggctgatgttctgcatatatactcctaaattatttttacttttattgttgtattccctaatcaggcattgacatttggttttttgtaactccaaggacaatcaaattgcctctttggtatgaatatatatacccacactgcttggtgctggaacagcattctcccaacccagaaatagagccctgaaggaggaaatagtcacagggaagagtgtgagcaaaagaatcaaggaaacgcatctttacaatctcctgaggacattcccaagctctaccctttcttcctggtggccagattattttggcttttattttaagatgggagaggtcccattgttctggctaatggatagacagtctatgcatattttcccctttaatggaagtaaaatgaaaatcagaaagctcttatgccattcttaagtacaatttttcaggtatccacttaaaacattcacatgacaccaaattacaaggcatttcttttttatctctggtaatcaagcgaagtttgtttgtacttgaatgtttacaatttaaaacactcaaggaatatgagagagcacaagtaacgtatgaatagggaatggcgcctatgagactgacaatgaacattctctttgcttgctcacaggaagctattagattgttgctgctgtgggttgaattctgttctctccttctaccctccctgtcaaattcatatattgaagtcctaacccccagctgctcaggatgaaatctcatttggagacagaggtatttacagaggtaatcaaattaaaatgaggggcgggtgtgatggctcatgcctgtaatcccagctcttagggaggcagaggtgggagaatagcttgagcccaggcaggtcaaatgaggtccttagggaagaccctaatctaatatcactgatatccttacaaaaaggggaagtctggaaacagagagctacagggagaatgccatgtgaccatgaagatggccatctacaagccatagagggaggcctggaacatatcctgccttcgcagccctcagaaagaaccagccctactaacaccttgattccagacttctagactgcagaactgtgagataatacatctttttgctgtttaagccacccagtttttggtattttgttacagctaccctagagaactaatacagttacctactttacttttttttctataaatgaaagtcaatttttgacataccttcaactgtacattattgttgaagaaatatatacttataactatattaatttcatatttgatcttttaactttagggaaaaaatctttgccattccttaaatggcaatgttctgaatttcatgaggaaagtcttacataccagaaaaagatgttgagaatcatcaaaaacaatctttcagtgtagaactggataaaagtagacaagtacaagttacaggccttttaaagtcacccagttactggtgaaaatagatcacacagctcccagtctccatatttttctactatagcacagagcgactcctagctagtagccaaggattttatatcattaaaatatttttttactattttcttatgctaaaaaatgtttaaagtcaggataatataagtaaacagatcacaaaaaatagtttactccactgaaactgtattcttcaaagtcctaagacatattcttaatcagactgttgataattgcactgttatttgcattatatttttgtaccattttgagataagcacagcaatgacaggtgggtaaatacctcagtctgtggaaagattagaattttctttagaattctgcttatccaagcagaggaaatttttcggaagacaacttgtgcatttgctatttctcaatggtagttttcacaagttgcattgtacatgttcaggtagctatcaaagagaagtataatttaattctaattaaattgctgtttatcttaaagctaatcatttcttgataggtgtttctgtctcttttctcctccatttctttaccttgattctgttcttttagaagactcatggtaaacacatttggaatcttcaaatagctgacatgaaggagaactttactcttctaccctaaagggtataactaagatgagctggctaaagttgcaattaaatatatatcatgtaaaaaaaaaaggaaaatctttaaacagagctatgatatgatacaattggctgctgtaaaagatcttcagggatagtcactggtgatattgcaagcattagaacattgcgggaagggctggctttgctatatatagacttcaagcaatgaatggattagatcaaatggaccttagagtcttttccatcctaaaaattcatggttctatgaactcaattgtaagtaatctcatggggctaattattcccctcaactatcacaagtctcattccttcacacgcttgacactctttgcatttaatatgctgtggaattgatttaattaacatacatttagaagacacagagatgaaacacagagatcagtcaaagctcgtacatgtcgagttagataccgtgtttaggtcagaatctttcgttgctactcatttattagtatgaaatcatgtattttttactatttgggtaagagtaaaaaattgtcctgcaatcataaaagaaattttttaacagtcatattagtccttgggattcttttttaaagggctaaaaatacatagtacaccatgaaataatcaaatactaacctctttcattttttccagttcattctgtaaagcttgctttgcaatttcaacttctatgagctgttgcctcagtttctcattttcatcttctgttgttgttctcttttcttccacattttctaattcatggtgaagtctcacagatacatcctttgcaacctgaattaaggtgtttgtaacaataaaatataattaatgacaatataataagggctaaaattgtattcctattgaaagcattaaaacccaatatttatatggtgtttaccatgtgccaggcattattccacaaagtatacatataagccattcacatatatcaatcgtttaaccctacaaaaatcccatgggataggtactattattacttctattttgtagatgaggaaactgagtctcagagaggtcaaggtcacacagctaatgagtagacactgctgggctaagaggcctggcaatctggctctaaattttgttcccttaacttctgcactactctgtggtaaaaaatgttctattgcattttatcacatgtagagaaatttcacaaatttcctttacttcagcaaaactatgaggtagatgtttccattataatctatgttaaagaatgaaaaattgaagtttttacaagtagtgggttgggcttgaatttcaatcttatagcttgaattccagttgcttaatcttaggaaagttttagtccttgagattattattttttgaatgactgtgcatttttgcctcatattttgagattatcctggaaattctagggtttggaagaaaagtggagcagactggtgtagaggcttaggacacaggttgtgattttggactgagtggagagtcagcctggcacctattagctgttttccaggcctgggcacttaacctctgtaaaaggtgtagcttctgcacctataaaatggtgccttaataatccctacattgtaggattttttttcccttgagaattaaatgaaataataatgtatgtaacagtgtttgccacagtgcttagtacatactaagcactcgacaaaagttaagaaaaaaagtaatacgtctttcataaaatgtttacacatagctttctttaaaacaaagattacacgtgatctttaaatcccaatgaagttaatgcaatgaacgtatacttatttggttgtgcaaggagattaagttaatgtctagtttgcatagtcaatgaatctgcctacagtcaaactgaactggagaccacacctgtctagaaaatgcacttcaaggttgagatttttccactggaagaaattctgaaggaacaattgcactttaaaaaaatgagattatttcatttacctcacaccaaacaggctgcaagttggttatctgttttttttttccccctcagggagtcacctaagtggcaagtgcagaaaggaagaagtcctggaagaaggaagtggagtggacacttgctgaaagaaatcttaactctagtatcttcccagtgcagttcctattttgggtttcaactcccccagaggagtccttttagtgcagctcctgactgcccgattccaccggacttctctcagtagacagactgaagggcagatcaaaggctagagcctgcgctctgccacgcccttgcttctgcccagaagggagccttcttctcatcacctcttgaagagccacctttgctcccaggagagcacacttagctcgtttgctgccaggccctccacacactctgcactctttagagccacctgccagttctctcccttctgagaccctagtattttgtggttagcgctacgaaactgtgtccctaaggctccttgccagtcgccactgaagacttctcagcctaaagagcccttggccaaagtccccacccaccgcccctgccgcgcgccattgagcccccgcgccgcagaccttgaggtcctgctccaggctgcgcaacagctccccgtcgatttccccggtctgggcgtagcggagccttttgcgctcggctttgcggaggcggtactgcaggatccggcagtttttgttggctctctccaactcgtggcgcatttcctgcagttgacaggcatcctcctcgaagaaagtgtccctcatctcgtccatctcggttctcagctcatcgatctcgttctgaggcggtgacaggccgcgtgtcaaaatcaaactcgcttccagcccttccgacacacaccgtacacaccccattccaattccaaattctcagctttaattgccctctctctccacgagacaggagtgacaaggagctgagtacagaagaggaaactgggggaaaaaggcccactttaggccctctctcgttctcttactctacctctctccaggaagaagtgtgacaaaccattataattagagaaacggaggcccagatttgaatttaaatgaaaacctcgcgttactgagagcagattcaaattccggcaaggcctaggaaaccccctccctcctttcttgttctcctccctcttcaaggctccctaacaggttagcagcctctgatccctgccggtacacgccctaatcctcccaggcccactcttcccatcccccagccgggtccccccaccctcctcaccttgagagtctcgttttcctctcgcagcttctccatctcctcttgcatttcttcctgctcttggagctgctgcgggtgcggctgcgacgaagggggcgctgccgcctgcatgcccccgccgctcgcgctgccctctgcgctctgctgggggccctccgccgccgccgccattggggaggcggaggcgacggccagggtctcgcaaacggcaggggggccagacaccggggagctgcggctactgctgccgccgccgttcttagcgtgcatctgagccgcggccgccgccgctgccgcccgctccttcttgagatggaactggatgagctcagactgcagacatccttctttccagtagctccctccaccaccgctgccgccccccgcaacgccgcttccggagtttctgctgccggttcctggggttttgcccgcagaagaggaggatggagaaggggaggccccctccccgccgctgccgcccctctgctgagcgcgtacgcctttccctcgccagcccctgggcggcggcggctgcggagcgcccccctccctttccccggagccgccgccggctcctcctccttccccgccccctcctcccccttctccgagcggagggggttccccgagtttcgagggcacggactctagctcccgaggcggctcctcgggcggtccgggcctcctgccgcccaaagcggccagggtcgcggcgggggccgcttcagcaccagccacaggctggacagctcccggagcggcccctttgggcgccaggggcgtcgccttctcggccccacctccgcctcctcggatgctggcgggcggccccgtgcggctcccggtcttgttaccctgctgttgctgctgctgcagctgctgctgccgaacagaattgagtttagtgccggcccccactggggaccgggtggccgcgattgtctgtcgcagcgaactgtccctcggtctagcgggtgactgagctcgctgctgctttctgctgctgccctccgggtgcagacgagcctcagtggctgcagcggcgggagaagctgctgctgtggcaggggcagcgcccccgattggtggctgactcatggctatgaacctaccagatgcgatttggaagagcccattactagatcatcctcttccctcttcaccgccgccaaccttccttcctaagctgggacagaaacaaaaggagagaagaagacaacatgtctgaatttttgcagagcaaagggtgatattgctccatttggatggcgcttaatagaagctttgactttaggaataggatgcagggctgtctttaggaataggatggagggctgtcaattctcattttgcccagggtggcgctgtctccatctcactccacctcagcaaaatgacggatctgaaagcagctgaaccttacattctcatggtagcaggctttggaaagggtgagatacagagtcagacaggaattgatggaaagggagatataaaagaaaagaggataaagtggaaaagaagcttcagaaagaaaagatatccatatattagagttgtcaactctgcttttacaactttggctttccttaccatcaaatccatatgtaaagcctagtttactggagaaagttttcatttaattagtattcccaagttcaattagaggaaaagggttatgatgtagggttcctagagaatattttctacggataaatgacactttccccaggcagctccaacccttaatgttgtttttgggaaaatgcacccaacttcctttataatagaactaaaagaaaatataaataatgaatgcctttaaatcaatctcagtttcaagaaaataatagcattaagaattgtctatatgggttagttattagcaacccaaaaacgtattttttcccttttgggaaataatttttaaaatacatttggaaaagttgtggtcagttctgcagtttcctaagtttctggtgatgaattttcctatgcttacccagttttgtagtcttatgaatcactttagttttaagtgtaattgctagatagaaaatattttcattcttagccatcttcttacatcgcatatcataggcaaaagttgtactttttaaagtgcccatttcctcctatatagcaattctgagacagaacccagaaggctggtgcatcttccctcatggtggtaagatc

SEQ ID NO: 2785 - DNA, 1088 bp, Homo sapiens
actgcagcaatggatacaaaagttaagcaagaacacagtgacagatgacatcctctgcacttcccccgggcatctcgacaaaaaggaattgaaagccctaaatagtgaaattctctgtccaggtttagtaaataacccatccatgccaacacagactagttaccttatggtcaccactcctgcaacaacaacaaatacggctgatactattttacgatctcttacggacgctgtgccactgtctgttctaatattgggacttctgattatgttcatcactattgttttctgtgctgcagggatagtggttcttgttcttcaccgcaggagaagatacaagaagaaacaagtagatgagcaaatgagagacaacagtcctgtgcatcttcagtacagcatgtatggccataaaaccactcatcacactactgaaagaccctctgcctcactctatgaacagcacatggtgagccccatggttcatgtctatagaagtccatcctttggtccaaagcatctggaagaggaagaagagaggaatgagaaagaaggaagtgatgcaaaacatctccaaagaagtcttttggaacaggaaaatcattcaccactcacagggtcaaatatgaaatacaaaaccacgaaccaatcaacagaatttttatccttccaagatgccagctcattgtacagaaacattttagaaaaagaaagggaacttcagcaactgggaatcacagaatacctaaggaaaaacattgctcagctccagcctgatatggaggcacattatcctggagcccacgaagagctgaagttaatggaaacattaatgtactcacgtccaaggaaggtattagtggaacagacaaaaaatgagtattttgaacttaaagctaatttacatgctgaacctgactatttagaagtcctggagcagcaaacatagatggagagtttgagggctttcgcagaaatgctgtgattctgttttaagtccataccttgtaaataagtgccttacgtgagtgtgtcatcaatcagaacctaagcacagcagtaaactatggggaaaaaaaaaaaaaaaaaaa

SEQ ID NO: 2786 - protein, 314 aa, Homo sapiens
LQQWIQKLSKNTVTDDILCTSPGHLDKKELKALNSEILCPGLVNNPSMPTQTSYLMVTTPATTTNTADTILRSLTDAVPLSVLILGLLIMFITIVFCAAGIVVLVLHRRRRYKKKQVDEQMRDNSPVHLQYSMYGHKTTHHTTERPSASLYEQHMVSPMVHVYRSPSFGPKHLEEEEERNEKEGSDAKHLQRSLLEQENHSPLTGSNMKYKTTNQSTEFLSFQDASSLYRNILEKERELQQLGITEYLRKNIAQLQPDMEAHYPGAHEELKLMETLMYSRPRKVLVEQTKNEYFELKANLHAEPDYLEVLEQQT

SEQ ID NO: 2787 - DNA, 4986 bp, Homo sapiens
aggaggctgccgctctggcttgccgccccccgccgccgctgcacaccggacccagccgccgtgccgcgggccatggacctgcccaggggcctggtggtggcctgggcgctcagcctgtggccagggttcacggacaccttcaacatggacaccaggaagccccgggtcatccctggctccaggaccgccttctttggctacacagtgcagcagcacgacatcagtggcaataagtggctggtcgtgggcgccccactggaaaccaatggctaccagaagacgggagacgtgtacaagtgtccagtgatccacgggaactgcaccaaactcaacctgggaagggtcaccctgtccaacgtgtccgagcggaaagacaacatgcgcctcggccttagtctcgccaccaaccccaaggacaacagcttcctggcctgcagccccctctggtctcatgagtgtgggagctcctactacaccacagggatgtgttcaagagtcaactccaacttcaggttctccaagaccgtggccccagctctccaaaggtgccagacctacatggacatcgtcattgtcctggatggctccaacagcatctacccctgggtggaggttcagcacttcctcatcaacatcctgaaaaagttttacattggcccagggcagatccaggttggagttgtgcagtatggcgaagatgtggtgcatgagtttcacctcaatgactacaggtctgtaaaagatgtggtggaagctgccagccacattgagcagagaggaggaacagagacccggacggcatttggcattgaatttgcacgctcagaggctttccagaagggtggaaggaaaggagccaagaaggtgatgattgtcatcacagatggggagtcccacgacagcccagacctggagaaggtgatccagcaaagcgaaagagacaacgtaacaagatatgcggtggccgtcctgggctactacaaccgcagggggatcaatccagaaacttttctaaatgaaatcaaatacatcgccagtgaccctgatgacaagcacttcttcaatgtcactgatgaggctgccttgaaggacattgtcgatgccctgggggacagaatcttcagcctggaaggcaccaacaagaacgagacctcctttgggctggagatgtcacagacgggcttttcctcgcacgtggtggaggatggggttctgctgggagccgtcggtgcctatgactggaatggagctgtgctaaaggagacgagtgccgggaaggtcattcctctccgcgagtcctacctgaaagagttccccgaggagctcaagaaccatggtgcatacctggggtacacagtcacatcggtcgtgtcctccaggcaggggcgagtgtacgtggccggagccccccggttcaaccacacgggcaaggtcatcctgttcaccatgcacaacaaccggagcctcaccatccaccaggctatgcggggccagcagataggctcttactttgggagtgaaatcacctcggtggacatcgacggcgacggcgtgactgatgtcctgctggtgggcgcacccatgtacttcaacgagggccgtgagcgaggcaaggtgtacgtctatgagctgagacagaaccggtttgtttataacggaacgctaaaggattcacacagttaccagaatgcccgatttgggtcctccattgcctcagttcgagacctcaaccaggattcctacaatgacgtggtggtgggagcccccctggaggacaaccacgcaggagccatctacatcttccacggcttccgaggcagcatcctgaagacacctaagcagagaatcacagcctcagagctggctaccggcctccagtattttggctgcagcatccacgggcaattggacctcaatgaggatgggctcatcgacctggcagtgggagcccttggcaacgctgtgattctgtggtcccgcccagtggttcagatcaatgccagcctccactttgagccatccaagatcaacatcttccacagagactgcaagcgcagtggcagggatgccacctgcctggccgccttcctctgcttcacgcccatcttcctggcaccccatttccaaacaacaactgttggcatcagatacaacgccaccatggatgagaggcggtatacaccgagggcccacctggacgagggcggggaccgattcaccaacagagccgtactgctctcctccggccaggagctctgtgagcggatcaacttccatgtcctggacactgctgactacgtgaagccagtgaccttctcagtcgagtattccctggaggaccctgaccatggccccatgctggacgacggctggcccaccactctcagagtctcggtgcccttctggaacggctgcaatgaggatgagcactgtgtccctgaccttgtgttggatgcccggagtgacctgcccacggccatggagtactgccagagggtgctgaggaagcctgcgcaggactgctccgcatacacgctgtccttcgacaccacagtcttcatcatagagagcacacgccagcgagtggcggtggaggccacactggagaacaggggcgagaacgcctacagcacggtcctaaatatctcgcagtcagcaaacctgcagtttgccagcttgatccagaaggaggactcagacggtagcattgagtgtgtgaacgaggagaggaggctccagaagcaagtctgcaacgtcagctatcccttcttccgggccaaggccaaggtggctttccgtcttgattttgagttcagcaaatccatcttcctacaccacctggagatcgagctcgctgcaggcagtgacagtaatgagcgggacagcaccaaggaagacaacgtggcccccttacgcttccacctcaaatacgaggctgacgtcctcttcaccaggagcagcagcctgagccactacgaggtcaagctcaacagctcgctggagagatacgatggtatcgggcctcccttcagctgcatcttcaggatccagaacttgggcttgttccccatccacgggattatgatgaagatcaccattcccatcgccaccaggagcggcaaccgcctactgaagctgagggacttcctcacggacgaggtagcgaacacgtcctgtaacatctggggcaatagcactgagtaccggcccaccccagtggaggaagacttgcgtcgtgctccacagctgaatcacagcaactctgatgtcgtctccatcaactgcaatatacggctggtccccaaccaggaaatcaatttccatctactggggaacctgtggttgaggtccctaaaagcactcaagtacaaatccatgaaaatcatggtcaacgcagccttgcagaggcagttccacagccccttcatcttccgtgaggaggatcccagccgccagatcgtgtttgagatctccaagcaagaggactggcaggtccccatctggatcattgtaggcagcaccctggggggcctcctactgctggccctgctggtcctggcactgtggaagctcggcttctttagaagtgccaggcgcaggagggagcctggtctggaccccacccccaaagtgctggagtgaggctccagaggagactttgagttgatgggggccaggacaccagtccaggtagtgttgagacccaggcctgtggccccaccgagctggagcggagaggaagccagctggctttgcacttgacctcatctcccgagcaatggcgcctgctccctccagaatggaactcaagctggttttaagtggaactgccctactgggagactgggacacctttaacacagacccctagggatttaaagggacacccctacacacacccaggcccacgccaaggcctccctcaggctctgtggagggcatttgctgccccagctactaaggtgctaggaattcgtaatcatccccatcctccagagaaacccagggaggaagactgtaaatacgaacccaatctgcacactccaggcctctagttccagaaggatccaagacaaaacagatctgaattctgcccttttctctcacccatcccacccctccattggctcccaagtcacacccactcccttccccatagataggcccctggggctcccgaagaatgaacccaagagcaagggcttgatggtgacagctgcaagccagggatgaagaaagactctgagatgtggagactgatggccaggcaagtgggaccaggatactggacgctgtcctgagatgagaggtagccgggctctgcacccacgtgcattcacattgaccgcaactcacacattcccccaccagctgcagccccttgctctcagctgccaaccctcccgggtcacttttgttcccaggtacctcatgggaagcatgtggatgacacaatccctggggctgtgcattcccacgtcttcttgctgcagcctgcccctagacatggacgcaccggcctggctgcagctgggcagcaggggtaggggtagggagcctcccctccctgtatcaccccctccctacacacacacacacacacacacacacacactgcctcccatccttccctcatgcccgccagtgcacagggaagggcttggccagcgctgttgaggggtcccctctggaatgcactgaataaagcacgtgcaaggactcccggagcctgtgcagccttggtggcaaatatctcatctgccggcccccaggacaagtggtatgaccagtgataatgccccaaggacaaggggcgtgcctggcgcccagtggagtaatttatgccttagtcttgttttgaggtagaaatgcaagggggacacatgaaaggcatcagtccccctgtgcatagtacgacctttactgtcgtatttttgaaaaattaaaaatacagtgtttaaaaacaaaaaaaaaaaaaaaaaaaaa

SEQ ID NO: 2788 - protein, 1189 aa, Homo sapiens
MDLPRGLVVAWALSLWPGFTDTFNMDTRKPRVIPGSRTAFFGYTVQQHDISGNKWLVVGAPLETNGYQKTGDVYKCPVIHGNCTKLNLGRVTLSNVSERKDNMRLGLSLATNPKDNSFLACSPLWSHECGSSYYTTGMCSRVNSNFRFSKTVAPALQRCQTYMDIVIVLDGSNSIYPWVEVQHFLINILKKFYIGPGQIQVGVVQYGEDVVHEFHLNDYRSVKDVVEAASHIEQRGGTETRTAFGIEFARSEAFQKGGRKGAKKVMIVITDGESHDSPDLEKVIQQSERDNVTRYAVAVLGYYNRRGINPETFLNEIKYIASDPDDKHFFNVTDEAALKDIVDALGDRIFSLEGTNKNETSFGLEMSQTGFSSHVVEDGVLLGAVGAYDWNGAVLKETSAGKVIPLRESYLKEFPEELKNHGAYLGYTVTSVVSSRQGRVYVAGAPRFNHTGKVILFTMHNNRSLTIHQAMRGQQIGSYFGSEITSVDIDGDGVTDVLLVGAPMYFNEGRERGKVYVYELRQNRFVYNGTLKDSHSYQNARFGSSIASVRDLNQDSYNDVVVGAPLEDNHAGAIYIFHGFRGSILKTPKQRITASELATGLQYFGCSIHGQLDLNEDGLIDLAVGALGNAVILWSRPVVQINASLHFEPSKINIFHRDCKRSGRDATCLAAFLCFTPIFLAPHFQTTTVGIRYNATMDERRYTPRAHLDEGGDRFTNRAVLLSSGQELCERINFHVLDTADYVKPVTFSVEYSLEDPDHGPMLDDGWPTTLRVSVPFWNGCNEDEHCVPDLVLDARSDLPTAMEYCQRVLRKPAQDCSAYTLSFDTTVFIIESTRQRVAVEATLENRGENAYSTVLNISQSANLQFASLIQKEDSDGSIECVNEERRLQKQVCNVSYPFFRAKAKVAFRLDFEFSKSIFLHHLEIELAAGSDSNERDSTKEDNVAPLRFHLKYEADVLFTRSSSLSHYEVKLNSSLERYDGIGPPFSCIFRIQNLGLFPIHGIMMKITIPIATRSGNRLLKLRDFLTDEVANTSCNIWGNSTEYRPTPVEEDLRRAPQLNHSNSDVVSINCNIRLVPNQEINFHLLGNLWLRSLKALKYKSMKIMVNAALQRQFHSPFIFREEDPSRQIVFEISKQEDWQVPIWIIVGSTLGGLLLLALLVLALWKLGFFRSARRRREPGLDPTPKVLE

SEQ ID NO: 2789 - DNA, 459 bp, Homo sapiens
  misc_feature (430)..(430): n is a, c, g, or t
ggtaaaggaacatttaagtctctccagtaagtgtgaacaggaaggcatgggatagaagagagtccttatggagtggactggccacatgaactgtcctccagccactctttatttagatgggaagtggcatggtcctctgaacgctgcaggctggaaatgatccccagggcacatgcaatctgtggaaaggaatacatcggacagtgcaacatggtgagggctttcaatttgctgtggttgctgtatttttaacaagacaacccggagcttcgattaggaataacctatcattagagttgttcctttaaaaaatgttgatgaataaagcaaatgtgggtttaaaatgccaacttatttttcactttgatattggtgctttattaagtgataccatagtttctctctcttttcccctgttactttaaaaagnattttaaaattgtggtttgtatataaggg

SEQ ID NO: 2790 - DNA, 253 bp, Homo sapiens
ggcacgaggcgtcgggggaggacaacaaagggccgcgggcggcgggcagtggtgtcccagtctcccggtgcttccctgaggctgaggcgcccggcctcccgcccgccgcgctccagatgaagtgtgagcactgcacgcgcaaggaatgtagtaagaaaacaaaaactgatgaccaagagaatgtgtcagccgatgcaccgagtccagcccaggaaaatggagagaagggagaattccacaagttggctgatgc

SEQ ID NO: 2791 - DNA, 519 bp, Homo sapiens
ggtaaacattacacatcagggcttgatttattgttttgttgattgtctagacttaagcaagtgataagaaaatgctaataatgcagattaaacttagaagtatctcacatctataaccattacattgtaaatagaacaaaaaattgcaaaaatattcttaatagaatattctcatatattctcaatagaaaactactatccgatctagcaaagaagtagctgacaacatggaccagtaaagtttcgacaaatgtcttctcatcttactcattaccataaacaaaaatgtcaaccagcacacatgttagaacaaccccctttgttaatcagttgtggatacaagagtatggaaaaaatcactgaaagcattctgagaaaaatccatttgctgtacggaattcacaataaaattatatatttttatttgtaaattgtgtactaagcattgtttttattggtaaaatttataataaacttatatatgtgtacacacacacgttttttctagagagttagttt

SEQ ID NO: 2792 - DNA, 450 bp, Homo sapiens
aaccccagagcgggatactcgggatctgagcagaggggaaagtcatctaagaggctgctgctttacaaggtctgggcacagcgctgcccctcccttcctccctgaagtttgcatgaagtgcacattaggctgtaattaggggatttgggaggagaactttcctggtgacgctttgcttttcttctgctcttggtgagaaagtgcctccttcttcccaggatcaggacctctgccatccagcgccacaaagagacattctgcacacacactcacacacacacacacacacacactctcacactcgcccagagacaaacttaaggtgaggagaaagagcgctagcttcacttgatctccagcttccaacttaagcagaacttgagagcatccgaactcctggatttcaggacaaggtaaaacttgcaaattgtttccccctcttttggttat

SEQ ID NO: 2793 - DNA, 732 bp, Homo sapiens
atgggcaagaacaagcagccacgcggccagcagaggcaggggggcccgccggccgcggacgccgctgggcccgacgacatggagccgaagaagggcacgggggcccccaaggagtgcggggaggaggagccccggacctgctgcggctgccggttcccgctgctgctcgccctgctgcagctggccctgggcatcgccgtgaccgtggtgggcttcctcatggcgagcatcagctcctccctgctagtcagggacactccattttgggctgggatcattgtctgcttagtggcctatcttggcttgtttatgctttgtgtctcatatcaggttgacgaacggacatgtattcaattttctatgaaactgttatactttctgctgagtgccctgggcctgacggtctgtgtgctggccgtggcctttgccgcccaccactattcgcagctcacacagtttacctgtgagaccacactcgactcttgccagtgcaaactgccctcctcggagccgctcagcaggacctttgtttaccgggatgtgacggactgtaccagcgtcactggcactttcaaactgttcttactcatccagatgattcttaatttggtctgcggccttgtgtgcttgttggcctgctttgtgatgtggaaacataggtaccaggtcttctatgtgggtgtcaggatatgctccctcacggcttccgaaggcccccagcaaaagatctaa

SEQ ID NO: 2794 - protein, 243 aa, Homo sapiens
MGKNKQPRGQQRQGGPPAADAAGPDDMEPKKGTGAPKECGEEEPRTCCGCRFPLLLALLQLALGIAVTVVGFLMASISSSLLVRDTPFWAGIIVCLVAYLGLFMLCVSYQVDERTCIQFSMKLLYFLLSALGLTVCVLAVAFAAHHYSQLTQFTCETTLDSCQCKLPSSEPLSRTFVYRDVTDCTSVTGTFKLFLLIQMILNLVCGLVCLLACFVMWKHRYQVFYVGVRICSLTASEGPQQKI

SEQ ID NO: 2795 - DNA, 1689 bp, Homo sapiens
cgggagcgtggggtatctcgaggtgccgggttgcaggcgctcaggggcgctagggtttgaggcctgctttctgctcgcgccagcagagcactacctgaggcagcgaggcgcagcgagcctagcctccccgcgccctgggcagtgtggccatggagaatcaggtgttgacgccgcatgtctactgggctcagcgacaccgcgagctatatctgcgcgtggagctgagtgacgtacagaaccctgccatcagcatcactgaaaacgtgctgcatttcaaagctcaaggacatggtgccaaaggagacaatgtctatgaatttcacctggagttcttagaccttgtgaaaccagagcctgtttacaaactgacccagaggcaggtaaacattacagtacagaagaaagtgagtcagtggtgggagagactcacaaagcaggaaaagcgaccactgtttttggctcctgactttgatcgttggctggatgaatctgatgcggaaatggagctcagagctaaggaagaagagcgcctaaataaactccgactggaaagcgaaggctctcctgaaactcttacaaacttaaggaaaggatacctgtttatgtataatcttgtgcaattcttgggattctcctggatctttgtcaacctgactgtgcgattctgtatcttgggaaaagagtccttttatgacacattccatactgtggctgacatgatgtatttctgccagatgctggcagttgtggaaactatcaatgcagcaattggagtcactacgtcaccggtgctgccttctctgatccagcttcttggaagaaattttattttgtttatcatctttggcaccatggaagaaatgcagaacaaagctgtggttttctttgtgttttatttgtggagtgcaattgaaattttcaggtactctttctacatgctgacgtgcattgacatggattggaaggtgctcacatggcttcgttacactctgtggattcccttatatccactgggatgtttggtggaagctgtctcagtgattcagtccattccaatattcaatgagaccggacgattcagtttcacattgccatatccagtgaaaatcaaagttagattttccttttttcttcagatttatcttataatgatatttttaggtttatacataaattttcgtcacctttataaacagcgcagacggcgctatggaaaaaaaagaaaaagatccactaaaaagaaagatttagatggcttcttgccagtttgagcctaatctgattcttacagttttaccttcttgaaccaatgtaaaagtttttttaatgttaaatgattaaattctcagtgaggctatcttccttttccccagtaacattcctgaatttactgttatcttattgtagtacttgcatgacatggattcctgatatctgatgagaggttcattcttgtgtattcagttaatgacaccaaaaggctcagcccaccccaaccctatctcatgttcagtctgtctaatacatgccagagatttttttttcaaaaagtgctttatccctacaatgtactgacagttcttacagttgaggatttggttcttttcagctaattgcttggtggattaaaaaaagcaagactaatgtcaactctaatggaaggctggttaaaagtggactcaggcaagg

SEQ ID NO: 2796 - protein, 373 aa, Homo sapiens
MENQVLTPHVYWAQRHRELYLRVELSDVQNPAISITENVLHFKAQGHGAKGDNVYEFHLEFLDLVKPEPVYKLTQRQVNITVQKKVSQWWERLTKQEKRPLFLAPDFDRWLDESDAEMELRAKEEERLNKLRLESEGSPETLTNLRKGYLFMYNLVQFLGFSWIFVNLTVRFCILGKESFYDTFHTVADMMYFCQMLAVVETINAAIGVTTSPVLPSLIQLLGRNFILFIIFGTMEEMQNKAVVFFVFYLWSAIEIFRYSFYMLTCIDMDWKVLTWLRYTLWIPLYPLGCLVEAVSVIQSIPIFNETGRFSFTLPYPVKIKVRFSFFLQIYLIMIFLGLYINFRHLYKQRRRRYGKKRKRSTKKKDLDGFLPV

SEQ ID NO: 2797 - DNA, 1203 bp, Homo sapiens
catctggtgtattgactgtggccagtcttaaagctagtttttgctatgtggaacatgctgctctaattcagatttaaagagtttcttcctgttaattcgaagctcactgtgcctcttgtttccgagggaagaaggactgattaagtcatctaaatggatgcaatactgaattacaggtcagaagatactgaagattactacacattactgggatgtgatgaactatcttcggttgaacaaatcctggcagaatttaaagtcagagctctggaatgtcacccagacaagcatcctgaaaaccccaaagctgtggagacttttcagaaactgcagaaggcaaaggagattctgaccaatgaagagagtcgagcccgctatgaccactggcgaaggagccagatgtcgatgccattccagcagtgggaagctttgaatgactcagtgaagacgtcaatgcactgggttgtcagaggtaaaaaagacctgatgctggaagaatctgacaagactcataccaccaagatggaaaatgaggaatgtaatgagcaaagagaaagaaagaaagaggagctggcttcaaccgcagagaaaacggagcagaaagaacccaagcccctagagaagtcagtctccccgcaaaattcagattcttcaggttttgcagatgtgaatggttggcaccttcgtttccgctggtccaaggatgctccctcagaactcctgaggaagttcagaaactatgaaatatgaaatatctctgcttcaaaaaatgaggaagagcaagactgtcccctatgctgccaacatgcagtctttgtttatgtcttaaaaatgtcatgtttatgtcatgtctgtgaattgctgagtactaattgattcctccatccttgaatcagttctcataatgctttttaaataagaaaaattcagaagatgaatttcttccaatatttgaataaattaaagctcttagatacagagtagattgtattatatgctttttcctattaatactacttatagaaatccattaaaaagcaatctctgtacagtgtatttaaatatttcattgacatactgtgatctctattagtgatggatgtacaaaaaatgttttcttacccttgacttacaatgaaatgtgaaattacttgtctgaaccccgtggggagaaataaataattttcccaaagttcaaaaaaa

SEQ ID NO: 2798 - protein, 198 aa, Homo sapiens
MDAILNYRSEDTEDYYTLLGCDELSSVEQILAEFKVRALECHPDKHPENPKAVETFQKLQKAKEILTNEESRARYDHWRRSQMSMPFQQWEALNDSVKTSMHWVVRGKKDLMLEESDKTHTTKMENEECNEQRERKKEELASTAEKTEQKEPKPLEKSVSPQNSDSSGFADVNGWHLRFRWSKDAPSELLRKFRNYEI

SEQ ID NO: 2799 - DNA, 411 bp, Homo sapiens
  misc_feature (167)..(167): n is a, c, g, or t
  misc_feature (201)..(201): n is a, c, g, or t
  misc_feature (217)..(217): n is a, c, g, or t
  misc_feature (223)..(223): n is a, c, g, or t
  misc_feature (349)..(349): n is a, c, g, or t
  misc_feature (375)..(375): n is a, c, g, or t
tgttgacatagttggaaaactgctctctcatttttaaaactttatttccacttccccagctttgaagatttctatgttaggaaaagccaaactaaatatactggctatggtgttgtaacaatgctggtttctggaatggtggcatgtcctccccttccctctcctcnaactcctttaaaaatatgactatttttgaaatgnagcccgaggagggagnaatcangggttcagaacaataagcgcccttcacacattcaagttcccagacaccaggtgaacgagcgagctccttgtcgggggcggggcggctgtcctcaccgaattcgcagcggcatcttcctcccgggancggccgggttcccttctgccagcganggagactcccaagcaaaaggcgggtgggggtgggcg

SEQ ID NO: 2800 - DNA, 4250 bp, Homo sapiens
gaacacatcgcgtttgcatcccagaaagtagtcgccgcgactatttcccccaaagagacaagcacacatgtaggaatgacaaaggcttgcgaaggagagagcgcagcccgcggcccggagagatcccctcgataatggattactaaatgggatacacgctgtaccagttcgctccgagccccggccgcctgtccgtcgatgcaccgaaaagggtgaagtagagaaataaagtctccccgctgaactactatgaggtcagaagccttgctgctatatttcacactgctacactttgctggggctggtttcccagaagattctgagccaatcagtatttcgcatggcaactatacaaaacagtatccggtgtttgtgggccacaagccaggacggaacaccacacagaggcacaggctggacatccagatgattatgatcatgaacggaaccctctacattgctgctagggaccatatttatactgttgatatagacacatcacacacggaagaaatttattgtagcaaaaaactgacatggaaatctagacaggccgatgtagacacatgcagaatgaagggaaaacataaggatgagtgccacaactttattaaagttcttctaaagaaaaacgatgatgcattgtttgtctgtggaactaatgccttcaacccttcctgcagaaactataagatggatacattggaaccattcggggatgaattcagcggaatggccagatgcccatatgatgccaaacatgccaacgttgcactgtttgcagatggaaaactatactcagccacagtgactgacttccttgccattgacgcagtcatttaccggagtcttggagaaagccctaccctgcggaccgtcaagcacgattcaaaatggttgaaagaaccatactttgttcaagccgtggattacggagattatatctacttcttcttcagggaaatagcagtggagtataacaccatgggaaaggtagttttcccaagagtggctcaggtttgtaagaatgatatgggaggatctcaaagagtcctggagaaacagtggacgtcgttcctgaaggcgcgcttgaactgctcagttcctggagactctcatttttatttcaacattctccaggcagttacagatgtgattcgtatcaacgggcgtgatgttgtcctggcaacgttttctacaccttataacagcatccctgggtctgcagtctgtgcctatgacatgcttgacattgccagtgtttttactgggagattcaaggaacagaagtctcctgattccacctggacaccagttcctgatgaacgagttcctaagcccaggccaggttgctgtgctggctcatcctccttagaaagatatgcaacctccaatgagttccctgatgataccctgaacttcatcaagacgcacccgctcatggatgaggcagtgccctccatcttcaacaggccatggttcctgagaacaatggtcagataccgccttaccaaaattgcagtggacacagctgctgggccatatcagaatcacactgtggtttttctgggatcagagaagggaatcatcttgaagtttttggccagaataggaaatagtggttttctaaatgacagccttttcctggaggagatgagtgtttacaactctgaaaaatgcagctatgatggagtcgaagacaaaaggatcatgggcatgcagctggacagagcaagcagctctctgtatgttgcgttctctacctgtgtgataaaggttccccttggccggtgtgaacgacatgggaagtgtaaaaaaacctgtattgcctccagagacccatattgtggatggataaaggaaggtggtgcctgcagccatttatcacccaacagcagactgacttttgagcaggacatagagcgtggcaatacagatggtctgggggactgtcacaattcctttgtggcactgaatgacatttcaactcctctaccagataatgaaatgtcttacaacacagtgtatgggcattccagttccctcttgcccagcacaaccacatcagattcgacggctcaagaggggtatgagtctaggggaggaatgctggactggaagcatctgcttgactcacctgacagcacagaccctttgggggcagtgtcttcccataatcaccaagacaagaagggagtgattcgggaaagttacctcaaaggccacgaccagctggttcccgtcaccctcttggccattgcagtcatcctggctttcgtcatgggggccgtcttctcgggcatcaccgtctactgcgtctgtgatcatcggcgcaaagacgtggctgtggtgcagcgcaaggagaaggagctcacccactcgcgccggggctccatgagcagcgtcaccaagctcagcggcctctttggggacactcaatccaaagacccaaagccggaggccatcctcacgccactcatgcacaacggcaagctcgccactcccggcaacacggccaagatgctcattaaagcagaccagcaccacctggacctgacggccctccccaccccagagtcaaccccaacgctgcagcagaagcggaagcccagccgcggcagccgcgagtgggagaggaaccagaacctcatcaatgcctgcacaaaggacatgccccccatgggctcccctgtgattcccacggacctgcccctgcgggcctcccccagccacatccccagcgtggtggtcctgcccatcacgcagcagggctaccagcatgagtacgtggaccagcccaaaatgagcgaggtggcccagatggcgctggaggaccaggccgccacactggagtataagaccatcaaggaacatctcagcagcaagagtcccaaccatggggtgaaccttgtggagaacctggacagcctgccccccaaagttccacagcgggaggcctccctgggtcccccgggagcctccctgtctcagaccggtctaagcaagcggctggaaatgcaccactcctcttcctacggggttgactataagaggagctaccccacgaactcgctcacgagaagccaccaggccaccactctcaaaagaaacaacactaactcctccaattcctctcacctctccagaaaccagagctttggcaggggagacaacccgccgcccgccccgcagagggtggactccatccaggtgcacagctcccagccatctggccaggccgtgactgtctcgaggcagcccagcctcaacgcctacaactcactgacaaggtcggggctgaagcgtacgccctcgctaaagccggacgtaccccccaaaccatcctttgctcccctttccacatccatgaagcccaatgatgcgtgtacataatcccagggggagggggtcaggtgtcgaaccagcaggcaaggcgaggtgcccgctcagctcagcaaggttctcaactgcctcgagtacccaccagaccaagaaggcctgcggcagagccgaggacgctgggtcctcctctctgggacacaggggtactcacgaaaactgggccgcgtggtttggtgaaggtttgcaacggcggggactcaccttcattctcttccttcactttcccccacaccctacaacaggtcggacccacaaaagacttcagttatcatcacaaacatgagccaaaagcacatacctaccccatcccccacccccacacacacacacacatgcacacaacacatacacacacacgcacagaggtgaacagaaactgaaacattttgtccacaacttcacgggacgtggccagactgggtttgcgttccaacctgcaaaacacaaatacattttttaaaatcaagaaaatttaaaaagacaaaaaaaaaagaattcattgataattctaactcagactttaacaatggcagaagtttactatgcgcaaatactgtgaaatgcccgccagtgttacagctttctgttgcagcagataaatgccatgttgggcaactatgtcatagatttctgctcctcctctcttttaatgaaataacgtgaccgttaacgcaagtaactctttatttattgttcaccctttttttccttaaggaaaggactcttccaaatatcatcctatgaacagctcttcagaaagcccattgaaagttaaactatttaacgtgaaatccattaactggaataattgagtttctttatttttacaataaattcactgagtaaat

SEQ ID NO: 2801 - protein, 1049 aa, Homo sapiens
TTMRSEALLLYFTLLHFAGAGFPEDSEPISISHGNYTKQYPVFVGHKPGRNTTQRHRLDIQMIMIMNGTLYIAARDHIYTVDIDTSHTEEIYCSKKLTWKSRQADVDTCRMKGKHKDECHNFIKVLLKKNDDALFVCGTNAFNPSCRNYKMDTLEPFGDEFSGMARCPYDAKHANVALFADGKLYSATVTDFLAIDAVIYRSLGESPTLRTVKHDSKWLKEPYFVQAVDYGDYIYFFFREIAVEYNTMGKVVFPRVAQVCKNDMGGSQRVLEKQWTSFLKARLNCSVPGDSHFYFNILQAVTDVIRINGRDVVLATFSTPYNSIPGSAVCAYDMLDIASVFTGRFKEQKSPDSTWTPVPDERVPKPRPGCCAGSSSLERYATSNEFPDDTLNFIKTHPLMDEAVPSIFNRPWFLRTMVRYRLTKIAVDTAAGPYQNHTVVFLGSEKGIILKFLARIGNSGFLNDSLFLEEMSVYNSEKCSYDGVEDKRIMGMQLDRASSSLYVAFSTCVIKVPLGRCERHGKCKKTCIASRDPYCGWIKEGGACSHLSPNSRLTFEQDIERGNTDGLGDCHNSFVALNDISTPLPDNEMSYNTVYGHSSSLLPSTTTSDSTAQEGYESRGGMLDWKHLLDSPDSTDPLGAVSSHNHQDKKGVIRESYLKGHDQLVPVTLLAIAVILAFVMGAVFSGITVYCVCDHRRKDVAVVQRKEKELTHSRRGSMSSVTKLSGLFGDTQSKDPKPEAILTPLMHNGKLATPGNTAKMLIKADQHHLDLTALPTPESTPTLQQKRKPSRGSREWERNQNLINACTKDMPPMGSPVIPTDLPLRASPSHIPSVVVLPITQQGYQHEYVDQPKMSEVAQMALEDQAATLEYKTIKEHLSSKSPNHGVNLVENLDSLPPKVPQREASLGPPGASLSQTGLSKRLEMHHSSSYGVDYKRSYPTNSLTRSHQATTLKRNNTNSSNSSHLSRNQSFGRGDNPPPAPQRVDSIQVHSSQPSGQAVTVSRQPSLNAYNSLTRSGLKRTPSLKPDVPPKPSFAPLSTSMKPNDACT

SEQ ID NO: 2802 - DNA, 412 bp, Homo sapiens
gttctggagctgatcaaatgccaggagaagctgtgtatctattggatggtcaactacaactttgaagatgagaccatcaggaacatcctgctgcaccagctccaatcagcgaggccagtaatcttggatccagttgacccaaccaataatgtgagtggagataaaatatgctggcaatggctgaaaaaagaagctcaaacctggttgacttctcccaacctggataatgagttacctgcaccatcttggaatgttctgcctgcaccactcttcacgaccccaggccaccttctggataagttcatcaaggagtttctccagcccaacaaatgcttcctagagcagattgacagtgctgttaacatcatccgtacattccttaaagaaaactgcttccgacaatcaacagcca

SEQ ID NO: 2803 - DNA, 151 bp, Homo sapiens
gtttactcgctgctgtgcccatctatcagcaggctccgggctgaagattgttctcttctctcctccaaggtctagtgacggagcccgcgcgcggcgccaccatgcggcagaaggcggtatcgcttttcttgtgctacctgctgctcttcac

SEQ ID NO: 2804 - DNA, 1592 bp, Homo sapiens
ttctaatgcttttaaggttccttttcagcccttcctcctcgtaatccacaaatactgagaccaaggcattttttgggtcagtcctaatttcaagcattctatcctgccctccccaaatgaactcacacttattagaccatatgttcctatattagttcaggaagggggaaaaaatgttcatcacacttgtatataagagatcatagaaaaacagtttactaacctgtgaaaataccattcattctctgtttacctctggtccacagctaagcaatcagtaggatataaatgtaccctatgttcactattcagtattcataagtatactacttatgaattggaaatctgacacaacatttacatgacctaattttgaaaatttaaaatagtgtaaggcccctaggcttaattttacaggggaaagattaaaaggacacaagcaaacatatattctctctctgtgctgtgggacactggtaattttttgacttaaaatatttgatacttaaaatgccaaacttctacatttctgcagtaacaaggcagttatcatattgaataccatttctttctctccagtaagtaaatattagcacatgaactgaaaatattaagtgattataaaaaagtccaaataaattcattaaaatttagcttggcaaaatgttagtttcatgttcttggtagaagtccttttatatttatattcaaatgaaatgaacaatttacaagcaaaggaaatggcatcaaatatttgacaccctgcctcccaaggtgtattgattcatgctttttgctcagatctaggtttctccactcaggaaaagaggagaatgtacccatacttgggaaaacaagtttccgatggcacagctttgatcaaacagcaaaattctatccatctatgtattgccatctgacagtatgacaaatggtcccatgtgcgatattcacactgcattgtagtcaaacctgtaagtcaaaggatatgaaataatagtaactacacattaagcacagaagaaaatgaaacaaacaaaaaggttttaaaccaaccaaaaatatgtcttattttggatgttctatatgttcttacattctctcaggtcttttgtgtcgttatgaacacaattctaacaagcttgattattttatttccattcacatattacaggcaacaagctgaaaaagtagaacagggtgtagagagacaggacaaagtacagattagggcttgaagtgcccctgaccagtcgacagcaaccacatggaataatgactcatgtgcattaatgatcacactaaatgatatttgttttttacctagtccttcaactgacagcttaaagaacttcaggttgttctgattcttgagtctcctctacaacttcagagaggactttcattttattttggatcaaatgctccacaactagttgaaactggaattaaattttatatgaagttcctagatgatttaaagctgtaagaagaagaataatgaatcataagaaaacttgctgctacagatatcaaaaaggaatgttaccatccctcatgctaatccttttcattttaaataaacaggatct

SEQ ID NO: 2805 - DNA, 3780 bp, Homo sapiens
tactggacaaacatttcctccaaggacacagctctctgcctccatgtcaccacctttgaaggactgactgattccctcggctggtgccagtgcctgctcctgccatggggcccgcggggagcctgctgggcagcggacagatgcagatcaccctgtggggaagtctggcagctgtcgccattttcttcgtcatcaccttcctcatcttcccgtgctctagttgtgacagggaaaagaagccgcgacagcatagtggggaccatgagaacctgatgaacgtgccttcagacaaggagatgttcagccgttcagttactagcctggcaacagatgctcctgccagcagtgagcagaatggggcactcaccaatggggacattctttcagaggacagtactctgacctgcatgcagcattacgaggaagtccagacatcggcctcggatctgctggattcccaggacagcacagggaaaccaaaatgtcatcagagtcgggagctgcccagaatccctcccgagagcgcagtggataccatgctcacggcgagaagtgtggacggggaccaggggctggggatggaagggccctatgaagtgctcaaggacagctcctcccaagaaaacatggtggaggactgcttgtatgaaactgtgaaggagatcaaggaggtggctgcagctgcacacctggagaaaggccacagtggcaaggcaaaatctacttctgcctcgaaagagctcccagggccccagactgaaggcaaagctgagtttgctgaatatgcctcggtggacagaaacaaaaaatgtcgtcaaagtgttaatgtagagagtatccttggaaattcatgtgatccagaagaggaggccccaccacctgtccctgttaagcttctggacgagaatgaaaaccttcaggagaaggaagggggagaggcggaagagagtgccacagacacgaccagtgaaactaacaagagatttagctcattgtcatacaagtctcgggaagaagaccccactctcacagaagaagagatctcagctatgtactcatcagtaaataaacctggacagttagtgaataaatcggggcagtcgcttacagttccggagtccacctacacctccattcaaggggacccacagaggtcaccctcctcctgtaatgatctctatgctactgttaaagacttcgaaaaaactccaaacagcacacttccaccagcagggaggcccagcgaggagccagagcctgattatgaagcgatacagactctcaacagagaggaagaaaaggccaccctggggaccaatggccaccacggtctcgtcccaaaggagaacgactacgagagcataagtgacttgcagcaaggcagagatattaccaggctctagcaacccagaagacaaccctgggtagcctgtgatcagtgtctggagacgtttcttctgtggaagagaagaagtgacacaaacctatacttcatatgctgctttagtcacctgaagatggttggagaggccctgtcgactgttctcccagttgttcagtttctgagacagagaggtacggactaggctgcacctgagtgtgcccctgcctgccagatggacaggtacacccaagcacatctccctgctgcaccctcaccacccacaaaagatcccagctgtcagtggtctcatctcattagtgaggaaagccaagctgtatggaaaagctgcactcaccaaggaccacaatgcccccggcctaaagtactgccattcagaaaagcaggtttttcttcctctctttccttttctctgtctgctactgactttaaggctttttcccccttgaaatgtccagattcctgtggttcatcccaaggaaattttcacacaaagcttggcctttgccctcaatataggtgttttaggatggtgacaaaccatggctgctgctttctgcccagctcgccagtcctccccaaagagttgcgcatcagcacctggggatctggaccctgcgggtgaagggatggggagggacgtccctggagtctcttctgtctttgttccttcttattttggcattcgatatcagcagcctctccccaaagtacttgaagtcagttttagatgctttattttatttttctagtcaaaaacgtgtttcccccagtgtttgaaaactcgtccgaatcttttcagtattttccatgagtattgtggtacttctagacttgtttaagcccagaactcattccttcaaaacagagagccttaatctttatgttgggacacagaccacatatttggacggcagccatgcatccatcgctgaagggctgtggacatgaatgtgtatttcccatggtctccgctgcccacaccaacagtgtggcatctcataagttaactgctaccctaaggtaatctaagattaaaatgtaaacatttatttttgttatgtaagtttataagatgttttatgttcaatgcctaatttctcaaaagtgccagaaaaaaatgtatattagctattttgattttatgtacaatgatttatactctccttttgaaaagataccataaagcacataagctagatcactacaaggagctgttatcttttttctaatcaagtgtttaaaacactgatggtttttaaagactcacctttttaaatggtacttggagctcctgattcaaattacctagaccccctagagaaataaatggaatatacataaataatcattttcagtggtttatggtgggcaatattgcaatatttgaaatggtaaaaatggaaagaagaacaaaatatgatgagaggtggctgtgaattataaacctcataaaagtgtcataattccattaaggtttaattatattttttcagaaaacagtgatgaattctgtagtccagtgcttgccaatgcaaattgcctattggaatcttcttcctatattttacaaacatcagtggctgaaatagctcagagtaagagctcagcctggtttgaatttaatcatctctttagatcttataaggccagcattaggaaacttgttcacttttcattttcaaaggagcctagttgaagtgctattatgagtgtgggctatggaaagacagcttttcctacactgataaagaaaaaaaatgaggaaattatttcatccccttgtgacatctgtgactttttggatttaataatcttgctgtttttcctctttatgacaaagaatataattgggaggatgaagtgtcttaaaaattgtagagaccagctcactggaatgtttttccatccctgtattcatggcttgactctgtgactgctctacactgcatgtctgacattgcagagtgagctatgttgaggtaaactggttggttgtcattattttgcaatcagcctggtctctcccatgaagatgtcgtgtgcataagcacaatcatcactgattagaagatcacagcagaatacccttgtattagagagaagttcgtaccttgcatttctctgaattctagtctctcataagcactgctttgctggatgattttcactgctttgtgttaatgactttgagcgatctctcacatgatggggttctttagtacatggtaacagccatgtcatcttacacacctagcattgtgcatgctgtagtgacatcctttataggcaccttacagcttaaaacttttgtttcatttcatgccttacttatcagaaaggcaggaaagtaggtatgatctctaaagtaaaaaaaa

SEQ ID NO: 2806 - protein, 432 aa, Homo sapiens
MGPAGSLLGSGQMQITLWGSLAAVAIFFVITFLIFPCSSCDREKKPRQHSGDHENLMNVPSDKEMFSRSVTSLATDAPASSEQNGALTNGDILSEDSTLTCMQHYEEVQTSASDLLDSQDSTGKPKCHQSRELPRIPPESAVDTMLTARSVDGDQGLGMEGPYEVLKDSSSQENMVEDCLYETVKEIKEVAAAAHLEKGHSGKAKSTSASKELPGPQTEGKAEFAEYASVDRNKKCRQSVNVESILGNSCDPEEEAPPPVPVKLLDENENLQEKEGGEAEESATDTTSETNKRFSSLSYKSREEDPTLTEEEISAMYSSVNKPGQLVNKSGQSLTVPESTYTSIQGDPQRSPSSCNDLYATVKDFEKTPNSTLPPAGRPSEEPEPDYEAIQTLNREEEKATLGTNGHHGLVPKENDYESISDLQQGRDITRL

SEQ ID NO: 2807 - DNA, 5433 bp, Homo sapiens
ggggagattcgggaccatggcacctgtgcacggcgacgactctctgtcagattcagggagttttgtatcttctcgagcccggcgagaaaaaaaatcaaagaaggggcgccaagaagccctagaaagactgaaaaaggctaaagctggtgagaagtataaatatgaagtcgaggacttcacaggtgtttatgaagaagttgatgaagaacagtattcgaagctggttcaggcacgccaggatgatgactggattgtggatgatgatggtattggctatgtggaagatggccgagagatttttgatgatgaccttgaagatgatgcccttgatgctgatgagaaaggaaaagatggtaaagcacgcaataaagacaagaggaatgtaaagaagctcgcagtgacaaaaccgaacaacattaagtcaatgttcattgcttgtgctggaaagaaaactgcagataaagctgtagacttgtccaaggatggtctgctaggtgacattctacaggatcttaacactgagacacctcaaataactccaccacctgtaatgatactgaagaagaaaagatccattggagcttcaccgaatcctttctctgtgcacaccgccacggcagttccttcaggaaaaattgcttcccctgtctccagaaaggagcctccattaactcctgttcctcttaaacgtgctgaatttgctggcgatgatgtacaggtcgagagtacagaagaagagcaggagtcaggggcaatggagtttgaagatggtgactttgatgagcccatggaagttgaagaggtggacctggagcctatggctgccaaggcttgggacaaagagagtgagccagcagaggaagtgaaacaagaggcggattctgggaaagggaccgtgtcctacttaggaagttttctcccggatgtctcttgttgggacattgatcaagaaggtgatagcagtttctcagtgcaagaagttcaagtggattccagtcacctcccattggtaaaaggggcagatgaggaacaagtattccacttttattggttggatgcttatgaggatcagtacaaccaaccaggtgtggtatttctgtttgggaaagtttggattgaatcagccgagacccatgtgagctgttgtgtcatggtgaaaaatatcgagcgaacgctttacttccttccccgtgaaatgaaaattgatctaaatacggggaaagaaacaggaactccaatttcaatgaaggatgtttatgaggaatttgatgagaaaatagcaacaaaatataaaattatgaagttcaagtctaagccagtggaaaagaactatgcttttgagatacctgatgttccagaaaaatctgagtacttggaagttaaatactcggctgaaatgccacagcttcctcaagatttgaaaggagaaactttttctcatgtatttgggaccaacacatctagcctggaactgttcttgatgaacagaaagatcaaaggaccttgttggcttgaagtaaaaaagtccacagctcttaatcagccagtcagttggtgtaaagttgaggcaatggctttgaaaccagacctggtgaatgtaattaaggatgtcagtccaccaccgcttgtcgtgatggctttcagcatgaagacaatgcagaatgcaaagaaccatcaaaatgagattattgctatggcagctttggtccatcacagttttgcattggataaagcagccccaaagcctccctttcagtcacacttctgtgttgtgtctaaaccaaaggactgtatttttccatatgctttcaaagaagtcattgagaaaaagaatgtgaaggttgaggttgctgcaacagaaagaacactgctaggttttttccttgcaaaagttcacaaaattgatcctgatatcattgtgggtcataatatttatgggtttgaactggaagtactactgcagagaattaatgtgtgcaaagctcctcactggtccaagataggtcgactgaagcgatccaacatgccaaagcttgggggccggagtggatttggtgaaagaaatgctacctgtggtcgaatgatctgtgatgtggaaatttcagcaaaggaattgattcgttgtaaaagctaccatctgtctgaacttgttcagcagattctaaaaactgaaagggttgtaatcccaatggaaaatatacaaaatatgtacagtgaatcttctcaactgttatacctgttggaacacacctggaaagatgccaagttcattttgcagatcatgtgtgagctaaatgttcttccattagcattgcagatcactaacatcgctgggaacattatgtccaggacgctgatgggtggacgatccgagcgtaacgagttcttgttgcttcatgcattttacgaaaacaactatattgtgcctgacaagcagattttcagaaagcctcagcaaaaactgggagatgaagatgaagaaattgatggagataccaataaatacaagaaaggacgtaagaaaggagcttatgctggaggcttggttttggaccccaaagttggtttttatgataagttcattttgcttctggacttcaacagtctatatccttccatcattcaggaatttaacatttgttttacaacagtacaaagagttgcttcagaggcacagaaagttacagaggatggagaacaagaacagatccctgagttgccagatccaagcttagaaatgggcattttgcccagagagatccggaaactggtagaacggagaaaacaagtcaaacagctaatgaaacagcaagacttaaatccagaccttattcttcagtatgacattcgacagaaggctttgaagctcacagcgaacagtatgtatggttgcctgggattttcctatagcagattttacgccaaaccactggctgccttggtgacatacaaaggaagggagattttgatgcatacgaaagagatggtacaaaagatgaatcttgaagttatttatggagatacagattcaattatgataaacaccaatagcaccaatctggaagaagtatttaagttgggaaacaaggtaaaaagtgaagtgaataagttgtacaaactgcttgaaatagacattgatggggttttcaagtctctgctactgctgaaaaaaaagaagtacgctgctctggttgttgagccaacgtcggatgggaattatgtcaccaaacaggagctcaaaggattagatatagttagaagagattggtgtgatcttgctaaagacactggaaactttgtgattggccagattctttctgatcaaagccgggacactatagtggaaaacattcagaagaggctgatagaaattggagaaaatgtgctaaatggcagtgtcccagtgagccagtttgaaattaacaaggcattgacaaaggatccccaggattaccctgataaaaaaagcctacctcatgtacatgttgccctctggataaattctcaaggaggcagaaaggtgaaagctggagatactgtgtcatatgtcatctgtcaggatggatcaaacctcactgcaagtcagagggcctatgcgcctgagcagctgcagaaacaggataatctaaccattgacacccagtactacctggcccagcagatccacccagtcgtggctcggatctgtgaaccaatagacggaattgatgctgtcctcattgcaacgtggttgggacttgaccccacccaatttagagttcatcattatcataaagatgaagagaatgatgctctacttggtggcccagcacagctcactgatgaagagaaatacagggactgtgaaagattcaaatgtccatgccctacatgtggaactgagaatatttatgataatgtctttgatggttcgggaacagatatggagcccagcttgtatcgttgcagtaacatcgattgtaaggcttcacctctgacctttacagtacaactgagcaacaaattgatcatggacattagacgtttcattaaaaagtactatgatggctggttgatatgtgaagagccaacctgtcgcaatcgaactcgtcaccttccccttcaattctcccgaactgggcctctttgcccagcctgcatgaaagctacacttcaaccagagtattctgacaagtccctgtacacccagctgtgcttttaccggtacatttttgatgcggagtgtgcactggagaaacttactaccgatcatgagaaagataaattgaagaagcaattttttacccccaaagttctgcaggactacagaaaactcaagaacacagcagagcaattcttgtcccgaagtggctactccgaagtgaatctgagcaaactcttcgctggttgtgccgtgaaatcctaagggaatcccaggagtaaccaaggagggggtagttgaaaaatcccagcttcctctgtgcctccactctggccctaaatgctcctccagcatctgtttctcccttgggactgtgtctcatgtttgtgtgaatgtagaccaggaaagggggctgcaaaaatgttgagtctaatgttcgtaagcatcatagaaattcctgtcttcatattaagatgtactgctttaaaacacaactccagagcccctccccaagctcccctccccaagctcctgaagacccggtttctgagggagggaaattgctacttggattgagagtagctggaatgtaagtgaccccaggctttgctcagggcctttagcctatgtcccccccacataaagagagcttctcagagcctgactgaagagctgacgttttgctttttcatatgccaattaaacccggtctaaatccaaatgcttctccagccatccaggagtggctgtccttttcagtcttgtcttttatataggtagctgagggggaagatttagaagccttgcactcactaaatagattaaacagagcaggcttgtttgttgaattgctccaaagtccaacagacacacactgagcaggtgttttacactcacattccctttttgccccttaaatagaaagtgcaggtaaaggtttatacaacaagaaagcacattgaaaataatttgatactctaacaatccattaacatgtgtaggggttacggtgaggatcatgtgttgtattcgaaaaacggggagagggatgcttaattggccctcgcttgctatttttttctcatttcttcacaataggaccgtctttggcagcagcaaaatgtatttcagtatggcagtctttcctctcttacattattggtaagattatactaacaaaatgtttccccttgtacaattatgctgtgtttttaaaaaacattgacctgtgtgtttttataaaagaaaaagtatgttgtgccttcttcttaagaataaagttttctaaaggg

SEQ ID NO: 2808 - protein, 1462 aa, Homo sapiens
MAPVHGDDSLSDSGSFVSSRARREKKSKKGRQEALERLKKAKAGEKYKYEVEDFTGVYEEVDEEQYSKLVQARQDDDWIVDDDGIGYVEDGREIFDDDLEDDALDADEKGKDGKARNKDKRNVKKLAVTKPNNIKSMFIACAGKKTADKAVDLSKDGLLGDILQDLNTETPQITPPPVMILKKKRSIGASPNPFSVHTATAVPSGKIASPVSRKEPPLTPVPLKRAEFAGDDVQVESTEEEQESGAMEFEDGDFDEPMEVEEVDLEPMAAKAWDKESEPAEEVKQEADSGKGTVSYLGSFLPDVSCWDIDQEGDSSFSVQEVQVDSSHLPLVKGADEEQVFHFYWLDAYEDQYNQPGVVFLFGKVWIESAETHVSCCVMVKNIERTLYFLPREMKIDLNTGKETGTPISMKDVYEEFDEKIATKYKIMKFKSKPVEKNYAFEIPDVPEKSEYLEVKYSAEMPQLPQDLKGETFSHVFGTNTSSLELFLMNRKIKGPCWLEVKKSTALNQPVSWCKVEAMALKPDLVNVIKDVSPPPLVVMAFSMKTMQNAKNHQNEIIAMAALVHHSFALDKAAPKPPFQSHFCVVSKPKDCIFPYAFKEVIEKKNVKVEVAATERTLLGFFLAKVHKIDPDIIVGHNIYGFELEVLLQRINVCKAPHWSKIGRLKRSNMPKLGGRSGFGERNATCGRMICDVEISAKELIRCKSYHLSELVQQILKTERVVIPMENIQNMYSESSQLLYLLEHTWKDAKFILQIMCELNVLPLALQITNIAGNIMSRTLMGGRSERNEFLLLHAFYENNYIVPDKQIFRKPQQKLGDEDEEIDGDTNKYKKGRKKGAYAGGLVLDPKVGFYDKFILLLDFNSLYPSIIQEFNICFTTVQRVASEAQKVTEDGEQEQIPELPDPSLEMGILPREIRKLVERRKQVKQLMKQQDLNPDLILQYDIRQKALKLTANSMYGCLGFSYSRFYAKPLAALVTYKGREILMHTKEMVQKMNLEVIYGDTDSIMINTNSTNLEEVFKLGNKVKSEVNKLYKLLEIDIDGVFKSLLLLKKKKYAALVVEPTSDGNYVTKQELKGLDIVRRDWCDLAKDTGNFVIGQILSDQSRDTIVENIQKRLIEIGENVLNGSVPVSQFEINKALTKDPQDYPDKKSLPHVHVALWINSQGGRKVKAGDTVSYVICQDGSNLTASQRAYAPEQLQKQDNLTIDTQYYLAQQIHPVVARICEPIDGIDAVLIATWLGLDPTQFRVHHYHKDEENDALLGGPAQLTDEEKYRDCERFKCPCPTCGTENIYDNVFDGSGTDMEPSLYRCSNIDCKASPLTFTVQLSNKLIMDIRRFIKKYYDGWLICEEPTCRNRTRHLPLQFSRTGPLCPACMKATLQPEYSDKSLYTQLCFYRYIFDAECALEKLTTDHEKDKLKKQFFTPKVLQDYRKLKNTAEQFLSRSGYSEVNLSKLFAGCAVKS

SEQ ID NO: 2809 - DNA, 458 bp, Homo sapiens
  misc_feature (26)..(26): n is a, c, g, or t
  misc_feature (333)..(333): n is a, c, g, or t
  misc_feature (401)..(401): n is a, c, g, or t
  misc_feature (420)..(420): n is a, c, g, or t
tgacatggttgtcatcgcctctgagncctctggggaaaagctccgtctccccgagcctggagacttgggccacatggctgtcctttgccagcgctgtctgccaccccctgatctatggactctggaacaagacagttcgcaaagaactactgggcatgtgctttggggaccggtattatcgggaaccatttgtgcaacgacagaggacttccaggctcttcagcatttccaacaggatcacagacctgggcctgtccccacacctcactgcgctcatggcaggtggacaagcccctggggacaagcagcagcacgggggacactggcttcaanttgctcccaggactcagggacagatatgatgcttgcttgaggactacacgtcttgatgacaaccctcnctctcactgcacttgccanccaagagaaggagctcggttgacatttgaggatgaagt

SEQ ID NO: 2810 - DNA, 339 bp, Homo sapiens
  misc_feature (46)..(46): n is a, c, g, or t
  misc_feature (263)..(263): n is a, c, g, or t
  misc_feature (305)..(305): n is a, c, g, or t
gcacgaggatgcggggaggctgcgtgtgtgcgcagggagagaacgncggccaccttcccgcttccgagctgggtgcgcgccgagcacaggagattgcctgcgtttaggaggtggctgcgttgtgggaaaagctatcaaggaagaaattgccaaaccatgtctttttttctgttttcagagtagttcacaacagatctgagtgttttaattaagcatggaatacagaaaacaacaaaaaacttaagctttaatttcatctgganttccacagttttcttagctccctggacccggttgacctgttngctcttcccgctggctgctctatcacgtggtgct

SEQ ID NO: 2811 - DNA, 441 bp, Homo sapiens
tcccctttatttccactccccacccgcgtggctttgctctccctctcccccctcagctcgtctgtatttggagctccggaagctgccggcgactctcccctggagcagcgtgactgacaccggctcctattcagctgggaggagggagaggggaggagaaggggagggccgcggaaggagggtacgagtggccgaccacagatctgcattgccgaggacgggaccccagggcagcgaagcacaatggccaccatgcacggactggcggaaagactggaacgagctggcagccgcctggagccgctgtctgcagagtcccacaggccccctgggaactgcagggaagtcaatggtgtgattgcaggtgtggccccttccgtggaagccttcgacaagctgatggacagaatggtggccgagttttgaaagaacagtaagatc

SEQ ID NO: 2812 - DNA, 1872 bp, Homo sapiens
ggcacaagcctctctctctctccctctctctctccctctctctctctccctgtgtcgcttaaacaacagtcctaacttttgtgtgttgcaaatataaaaggcaagccatgtgacagagggacagaagaacaaaagcatttggaagtaacaggacctctttctagctctcagaaaagtctgagaagaaaggagccctgcgttcccctaagctgtgcagcagatactgtgatgatggattgcaagtgcaaagagtaagacaaaactccagcacataaaggacaatgacaaccagaaagcttcagcccgatcctgccctttccttgaacgggactggatcctaggaggtgaagccatttccaattttttgtcctctgcctccctctgctgttcttctagagaagtttttccttacaacaatgagaaaacatgtactagctgcatccttttctatgctctccctgctggtgataatgggggatacagacagtaaaacggacagctcattcataatggactcggaccctcgacgctgcatgaggcaccactatgtggattctatcagtcacccattgtacaagtgtagctcaaagatggtgctcctggccaggtgcgaggggcactgcagccaggcgtcacgctccgagcctttggtgtcgttcagcactgtcctcaagcaacccttccgttcctcctgtcactgctgccggccccagacttccaagctgaaggcactgcggctgcgatgctcagggggcatgcgactcactgccacctaccggtacatcctctcctgtcactgcgaggaatgcaattcctgaggcccgctgctgtgtgtggcttctggatgggacaactgtagaggcagttcgaccagccagggaaagactggcaagaaaagagttaaggcaaaaaaggatgcaacaattctcccgggactctgcatattctagtaataaagactctacatgcttgttgacagagagagatactctgggaacttctttgcagttcccatctcctttctctggtacaatttcttttggttcattttcagattcaggcattttcccccttggctctcaatgctgtttgggtttccaacaattcagcattagtgggaaaaagtgggccctcatacacaagcgtgtcaggctgtcagtgtttggtgcacgctggggaagaatttactttggaaagtagaaaagcccagcttttcctgggacatcttctgttattgttgatgtttttttttaccttgtcattttggtctaaggttgccattgctgctaaaggttaccgatttcaaagtccagataccaagcatgtggatatgtttagctacgtttactcacagccagcgaaactgacattaaaataactaacaaacagattcttttatgtgatgctggaactcttgacagctataattattattcagaaatgactttttgaaagtaaaagcagcataaagaatttgtcacaggaaggctgtctcagataaattatggtaaaattttgtaagggagcagacttttaaagacttgcacaaatacggatcctgcactgactctggaaaaggcatatatgtactagtggcatggagaatgcaccatactcatgcatgcaaattagacaaccaagtatgaatctatttgtgggtgtgctatagctttagccgtgtcacgggcatcattctctaatatccacttgtccatgtgaaacatgttgccaaaatggtcctggcttgtcttctgaacgtttgggtcaaatgtgttttggtcctggaggctcaaattttgagttattcccacgttttgaaataaaaagagtatattcaaaaaaaaaaaaaaaaaaaaaaaaaaaaaaaaaaaa

SEQ ID NO: 2813 - protein, 133 aa, Homo sapiens
MRKHVLAASFSMLSLLVIMGDTDSKTDSSFIMDSDPRRCMRHHYVDSISHPLYKCSSKMVLLARCEGHCSQASRSEPLVSFSTVLKQPFRSSCHCCRPQTSKLKALRLRCSGGMRLTATYRYILSCHCEECNS

SEQ ID NO: 2814 - DNA, 386 bp, Homo sapiens
tttttttttttttttttccccctttccacgttaattttaaccatttgcaaaacaaaatacattaaacaagggcagttggctttgctaaattaaaataaaatgatctcgagtagaaaacgtaaaaaatgaatcaagataagtagaaatggtagcaaacaataataaataagttttctaatattaacaaagcaaaataaaattgaccacatgcgtttgacactactagattttttttaatttttcattttttaaacaaacatttgcacagagcttaagaattataagtggctgtgttttaaaaaaaaaaactggtctgcaattggcagttgagtttctcctggagccaccaccgcagcagcggctgataaagtgcgtgcgcggagttt

SEQ ID NO: 2815 - DNA, 682 bp, Homo sapiens
aagcttgcggccgccgcgcgccccgaagccggtcttgcctgctctcccggcaattcggcatccctggcacacatgtctctgcaagaaggactgtaaagatgtcatagcacagccccgccgccgccaggctgcacagatgcagcccgcgcagccgtccgaggctgggaggaggctcggggctcggaagatgaacctcagaacaaaggacttgtctattcccccatatctcagcctccaaggcaacgcacaatacctttgcgggcaaacactaagaaattttttaatgtcccctccgagcggcacggcaaaacgccagtttttcggttttgttcttaaatcatcgatttccccaccccattatccagtatctagggtgtttcgcatccccccagctccccaaagtagccttcccggggagaaccactcgggctcggatttagggaatgccttcacagggacgcggatgatgaaagggcggggacggaggcaggacggcaggaggaaggaggcaagggccctggggctcaccgaagcgaggcgcacgagtacgagcgaagtctggtctgcgcagtggccccttgtgccgaaatcttggcctcgagggccaaattcccctaagtgagtcggattaaattcgaaatcatgtcataactggttcccggggggaaatggtaatccgctc

SEQ ID NO: 2816 - DNA, 143 bp, Homo sapiens
ggtacgaccaaattatgtaaaatatggtttaatagtagatatccgaccaaacgttttattggggttttattgcaatctactttcagcaataaggggaaagtgagcatgaaaagaactccaatcagactttattcaataaagca

SEQ ID NO: 2817 - DNA, 420 bp, Homo sapiens
  misc_feature (222)..(222): n is a, c, g, or t
  misc_feature (330)..(330): n is a, c, g, or t
  misc_feature (371)..(371): n is a, c, g, or t
  misc_feature (383)..(383): n is a, c, g, or t
  misc_feature (393)..(393): n is a, c, g, or t
  misc_feature (403)..(403): n is a, c, g, or t
gaagtaggaatagcttgggcccaggaatttgagaccagcttgggcaacacagggaaacctggtctctaaaaaaaaatttttttttaatattctgggcttagtgactcgtgcctatattcccagcttttctagaggctgaggtgggaggatctggttcgcttgagcccaggagatggaggctgcagtgagccatgattgccctactgcattctagcctgggcnacagagagagcgagcctgtgtccaaaaagtaagtaagtaaataaatacataaaaataaatacgggtttctgtcacctcgcttcagaatcagacagctagaggtggggncctggaattggtgttgttaatgcattctccaggaatttctncctgcatagggnaattggaaancactggcttncctctctctgagcatct

SEQ ID NO: 2818 - DNA, 1866 bp, Homo sapiens
tctctgaagttccagaatcgatggaagtggacggcacgccgcggcggggtgggtgcaagatgccgctgccggttcaggtgtttaacttgcagggggccgtggagcccatgcagatcgacgtggacccccaggaagacccgcagaatgcacctgacgtcaactacgtggtggagaaccccagcctggatctggaacagtacgcggccagctacagcggcctgatgcgcatcgaacggctgcagttcattgctgatcactgccccacgctgcgggtggaggccctgaagatggccctctccttcgtgcagagaacctttaacgtggacatgtacgaggagatccaccgcaagctctcagaggccaccagggagctgcagaacgcacccgacgccatccctgagagcggcgtggagcccccagccctggacacggcctgggtggaggccacgcggaagaaggcgctgctgaagctggagaagctggacacagacctgaagaactacaagggcaactccatcaaagagagcatccggcgcggccacgacgacctgggcgaccactacctggactgtggggacctcagcaacgccctcaagtgctattcccgggcccgggactactgcaccagcgccaaacacgtcatcaacatgtgcctcaatgtcatcaaggtcagcgtctacttgcagaattggtctcatgtgctcagctacgtcagcaaggctgagtccaccccagagattgccgagcagcgaggagagcgtgacagccagacccaggccatcctcaccaagctcaagtgtgccgcaggcttggcagagctggccgccaggaagtacaagcaggctgccaagtgcctcctgctggcttcctttgatcactgtgacttccctgagctgctgtcccccagcaacgtggccatctacggtggcctgtgcgccttggctacctttgaccggcaggagctgcagcgcaatgtcatctccagcagctccttcaagttgttcttggagctggagccacaggtccgagacatcatcttcaaattctacgagtccaagtacgcctcatgtctcaagatgctggacgagatgaaggacaacctgctcctggacatgtatctggccccccatgtcaggaccctgtacacccagattcgcaaccgtgccctcatccagtatttcagcccctacgtgtcagccgacatgcataggatggcggcagccttcaataccacggtggccgccctggaggacgagctgacgcagctaatcctggaggggctgatcagtgcccgtgtggactcacacagcaagatcctatacgcccgggacgtggatcagcgcagcaccacctttgagaagtctctgttgatgggcaaggagttccagcgccgcgccaaggccatgatgctgcgggcagctgtgctccgcaaccagatccatgtcaagtccccgcccagagaagggagccagggggagctgactccagccaacagccagtcccggatgagcaccaacatgtgaggggtgaaccttggcctccaggacatctgcaccccctccccacctccacggacctcggacctccaggcggctcagtgctgcctgcggcccagctaaggggcctggccactgggtgccacccagcctgtgtgccctccctggggctgaggaggcaggcggctgctagttgtggcccttcctggaaggagaggcctgcagggctcgaccctgtgggtttctgtccccagggagcagactgtgcggcacccaggcccagtggcaccatttcccagacccctcctgttcccgcctcagtcaggtgcagacaagtgggcggtgtccattaaagagcagactcagcgtt

SEQ ID NO: 2819 - protein, 500 aa, Homo sapiens
MEVDGTPRRGGCKMPLPVQVFNLQGAVEPMQIDVDPQEDPQNAPDVNYVVENPSLDLEQYAASYSGLMRIERLQFIADHCPTLRVEALKMALSFVQRTFNVDMYEEIHRKLSEATRELQNAPDAIPESGVEPPALDTAWVEATRKKALLKLEKLDTDLKNYKGNSIKESIRRGHDDLGDHYLDCGDLSNALKCYSRARDYCTSAKHVINMCLNVIKVSVYLQNWSHVLSYVSKAESTPEIAEQRGERDSQTQAILTKLKCAAGLAELAARKYKQAAKCLLLASFDHCDFPELLSPSNVAIYGGLCALATFDRQELQRNVISSSSFKLFLELEPQVRDIIFKFYESKYASCLKMLDEMKDNLLLDMYLAPHVRTLYTQIRNRALIQYFSPYVSADMHRMAAAFNTTVAALEDELTQLILEGLISARVDSHSKILYARDVDQRSTTFEKSLLMGKEFQRRAKAMMLRAAVLRNQIHVKSPPREGSQGELTPANSQSRMSTNM

SEQ ID NO: 2820 - DNA, 505 bp, Homo sapiens
ttgaatttaggtgacactatagaatagctatgacgtcgcatgcacgcgtacgtaagcttggatcctctagagcggcgcctactactactaaattcgcggccgcgtcgacaggattcagagtgcccctccggcctcgccatgaggctcttcctgtcgctcccggtcctggtggtggttctgtcgatcgtcttggaaggcccagccccagcccaggggacccctgacgtctccagtgccttggataagctgaaggagtttggaaacacactggaggtcaaggctcgggaactcatcagccgcatcaaacagagtgatctttctgcctagatgcgggagtggttttcagagacatttcagaaagtgaaggagaaactcacgattgactcatgaggacctgaagggtgacatcccaggaggggcctctgaattttcccacaccccagcgcctgtgctgaggactccctccatgttgccccaggtgccccccaataaaaatcctacagaa

SEQ ID NO: 2821 - DNA, 468 bp, Homo sapiens
  misc_feature (162)..(162): n is a, c, g, or t
  misc_feature (339)..(339): n is a, c, g, or t
  misc_feature (348)..(348): n is a, c, g, or t
  misc_feature (358)..(358): n is a, c, g, or t
  misc_feature (369)..(369): n is a, c, g, or t
  misc_feature (388)..(388): n is a, c, g, or t
  misc_feature (393)..(393): n is a, c, g, or t
  misc_feature (418)..(418): n is a, c, g, or t
  misc_feature (424)..(424): n is a, c, g, or t
  misc_feature (462)..(462): n is a, c, g, or t
gaaagatgccacattcctgcagcctctcttggtgcagtggaatacagtcttgggcgaggtggcgtggatgagctggtgaaagaggatgctgcccacatccaaaggctccagaggatcctgggcctgggcagctgagctcccctgcatttgggaacctcaggncgtaacttgggtgtagagctcatgaaaggtgcttgtgtttctccagctttttttcaccagtgcttaccagactggctcaggttttgggaattctaagggtgagctgggtaggaaacagggagagggtaggaaagaagcccctggggatgccttcccagaattcatttgattgggatnccctgcatnacttgctttngggaacacagnaagaggcttttgacacagntgagnttttgggagcatttttaaagggagntccagnttaaggcaaacaactcttttgcatttttaaggcccagnaagagt

SEQ ID NO: 2822 - DNA, 547 bp, Homo sapiens
acaggtcccctaaaactaattccaacaagcactctgaagccttctcattcacaggttatggctactttccagataatccaacagctaaatcaccagtttccaaagggcatttgcatcacctaatggaaagcatcggattcttatacaccagatgttcttgacagctcatcccgtcattcccccctgcacaaaagttgctataccagcggacaagcaagacaaactactgagcttcttttgatggtcaagtagatataatatcactgccagcaaaacagcacaaaagtgtcttcttcacagtatcactaccagttgggactatgctaagtaaatcagcttgcctagatgaggaccccttctatacttgggtagcccaggatttgaaggagatactctgacctgtgccagtggtaagtgactaatacttttacacactgaactggtcctgggaactgagatggcttctttgtaagtgaagaatatacaacataatcttgaagaacggcacagtggtatgggccccaagcatactttatgtgtgtacgga

SEQ ID NO: 2823 - DNA, 397 bp, Homo sapiens
aatatatccggcctatcctgtgtagcaggtcacagtgcctgggtttggttctagccctcatttgtgaactgtgtgactcaccatgccttttttctttctgtaagacaggaataatggtaagaatttaaatgggggtaatatggagcgcgtttagttcagagcctggtgcatacaagcactcaataagtactggcgattattagacctttagattaatttattagaagttggatttctggtgaaagggtttgagtgtttttgaggctttggcacagaatacccagctggtcccagaaaggtggttcccatttacctgcccgaaggtaattcacccttactggatactgagtactggtttcttaaaagacattaaaaattggataggccggatattatt

SEQ ID NO: 2824 - DNA, 1094 bp, Homo sapiens
cagaaaggagaaaattcaggataactctcctgaggggtgagccaagccctgccatgtagtgcacgcaggacatcaacaaacacagataacaggaaatgatccattccctgtggtcacttattctaaaggccccaaccttcaaagttcaagtagtgatatggatgactccacagaaagggagcagtcacgccttacttcttgccttaagaaaagagaagaaatgaaactgaaggagtgtgtttccatcctcccacggaaggaaagcccctctgtccgatcctccaaagacggaaagctgctggctgcaaccttgctgctggcactgctgtcttgctgcctcacggtggtgtctttctaccaggtggccgccctgcaaggggacctggccagcctccgggcagagctgcagggccaccacgcggagaagctgccagcaggagcaggagcccccaaggccggcctggaggaagctccagctgtcaccgcgggactgaaaatctttgaaccaccagctccaggagaaggcaactccagtcagaacagcagaaataagcgtgccgttcagggtccagaagaaacagtcactcaagactgcttgcaactgattgcagacagtgaaacaccaactatacaaaaaggatcttacacatttgttccatggcttctcagctttaaaaggggaagtgccctagaagaaaaagagaataaaatattggtcaaagaaactggttacttttttatatatggtcaggttttatatactgataagacctacgccatgggacatctaattcagaggaagaaggtccatgtctttggggatgaattgagtctggtgactttgtttcgatgtattcaaaatatgcctgaaacactacccaataattcctgctattcagctggcattgcaaaactggaagaaggagatgaactccaacttgcaataccaagagaaaatgcacaaatatcactggatggagatgtcacattttttggtgcattgaaactgctgtgacctacttacaccatgtctgtagctattttcctccctttctctgtacctctaagaagaaagaatctaactgaaaatacca

SEQ ID NO: 2825 - protein, 285 aa, Homo sapiens
MDDSTEREQSRLTSCLKKREEMKLKECVSILPRKESPSVRSSKDGKLLAATLLLALLSCCLTVVSFYQVAALQGDLASLRAELQGHHAEKLPAGAGAPKAGLEEAPAVTAGLKIFEPPAPGEGNSSQNSRNKRAVQGPEETVTQDCLQLIADSETPTIQKGSYTFVPWLLSFKRGSALEEKENKILVKETGYFFIYGQVLYTDKTYAMGHLIQRKKVHVFGDELSLVTLFRCIQNMPETLPNNSCYSAGIAKLEEGDELQLAIPRENAQISLDGDVTFFGALKLL

SEQ ID NO: 2826 - DNA, 491 bp, Homo sapiens
tcaatcttactgatttgtaaatataatataagtggattatacttagagaacgtccatgttcaccaatatagaagtcattaaatcatttcaagaagcaatatacacatttctagtcagtatcaagaattaaccagcaaaaaggctaataagcaaacacaaccatcaccattataaaagggaagtatttgtgttttacttcaaaccaagcaccaggttactctcagtgtttacccgccctcaggttttagagcaaaacaagggttttcctttaatgtttccctttcatactagatgtcatacaatgtaggcatgagtataaggaggcaggcattgttcatttcttactcctatatacttgcacttgaggtattaagacacagtcagcccaggtggccaaaggggtggggacagcacatgatggaatgggggaagagcagcctattccagccaattcttgtcttgaccagcctggctctgatcactcttcttta

SEQ ID NO: 2827 - DNA, 1368 bp, Homo sapiens
atccattgtgctctaaagtgatggagagcaccagcaaagccttagggcccatccctggcctcctgttacccacagaggggtaggcccttggctctcttccactatgacgtcagcttccattcttcctttcttatagacaattttccatttcaaggaaatcagagcccttaatagttcagtgaggtcactttgctgagcacaatcccatacccttcagcctctgctccacagagcctaagcaaaagatagaaactcacaacttccttgttttgttatctggaaattatcccaggatctggtgcttactcagcatattcaaggaaggtcttacttcattcttccttgattgtgaccatgcccaggctctctgctccctataaaaggcaggcagagccaccgaggagcagagaggttgagaacaacccagaaaccttcacctctcatgctgaagctcacacccttgccctccaagatgaaggtttctgcagcgcttctgtgcctgctgctcatggcagccactttcagccctcagggacttgctcagccagattcagtttccattccaatcacctgctgctttaacgtgatcaataggaaaattcctatccagaggctggagagctacacaagaatcaccaacatccaatgtcccaaggaagctgtgatcttcaagaccaaacggggcaaggaggtctgtgctgaccccaaggagagatgggtcagggattccatgaagcatctggaccaaatatttcaaaatctgaagccatgagccttcatacatggactgagagtcagagcttgaagaaaagcttatttattttccccaacctcccccaggtgcagtgtgacattattttattataacatccacaaagagattatttttaaataatttaaagcataatatttcttaaaaagtatttaattatatttaagttgttgatgttttaactctatctgtcatacatcctagtgaatgtaaaatgcaaaatcctggtgatgtgttttttgtttttgttttcctgtgagctcaactaagttcacggcaaaatgtcattgttctccctcctacctgtctgtagtgttgtggggtcctcccatggatcatcaaggtgaaacactttggtattctttggcaatcagtgctcctgtaagtcaaatgtgtgctttgtactgctgttgttgaaattgatgttactgtatataactatggaattttgaaaaaaaatttcaaaaagaaaaaaatatatataatttaaaactaaaaaaaaaaaaaaaaaaaaaaaaaaaaaaaaaaaaaaaaaaaaaaaaaaaaaaaaaaaaaaaaaaaaaaaaaaaaaaaaaaaaaaaaaaaaaaaaaaaaaa

SEQ ID NO: 2828 - protein, 99 aa, Homo sapiens
MKVSAALLCLLLMAATFSPQGLAQPDSVSIPITCCFNVINRKIPIQRLESYTRITNIQCPKEAVIFKTKRGKEVCADPKERWVRDSMKHLDQIFQNLKP

SEQ ID NO: 2829 - DNA, 424 bp, Homo sapiens
  misc_feature (36)..(36): n is a, c, g, or t
  misc_feature (176)..(176): n is a, c, g, or t
acccgtgggcctgtggactgcagcctcggcgatcanagagtgcttgtgatttcacgtatttttgctgaactcgtaaaagagacacttggatggtggattaaccagaacactaacattctgtgaaaagtttcaaattggagaatattgaattttcaccctagtccagcagctccgcngtcacgttaaatacagatgaatgaagaccccattcggaaagacacctggccagcggtccagagctgatgcaggccatgctggagtatctgccaacatgatgaagaagaggacatcccacaaaaaacatcggagcagtgtgggtccgagcaaacctgtttcccagccccggcggaacatcgtaggctgcaggattcagcatgggtggaaagaggggaatggccctgttacccagtggaaaggaaccgtt

SEQ ID NO: 2830 - DNA, 3572 bp, Homo sapiens
gcctttctggggcctgggggatcctcttgcactggtgggtggagagaagcgcctgcagccaaccagggtcaggctgtgctcacagtttcctctggcggcatgtaaaggctccacaaaggagttgggagttcaaatgaggctgctgcggacggcctgaggatggaccccaagccctggacctgccgagcgtggcactgaggcagcggctgacgctactgtgagggaaagaaggttgtgagcagccccgcaggacccctggccagccctggccccagcctctgccggagccctctgtggaggcagagccagtggagcccagtgaggcagggctgcttggcagccaccggcctgcaactcaggaacccctccagaggccatggacaggctgccccgctgacggccagggtgaagcatgtgaggagccgccccggagccaagcaggagggaagaggctttcatagattctattcacaaagaataaccaccattttgcaaggaccatgaggccactgtgcgtgacatgctggtggctcggactgctggctgccatgggagctgttgcaggccaggaggacggttttgagggcactgaggagggctcgccaagagagttcatttacctaaacaggtacaagcgggcgggcgagtcccaggacaagtgcacctacaccttcattgtgccccagcagcgggtcacgggtgccatctgcgtcaactccaaggagcctgaggtgcttctggagaaccgagtgcataagcaggagctagagctgctcaacaatgagctgctcaagcagaagcggcagatcgagacgctgcagcagctggtggaggtggacggcggcattgtgagcgaggtgaagctgctgcgcaaggagagccgcaacatgaactcgcgggtcacgcagctctacatgcagctcctgcacgagatcatccgcaagcgggacaacgcgttggagctctcccagctggagaacaggatcctgaaccagacagccgacatgctgcagctggccagcaagtacaaggacctggagcacaagtaccagcacctggccacactggcccacaaccaatcagagatcatcgcgcagcttgaggagcactgccagagggtgccctcggccaggcccgtcccccagccaccccccgctgccccgccccgggtctaccaaccacccacctacaaccgcatcatcaaccagatctctaccaacgagatccagagtgaccagaacctgaaggtgctgccaccccctctgcccactatgcccactctcaccagcctcccatcttccaccgacaagccgtcgggcccatggagagactgcctgcaggccctggaggatggccacgacaccagctccatctacctggtgaagccggagaacaccaaccgcctcatgcaggtgtggtgcgaccagagacacgaccccgggggctggaccgtcatccagagacgcctggatggctctgttaacttcttcaggaactgggagacgtacaagcaagggtttgggaacattgacggcgaatactggctgggcctggagaacatttactggctgacgaaccaaggcaactacaaactcctggtgaccatggaggactggtccggccgcaaagtctttgcagaatacgccagtttccgcctggaacctgagagcgagtattataagctgcggctggggcgctaccatggcaatgcgggtgactcctttacatggcacaacggcaagcagttcaccaccctggacagagatcatgatgtctacacaggaaactgtgcccactaccagaagggaggctggtggtataacgcctgtgcccactccaacctcaacggggtctggtaccgcgggggccattaccggagccgctaccaggacggagtctactgggctgagttccgaggaggctcttactcactcaagaaagtggtgatgatgatccgaccgaaccccaacaccttccactaagccagctccccctcctgacctctcgtggccattgccaggagcccaccctggtcacgctggccacagcacaaagaacaactcctcaccagttcatcctgaggctgggaggaccgggatgctggattctgttttccgaagtcactgcagcggatgatggaactgaatcgatacggtgttttctgtccctcctactttccttcacaccagacagcccctcatgtctccaggacaggacaggactacagacaactctttctttaaataaattaagtctctacaataaaaacacaactgcaaagtaccttcataatatacatgtgtatgagcctcccttgtgcacgtatgtgtataccacatatatatgcatttagatatacatcacatgtgatatatctagatccatatataggtttgccttagatacctaaatacacatatattcagttctcagatgttgaagctgtcaccagcagctttgctcttaggagaaaagcatttcattagtgttgtattacttgagtctaagggtagatcacagactgtgtggtctcaactgaaaggatcacccttggcatctgtgtgcctggattcttccagaatgtctacaatgctaatctctcacatagaggttcccagcttcttaagaaccccttttggcacctaatcaaatttcaaaatccctccccccacattttcatacttttccccattctcaggacttttcaccatccatcacccacttatcccttcatttgacaccattcattaagtgccttctgtgtgtcagtccctggccactcactgcagttcaaggccccctttccgctctgctgtactcctcgcctacctactccttgccttttctgtcgcacagccccttctttccaggcgagattcctcagcttctgagtaggaaacactccgggctccaggtttctggttgggaagggaaggccaggccaaaagctccaccggccgtatagataatgtactcgcagttttgtatcttccattcatactttaacctacaggtcatttgagtcttcacacaaataataacctatctggccaggagaattatctcagaacagaagtcatcagatcatcagagcccccagatggctacagaccagagattccacgctctcaggctgactagagtccgcatctcatctccaaactacacttccctggagaacaagtgccacaaaaatgaaaacaggccacttctcaggagttgaataatcaggggtcaccggaccccttggttgatgcactgcagcatggtggctttctgagtcctgttggccaccaagtgtcagcctcagcactcccgggactattgccaagaaggggcaagggatgagtcaagaaggtgagacccttcccggtgggcacgtgggccaggctgtgtgagatgttggatgtttggtactgtccatgtctgggtgtgtgcctattacctcagcatttctcacaaagtgtaccatgtagcatgttttgtgtatataaaagggagggtttttttaaaaatatattcccagattatccttgtaatgacacgaatctgcaataaaagccatcagtgct

SEQ ID NO: 2831 - protein, 493 aa, Homo sapiens
MRPLCVTCWWLGLLAAMGAVAGQEDGFEGTEEGSPREFIYLNRYKRAGESQDKCTYTFIVPQQRVTGAICVNSKEPEVLLENRVHKQELELLNNELLKQKRQIETLQQLVEVDGGIVSEVKLLRKESRNMNSRVTQLYMQLLHEIIRKRDNALELSQLENRILNQTADMLQLASKYKDLEHKYQHLATLAHNQSEIIAQLEEHCQRVPSARPVPQPPPAAPPRVYQPPTYNRIINQISTNEIQSDQNLKVLPPPLPTMPTLTSLPSSTDKPSGPWRDCLQALEDGHDTSSIYLVKPENTNRLMQVWCDQRHDPGGWTVIQRRLDGSVNFFRNWETYKQGFGNIDGEYWLGLENIYWLTNQGNYKLLVTMEDWSGRKVFAEYASFRLEPESEYYKLRLGRYHGNAGDSFTWHNGKQFTTLDRDHDVYTGNCAHYQKGGWWYNACAHSNLNGVWYRGGHYRSRYQDGVYWAEFRGGSYSLKKVVMMIRPNPNTFH

SEQ ID NO: 2832 - DNA, 2943 bp, Homo sapiens
gagctcacagacccataatcctgcatttctctaacaagttgtttatggagttgcttctccatttgcctacatcccaaaattcacccctcccggtttcttctgccccctcctgagtcccggcctgaaggagggggagggacgcgggtgcggcgcgggtgggggagggcggacccgacgcacagggccagcgccgaggcgccccctctccgccagcggttgacgcccccggattatttatccgcaaagtcccgcgcgcgcccattgggccgaggcccgagtgtcagcgcgagtcccggctcgccattggctccgcacacgtgcggccctgactcacgtgcttccggtttgaaggcaaaaagtgtgcctgggtgattttttttttaagcgagagagtttgtgcaaagatccgagctgtcagagatttgaaaaaaaaaaaaaaaacaaaaaaaaaaaaaccagcccggcgctggcggagacgcgctctccctgcaaaaaaagcaaaggcgattaaaggcgctgccagcctcacgctctgggcacagctgagcgtgacactcggggaagtcaaacccctcactactgcctaggaagatggctagactttaaatactatttttttccctttaagaaaaaaattattggagctttttttcttgctttctttttccttttctttttctttttttccttcatttttttggccgtggcttactccccatttaaatcaaatcattgaatctggttgcagaaagaaaaaagaaatagccaagtgtctccatatctggatgtctacaaattagagagggagagacagcgagatctatctgctagataagaacgagcgatccaggccagacgcctgagcttttttcctgcacccgccccgtgccttcgctgaggcttcgcctgcctccttcctccgcgcacccccacgggccgctggcaaagtggggtggggagcgaggcggtgggggcgggggccggcgcggcggccggggcggcggggcggccgagcatggaagaacagcagccggaacctaaaagtcagcgcgactcggccctcggcggcgcggcggcggcgactccgggcggcctcagcctgagcctcagtccgggcgccagcggcagcagcggcagcggcagcgatggagacagcgtgccggtgtccccgcagcctgcgcccccctcgccgcccgcggcgccttgcctgccgcccctggcccaccacccgcacctccccccacaccccccgcccccgccgcctcagcatctcgcggcgcctgctcaccagccgcagccagcggcccagctgcaccgcaccaccaactttttcatcgacaacatcctgaggccggacttcggctgcaaaaaggagcagccgccaccgcagcttctggtggctgcggcggccagaggaggcgcaggaggaggaggccgggtcgagcgtgacagaggccagactgccgcaggtagagaccctgtccacccgttgggcacccgggcgccaggcgctgcctcgctcctgtgcgccccggacgcgaactgtggcccacccgacggctcccagccagccgccgccggcgcgggcgcgtctaaagctgggaacccggctgcggcggcggcggcggccgcggcggcagtggcggcggcggcggcggccgcagcagccaagccctcggacaccggtggcggcggcagtggaggcggcgcggggagccccggagcgcagggcaccaaatacccggagcacggcaacccggctatcctacttatgggctcagccaacggcgggcccgtggtcaaaactgactcgcagcagcctctcgtatggcccgcctgggtgtactgcacacgttattcggatcgtccatcctccggtccgcgcaccaggaagctgaagaagaagaagaacgagaaggaggacaagcggccgcggaccgcgttcacggccgagcagctgcagagactcaaggcggagttccaggcaaaccgctacatcacggagcagcggcggcagaccctggcccaggaactcagcctcaacgagtcccagatcaagatctggttccagaacaagcgcgccaagatcaagaaagccacaggcatcaagaacggcctggcgctgcacctcatggcccagggactgtacaaccactccaccaccacggtccaggacaaagacgagagcgagtagccgccacaggccggggccgcgcccgcgccccctcccggcaccgccgccgtcgtctcccggcccctcgctgggggagaaagcatctgctccaaggagggagggagcgcagggaaaagagcgagagagacagaaagagagcctcagaatggacaatgacgttgaaacgcagcatttttgaaaagggagaaagactcggacaggtgctatcgaaaaataagatccattctctattcccagtataagggacgaaactgcgaactccttaaagctctatctagccaaaccgcttacgaccttgtatatatttaatttcaggtaaggaaaacacatacgtgtagcgatctctatttgctggacatttttattaatctcctttattattattgttataattattataattattataattattttatggccctcccccaccgcctcgctgcccccgcccagtttcgttttcgttgcctttttcatttgaatgtcattgcttctccggtgcctcccgacccgcatcgccggccctggtttctctgggacttttctttgtgtgcgagagtgtgtttcctttcgtgtctgcccacctcttctcccccacctcccgggtcccttctgtcggtctgtctgttctgcccccctttcgttttccggagacttgttgagaaatacgaccccacagactgcgagactgaaccgccgctacaagccaaagattttattatgttcagaaacctgtagtctgaaataaa

SEQ ID NO: 2833 - protein, 392 aa, Homo sapiens
MEEQQPEPKSQRDSALGGAAAATPGGLSLSLSPGASGSSGSGSDGDSVPVSPQPAPPSPPAAPCLPPLAHHPHLPPHPPPPPPQHLAAPAHQPQPAAQLHRTTNFFIDNILRPDFGCKKEQPPPQLLVAAAARGGAGGGGRVERDRGQTAAGRDPVHPLGTRAPGAASLLCAPDANCGPPDGSQPAAAGAGASKAGNPAAAAAAAAAAVAAAAAAAAAKPSDTGGGGSGGGAGSPGAQGTKYPEHGNPAILLMGSANGGPVVKTDSQQPLVWPAWVYCTRYSDRPSSGPRTRKLKKKKNEKEDKRPRTAFTAEQLQRLKAEFQANRYITEQRRQTLAQELSLNESQIKIWFQNKRAKIKKATGIKNGLALHLMAQGLYNHSTTTVQDKDESE

SEQ ID NO: 2834 - DNA, 3171 bp, Homo sapiens
gcggaacaccggcccgccgtcgcggcagctgcttcacccctctctctgcagccatggggctccctcgtggacctctcgcgtctctcctccttctccaggtttgctggctgcagtgcgcggcctccgagccgtgccgggcggtcttcagggaggctgaagtgaccttggaggcgggaggcgcggagcaggagcccggccaggcgctggggaaagtattcatgggctgccctgggcaagagccagctctgtttagcactgataatgatgacttcactgtgcggaatggcgagacagtccaggaaagaaggtcactgaaggaaaggaatccattgaagatcttcccatccaaacgtatcttacgaagacacaagagagattgggtggttgctccaatatctgtccctgaaaatggcaagggtcccttcccccagagactgaatcagctcaagtctaataaagatagagacaccaagattttctacagcatcacggggccgggggcagacagcccccctgagggtgtcttcgctgtagagaaggagacaggctggttgttgttgaataagccactggaccgggaggagattgccaagtatgagctctttggccacgctgtgtcagagaatggtgcctcagtggaggaccccatgaacatctccatcatcgtgaccgaccagaatgaccacaagcccaagtttacccaggacaccttccgagggagtgtcttagagggagtcctaccaggtacttctgtgatgcaggtgacagccacagatgaggatgatgccatctacacctacaatggggtggttgcttactccatccatagccaagaaccaaaggacccacacgacctcatgttcacaattcaccggagcacaggcaccatcagcgtcatctccagtggcctggaccgggaaaaagtccctgagtacacactgaccatccaggccacagacatggatggggacggctccaccaccacggcagtggcagtagtggagatccttgatgccaatgacaatgctcccatgtttgacccccagaagtacgaggcccatgtgcctgagaatgcagtgggccatgaggtgcagaggctgacggtcactgatctggacgcccccaactcaccagcgtggcgtgccacctaccttatcatgggcggtgacgacggggaccattttaccatcaccacccaccctgagagcaaccagggcatcctgacaaccaggaagggtttggattttgaggccaaaaaccagcacaccctgtacgttgaagtgaccaacgaggccccttttgtgctgaagctcccaacctccacagccaccatagtggtccacgtggaggatgtgaatgaggcacctgtgtttgtcccaccctccaaagtcgttgaggtccaggagggcatccccactggggagcctgtgtgtgtctacactgcagaagaccctgacaaggagaatcaaaagatcagctaccgcatcctgagagacccagcagggtggctagccatggacccagacagtgggcaggtcacagctgtgggcaccctcgaccgtgaggatgagcagtttgtgaggaacaacatctatgaagtcatggtcttggccatggacaatggaagccctcccaccactggcacgggaacccttctgctaacactgattgatgtcaacgaccatggcccagtccctgagccccgtcagatcaccatctgcaaccaaagccctgtgcgccacgtgctgaacatcacggacaaggacctgtctccccacacctcccctttccaggcccagctcacagatgactcagacatctactggacggcagaggtcaacgaggaaggtgacacagtggtcttgtccctgaagaagttcctgaagcaggatacatatgacgtgcacctttctctgtctgaccatggcaacaaagagcagctgacggtgatcagggccactgtgtgcgactgccatggccatgtcgaaacctgccctggaccctggaaaggaggtttcatcctccctgtgctgggggctgtcctggctctgctgttcctcctgctggtgctgcttttgttggtgagaaagaagcggaagatcaaggagcccctcctactcccagaagatgacacccgtgacaacgtcttctactatggcgaagaggggggtggcgaagaggaccaggactatgacatcacccagctccaccgaggtctggaggccaggccggaggtggttctccgcaatgacgtggcaccaaccatcatcccgacacccatgtaccgtcctaggccagccaacccagatgaaatcggcaactttataattgagaacctgaaggcggctaacacagaccccacagccccgccctacgacaccctcttggtgttcgactatgagggcagcggctccgacgccgcgtccctgagctccctcacctcctccgcctccgaccaagaccaagattacgattatctgaacgagtggggcagccgcttcaagaagctggcagacatgtacggtggcggggaggacgactaggcggcctgcctgcagggctggggaccaaacgtcaggccacagagcatctccaaggggtctcagttcccccttcagctgaggacttcggagcttgtcaggaagtggccgtagcaacttggcggagacaggctatgagtctgacgttagagtggttgcttccttagcctttcaggatggaggaatgtgggcagtttgacttcagcactgaaaacctctccacctgggccagggttgcctcagaggccaagtttccagaagcctcttacctgccgtaaaatgctcaaccctgtgtcctgggcctgggcctgctgtgactgacctacagtggactttctctctggaatggaaccttcttaggcctcctggtgcaacttaatttttttttttaatgctatcttcaaaacgttagagaaagttcttcaaaagtgcagcccagagctgctgggcccactggccgtcctgcatttctggtttccagaccccaatgcctcccattcggatggatctctgcgtttttatactgagtgtgcctaggttgccccttattttttattttccctgttgcgttgctatagatgaagggtgaggacaatcgtgtatatgtactagaacttttttattaaagaaa

SEQ ID NO: 2835 - protein, 829 aa, Homo sapiens [sequence omitted]

SEQ ID NO: 2836 - DNA, 1055 bp, Homo sapiens
gtacgtctatgagagggaataatgtggatggatggaagtggagtagaaactacccctttgcctgtgagccccctgtcccgtcctttttcactcacataccagtcaccataccttcagtatccatcctacttcctttatagctgtttcacttggaaactaatgtgtgggagcacctcctgcagcaaactgctcttgaatcttaattcgatgagtcagtgactcttaaataccgattaagccttcaccctctcccccctcccccttttaaacttatgacctgtaagattcttgtaaaaaatagggttagggaaacatttttagaatttaataggattaaggacacctggagtgtgggcgatgttgagctagagtttacctttgtgaatattggacgtgtcttcaggaacggagaagaattttgaatgctaatttttacctttcagctatgtgaaaacacatgatttacgttgatgtaaccgaatttacattgctgaatatgttggtgatttcattaacttttagagcattccggtttaagttttagcttatttgggctttctccttgctttccaaacgaaatacttcgtcttttaaatgttttgctttaacgtgacagctgcgtggagaaataatggttggcaacacttttctattgagaagggatttaattccaagcagaatattagcatccgttttcttgtaattaagttcaacttttgtttatcttcggagggttggaaagagttaagtgagttaggacttagtcatttggatgcattcctttaaatacagtgcattactaaagtcagacctttttgaaataactttttaaagtctgtaccgagtcctgtttaacgtaaaatagctagagaaaggccaaacaacatttcctcctcccttactccctccccaccccaaaacacacgcttctgctgagcgggtgtagaaggaggtacattgctgcagtgtcagtgcagtgtagaagcagaagtggcagccatgttctgtctctttttgtgaatcgccctcatttgcatagcacactcttcattcat

SEQ ID NO: 2837 - DNA, 260160 bp, Homo sapiens
aagcttgtgtatgatgtgtgcatgggagttcctaattactctccggcctaatttactttggtgtagcactgactccaatattaaggctggagaagccctttccaagatcagcatcccaagctggcctgcggtgcttatcacagcttcttagggctctcatctcctcctgggttcagaactgaacccaaactacatgcacagcctgactcacagctgtgggttgcagtgattgctgggcttcattagggaggagtgtggtttcccgcatgcttagtctttggggggagtctgaaagagaatcaagcattccttatgccagttgcttaatccttgggggtatctgaaagaagcaagcacttcttagatcaatattttcaagacttatctgatgcaggcctctgcctggggctggaggatagactgtttcttcagcttctctctctccagggtggatatgaacttgagcccttgcaatgaactgcttgcatgttttcccccctgggaaatttgtgtatgtatgtgcaattatgatgggggaaacggtttaaagatactttcaaaagtggacacttctagtgtttgtcccttgacaaatgagtttctcgacctgtttttttttcattatcaacgcctcccctagtctttttaatttccccaccctcacccctaccccatgaaattttattttctttctttttttttttttgagaccaagtttcgatctttttgcccaagatggcgtgcaatggcgcgatctaggctcacctcaatctccacctcccgggttcaagcgattctcctgcctcagcctcccgagtagctggaattacaggcatgcaccaccacgcccagctaattttgtatttttagtagagactgggtttctccatgttggtcagtctggtctcaaactcctgacctcaggtgatccgcccgtctcgacctcccaaagtgctgggattacaggcataagccaccgcgcccggcctcttttcttttcaagacagggtctcactctgtcacccaggctggagtgtaatggcgtgatcatggctccctgcagcctcaacctcctgggctcaagtgatcctcctgtctcagactcccaagtagctgagactacaggcatgtgccacgacacctggttaattttttttttttgtattcttttgtagagatggggtctcactatgttgcctaggctggtcttgagctcctgggctcaagcaatcctcctgcctctacctcccaaagtgctgggattacaggcatgagcctccacgtctgccctgaaatttcaatatcacagctatactgtatatctatttatgtgctgtatgtatgctgtgctttgtacataaaaaatatgttttattttttgccccgttggggtgagatagagaccgcactgagaatgcacgctttacataattagttcacaacttgcccccggcagcctccaccacgtaaaattagaagaaagcagcccagcagggcctacaaggaatgtgtgaacggatgcacgtaaagtgcttagcaaagcgtggtaaacaagagcccttgttgtcattcttgctttaagcctagtcccagtgatgtctgtaaccctctcttgggccaaggagtcccatggctctggagggctgttcagaggactaagtcattcccagtctggagctctacgggatcagtaggtacctaagggagtgaattgggcttggagggactgtggccagaagacagctctgggcctggtggtgatagaacttctgatttctcaggaaaagccaagaatgtggattttgggttaaatctcctgaattttaagcattggctcaattaaacaacaataaggcaatgtgaaccgaacaaaagggatgaaaccaagatttactgactttcccagagtcacgggcacggctgggattccaacaaggactcccaaaccagtgctctttccacttaacctaacgcacacccttcatctcgccgcccctccccacttccccgtctttgggagttcttcgatgcctcttcccccctccccccaggattccctccccataggccacccgccttccagcagggcgtggtctctacagaggaggtcaggtctcccaggcttcctcagcgtcgacgccggggagcgccctggggttgggagcgcccggggcccgcgaaggaggaggtggctcaggtgtcagggcgcaccgtgggaaccggccccgggggaggcgtggaaacgcggggcctgggactcgaccagcctctcccgtgcggatcgcaaaatctcggagctgaaacagcccgttgttcgcagcctccctctgacccgccaccctgcacattgttttccattcgcccgggtcgcgggtgggaggagaggcacgccggggttctggagcttggccgcgcgccaggcttgtggccttcgtccccctggggccactggggcggccacgcctctccggcgggaggagagaacgcgtgggtccgggtggctgctccggcccttccgcctccagctcggccatggggtcgcgcagctcccacgccgcggtcattcccgacggggacagtattcggcgagagaccggctgtgagtgcgcccgcgtcggcggctgcggaggggacggggcgaacccaggcgtctggggctagggaaggggttgggttgaaggatggacgaacttacaagtctggggtccggggctccccggagctggaagaccaaggcccctgtgcctgggatcgctgggttaggggcgggttaacctaggggtcccagcctccaagtctggggaggatccgggttcacggggtcggagtccagaggaatccaggcacccaggtgtcctccagcccggctcgaagctgaaggcagagctgacggcggttggaagggatggctttggttctttggttttcgggaggttgcgagccgcccgggtcttgaacctggatcttcgcggggtcgtgtcactctccctccgccccggccagctcaacccctgattccccgggatgatcgccccttccagccagcccccgctgttctggcccatcttcctggcctgttggggcgggtttctggagctggccctgcagagtcacacacccccaccccactctccttcccgcagtctcccaagccagcctgctccgcctgcaccaccggttccgggcactggacaggaataagaagggctacctgaggtgagggggagccggcctcataacttctggcctctgtctctctgactccatgtccctctttgaccctccgtctggcatctctgccttaccctctttgaaatttggctttgcagccgcatggatctccagcagataggggcgctcgccgtgaaccccctgggagaccgaattatagaaagcttcttccccgatgggtgaggcttgctgggcgtggggaggtgaaggcgggaaaaccggtgtgtgagtgggtgggaggggaggttagagacggaggcaaagtgatggccaaggtgaccaccacctctttccattctgtcccgtctccccaggagccagcgagtggatttcccaggctttgtcagggtcttggctcattttcgccctgtagaagatgaggacacagaaacccaagaccccaagaaacctgaacctctcaacagcagaaggaacaaacttcactgtgagtttgtgaggacctgcacaagtgagaatgcagatgtacccacaccagggacaggctccagggatctcccactcccttcctgagggcattgacaacctcccccctcctccaaggtggggggaaggaaggtggctgctggaagagagccagggaagacctaccttcctttccccctcccaccctctccccagatgcatttcagctctatgacctggatcgcgatgggaagatctccaggcatgagatgctgcaggttggcagaaagcgagagcaagagatgtgatgtgtgaaggatgggatggttaaatgcaatggtgtgagagatggggtgggatgattggggaactggggcgcagataattggggtattggttgggaaatgggaatgggtgcagttagagtgtgggtttgttgggagtcggagtggggagcagttgactatgaggttgggaatagatcagtgattctcaactgggggtgattttgctccctgagtgaatatctggcaatatctggagatgctttttgttgtcacaatgggggagagagtgtgctactggcatctagtgggtagaggtcaggaatgtggctatatatcatgcaatacccaggagagcctcttccaacaaggagttacctggctccaaatgtcaacagtgccaagattgagaaactctggaacagatgtgatggaatgaggatggaattagaaacccttagtggctaaggtggagaatggtgtggaggatggatggaggttgggtgataaagttgggtaatgagtttgagcatattttgagggtagtgcaggatggtgagggagagataggagattggttgttgaagcagtagggaaaattattggggggatatggtgaaaaatggatgaaggatggattataaaattagcaataacttttgggatgaggtgggcaaggtttaggagatggggagttgcagccttcgtgccccctccttatggctgcctcttcactcatctctcaggttctccgtctgatggttggggtacaggtgacagaagagcagctggagaacatcgctgaccgcacggtgcaggaggctgatgaagatggggatggggctgtgtccttcgtggagttcaccaaggtcagagtgcccttggggattggggagttgagatcaggagttctggggcagacagacttgggaaacgttcaacggaggagggtggaaagataggggttgcctgggaatgatggggtctctggaatgggtagaaccctgggggaggaggttgggagcagggagagctgagagtcaagcctcttgcctgccatttgtttttccctcagtccttagagaagatggacgttgagcaaaaaatgagcatccggatcctgaagtgactccgtttgtgccttgggcttgctcctgcaaccagtatctccttggaattcatccaaagcccccatggacgcatggacgcagggcgacaataaactgtattttcgtttctaactctatttagggccaagagaagaaagctggaaggatgtgtactaaagtctagctcagcagtccccaacctttttggcatcagggacagtttttccacggatgggtgacaggggatggttttgggatgattcaagtgcattacatttattgtgcactttatttctattatgattacattgtaatatataatgaaataattatacaactcaccataatgtagaatcagcaggagccctgagcttgttttcctgcaattagacggtcccatatgggagtgatgggagacagtgacagatcatcaggcattagattctcataaggagtgcacaatctagatcctttggtgtgcagttcacagtaggatttgggctcctatgataatctaatgccactgctgatctgacaggaggcagagctcaggcggtaatgcaagcaatggggagtggctgtaaatatagatgaagcttcagctcgcctgccgctcaccttgtgctgtgcagcccggttcctaacagaccacagaccccacaccaggtctatctcatttggtctcagagctgtgaatcagccagcaatattttagttgcaaatcactgaaaacccaactcaaagtgacttaagtcagaaagaaattttatgaattcaggtaattaaaaagtccagaagtatctgcctttaggcacagctggatccaagggcacaaatgatgtcatcaggctccagttattctccatctcccagctcagctttttctgtctgtaagcctgattttcaggaaggctctttcctagtgatggagatgaccaccatcagctccaggcttctatcctgctaacccagtaacccagtgggaagagatttacttattccaataattccaagtggagagtgtcattgacccgtttggggtctcatctctacttctaggggaatgaaacactctgagtggccaggcctgtgtcatgtgctaattcctagagccagggaaataaggtctgaggattcaggatggggtgaaaggtggttgcttaaaggaaaatgaaatacaattagcagaataaggggaaacgagtggtctgctctgctcgggcaaaacaagagatgcccattactgtgagggacccttgaagtctggactcttaaatgggtttttgctgatttcctgggtgcatgctaggatgatggggcttgatgcagtagggaagagacgatgtaaaaataataaacaatatataccttcctagagtgtgaatgcattcgaagattctaagagtaagcttgttttcatggtaagatgttcaaacattgatataagatggaatggagcaggaagtcccataaaactatgagactctatgtctgcagcagagctctctggttgcacctgtgggagacactgtaattgccctgctgtttttctccctcccagagctggtctttggttgtcttgtatcatcaacacatgagaaccagttgtgctcataacatctcaactctgctttcaatgatatgttagcagcttgaaactggctatagcaggaatatttacaccacagacattggtaactgcaacaggttaaggctttttcctcctggaaagccagttgttaaacatttatctgcacactacctgctagacatttcccattactttgcatgccaatggtttctttccttttttctcccttctttctttctttctttctttctttctttctttctttctttttctttctttcttttcttatctttctttcctttttttttttttttttttttgagacagggtctagctttgtcacccaggctggagtgcagtggcagtcttggctcactgcaacctctgcctctcgggctcaagcaatgctcccacctcagcctcttgagtagcttggactacaggcacatgccaccatgcctagctaattttttttttaaaaagaggtggggtttcaccatgttgcccaggctagtcttgaactcctagactcaagtgattcacccacctcggcctcccaaagtgctgggattataggcatgggccactgcacccagccttacatgctagtggcttctttttgcaagcactgtgatgccttgctccagggctttgcacatattcagcctgtataaagggcagggtggaagtgccaggatttaatgacattaggagtagctctcaactagtgacagatggaaattggttggataaatacccattacttcatcattcaggtggcacaatttagatacatgttttcttaattttcatagcaatttccagcagatttgagcccccattgctcacagggttaattcatttgcttgttaaatcaccctgtcctggccgggggcagtggctcaggcctgtaatcccagcactttgggaagtcaaggtgggcagatcacctgaggtcaggagttcgagaccagcttggccaacatggtgaaaccctgtctctactaaaaatacaaaaattactcaggcgtggtcacatgcacctgtaatcccagctacttgggaggctggggcaggagaattgcttggacctgggaggcagaggttgcagtgagccgagattgtgccactgcacttcagcctaggcaacagagtaagactgtctcaaaaaacacaaccccaaaacaacaaacaacaacaacaacaacaacaacaaaaaacccaccctgtcctggcttccttcccttcctgtatcacgggcgtacttccctattagtgcttcccggatcacctcacaaataaacttactgtcaaacctcagggtgcttctggcaaaacccaacctaagagacactagaccttccagaacataagctcacactcaaccatggttgtgagtactcagtgggacattttgaggaagcattgcacagctgctggcactttctgattttagaagtttgaggtcatgtaaacacgacacactttggggccccaggaacctggaattgtccggggttaaccacaatgtgaaatgtggattaaccacatttcaacttttaacatttattattattattatttgagatggggtcttgctttacagcccaggttggagtgccgtggtgggttctcagctcactgcaacctccacctcctgggttcaagcgattctcctgcatcagcctcctgagtagtggggactacaggtgtgcgccaccatgcctggctattttttttttttttttttttgagatggattcttgctctgtcgccaaggctggagtgcagtggtgtgatcttggctcactgcaacctccacctcctgggttcaagcaattatcctgcatcagcctcccgagtagctgggactaaaggtgtgcaccaccatgcctggctaatttttgttcttttgtttttttggagttggagtctcgctctgtttccaaggctggagtgcagtggtgtgatctcggctcactgcaatctcagcctcctgggttcaaatgattctcctgcctcagcctcctgagtagctgggactacaggcgtgtgccaccatgcccggctaatttttgtatttttagtagagacggggtttcgccatgttggccaggctgctcttgaactcctgacctcaagtgatccgcccgcctcggcctcccaaagtgctgggattacaggcatgagccaccacacctggtctgaacccccttttttggcttcccaaagtactgggattataggcaagagacagtgtgcccaacccagatatatatatttttaaataagtgattctgataccagaagatgaaggaaaaaacttttaaaaacattgacctaaagcttccggccaggctcctagtgactgctatctataagaaggtctccaacagccataaggcactgagcatagcaccgggcccacaggctctaaagaaaggtctccccatccattcatgcccacaccttctctaggaactcagtaccaatcactagtgctcctcatctaataagggttactagagggcctgagggatccccaggattccactcgctgctctggttgttgggggcacaaaccactctcagcacgaaagtccccagatcccacccaaacctcaggaggggaggcttttgtcatgcaggtgaggggctgcagtctggctgctgggcagaaactgctgaacgccaccctccggatgtcaagtctggcagatgcctgtggatttgttctagaggggtcctgatgagaagcccctctcctgtgagcagcagttgacaatgttcagcgatttgtttaccatcgtcattattgttgctgtacagtatctatgtcctgtactgttactcattgtttgtctataaacacactcatttaaaatttatacatttgagtttgtaaaggaaattgtatttactcctataaattttattttctttttaaaatatattttctgcatccaatcatccattatcactcctataaaataaaagcagcatcaatggctataaataaaataactacacaaatacagtacatgcaaagaaacaaaaaatacacatataagggaatatcaacacaaagaaatgatatatgtttgaggtgaagaatatgctaattaccctcatttgagaattacacattgtatgcatgtatcaaaatatcacattgagctgggcgcagtggctcatgcctctaatcccagcactttgggaggctgaggtgggcagatcacctgaggtcaggagtttgagaccagcctggccaacatggtgaaaccctgtctctactaaaaatacaaaaattagccaggcatggtggtgggcacctgtaatcctagctacttgggcggctgaggcaggagaatcacttgaacccaggaagtggaggctgcactgaggtgagattgcaccactgcactccagcctgggaaacactcaaacaaaaacaaaaacaaaaacaaaatatcaactgtattgcataaataagtatgattattatatgtcaatcaaaaataatactttctttacaggggggagattaacaagtgttaaagagttttaaaagataaacctgcctcaaacagagatttctctttggtgatctgaagaatgcaaaaaagaattgagaagggtacaattttttttttctttttttgagaccagatcttgccctgtcaccaagcctggagtgcagtggtgcaattttggcacactgcagcctctacttcctgtgctcaagtgatcctctcacctcagcctcctgaatagttgggatcacaggtacatgccactacacctcgttaattttgctattttttgtagagatggggtcttgctatattgcctaggctggaattacaagtgtgagctaccgcacctggttaggaataaccttttcactgtgtgattcaatgttattgagctgtgttgttactacccaaaatcatcttgtgtatgtgagtggtgtgtttcccacaccttgggaacctctggctggagcaatctatgaggaaataaacttgggttgagtcttcccttcctgtcccttcagggagcatctggaggcagccatcagtgggctgaacatcgtgatgctcaggttggccactggtcaggttgggtttggcagaggttggccatcgtagcggaattcacttatcaggccaggtccagggacaagtaacaggacattatgacagatgcttcgtggagctggaaatattaaaagcaacagccctctgctgacattcgtctccagaacctggtaagacttgtaagtttggagacagggcccatgaacttgcccacttgctgggctaagatggcagagtccccaagggagaaactggaggtggctctagtcctggtgcttgcgatcctcatttgagagggagggtgcttcccagccaggagtgggaagggcactggagtggtcccagcttgttccactgtggctgctgggaaaggccttggctatcctggaattttctagaataactcatctatgtatctcaaagaggagacgggagttccagaagaagcacctctccttgccaaggagacaaaacttgagagggtatgtagggagccctcggaagagaagcaagtacaatcatgcatcacttagcgactgggaaatgaaatgcgttgttggtgatttcgtcattgtatgaacatcataaagcgtacttacacaaacctagatggtgtagcctactacacgcctaggcgatacggtgtagctgattgctctcaggcgaggagaaacctgcacggcatgttactgcattaaatactgtaggcaactgcaacataatggtaagtatttatgtatctaaagatagctaaacataggaatgttacagtaaaactgtggtattacagtcctgtgggaccatcgtcatatatgtggtccatcattgaccaaaacgtcatgacgcagcgcatggctgtagaaggacgtaggtagtgatgttgggtagacctggttatgctgccattgccccttgctaactgataaggaaaatagttaggagttctgaccttgtcctcagccctgcctaagcaacaccaataaaactctttttttgtgagtgatggagtctcactctgttgcccaggctggagtgcagtggcgggatctcagctcactgaaacctctgcttcccgggtttaagtgattctcctgcctcagccaaccgagtagctgggattacaggtgcccactatgacgccgggctaatttttgtatttttagtagagatggggttttgccatgttggctaggctggtcttgaactcctgacctcaggtgatccacctgccttggccttctaaagtgctgggattacaggcgtgagccaccacgcctggctccaataaaactcttaatgtttaagaggcaacatacagacttgattcctggtagagccctaccctgagaatcagtgtggtttagtaaaaccacactggcgatacagtatagctgagtcttgttaggcctgggtttgaatctggacccttataatgagctgccgtacaaccttgggtaagtgattttaacccttggggctttagcttctgtcatctgtgacagagagagatactagcagctgccctccagagctgcatcttatcctttctctctccccctctccctcaaacctacttattttagctgaggcccttggcctcatttgtaagcctggactctggcctgcaccagctgggattctttaattgttaactggctaataaaataatagaaatttattggttcatataactgaaaaaaaagtccaaaggtacaccaggcaaaggtgagtcccaaaggctcaatgatattaccagaaactagtctttcatttcttaactctgctgtcctctgtgttggtttcattcattcattcattcttttttttgagacaggtctcattctgttgcccaggctggagggcagtggtgtgatgttggctcactgcaacctctgcctcccgggttcaagggaacctcctgcctcagtctcccaagtagctgggattacaggcatgcgccaccacactgggctaatttttgtatttttagtagggacagggtttcaccatcttggccaggctgatcttcaactcctgacctcaagtgatccacccacctcagcctcctaaagttctgggattaccagcgtgagccactgagcccagccaatgtgttggtttcattcttaagcagtaaaataaaataccaataaagagagcctctctctcttttttaaaaacttctattttaagttcaggggtacaagtgcaggtttgttaaacaggtaaacttgtataatgggaggtggctacacagattatttagtcacccaggtattgagcctagtacccattagttatttttcctgatcctccttctccttccacccaccaccctccaaaagaccccagtatgtgttgttcccctctgggtgtccatgtgttctcatcatttagctcccacttataagtgaaaacatgtggtatttggttttctgtttctgtgttagtttgctaaggataatgagtctctctttcccaacagttctgtcaaaagtcccagaacaaaacctcattggtccatccattgtagccaggtaaatgcaacactctggttagccagacctgctcacatgcttgccccagtactatggactgaagtcaatcccacttgaaccaaatgcaatgtgtatgtgtgtgtgtgtgtgtgtgtgtgtgtgtgttgattccctaaaggaatatcagaatgttgttatgggaagaaggaggctgcatgttggacaggcaaaatccacagataactatatactagttagtttgcttttggctacaaataacagaattgccagctaacagtggcttaaataattaaaacaattatctcacattataagatgtctctggtggtaggcagtcttagagttattgaatgactcatcaatataattgagactccaagatgttttatccttctattcctcagtatgttggcttttaatgctcaggtgtgttgactcatggttacagaatggctgccatagctctagccatcacatcctcacaggaacagtgtctagaaaaggcttctggagagagtgtcctaagaaacaggaagtgtaagaccccagtgtcttaaagcctgagaaagtggcacaatgtcacttctgttataatgtattgagacaaaacaggtggctcatgcctgtaatcccagcactttgggaggctgaggtcaggagttcgagaccagcctggccaacatagggaaaccctgtctctactaaaaatacaaaaattagccgggtatggtggcaggtgcctgtaatcccagctacacgggaggccgaggcaggagaatcacttgaacgtgggaggtggaggttgcagtgagctgagactgggccactgcactgcagcctgggtgacaaagtgagactttgtcttgaaagaaaaaaaaatgaattgagacaaaacagtcctagagcacacagaagaggaaatatagactccatctctggatggcaggagtactgatgaatttatggtcatctttaatctgacattgtggttacaggtggggatgcataattttcttgcagggaaggaaagtagacattaaaaaaaatgaataataaaatgggccttatcttaccggttaacatctatcatttatcacgaaactaaagtaaataaaatggttggtttgggaagcctgtaaagtttaggcaactctatgtaaactgctttgtgaatggatttttctcatgcttattaatgcaaagcactaaataggtagatgtaaaagagctttgtgtatataaataatgtaaagtatctagcaaactattacagtattcaaaaaaatataataaaatacactttgggaggtcgagatgggaggatcgcttgaggctaggcatttgagaccagctgggcaacatagtgagatcatgtctctaaaaagtaaaacattagctggcagtgcacacctgtagtcctagctacttaggagactgaggcaggaggatcacttgagcccaaggaggtccaggctgctatgagctgtgatcattccttgcattccagcctgggcaacagaataagaatccatctctaggctgggcgtggtggctcacacctgtaatcccagcactttgggaggccgaggtgggtggatcacgaggtcaggagatcgagaccatcctggctaacacagtgaaaccccatctctactacaaatacaaaaaattagccgggggtggtgatgggcgcctgtggtcccagctaatcgggaggctgaggcaggagaatggtgtgaaactgggaggcggagcttgcagtgagccgagatagcgccactgcactccagcctgggtgacagagcaagactccatctcaaaaaaaaaaaaaaaaagaaaagaaaaggagtataatagcactttaggaggctgagtgggaggatcacatgagctcaggagttcaagactagactgggcaacataatgagaccctgtctctacaaaaaatacaaaaattagccgagtgtggtggtgtacacctatagtcccagatacttaggaggctgaggcagaagaattgcttgagcccagggggttgaggctgcagtggagtgagctgtaatcacatcactgcactccagcctgggtgacagagacagatcttgtctcttaaaaaaaaaaagaaagaaaaaaagtgtgattattaatgtattaatataatcctgagatgcggaagctttcctaagaagaatcataaagtaaaatattaatagtgttgactacataaaaatttaaaaaattaaaggtaaaagacaaactggagaattatttgcatcatgcatatcagacaacaggttgcaatcttttacatataagtagctctttcaattggaagaatatgaccatcctatatccaacaatatgaacaagaaggtttttttctttttttttttttagaaatataaatatctaggctgggtgtggtggctcaagcctgtaatcccagcactttgggagaccaaggcaggtggatcacctgaggtcaggagttcaagaccagcctggccaacatggaaaaaccctgtctctactgaaaaatacaaaaattagctgggcatggtgatgggcacctgtaatcccagctacttgggaagctgaggcaggagaattgcttgaacccaggagacagaggttgcagtgagccgagatcgtgccactgcactccagcctggacaacagagcgagactctatgtcaaaaaaaaaaaaaaagaaagaaagaaatataaatgtctaaatgcatatgaaaacattcaacctcaatgttgattaaaatttgattaaaatcacaactcttctgaggcccagtctagttttatatatcaaaagccctaaaaatggggagattatttgtcccagatcctcatttctaggcatgtatcctaagcaaataattaaggatgtgcaaaaagatatgacctaccagattgttcacttaggtcttgtttataacaaacaaagtggatcatcagagtcatccaactgtgcgccaatatgggtggggcagctctagggtgtgctgttctggtctcccttcaagaaggaacttgcccttcggctgtgaggaatgctgggagctgacagattccagctatttttatttttctatttttgaggcatgggccttgctctgtcacccaggctcaatgcagctttgaccttctgggctcaagtgatcctcccacctcagcctcctgagtagctgggactacaggtgtgcaccactacactcagataatttacttttttatttttagtagagatgacgtctcactatgttgccctggctggtgttgaactcctgggctcaagtgaccttcccacctcggactcccaaagtgctgggattgcaggtgtgagccactgaacctggcctctgcctcacctgttaagctgaggttgtgctgttctcaggcagccccagcgaaggactgagcaaggtactgggactagtgattatagctcactgtgggattcctttggtgggaaatctttgctccagaactccccactgggttggatgaacattttccagatctgcatctcgatctgatattctccctggccaatcctccttcttcaccattttatctttcatggatgttactcccaaataaacctgatactaccgcagagaacccaactaacacattgcattagcattcaattggagtttgatcagaggagcagaaccaccatggctgacatgcaatgagagacttattacatgtggggattagtcctcatgcaactgtgggggcaagttatcagtcaatgtgggcggtggctcttctgaatctgatgttgcatctgaagtcatcagggccagcagctggacaggaaaaaatgtacatgaagtaggggatgcaaagaccaacaggaacctacaaggacaacgtggaacctgagtctgttgccacctccaatcttgatgatgtgagtgactggcaggaggagccagtgcccatgacaggcacctggtgtagggtttggagaagctgaaggagacctggaggagctggaggtaccacaggcctggctgatgcctcacacccacaggtgaagcatcaggctagctgcaaattgtgtaagtggcaagaatgccatgcacctgtgctcagagcatagcaattgctgcaccttcagtcctgtctgccaaatctttttttttttttaagcgacagaatctcactctgtcactcaggctggagttaagtggtgtaatcatagctcacagcagcctcaaacctctagactcaggttatcctcctgcctcagcctcccgagtaacagggaccacaggcccatgtcaccatgcctggcttatttatttatttatatttattttcttattttttttgtagagatgggggatctcgttatgttgcccaggctggtctcgaactcctgggctcaagcgattctccagcctcagccttccgaagtgttgggattacaggcgtgagccactgcatccggccagtctgtcaaatcttgcatatgtttttctcatggccaacaataacatagaccatagagaagggatttcttggaaatatagttccagttttgctaagttaaataaaattaaataaacctaccacaataggattggttaaaataaaatgatatattcataaaatgaaatggtattcagccatttaaaacgatgtcatagatgaatattatcattaagaaaacaatataaatagcataaactaatttgcaaacatgcatataaacatataaagaaaagtattttgaggggttatgttctaagatgttacatttttaagtcaaaacaagtcagtctgggtcacttctcttctttaaactcttttttttagagacagggtcttactttgctgccaggctggagtgcagtggcacaatacagctcactgcagcctcaacctcctgggctcaaataatcttcccacctcagcctcctgagtatctgggactacaggtgtgtgtcatcatactggggttaagttttctttttttttttttttttagagatagggtcttgttgtgttgctcgggttggtctcgactccctggtctcaagtaatcctcctgcctcaaccttcctaatctcctttaaattcttaaatagtactttgggaggccaaggtgtgtggatcacctgaggtcaggaatttgagaccagcctgaccaacatagtgaaactccgtctctactaaaaatacaaaaattatctgggcgtggcggcgggtgcctgtaatcctatttactcgggaggccgaggcaggagaatcgcttgaacccgggaggtggaggttgcagtgagctgagatcacaccattgtactccatctcaaaaaaaattcttaaacagttttgcacaattgatcaaatctaagtatttttatagcttccaggtcctctgcaatgcagatgacgtatgcggtctttccagtttcatctctgactcccacgtgcgtgtcatttcatgttctaggaatgccagctgtttgaggttcttcctttctatgctctgctgtttctcactgactttggcttttctctttggttggactatctttcaccccaacctttgcctgattagttcctgcttattattcaataataattttctggtagtgctttattgagccatttgcagctcaatagttccccaaagtaattattttgaacatcaaaataaattacctgggaaacttacaaaaatactgatacttgggcgtcactatagatcttctacattataatttccagagacaggacctgcaagtctgcatatgattttgaatatagacttgtctgcatgtgatagagatccaatggttgtgtggtgaatttccatagttttatgttgccttggtacccattttgaatataagttagactttctcatatcagacgcagggcccagtcaaccttgacacagttcttcacctcttcccagttcctcaatgtggctgatccagacacctgccttatatctcctcctggtgtagatacaacctacttgtctcaccccacctaattgactcacccctctggcccctacaccttgcataggttgcacagatatgctacagtgaccacctcttagtcacagtgtggctttgcagagctcctgcctgcttagtctaaacccaccaattagaacttctcttgggaaatctgctggggtaatacccaagacgtattttttttttttgagatagagtttcactcttttgcccaggctggagtgcaatggcatgatctaagctcaccacaacctctgccttctggttttaagcaattctcctgcctcagcctcccgagtagctgggattacaggcacccgccaccatgcccagctaatttttgtatttttagcagagacggggtttccccatgttggccaggctggtctcaaactcctgacctcgtgatctgcctgcctcagcctcccaaagtgctgggattacaggcatgagccaccgtgcctggctgtacccaggaccttaataaaggctttgagccacaggtctctctctttctctcttgctttccacttacaggttcaacacgctgctgtctccagacttcccatcagtccttgcaggcacccttggcctgatgaccaaagttttaaaatagcttcattgttttaaatggtgccattttaaatatgaaatatatatatatgtgtatatatatatacacatacacatatacatatatatgtatatacaatatatatgtattttaaatggtaccattttaaatgtgaaatatatatgtatatatatttgtatatatgtaatatatatttcacatttaaaatggtaccatttaaaatacatatatatttatttttaatacatatgtattatttaaatatatgtatatatgtataaatatacatatatatttcacatttaaaatggtaccatatgtatatatgtgtgtgtatatatattttttttaccaaattttaatgataaaggcataatggtaatggctacttcctattgagctaagccctacacaaacataacctcctttaattctaacaataaacccatgagttaggtatttttggtaaccccacattatgaatatgaagtaatattctcaaggtcatgcagtcagtaagtggtgaagtgcttgcttttagtcattaagcttttcagtctgttgagaaattgctggtttccaatcacatacatttttcttttaagtaaacattccctctgatttttccacaattttgtgtatgaattttcataattagacttcagtgtatactaatttgatatttaagaggtctgtttgtcgcttcctagcatgaaaataattcacaaaagatatttaatttaatactcggatgatcaacttctcattttaagccataccaaactctttcccaactctgagcaatattttcagattctgttttaagcaaatgattaattaataaataattaatattcatgcacactttggcatgccagacacggagctaaataaaagcaggtgttacagggataagcaagacagacaaccccactgccatggagtttatattctagagaggtaggcagaccacacaacaaataaatgtatgacaaagtaagttcaggctggacagagtggctcatgtaatcccagtgctttgggaggctgagatgggaggaccgggctcacaggaattcaagacaagcctgggcaacatagtgagactctgtctctacaaaaaattaaaaaattagtggggtgtggtggtacacatctgttgtcctaggtacttgggaggttgaggtggaagaatggtttgaatccaggagtttgaggctgcagtgagtatgattgcaccactgtactccagcctgggcaatagagcaagactctgtctatgaaatgaaaataacatttatttttttaaaaaagcaggatgagggagactcggtggaggctatggcaatagtttaggtagggaggaggtggtgacagtagaggttagatttggaaaggcatgggacatattttggaggtagagtcaagaaaacatgctcatggtttgcatgtggggctaaagtaaaagaagaatcagagatggtttgtagattcttggtttgagcatgtggttggagaatggtagcatttctagagctagggatttctagggatcaatatgcttggaaaaatgaagagttttgtgcaaagtaattttttttttgaatgagtgcccattgcagagactgctaggtgtctactatagccttttcattcccctctttttttaataaaggaaagccaattttaccgggggtggcaaagtgtctggagaaaacataacatttcttagtttcctttgtagctaacctcttttgcttgtctattacgtgagctccatatacataatgtgaatgtgaataaccttgagttttgaaattacatgcttagactaagagaaggagcctctatgccaaataactttgcagagttgccatatcagttctagccttttttttttttttctcaccctgtcacccaggctggagtgcagtagcgtgatctcagctcacggcaaccttagcctcccagcgtcaagcaattctcccacctcagcttcctgtatagctggggctacaggtacacaccaccatacctggctaatttttgtagtttttagtagagacacgatttcaccatgttagccaggccagtctcaatctcctgacctcaagtgatccgcccacctcagcctctcaaagtgctgggattacatacgtgatccaactgtgcccagccaattctagccttttatatcagagaaaaaactctaaattgcttaatctacaataattggaaccctgttactagtagttgaatacaattcctatctgataccatactgattctagaaaaaaattattaagctataatttccagagtttgtccctgaattcccattctcctccaagcagaacatgaagttgcccagaaatagtttatctgtggtatgcaaatccagtgtattagaaaatattttctgaatctacttgcggttccattatcctcaaccaacatatgtcagcaaaataaaacaagcatttgtatttttagtatgtcactgttgtgcagtctcctaaattttgatgttttaagcactatgcctttaacattcactaaagctgataacatggaagaggttgattatggttccccgggtgccaagaattatacgggtttctgttccaatgttgaggacagaaatccttcagcgcagatggaaacatggttggattctgtagatacatttcttattcacacaacagagagtctaatagagacgggacattattatttttttgaagcctctacaaatgcccacttaaaaagctacaagcattatatacagatacttttttgttttttttgagacaacgtctcattctgtcacctaggctggagtgcagtggcttgatctctgctcactgcaacctctacctcctgggttcaagcgattctcgtgcctcagcctcccgagtagctgggactgtaggcgcctgccatcaagccggctaatttttgtatttttggtagagatggggtttcaccacattggccaggctggtctcgaactcctgacctcggcctcccaaagtcctgggactacaggcctgaccattgtgcctggctcattattacttttattttttaaaaaatagatgtgggttctgtcatttagggtggaggcttgggtttgtgcgtggagtgcatagttcctttcttttgggaagggccatctgggtgagctcttttgctttgggcagggacaatgcaaggacaaataccattttcataggggacactcttgctctctttccaaggttggggctggaaggaatttctgggcctagtgggagggggaggccagctcccagcatgtggagtctgaggctggggcctgtgccccttggagcagcccagctggacagtgcatctcacgacctgagggtgtctaattgggtctaatcagaggcattagagagtgacaagtctcctggaggccacagattgcagaggcctaagtgtggtaacaaagacagagactgaattcaaaagcccagttatgcttcaaactcaacccagaaaccagcagtccctgccgcactctcttcctccccagttccagtctagagaggcaacctctataatttttttgtttttttgagacggagtcttgctctgttgtccaggctggagtgcagtgttgtgttcatggctcactgcagcctcaagctcctaggctcaagcaatcctcttgcctcagcctcctgagtagctgggaatacaggcacatgccaccacacctggttaatttttaatttttgtgtagagatgggggtctcactatgttgtccaggctggtcttgaactcctggcctcaagtgatgttcctgccttggcttcccaaaatgttggaattacaggcataagccattgcaacccagccaatttcaccactaggttttgctacactgctgtaataattggaacacctttgtggtaggcggcctcaaagatgatccccccagtgatccctgtttcctgatattcacaccctgtgtagtcctctccaaccttgtaccagagttcatctctgttgaccagcagaatagatcagaagtgagggcatattagttctaagattagtatataagagacattgtaacttctgtcttggtctttgcttcatccccatctctatttgattattcactctagagggagccaactgccatatggagcagccctatggagaggcccaggtgataagtaattgagggatcttgccagcaattttgggaatgaatagatctttcagcccctgtcaagccttttgatgacttcagcctccgcttaactgcaacttcataaaagactgaaccagaggctgctccctgatttttgacccttagagagtgtgtgagatgatatatatttgttgttttaagctactagcttttggggtgtcatttgctacacagcaatagctaactgatacaacctcctatttggcttccctttttaaaatatatatatatatattttttattatactttaagttcaagggtacttgtgcacaatgtgcaggtttgttacatatgtatacttgtgccatgttggtgtgctgcacccattaactcatcatatacattaggtatatctcctaatgttatccctccccccttcctccaccccacaacatgttccagtgtgtgatgttccccttcctgtgtccatgtgttctcattgtttaattcccacctatgagtgagaacatgtggtgtttggttttttgtccttgcgatagtttgctgagaatgatggtttccagcttcatccatgtccctacaaaggacatgaactcatcattttttatgtctgcatagtattccatggtgtatatgtgccacattttcttaatccagtatatcattgttggacatttgggttggttccaagtctttgctattgtgagtagtgctgcaataaacatacatgtgcatgtgtctttatagcagcatgatttatattcctttgggtatatacccagtaatgggatggctgggtcaaatggtatttctagttctagatccctgaggaatcgccacactgacttccacaatgtttgaactagtttacagtcccaccaacagtgtaaaagtgttcctatttctccacatcctctccagcacctgttgtttcctgactttttaatgatcaccattctaactggtgtgagatgatatctcattgtggttttgatttgcatttctctgatggccagtcctgatgagcatttcttcatgtgtctgttggctgcataaatgtcttcttttgagaagtgtctgttcatccttcgcccactttttgatggggttgtttgttttttttcttgtaaatttgtttgagttctttgtaggttctggatattagctctttgtcagatgagtagattgaaaaaattttctcccattctgtaggttgcctgttcactctgatggtagtttcttttgccgtgcagaagctctttagtttaattagatcccatttgtcaattttggcttttgttgccattgcttttggtgttttagacatgaagtccttgcccatgcctatgtcctgaatgatattgcctaggttttcttctagggtttttatggttttaggtctaacatgtcagtctttaatccatcttgaattaatttttgtataaggtgtaaggaagggatccagtttcagctttctacatatggctagccagttttcccagcaccatttgttaaatagggaatcctttccccattgcttgtttttgtcaggtttgtcaaagatcagatagttgtagatgtgtggtattatttctgagggctctgttctgttccattggtctatatctctgttttggtaccagtaccatgctgttttggttactgtagccttgtagtatagtttgaagtcaggtagcatgatgcctccagctttgttcttttggcttaggattgacttggcaatgcaggctcttttttggttccatatgaactttaaagtagttttttccaattctgtgaagaaagtcattggtagcttgatggggatggcgttgaatctataaattaccttgggcagtatggccattttcacaatattgattcttcatatccatgagcatggaatgttcttccatttttttgtgtcctcttttatttcattgagcaatggtttgtagttctccttgaagaggtccttcacatcccttttaagttggattcctaggtattttattctctttgaagcaattgtgaatgggagttcactcatgatttggctctctgtttgtctgttattggtgtataagaatgcttgtgatttttgcacattgattttatatcctgagactttgctgaatttgcttatcagcttaaggagatttcgggctgagacgatggggttttctagatatacaatcatgtcatttgcaaacagggacaatttgacttcctcttttcctaattgaatgccctttatttctttctcctgcccgattgccctggccagaacttccaagactatgtggaataggagtggtgagagagggcatccctgtcttgtgccagttttcaaagggaatgcttccagtttttgcccattcagtatgatattggctgtgggtttgtcattggcttcccaacttattgcttcagtgtgaacagacctgctgtacattctgggccactttttactctcatcctagggattccctttcctttttcctgcttccactgcttcctggaccccctgttttcctctttatagctttaatttctcattttgatagagcagactacctagtaacctcctaagaaagagtgcattggtggtcaggtgtggtggctcgcatttgtaattccagcactttgggaggctgaggtgggtggatcatttgagatcaggagttcaagaccaacctggccaacatggtgaaaccccgtctctattaaaaatacaaaaattagctgggcatgttggcaggtgcctgtaatcccagctacacaggaggctgaggcaggagaattgcttgaacctgggaggtagaggttgcagtgagctgagatgattgctccactgcactccagcctgggtgacagagcaagactccatgaaaaaaaaaaaaaaaaaaaaaaaaagagtgcattggtgaaaaatatttgagagcttgcatgatttataatgtctttattctgccattacgcttgatggtaaggtgtcagggtctagaattttaggttgaaaatagcctttctctcaaaaaaaaaaaaggaaaagtattgcttcatttttcttctagcttcttatgatgctcttgaagagtattagtttttgtatgtgcctattatgtttctttcccccactcctgaaaacttctaggtgccattattggtggcagttaagtgtgcaaactctagaagcagactacctgggttcaaatctcagttccaacaatcattggttatgtgactctgggaaatttgtttaactgctctgtgcctcagtttccccatctgtaaagataacagtacctacctcacagagttgctgtgaggatcaaatgaccccctacctttctgtgctcctctgtatccgttgatgtaaaccttcctcaagttgggttggttccacacaccatttctggagaggggtagggtctagaacaaggcgggcaagctttacctgtgaaagagcagatagtaggctggctgtggaggctcatatttgtaatcccagcatgttgggaggctggggtgggtggatcacctcaggtcaggagttcgagaccagcctgaccaacatggtgaagccctgtctctaaaaaaaaaaaaaaaaaaaaaaaaaaaaaacaaaattagccaggcatggtagcacatgcctgtaatcccagctacttgaggaggctgaggcaggagaatcgcttgaacccgggaggcagaggttgcagtgagccgagatcacgccattgcactccagcctgggcaacaagaacaaaactccatctcaaaaaataaaaaaaaaagcagatagtaaatagttttgactttgagagctataaagctagtgtttcagctatcgaactttaccattgtagggcaaaagctgccatagacaaaataaaagtgaatgaacctggctgtgttccaataaaacttttgtttatacagctgcaggcagatttggctcgctgaccgtaggcatctgactgtgaaacactatcctctcctttttgtacttattttatccgacccttcttagaggtatagagatgactcctagttggagacatctcagactaaaaactgactaccttatattataacttctacacagtgctctaagtggtccgatgattgagttatatcaaatgcagggtttcagttgcaacattaatgaaatagcctgagtaaacctttcgtgatgacaagagccagccaccaattatctcatccctggattgacattattgtaagccacaaagtaccaagctttccttgtgcttaaactgttgaggaaaatgcttgactcttttttttttttttttttgagacagagtctccctctgtcacctaggctggagtgcagtggcacgaacatggctcactgaatccttgacctcctgggttcaggtgagcctttcacctcagcctcccaagtaggtggaactacaggtgcaagccaccatacaggctaatttaaaaaattatttctagatacgaggtcttactatgttgcccaggctggttttgaactcctgggctcaagtgatcctcctgcctcagcctcccaaagggtgggtttgcaggcatgaaccaccatgcctgcccagccaactctttctttgtaacatttttatacaaataaaaacagccatgctatggcacttttatccattaattctaggtcaagtgacatgctgggactggaaagatgaaaatcactgtgtcaccctcaaaggtttgagtaagcaagcaatttagatagaacatcccctgtgtcacaataaagcccttttcgccaatcagattagcaaagactaaaaaacaaacaaaagacacaatcaatgcttgttaggacatgatgaaaagggcactttgtagatttctgatgttaaataaattgcaacccagtctgactacattaactctgtgctgttatgttcatcccaactctgttttctttgtcttttctttttttcttttttttgagacagggtcttcctctgccatccaggctggagtgcagtggcataatcttggctcactgcaatctctgcctcctgggctcaagcaattctcctgcctcaccctcctaaatagctgggactacaggtgcacaccaccatgcctgactaattttttagtagagatggggttttgccatgttgtccaggctggtcttgaactcctgagctcaggtgaatctgcccgtcttggccctccaaagtgcagggattacaggcgtgagccaccatgcctggccccaactctgttttctgctctggccctctgtgtcttgccttgggggtatgggtgggtagatgggggggagtttcctctttgttccccactgactctttttttttttttttttaaggttatctatttatttagagatggaggtctcagtatgttgcccaggctggtcttgaacttccgggctcaaacaatcctcccacctcagcctcctgagtagctaagaccactggtgacccaactgattcttggggaaggcagccccaagtgagttgacaacaaaagtgcctccctagcctggggccagtgagaccccaaatatcacccccctcccttcgctgggtttttcctgcccatctttacctgaccattggtcactggaggagcctcttaaaccttctaaccgggaactgctcctgctattgtattttcacccacctacacaattactggaccacagcatctcctaccacgctctcacttctcacattgtcagtacatccatccccagtccttgcctgccaaattcccccatctgtcatcaacacccccccgccatagattttctttccccttccatcgacaaaaaccacttttcccttctcccaatgttattatgctagtattggttaacactgagctattttcatttatttgcttcatttgaaattttcaaatacattcacgctccttgtaaaaattaaagtaattcagaagtacatgaagtaaaaaggtgagagtccctccttcgctcaactcatctcagtccccagaaataaccactgatagtagttttgctttcctgtttccagaactattttgcaaaattcaatttggactaatggggttttagtgctcatatgcataatttatagaatatggtggattaagaaaatcacatctctgggaattgggctgattcaatcgatctgcatcttatatgactttgctgcattttgacattggccaaactagctttttttttttttttttttgagatggagtttcactctgttgcccaggctggagtgcagtggtgcaatctcagctcactgaagcctctgcctcccaggtagaagcgattctcctgcctcagcctcccgagtagctgggactataggtgtgcaccatcacatctggattttatatatatatatatatatatatatatatttgtattttttagtggagatggggtttcaccacgttggcaaggttggtcttgaactcctgacctcaagtgatctggctgcctcggcctcccaaaatgctgggattataggcgtgagccaccgcccctgaccaaagccaaactgtatttttttttttttttttttgagacagaatctcgctctgtcgcctaagctggccaaactgtttttgagacttgactccttctaggcttcctgagcaccattccctggctgctctttctcatttccttggaggctttctcttatctgtttctcccctaaatgctggtattcctcagggctctgttctcatcactcttggtggattaggcacagagcaaatcatcccttctttagacttgcaaactcacgtctactagtgaaatatgtgttgagcaggcagtgcatggtggctcgcgcctgtaatcccaacactttgggaggctgaggtgggaggattgcttgagtccaggagtttgagagcagcctgggcaacatcatgagactctgtctctacaaaaaatttaaaaagttagccaggggtggtagcacacacctgtggtcccagctacttgggaggctgaggcaggaggatcacttgagcataggaggtagagactgcagtgagctatgatcgtgccactatactccagcctgggcagcagagcaagactctgtctcaaaaaaaacaaaataaaacaaaacaacaacaacaaaaacaaacccaaatctccaaagccaaacaaacaaaaatacttttttttaaaaatttaattttattttttattatactttaagttttagggtacatgtgcacattgtgcaggttagttacatatgtatacatgtgccatgctggtgcgctgcacccactaactcatcatctagcattaggtttatctcccaatgctatccctccccgctccccctaccccacaatagtccccagagtgtgatgttccccttcctgtgtccctgtgatctcactgttcaattcccacctatgagtgagaatatgcggtgtttggttttttgttcttgcagccataaaaaatgatgagttcatgtcctttgtagggacatggatgaaactggaaatcatcattctcagtaaactatcgcaagaacaaaaaacaaaaatacttttaaatgagtgttttctttcacttaactttatatctgtgaagttcatgcatgtcattgtgtggagtgtttgtgcactttcactgttctatggtattccattgtgtgaataaatgacaattaaaaaaactcattctcccgttgaaggatacttgcattgtttccaatgtttggcttttataaacaatgctgtctgcagaactgtttggataagagattttgtgattgatggggaagcgagcagatttgcagtgatggagcgatggggaaaaggtggtcctgtgcagaatccacctcacctggggcacccccagaactggtcaccttgtgggcactaggggatggtacctcaaaaccagcataggcatcctcaaaagagacactctcagctgtggctagtttatgtggcttcctgaacctcaatctgaagccagagagagaaagaacttggcaatttttgtgtttttagattgcagtggaaaactggtgtgtgagtgcatatgaggttgctttttgaaagtaggaatggggtgcaggtgggaggctcagaggcattgtaattcaggaatacgtgtaaatgttccatatatgaatccactggaaacaataatccacaggcctgctgactagtggggaagggtctgggccacctggggtgggtgggaatgtttctcactgggtctggcctgagcagtgacaggtttttgttggtgttgctgcagtagaagggcttgcttctttcccattggctaactctgaagtagctgttactcaccaaaatggtgttggaatgagatactcatgatctgtgcagataagcaatgactaatggtgcttttgcaagttctggagtccctcccttggggaaggaactagacttggaaccagactacgggttggcaaaattaagcataatttctttctgtacgtgctccacttcagcagagatcatcccggaagtttcctagtatcctgacttcacagatcacatgatgtgatcaacattgattgaatacttattatgtatcaggcactggttgaagcaccttaatatacatttaaaactcaaacatcactatgagtggggcaatgtgtatcagttagcttttgctgtataacaaaccttcccaagttttagtgtcttaaaacagcagacatcattttatttttattgagatagagtcttgctctgttgcccaggctggagtgcagtggtgtgaacatggctcaccgcagcctcaacctcctgcattcaagtgatcctcctgcttcagcctcctgagtagctgggaccacaaacccgtgccaccatggccagataattgttaaatttttgtagatacagcgtcccactatgtttcccaggctgtcttgaactcctgggctcaagtgatctcctgcctcagcctcccaaagtgctgggctttcaggcatgagcctctgtgcctggcattgttttatcttttattgaatttttttttttaagagacggggtcttgctatgttgccctggctggtcttaaattcctgggcccaagcgatcctccctccccagcttcctgagtagttgagactataagcatagccactgcaactgactaagcaatagacattatttctcacagttctgtgaattttctgggagtttattctgatttgggctagcttggctgcaactgaatggcctaggatagtctcgctcacgtatctggcaattgcctcaatgtcagctggggcgacagccatgtgtctgtcagtatcagcccacactggttcacatgatggtaggaaagttctcagcagcaagagagtaaatcctaatgtgcaagaaggcttccagcctctgcttgcatcacattggttaatgtcccattggtcaaagcaagtcacatgactaagaccagattatacatagaggtgaccttctcaagatatggatgtggggagggggtggattatggtagtcatcttataaacaaccagctgcgtactcttattatcctcattttactgatgatggttagataagttaagaatcttgttacaggtcacacagctgctataaggtagagctcagcctcaactttaggtctatatggtgatgaagcctgtgccttaagtcctgtgctatttgtattgcttccttcctcagacctggactgttgtgtctcagcccagggaagaggagagatgagacacttaactagcctcctccagggaccactgatcatagagcctagccattgcttgtgcagccagctggacttagcaacccctgcaatgctgaagagagtaattctcatgaatctaacaattccgccattgcactggattctgtaccttcagattagtattggagatctattacatagaccgtaggaaatagatggaaaggataaaggatggcagcagaaatagggccccacatttgcttcatgggcaatcatcaagcatctactgtgtctgggctagattgtggttattcaggcaaagtgcaggaaggggaacagttgctctctaaagtacattttcaacaagagaacatgttgactgagggacattaaagactgagatgaaaggcacttagatgcagaagctgcaagacagtaagaccttgagatttgtagggaagagcagaggagagaagacatttcttaataataaccagctgctttaccagtgctggtgcagacactaccccctctcaccaggtggttatagaaactgcaccttcttctatccaatttcaagcccaccatctcttaaatttaaggtctccaaaagaacagtttttgatgacactgggaagagggtgagcaggcagatttggggtgggaattgaaggaatcaaatcccaaactccattttagatttgcaatcaagctgaaactctcagcacccccagagtatgcctttaaaaggaaaaaaaaaaggctatttgtaagaaaaaaagaccaaggtttgcatctgaatggagtgccaatcagcactcattagtgggaacacaatgcggccccattagcacgaaaggagctttggcaattgctcattagctttgtagattcaaataattattttaagggatgcttcggtgtttgatgagatccagcagtgtcaatgatatgccacttttctccccaaagaaagggaatgttcccaggagtaattgtactctcttatccccctcccttctcactcacacctcaatgcttctctatatactcccgggggtacaggatctcaacaaagggctgaaggtggatagaaacttctccatcaagatattactcacaggaaaactgtggtcccgagagtacaggaacacaaaagtagttatctgaagagctgggagaatctgtttattacacgcactcccttcttccattgacaggagggaatctcgatgagctgggggaagaatagaaacatgcaatagggtcttgagtacatactcaagagagaggagtgtgggcataccaagggaaggaatattcatgaaaattcctggaaaaagctggagatttctcagaattatggtgccaccaatttttacatcaatatgggtgctcctggaactgtcctggcactggtgggtttgtgattaagaatgttaatgagtatataggctgggtgcagtggctcattcttgtaatcccagcactttgggaggccggggcagatcacctgaggtcaggagttcaagaccagcctgaccaacatggtgaaaccctgtctctactagaaatacaaaaattagccaggtgtgaatgtgggcacctgtaatcccagctacttgggaggctgaggcaggagaattgcttgaacccaggaagcagaggctgcagtaagctgagatcacgccattgcactccagcctgagtgacaagagtgaaactccatctcaaaacaacaacaaaacaaacaaacaaacaaaaacataaggttctaggtgaaacctaggtcaaatccagtgccaattaagttcaattggtcttagccagcatggtccacaccctggtttttcagggttttatcagaccctagcttctgcagctatttcaacatctgccttttgcctagccatgtgaaagtgctgcctggaattttctgttctcctgtgaccaccctgtattattcctgtctcactttgatgaaaatttcaaagatcagaactctgtccaaggggctggaaaattggggtgggcacaacttttttttttttttggctggaaggaacattctggaggataaggtgggtcacaggggacctatgaaggggaacttcttaggcctaattctgctgtaggcattaagggagtgctcctagagcagtgcttgacacagggtaagagctcaataagacaatggttaaaagcccaggtgttaaaatagatggatttaggctcaagttccatcattctcagagatctgccctttcaccaaacttctagggtgattcttatgcacattattgtttgagaactgctgagacagacagtactatttctgataattaatgctggtcctctggagcttgtatttggggaggaagaaggatgaatcccactgtgaggtccacttctgtggttagaatgtggcaaaaacttggtttcctcttcctctttcccaataaaacctccatttattttttgctgtctactgtcctccacgtggtcatgttctttacaggaagcggtctctgacctcaagaagttaatagtaattggtctaaaccaaccatgttttcctatttcccttgcttagtgataggctcagcatgggcacatgaaataattctggtcaatgagacacgagtggggagtgtattggagtttctggcaaaggtcttccttaatgattgaaaggagattgattgaaagagggaagaaacagcccctttatgaaagagggaagaaacagcccctttactgtctctggttatttgagaacatgctggctggagcttgggcagccatcttgtgcccatgacgggggctgatttaggtcaaggataacagtggaaatccacaaagaagtgggcctttactaatgtaattgagctgtcaaatcaatcaaccatgaagcttccccattttattatgtgagataataacatttcttcagtgtgtaaggtcagatcagttgcaggctctgtttcttgctctgaaagttttccagagaggagggatggagatgtatactgagaaggcctgaagaaggagggactgaatagagggagaagcctgagaatggctaggaactggagtgcatctttaaggagaggccctatgagtggcccagactttactgcagcacagtggctaaaatcaaggactttagaatcagaatgtcttggttcaaattctacctccaccacttactagttatatcaccttgggtaaattacttaacctcagtttcattgtttgtaaaacaggatcatggtggtattaacctcacagggtttaagaaggtgagtagggctgggcacagtggctcacccctgtaatcctagcagtttgggaggccaaggcaggtggatcacttgagctcaggagtttaagaccagcctggacaacatggtgaaaccccatctctgcaaaaaaatacaaaaaattagccaggcatggtggcacatgcctatagtcccagctacttgggaggctgaggtgggaggatggcttgagcccaggaggcggaggttgcagggaacagggatcacaccactgcactccagcctgggtgacacagccagaccctgtctcaagaaaaaaataaaaaataaaaaaagattagttaataatgtaaagtacctagtgtagtgtgatctgagagacctatgtgtaatgtgctcagagactgaaacagacacccctttatcaactaagacaagcccaaggttaaggaaacaaaagttacctacctaaggtcaagggttcaggtcctggcaggcatggcaaatttctaaattcctatagctataagaaaaaccagctgggcgctgtggctcatgcctgtaatcccagcactttggcatacctaggagggcagattgcttgagtccaggagtttgagaccagcctcggcaacatggcaaaatctcatttctacaaaaaatgcaaaaattagttggatgtgggcatacctgtatgcccagctactcaggaggctgtgagaggattgcttaagcctgggaggtggaggctgcagtgagccatgattgcaccactgctctccagcctgggtgacagagcgagaccctgtctcaaaaaagaaaaagaaaaagaaaaaagtaaaatcacagccttgctaaactccctaaccataggagctatatcaggtgaatttacggcccagaccgctacaactctggacagggaccagccttataaacattgttttcttatatggaactgcagaccttaagccagtttcagcggcttatagaggctgcacacaagctttctttgtgtcctgtaggtcaccttttgacgtaacgagtcaaattccacctcattttaatgctaaaacctgccccgaagtgaacatgggatgtatgctacgtcccgtgtgtgtgtgattaagaatgttaaaaagcatataggctgggtgcagtgcctcatgccactgcagattccccttcctgcactttgcctgaataaccagaatctacccgagacacagtaggtgcttaatgattgcccatgaagcaaatgtggggccctatttctgctgccaatgtttacccattgctcatgcatttggctcctctcataaatatgtatagcgttctcccaaacctgctgaatatgcatgactattgtataataagaccttgtgtgacacaaaacccaacctgccctttctctcttcaaagctaagtgtggtggcttatgcctgtaatcccagtactttgggaggctgaggtagccagattgcttgagcccaggagtttgagaccagcctgggcaacatggtgaaaccttgtctctgcaaagaaaatacaaaaattagccaggtgtggtgggggcatgcctgtagctcactgtagcctcgaattcctggactcaagtgatcctcctgcctcagcctcctgagtagctaggactgtgatgtgtgctaccatacttgactattttttttttctttttgtacagatgagggtctttgtgtatttcccaggctggtcttaaactcctgtcctcaagtgatcctcggcctcccaaagtgctgggattacaggtataggccagcatgcccagcctaacccattttagacaaccaataagttttattttttatttttaaattttatttttggagacagagtcttgctctgttgcccaggctggaatgtagtggcgtgatcatggctcactatagactccacctcttgggctcaagcaatcctcttgcctcagcctgccaagcagctgggactacaggcacatgccaccacacctggctaattttttttcttatttttatagagacgaggtctcactatgttttccaggcttttatcgaactcctgggttcaagtgattctcctgccttggcctcccaaattgctgggattataggtgtgagccgccatgtccagccctaataaattttaatagccagctccacttctctaggagaatgtctctttgcccattgctggacatttcagcctgtacagtgtgccccttggtctgaagaaatgacagttagctgcccaaatccatgtactatttttgatcctgttttttaatggcatcgtgaatagttgcatcttccattgggtaagcaaggcccagtgcagagtcagtgtctattattgtcaagacccacttgtggtcccccagggctaccagtgtcggtctcacttgccagctacgttcagggccttcccaccaaggaatcttttccatagccctcagcagcttctgtctctcttgctgacaaacagaacagtctcactggcattttgtacctcagagggcacaagaagaacctgtctagattcagcccgtctctgcactgctgcagggccctgtctcatagacccagctggcccccacaagggagcaaatggggatatctgcttgtcgattccaatcaccttccaaacccggaaggaggttcttctgatgggcagcccatgtcttactttaatgtactctcacacttccatagggctgtcccctataagggcatctctttaataggccaggtttccatgccctcctgcctgagtatggttaggtctctgaccactgcccatgagttagtaaaaacccaaacacaaagactttttattactgttcaatctttccatcactgctaggaaaccaccatgcaattcagcccactgagctgatttgcttttactgtctttgatcagagtggcatctttccaaataagatgttgtctattcatcttggaacttggaactgtcacccatactccatgcagtttttttgtttgtttgtttgtttgttttgagacagggtctcactctgtcacccaggcacccaggctggagtgcagtggcatgaacacggctcattgcagccttgaactcctgggctcaagcgatcctcccacctcagccttctgagtagctgggaccacaggcatgcacttggctaatttttaaattgtttgtagagaggaggtcttaccatgttgcccaggctggtctccaactcctgggctcaagcgatcttcctgcttcagcctcccaaagtgttgggattaccagcgtgagccaccatgcccagccccaaccagctgttatttgagaactgtttgtagggcactatccaagtgacaatagaatccagcaacgcctcccacaattccaaagtctatctgaggggaaaagaggctctctgcgtgtatttcttcctcgcattccccaggtagaatgatccgctaaaccatttccatttcatcatggatctctgctgcacagtgtcacactcattacagtgtttctctgatgtcactccagtcatcgagggtgttttccaccttcctgggatgaatcctttgactttcttgtctgcatttccccattctcttattaattaatctgatttttgttattgttgttgttgagactgagtctctctctgtcacccagcctggagtgcagtgtgatctcagctgactgcaacctctgcctcccaggttcaagcgattttcctgcatcagcctcctgagtagtgggactacaggcatgtgccaccaagccctgctaagttttctttgtatttttagtagagacggggtttcaccatgttggccaggctggtcttgaactcctgacctcaaatgatttgcccacctaggcctcccaaagtgctgggattacaggcataagccaccgtgactggcccagaaaacatgataaggcttcttgaactaccttttgattttgcagcagcaaggttatacggggcatccacattacaggggtgcccttaaccacagcatttactatgaccttggcaatgagcacattcagctggtgaatatcgcgattctcataaagccaggcccacatgacttgcatatgaaacacatcagctgcttcttccgagatgcactactggatatttataggaggagacagagtcccccttctcagggagaacagatcttacagtggcttttttttttctttttgagatagggtctcactctgtcaccaaagctggttgcagtggcgtgatcttggcatactgtaacctccgcctcctaggctcaagtgatccttgcacttcagcctcccaaatagcttggacttcaggtgcacactaccatgcctggttaattttctttttcttttggaagggatggagtctggccacgttgcccaggctggtctcaaactcctgatctcaagcaatccacccacctctgcctcccgaagtgctgggagtacaggcatgaggcacaatatccagcctatagtggcttttatccagtccaccaggctggctgttctcttgggaataaccacctgtgtgtctgcctcccatataaccatttgtgattattttgtagtgagctgtgggtcaacccaaacgtgctctttcactgtagtatttaaaactaaagacataggccgggtgcggtggctcatgtctgtaatcccagcactttgggatggtgaggtgggtggatcacttgaggccaggaccagcctggccaacatggcaaaaccctgtctctactaaaaatgcaaaaattacccgggcgtggtggtgggcgcctgtaaactcagctacttggaaggctgaggcacgggaatcgtttgatccaggaggtagaggtggcagtgagctgagatcgtgccactgtactctaagtattctaaggattttaagagttgtatgccaggaaatgaggtccaaaaccaaatataattttacaatatcacaagttgtttccaatggttgcttattaagagtagagctgtgataaacattcatgtagaggtttttgtatgaatataaatttttatttctctgggatgaatattcaagagtgcaattgctaggttatatagtagttgcatgttcagtttgcatagattatgacaatgagacagcgagagaagtctaatgtggctgactccatcctcacagcctggatgtctttgcccattcctgggcataggccaagctaaccatgggaggagtttaatttacagtttaaccttgaagcaaggatgggaatagtcttaccttgaaatggatcctttccttgtgcaggggctgaaactgtctttgtaagattaataaaagaccacaagattaggattatggaaggggcataaattttaaaatgtagatatagtttttataatccttttactgctctggtatcatgtaaccagaggtcacgagatttgagactttgctaattgctcctgtagatgacaacactatttgtagaatcaatctaaggttgatctttttttttttcttttgggacagagtctcactgcgtcacccaggctggagtgcagtggtgcaatcttggctcactgcaacctctgcctcccaagctcaagcaattctcatgcttcagcctcccaagtagctgggacaataggcatgtgccactgcacccagctattttttgtttttgtttttgtttttagtagagatggggtttcaccatgttggtcaggaaggtcttgaactcccagcctcaagtgatcagcctgcctcagccttccaaaatgctggaattacaggcatgagccactgcatctggccaagattgatcttttgagatgtttttcaggcttttacattctgagtaaagaatggattgactcccactgaacccatgactcatgattcaatcagtcccgtgacctccacccagaggcagactcagtgcacgagggccattttccgcacacctgtgattgcatttccaatccatcaacaggacccattccctaatcccccacccaccaatctatccttgaaaaaccctaacctccgagcctttggagagaatgatttgagtgataactccagttctcccacgtggccggcctcacattaattaaaccctttctttactgcaatttctttactgcaatatcacagtctcagtgaactggttttgtttgtgtagtgcacaggaagaacccaacagataattatgcatggataccaaaattgggggatctccattacttctgggcgagagggggatttcttgctccccactaggcctccatggataccttcctagaaagggcaggaatggctccatactgcttcccacatggcttttactgacatcatggaccaggggtggggtggggagataggagaatagagggttggggggataggaagttgggggatgggggggtttcttctcatgactgctgggaggccataaaaatcctaactttccactagacctactatgaccccacccagcagagagggagaccttgctactgacttgtggagataaaaggcccagttccctacctgcccttctctgacaccacttctagacatctcattacagcctagggagtgtggaattctagactattcactcagctttgctgcatggctgtgggtgcattcagtttttttttttttttcctcccctgtggcatttcctggagaagagttattatcatttaaaagttttctgtcttgctaggctgcctctgcctgctcccttagctacagagaacacttttggaagagcatatttatctgcacctcttggcatttctgggttgctggcttctccagctccaagtctaggctatatcaggcaaaaagaaaacccagagaactcaacaatatgtcattccttgagtcccgaggttcttaactggcctctcttctctctgcctctcagagccttttttttttttttgagcgagggtctcactcttgttacccagattgtagtgcagtggcatgatcacagctcactgcagcctcctcctcctgggctcaggtaatcctcccacctcagcctccagagtagctgggactacaggcgagtgccatcactcctgactaatttttgtatttttttctctgtagagacagggtctcattatattgcccaggctggtctcaaactcctgagctcaaatgatcctccccccttggcttccctaagtgctgggattacaggcatgagccaccatgcctggctgacttttttcttcgggaattgtaatgtgcccagctgtcaagaatggatcatgacttgtgtaggccaaccattgctatcctattcccctttgccagatactcatgttctcagcctcccttgcacctaagggtggccgtgtgacccagttctaacaaatgatatgcaaaagaagatctttctggagccttctatgagtatttttgcattttcattgtcttctttcctgctggggacaaaagagagagggcatgaaggctggaggtgcagcagctatcttgtgaccttgaggtgataagcctaagagaaaggccaggtgaatggttacagatgagctcccagagactgcagccatgcataagctcctgattagactcattacctagctccaggttctcactgagaaaaccagaaatgtcttcacagtctaaatcttcgctggttggggttctttttttggttgttgttacttgcaaccagacatattttgattgattcagggagggaggagtttatgatgcagggaaatagctgctaataaattaattacagagtggatgtaacacaaactgatgtttctcaagtatttcaaaggaagatgattcttgaaagggaaggagggaagctggaactagggttttggatcataaacactgaataaattatatgttttcacaataatagacgtgagccagcaatccagggtgggaagggagattggagtgaaagaagccacttgagttctctctggccttaagggcctggaactgggagttatttctagtgaaagctcccatttgagagggccctgaggagctacccctgggagaactctgtcttagcagcagtcacaagagatgcaaaaatgtggtcaggggctaaagaaagatggacgctcttcaggattcagtaaactaccgagggaagcaaaggatgcttcttgatttccaacaataaggacgtttttgatctcaaataataactcaagaagtagacagctatgggttagtttggagaatacctagatcaccaggaacatcaaggttgtgtgaccagttgcctgccatccacatggaaaatccagcttgggaaatggactctgtctctcagtctctcacattcactcaatacaagtgctcctgggtcaaagaaagaaaagaggctctggaacatggctgggcgcagtggctcacgcatgtagtcccagcattttgggaggccgaggcaggtgggtcatttgaggacaggagttcgagactagcctgaccaacatggtgaaaccctgtctctattaaaaatacaaaaaattggtaagacgtggtggcacatgcctgtagtcccagctacttgggaggctgaggcaggagaatcgctggaacccgagatgtggaggttgcagtgagccaagagagtgggtgccattgcactccagcctgggcgacagagtgagactctgtctaaaaaaaagagagacactctggaacattctggaaaggggatatttaaaagattattattattttagagacagggccttggtctgtcttccaggctggagtgcaatcatagcttactgcagccttgaactcttgggttcaagcaattctcaaccttccaagtaactgtgactacagatgtaccccatcacagtggattaattttttttttttttttttttttgggtagagacagggtcttgctgtgttgcttaggctggtcttgaactcctgagttcaagcaattctcctgcctcagtttcccgaagtgttggtattacaggtgtgagccactgtgtgtgaccttaacagtttaaaatagagttggaagaactagaggaaagaaggaaatgttgggaaaggtgtagtggctcgagggatgatccttgcagatttgaaaacgttgcttctcagaagtgatatctctggaaatgaggatttctgtaaagtgggagggtaattgttcaccaggatacgaaatatttctaaaggggaaataatgtcacatttaatctttttttccttccaataataattttctctcattgtaaaagtagggcatgtccttaaagaaaatgtagaaagtacaagtacaagaaaaaaaagaagaaaaataaatcgctcatatttctgctacactaacaaagccgcttcctttattgattatgtttattttacattatttttaaagccataggctgggtgccatggctcaagcctgtaatcccagttctttggggggttgaggtgggcagatcacttgaggctgggagttcaagaccagcctggccaccatagtgaaacccatctctgctgaaaatacaaatattagctgggtgtggtggcacatgcctgtaatcccagctactcaggaggctgaggcaggagaatcgcttgaacccagaaggtggaggttgcagtgagccgagatcgtgccattgcactccagcctgggcaacaggaataaaaaatgaaaaacaaaaacaaaaacaaaccatgctacaaagcttgatattttgtgttctgttttctttttactttcccatttccattatattgtgaacagttttgcttattattattacagacttttggccaatatcatttttaatgccgcttactaatatatgaagtgcatgtactataatttcctgaataaatcttttccattagttggacaattaggttgtttccagtttctctctactaaaattgatgtttcagtgaaaattgccatgagaatgcccaccgtcaccactcaccaagcacttattgtgctgcgtggcttccattccacatttatttcatcctcacaacaacccaatgaggcagacgttattgtggtttatttccttttctttttattaaattatgaaaataaaatgtgtctctgtaaaagcaattcaagcagaaccaaaggggcctaaggggaaagaccaagcccttcctcccctttccctccaatctcaccgctgcaattccccagagataacactcatacatttcttgtatacccttccagaaattttttgtccatatccaaacacattgggaaatggactctgtactggcatttcatggcatgtattttactctgaaacttcctattagtctgagtgacatatctcaaatgtcttttttttttttttttttttttttttgagacggagtctcgttctgtcttccaggctggagtgcagtggtgcaatcttggctcactgcaacctccgcctcctgggctcaagcggttctcatgcctcagcctcccaagtagctgggactacaggtgtgtaccacggcaccctgctaatttttgtatttttagtagagactggcttttgccatgttgaccaggctggtctcaaactcctgacctcatgatctgcctgcattggcctcccaaagtgctgggattacaggtatgagccaccgtgcctggcctcaaatgtctttctatgtcagaaaatttcaatcctatgagctggctataattattttcattttacacttgactaaatgaaggcttaggaggtgaaagactatgctgttgaattgcattgtgtgcccagaaaaagatatgttgatgtccttcttatcctccagtaccccagatgtgagcttaatttggaaatagagtcattgaggtaattagttaagatgaggctgtacaggagtaaggtgggccataatccaatacaactggtgtgcttataaaaaggggcgatgtggacacaaaatagacaggcataggaggaagatgtcataagagacacagaaagaaggccatgtgaagatggaagattggagtgatacatctgcagccatggagagattgctggaaaccaccagaaactgggaagaagcaaaggagtcccctgcaggtttcagagaaggcatggcctggccgacaccttgatttcagatttcttgcctccaaaactgaaacatactttattatttatttatttatttattttgtagagatagggtcttgctatgttgcccaggctggtcttgaattcctgggctcaagtgatcctcctgcctccaattcccaaagcactgggattacaggtgtgagccactgtgcctagctcttttttttttttttgaaatggggtctccctctgtcgcccaggctggagtgcagtggtgcaatctcagcccactgccacctctgcctcctgggctcaagcgattctcctgcctcagcctctcaagtagctgagattccaggtgccctccacgacgcctggctaatttttgtatttttagtagagatcaagtttctccacattggccaggctggttttgaactcccgatctcaagtgattggcctgctttggcctcccaaagtactgggattacaggcgtgaaccacagcgaccgactggctcagctcattttttaaaaaccacccagtttgtgtgactttgttaaggcagccctaagaaacccaaacacatgtcaaagtttcaaaactcgtaggtagcagagctggaatttgaactcaggtaggtgtgaccctaaggccaatgcatttaaacgaacaggatctatctattttcttttttgagcgaacccctgtatatagtgcttagcctgtgccaggctctaggctaagcattggcatgtatctctctgaaactggcatttcgccttctgggcagtgcagtaatttcctccttgaggttgtctggtggcttccaccagggggcagacctgggctttcgtgcacaggcaggaaaataacacacaaggcaggaggtggacttttcccttcccttcccttcccttcccttcccttcccttcccttcccttccctcccctcccctcccctcccctcccctcccctcccctcccctcccgtcttccctcccctcccctcccccccccttcccttcccttcccttctttccttctttcctttctctctttctctctttctatctttctttctttctttctgacggagtcttgctctgtcccccaggctagagtgcagtggcgctatcttggctcactgcaacctcggtctcctgggttaaagcgattctcctgcctcagcctcccaagcagctgggattacaggcgtctgccaccacacgtggctaatttttgtctttttagtagagacgggatttcaccatgttggccaggctggtctcgaactcctgacctcatgatccacccacctcggcctcccaaagtgttgggattacaggtgtgagccactgtgcctggccaggaggtggactttctggcagttccctctgtagagattgtctgtaggtttggtctaccaaagcaaagaccacattaaaaacaaaaaaacaaaaaacaaaaaacaaaaaaaaaaaaaaaaaaaaaagagagagagagaggatcgacccagacgattgagtgcaaataaacttccatgttttctgagggagagagagccaaacaccaggggtacaggcagtctgatttccagagagggactctgtcatggatgtgatgggagatgtgttatctgctttttctccaaacagatcctgaacccattctcactcagcaagcttctgatgaaaaaacaacgaacatttgtgtcataggcacaattctagagatggtcatccaataattaatcttgccgggtgcggtggttcaagcctgtaaccccagcactttgggaagccaaggcaggaggatctcttgagtccaagagtttgagaccagcctgggtaacatagaaagaccctgtctctaaaaaaaaaaaaaaaaaaaattaaaaaattagccagacatggtggtgcacgcctgtagtctcggctacttgggaggctgaattgggaggatcactcgagtcctgtagtttgaggctgcagtgagctatgatcatgccactgccctccagcctgggcaacaaagccagaccttgtctctaaaaaacaaataaaaaattaatctgcctttttgtgcaatggtctcagcagcagcagccgtatctataccacatgaccttatacccctagctgaagcagagcttagggttttgacatgagagatgtaaaagtggccccttaggaggaagtttgcacattcctgctgctgagtttctgcagctgccctggttgctggccctgctaagccctggttgttcagcccttccttggattctgttaatatacccagtatccatcccataatctttctttttacaatgccttttaagccagtcgtagttagtttctattacttgcaaaagcacaaaacaaaaaaaaccctgaatttatatgaataagaatagaaaaaataaatgattaagtatattatttaaagccatgcaggcaattaaaaagttataaataataaagtcattagaacaaccagcacccagaaaagaggtggaggttctcaataaatatttattcagtgaccgcaggaatttacccacaataatatcaaacaaaactgatgtagaaacaagggaaaaggggataataaggctgaactaaatttcgctcttttcaatggagacaatatggttttaagttgatcaatcaaaacacagaagcacaatcatattatttagaattatagtgtgaacgccagagttaaaacaagaaaacgttttctgaggagtgggagagtgtttttctgtctccttctaaacatctccttctaaactctcaaccctttaataatttggcagagggttctaagcttgtttggaaacccaggctgcgagggagtaggactgaaatccagaactcgcccgggtcaccggcacgaggcacatcctcccagaagggggtgctgctttctgatgtgcacagaggtgctcacaggccagactccacctcctgtttgccagtcccataggagacaatggtatctcattattgtttcaatgtgcatctccttaattgtgtgtgagatcgagtggtttctcccgtgtctataagccatgtgaattgcctcttcatgtcctttgcactaaatggaagctgtgtctcatctcgttcagaactttctttttcttatctgatcgttttattactcagctcctcagtttagctcatttttggcatactagctgggttttaaattctcctttcctcttccttcttctcctctacccctctcttcctcctctatccctctctccttctttacagatttgattttgtaaatacctcccagaatcctaacactcctgcttagttccttgcaacagtgtttggggaatcatacataccaatgacaggaatacatctcgtatcggttacaaaatataaaatgaccatcttccttttgttcagtgccatttacttctgcaaacatccctccattctttctagctcttccacaaaccctctgcattctcctatgggcttagatttttagggcaaaagccaagacatcttggagattattgtgcttttcagacctgccacaaaccccctcagagactaggactttcaaagttgactttctgcttgcttggctgggggaaagacagtggggagaggaaaagtgtataaaaatccataaattaaagtcaaaatgttattcaattacatttgggtaaacccagaaacaattctggaagcacttgaaggcaatatttatcagtgattagcccggggggattttatgtcttactttgtataattttctataaattaggattatgcatgagttttactttattttccccccttgggcatctctcatatatatatatatacacgtatatatatatatatacacgtatatatatatacacttgtatatatatacacatatatatacacgtatatatatatacacacgtatatatatacatatatatacgtgtgtatatatatatacgtgtgtatatatatatatataattttttttaagtgaggtcttgctctgttgcccaggctggagtgcagtggtgcaatcttggctcactgcaacctccgccccccaggttcaaacgattctcctgtctcagccttctgagtagctgagattacaggcatgtgccaccacgtctggctaatttttgtatttttagtagagacgggtttccccatgttggccagctggtctggagctcctaacctcaggtgatctgcctgcctcggcctcccaaagtgctgggattacaggcatgagccactgcacctggaaatatttttctttttaaaaatttttttctggccgggcacagtagctcatgcctgtaatcccagctactcaggaggctgaggcaggagaatcacttgaacctgggagaaaaaaaaggaaaggaaattttaaaaaaatgttttttaaaaattcctttcttttttttttttttgaaacagggtctcactctgtaacccaggctggagtgcagtggcacaatcttgacttgctgcatcctcaacctcccgggctcaagcaattttcccacttcaacctcctaagtagctggggtgacaggcttgcaccaccatgtctggccaattttataatttttggtagagatgaggtctcactatattgcctaggctggttttgaactcctggacttaaatgatcctcccgtctctgcctcccaaagtgctggaattacaggcatgaaccaccactcccggctctcctaatattttttatttgaatattttctagaaaaataacatcgtaaaattcagagtaacaaaatgtatacaatgaacacctaatttctctcttactttcacccaagaaacaattacaattaatgttctcttatgtaaattccttgtgatatgatctttgtagtgtctctatgtgtgtgtctctatctcaatctctaactctggatatcatcctccattctttttacacaagtgggtatgtcacctacagacttttatgtccccagtgctacaacttgtaaattgcttaatgtcagagcccataaaaatctacctcatttaaaaaaatggctgtgtagcattcttctgtggaagttctgtaatataacaaacactctcccattgagtgggaaacattgtttctcatcttttgctactattaataatgtcaaaagaaataactttgagcaaatatctttactcagattccagcttatgtctaggataaattctcaaaactagagttcctgggtcaaaggatttttttttcttcctcatttctaatttttgatagctatttcagaatctccttccaaagaagttgtaccagtttatgctcacaccaacaatgtgtgaagctggatttttttttttttttaagacagggtctcactctgtcacccaggctggagtgcagtggttcgatctcggcttccaggctcaagctattctcctgcctcatcctcctgagtagctgggattacaggcatgtgtcaccacacctggctaatttttgtattttttgttttagtagagacagggtttagttatgttggccaggctggtctcaaactcctggcctcaagtgatctgcctgctttggcctcccaaagttctgggattacagacatgagccaccacacctggccagaagctgaagctggttttttttttttttttttttttgagatggagtttcactcttgtcgcccaggctgtgaactcagctcaccgcaacctccgcctcccgggttcaagtgattctagtgcctcagcctccctagtagctgggactacagatgtgagccaccacatccaactaatttttgtatttttagtagggacggggttttaccatgttggccaggcttgtctcgaactcctgacctcaggtgatctgcccgcctcagcctcccaaagtgaagacatttatttatataaatgaagaaagtatacagataaattacacaaacacaaattagagaaactttgatctctctcttctacttactaaattagcaacaacaggtaatacccctgcccaagtggtgatgctataaaatgttacagctctttgggaatacaatagggcaaacataagccatacaattgttcatattattctatttaataatcccactcccatgaatttatcctaataaaattaaaaactacttaagtattcagtaatactgatgccctctgttgatgaatccattttcgcccccacttatttgaaataccacttttatcttatttaggggttcaatgacatggatactcacagaaagtcttgggtaactgaactctgagatcctgttcatttttattgctgacatttttgtctttcagatggtaaaggaagtatctagaggaactgttgccttgggccaaattctggccaaccaggtggaacaagctggtgaggggaagtgacaaggaccttagtagaaagtgactgtgtgggtctagacaccctgtctgcctcctaccactttggttaaccctccagctctttccagcttagctgggaacatcccttgtggtcagtatccttgacagcctagcactgtctctaataacagaaagtttgaccaatgagttccccaaatgtgccctcctttctcttgtctccacgtttttgcctctgcccttccctttgcctgcaatattttccctcacttttagcctagctaactcttcagccttcacatctgtttaaaggttacctgcaatgtgaaggagataacatgctaagctagacactccataataccttctattttcttcttcttctttttttttttttcttgagacagtctcactctgtcacccaggctgtagtgcagtggtatgatcttggctcactgcaacttctgcctcctaggttcaagtgattctcctgcctcagcctcccaagtagctgagactataggcacccaccaccacgcctggctaatttttgtatttttagtagagacaaaatctcctgttgcccaggctggtctcgaactcctgacctcaggtgatccacttgcctcagcctcccaaagtgctgagattacaggtgtgagccacagcgcctggcctgcttctattttcttaatggtctctatccaagatggatggggtgcaggcaagaaagccactcaaattccaggggcctgatgatctggaaagtgggctgaggtaaatcccaagtaaatactttccatttcctgtttgcctcaggactagaaccagctacataaaagcccaatacaaaatgaaaccgtgctgggcacagtggctcatgcttgtaatcccagcattttgggaggcccaggcgggaagatcacctgaggcaaggagttcgagaccagcctgggtagcacagtgaaacctccatctgtacaaaaaattaaaaaaatcagctggacattgtggcatgcacctgtagttccagctactcatggggctgaggtgggaggattgcttaagcttgtgaggttgaggctgctgtgagccaagattgcaccactgcactccatcctgggcaacagagcgagaccctttaaaaaaaaaagaaagaaaatgaaaagaaagaaagaaaaagccacgcttctttgaggtgtcatggaagtctagctgaagatttgtggaagtaggaaatatttagtgaacaaagtctccaatgagataagcatgagttccagagccagaggcaaggatagcacggaacaggatttggagttggagggatacttctttagacccttctgtgtgactatcaggactggatgaagatatttagaatcacaaagagctatcttcatatatgataaaaacgccaacagtggggagagcattagggaaaagagctaatgcatgctgggcttaatacctaggtgatgagttgacaggtgcagcaaaccaccatgacacacctttacctatgtaacaaaactgcatgtcctgcacctgcaccgtggaacttaaaaagaaaaaaaaaccagccaggtgcggtggctcacacctgtaatcccagcactttggggggccgaggccggtggatcacctgaggtcaggagttcaagaccagcctgaccaacattgcgaaacttcgtctctactaaaaatacaaaaatttgccgggcatggtggtgggcacctgtaatcccagctactcgggaggctgaggcaggagaatcgcttgaacctgggaggcggaggttgcagtgagctgagatcgcgccatcgtactccagcctgggtgacagagtgaccctgtctcaaaaaaaagaaaagaaaaaaaaaagaaaagaaacatcaaccgtaagtcataaaggatggatagcacacaaaagacatgcttctcaccccctcttaggtctgcttttttactctagccaacactgtggtgcctgggtgtgcacagccataaacggggagcatctccctttggttgcattgtgtatctttcattctctgtctccgggcttttctgctttctccagatggtaggactgtaggaatctgcatgaatgaaccacactgactcattcacacacctggaaaggcaagggagctaacagcccatgcagcaacccttgacagatgaaggaggcctccatggataaattgctcttctctggagcctcctgtttggagaggattcaccatcattcctctaaggacctcagcaggactgagccgcagctgcccatggtggcaaccagctcaataacgtatccgtggatccgtgatcactccttggtttcatgcttctccagcctctgctttcctggaatcactttccagattaaactggctgcctgcaagcccttatctcaagctctgctctttggaagaacctaggctaagacaacaggtgtgagaaattctaccaacgttttagtttttccatgaccgttttttattttttattttcaagacagggtctcactctgtggcccaggctggagtgtagtggtgcaatcatggctcactgcagcctagacctccttgggttcaagcgatcctcccacctcagcttcccgagtagttgggactgcaggtgcacactacaactgactaatttttttagtgtttttcttttttctgttttttgtttgtttgtttgtttgttttttgtttttgagacagggtttcactatgttgcccaggctggactcaaactgaagagatcctcttgttttggcctccgaaagtgctggcattacaggcatgagccactgcgcccagcctccttgactatctcaacgttccggagtcactgctgttgctgctactgctgctgcctgaactggttcaagagggcaggaaaaaagataggctcaggaaagtttccaaacagggtggggagaattcaggatgaggctgaggccattggggcctagtaagagacttgcagaaaggatggaaagaactgggtggacaggatcagccatgcatgtggcagagttaggacacattattaggagtatagcattgaaaacaaaggaggcaaaagttctccattcttcatggatctgatcataggctggaacactgtgcgtcggttctggacactatactttaataaagacaacgaaaaactgaagcaaattaactcaaaagtcaacaaaggtttttcaggacttgttaccatgttatacaaagaaataaggagatttacttgcagaactgctaggagaaagggagggataggggagctatttttcaacgtgtgaagggttgtcatgtggaagagggaataggtttattctgcaggtgagaaataatcagtggaagttagaaggagctggatttatctcagcttaaggagaaactctgaaacctgggggccgccttctaactcccaaagggtccaaatgcctggggctactatgcatggtatggtatacaacccaagaagaaccaaaggcaatggaatcaaagtttcttagcttgtctctttcctgtcgcctccattcattccatcaaattactgagcatctcaaatttgcatgaaggtcttccttacaaagaattaaaaacctttgggtaactttcatcttttgtccctaggctcttctctcaaaaggaaatacaagtctccagtgttgcttcgttttgccagagtccttcttgaaatgtggttcatggaactgagtgtgtctgtgatagccacgtccacacaccttggcagcaagagtcatttgtattagttcatcacctaggatacttttttgtaaacaacagaaacagaccctggctaatcctatgggaaaaaaaataaatttattagattgcaaaataggtacaggtaaaactaaaggttaatagttgatgctggaacatggaaggttctaagggtctgggtatcaggaacaaaggaacctatattgtgcatatctccctctctccctctgtatctgtctgtcttgtctatctgtctatgaaccctgtgctcacaaccacaatgttgtagaaagaatctttcttttcttctttctttctttttctttctttctttttctttctttctctctctctctttctttctttctttctctttctttctttctctctctctctctctttccttctttctttcttctttcttttttttactttttgacacagtctcactccactgcccaggctggagtgcaatggcacgatcttggctcactgcaacctctgcctcccgggttcaagcgattctcctgcctcagcctcccaagtagatgggattacacgcacctgccaccacactggctaatttttgtatttttagtagagacagcgttttgccaagttggccaggctggtctcaaactcctgacctcaggtgatcctcccgcatcggcctcccaaagtcctgggattacaggcatgagccactgtgctcggctgtagaatctttttcacaggaagtcaactttacaaccttaccttagttgaaacctagctccccatggagtttatttcttctctccctttccattaccatcctgagaaattttagtgttcttgcagatgactttcccagcatgctgggtggttgttctgcaatcttctcaacgagtgaccttctcctctgtttcctcatggccacaccctggacttggacatcagctagagctgctctacttgaaaaatgtcagaaatggatacttctatctggtcatagcttcctatctcttcacctcttctacaccttcattcccagttaacctatttttcaacctcatcaaagccactggttccagccaggcttagtggctcatgcctgtaatcccagcactttgggaagccaagaagggcagatcacttgaggtcaggagtttgagaccagccttgccaacatggcgaaaccttgtctctactaaaaatacaaaaattagctgggcgcagtggctcacatccataatcccagatctttgggaggccaagacgggcagatcacttgaggtcaggagtttgagaccagtctggccaacatggtaaaaccctgtctctactaaaaatataaaaattagccttgtatggtggcaggcacctgtaatcccagctacttgggagtctgagataggagaattgcttaaacctgggaggtgagggttgcagtgagctgagatcgccccactgcactccaacctgggcaagagtgagactctgtgtcaaaaaaaaaaaaaaaaaaatagccactggttcctcaactcctcttggcttcaccttcttccccagctgggagtctgtggttagtgaaatgaacatccctgtgaccaataattccagttcctccacacctttgcctttctaaccattcattttctcagttcctatttccaggctttttggcatgactggagaaaaatcacagtatcaaactctttggcttcatgaaaaattcttagtttatatccttagcttgatctttacactatcaacaatccttttatgaattcttagatgttctccttctcatacaagcctttaccacattcctgaaggtctctactccattgtattatttgattcccgagatgactttacttacagagcaaatataagccaacaatttaaaacaacctcaactttcctttcctccattttgaaatcagtctgtattttcctagaccttaccataatcatggcattttcagtaggacaaggatactgtctaattttcttttctttttttccttttctttcttttcttttctctcttctcttctcttcttttcgtttttttttttttttttttgagacagagtctcactctatcacccagcctggagtgcagtggtggcatcttggctcactgcaatctctgccccctgggctcaagcgattctctcgcctcagcctccagagtagttgggattataggcatgcgccaccacgcccagataattttcatatttttagtagagacggggtttcaccacgttggccaagatggtcttgaactcctgacctcaagtgattcatcctcctctgcctcccaaagtgctggcattacaggcgtgagccactgcacccggccggatgctgtctgattttcaaggatgtgttcacctctttcttcaccatgtctcctatcttctccccaggaaccttgcttcagcaattaattctctatccacgtactgtttcttcttttcctgctatgcctggtttctccctcatcttatatctatttcatgtctccatcatctaaaaatttaaaatccagcaattccagcccctttacttaatcctatgttcgcctcaaatcatgatcatattgctccccgcataatcatccaaacctctggaaaaaatgcatatagtatacattttaaaaatgtatctcctttgagataattgtagattcacatgccattgtaaaaaatattacagaacacatacataatgcagtactatggagccataaaaaagaatgagatcctgccatttgtgacaacgtggatggaactggaagtcattatgtttatgaaataagccaggcacagaaagacaaacttcatgtgttctaatttaacttgtttgtgggaactaaaagttaaaacatttgaactcgtggagatcaagagtagaaggatgggtaccagaggctgggaagagtagtgggggtggggggatgggtaccagaggctgggaagggtagtgggggtggggggatgggtaccagaggctgggaagggtagtgggggcgcggggagaaagtgggaatgattaatgggtacaaaaaatagaatgaataatatctagtatttgatagcacaacagggcatctatagtccatggtaatctaactgtacaatttaaaataattaaaatagtataattggattgtttgtaacacaaaggataaatgcttgaggggatggataccccagttaccctgatgtaattactatacattgtatacctgtatcaaaataccccataaatacatacatctactatgtacccacaaaaattagaaattaaaaataaaaaaaaaataatatagagagatcccatataccctccacccagttttctccaacagaaacaccctgtgtcacagtagggcgatactccaaccagggaattcacattgatataatcaattgatcttagtccgatctcaccagcgtttcagccattcatttggtgtgcgtgtgtgtgtgtgtatttagtttcttgagattttatcacatgtgtagactcctgtgaccaccagcagtgaagacaagaacaattccatcactgcagagatcctcgtgctatttattcttttatagccacacggccatctcccttcctctatctccttgtccctggcaacccctcatacattttccatttctatagttttgtcattttaagaaagttatataaatgcagccatgcagcatgaaacctttgggattggtgttttccactcagaataattctcttatgatctatccaagttgctgtgcatatcaatagtttgttaccttttatttctgagtgtatttctattctatggtatgggtatactgtagtttgttgaacgattcatccttagaaagacatttgggttgtttccaaatgtctttccagttttttttttcaattacaaataaagtggctatgaaaatttctgtatggatttttgtgtgaacataaattttcatttgtctaggatatacctccaacagtgcagttgctgggcaattgcatgtatttagtttgattgattgattgattatggcaaaaaacatataccataaatttaccctcccaacgacttttaagtgtagagttcaggagtgttaaatatactcacattgttgtgaaacaaatgtccagaatgttttcatcttgcaaatctgaaactctttacccattaaacaaccacgcctcttttcttccttccctcagcccctgaaaatcactattctattttctgtctctatgaatttgactcctcagggtttctcatgccagtggaatcatacagtatttttcttttttgtgactggcttatttcatctagcacagtatcctcaagattcatctatgtttaacatgggtcagaatttccttcctttttaagtctggataatattccgttgtatgtatataccatattttgcttatccatttcgccagtaatgggcatttgggttccttctacatgctggctgttgtgaataatgctactatgaacacggtgtacaaatatcgctttgagatccagatccaattattttggataattgaagtggttttgctggatcgcgtggtagttctgtttttaactttttgaggaacctccacattattttccatgctatgttggaataattttacaatggtacaacaaaaatgttgcatcattttacaattccaccaacagtgctgaagggttccaatttctccacatcctcaccaacatttgttattttccctcttcctcttcctcaccaacatttgttattttccctcttcctcttcctctcctgctcctccttcttgtagccagcctaatgggtataaagtgatatctcactgtggttttgatttgcatttgtttgatgattagtgatgttgactaccttttcatatgctcattgtgttttgaatatcatctttggagaaatagctattcaagagctttgccttgaatattttaaaattgggttatttgattttttattcttgaattgtaggtgttctttatgtattctggatatctaccccttgtcagatagatgattagcaaatattttctccaattctgtaggttgcctttccaatctatcgattatgtcctttgatacacaaaagtttttaactttgatgtagttccaaccacatttagtttgtaagaaattgccatgctgttttcgagagtggctgtgccattctacagtcccaccggcaatggatgtatgatcctgcttttccaatttcttaccagaatttggtgttatcactttttttaaaattttagtcatcctcataggtgtgtggtgctttctcactatggctttaatttgtattactctaatggttaatcatgttgaacatattttttttttagatagggtctttctctgttgcccaggctggatcacagttgcgttatcatggctcactgcagcctccacctcctgggctcaagcaattctcccacctcagccccactagttcctgggactacagggatgtaccatcatgcctggctaatttctttattgatttttagtagagaagaggtctcactatgttgctcaggctcgtctttaacttctgggctcaagcaatcctcttgccctagcttcccaaagtgctgggattacaggcatgagccaccatgccaggctgaacatattttcatgtttttatttgtcatttatatatcctctctcatgaaatgtctgctgatgttttttttttttctcactttccaattgggttgttagttttaatactgctgagttgtgagggttctttatgcgtggtagatactagtcttctgtgagttacgtggtttgtgaatactttctcctagtatgtagtttgtttttgcatctcttaacaaggtctttcaaagaaaaaatttttaaaaatttcatgaggtccaatttatcaatttttccttgcttttggtgtcaagtctaaggaatctattatatattttttaaccctttacttagcatttcctttttgagacaaacattgctccgcttatttcataaaaatcctgttcaatccctgtggcttgaaggctaacaagggcacagcaaatcagaatactccatctcccaggctggagtgatagggtcaggcgtagtcatgtctcccaagctggaccatgcagaattgtcctccctgagacttttgctacagtcactggggaggctgtgctccacttctccatgtggagagagacttttttttcttttttttgagacagagtatcattttgtcgtccaggctggagtgcagtgatgtgatcttggctcactgcaacctctgtctcccaggctcaaatgtttctcctgcctcagtctcccaagtagtttctgagattataggtacatgccaccatgcctggctaatttttgtatttttattagagacggggtttcaccaggttagccaggctggtcttgaactccagacctcaagtgatccacccacctcggcctcccaaagtgctgggattacaggtgtgagccaccatgcccaggatctatgtggagggagactttctgagaagaaggcaagtagaaccaagaaatggagagaaagacagtgtttccattatgtacagtgggttctccatatccaaggattctgcatccttggattcaaccaattgcagcccaaaaatattaaaaaacagggctgagaatggtggctcacacttgtaatctcagcatgttgggaagctgaggtggaaggatcatgagactaggagctcgaggccagcctgggcaacatagagagacctcatctctacaaaagaaaaacaaaaaatttagccgggcatggtagtgtgtgcttgtagtctcagctactcaggagactgatgtgagaggatcacttaagcctaggagtttgagcggtgagctatgattgcacctctgcactccagcctgggtgatggagtgagaccctgtctcaaaaaacaaacaaacaaaaaaccaatacagtataacagttatttacatagctgttacattatattagatatataagtaatctagagaggcttcaaagtatataaaattatattcattggttatatgcaaatcttacatcattttatataacagttttgagcatcgtcagattctggtatctgagagggtcccggaacaaattccccacagataatatggagtgactctagtttgaacctctgaatccaagtacgtctgatgctagatactctttgagtttcagttataagagctgttaaatctacaccctcaaactaagcggtttaaggtgggattatgaggcacataatcgaaagagtccaagataatgtgacatcttatatttattattcatcctttcttttctgtagtttactcttcgattcctcatagtctgcttttcatgtcacagcactgaaactgtccttgctatgttgactggtgacaagaattttatggtctcttttgagccctttttatacttaccctatttgttatatttggcattaaataaaatcttttttctaatatctctctctctctctctctctctctttctctctctctcttctgtttcttgggattgtaacgtggggtattttctactacacagcagaggccatgatgggcatcatcacttaaattatatcatctacccctccatctgtttcacatgtgttatgccatctttctatgtatgtgtgtatttggaattttggacctcaaaactggactttccttctcatcttctggactctatgtaatttaaggatgtataaatttgcatctgatttttgggtaaccatccctcaaatttggctcatattatgcaggcagtcagcctggactccttcacagaaacttaaaaaatatccagccaggctgagcgcggtagctcatgcctataatcccagcactttgggaggctgaggcaggtggattacttgagctcaggagttcgagaccaacctgggcaacacggtgaaaccccttctctacaaaaaacacaagaattagcagggcatggtggtgtgcacccgaagtcccagctactcaagaggctgaggtgggaggatggcttaagcccaggaagtggaggttgcagtgagccaagatcatgccactgcactccagcctgggtgacagcaagactgtctacaacaacaacaacaacaaatattcagccaatttgggatgtctggcagtgggtgaaccacctcttatcgtctgggaactgacctccccttgtaacacctcaactgatatacaaaaataatatacatcggttaatatcagttcaactgtcttaaacagaaaggaaaattaatcagctcacataacaaaaacttccaaggtagcacctcttcagggttagtaaattcagtggttcaatgtcatcatagagaatccttcccatcttctgccatcctcaggctagtacccctcatagtcccaagatagcagagttctaggggtcgccaagatagactgcaaaaattgctgcactacattttatcccctcccataaagaaatatggtctatttctccacccaaccaggcttagccacgtggcttgctttggtcaatgggacaacagcaaatgtgatgcttgaagatatttgaaaagtgcttgggcagggcgcggtggctcacacctttaatcccagcactttgggaggctgaggcgggtggatcacttgaggtcagtagattgagaccagcttggccaacatggtgaaaccccttctctactaaaaatacaaaaattagctgggcatgatggcacatgcctttaatcccagctacttgggaggctgaggcaggagaatcacttgaacctgggagtggaggttgcagtgagccgagattgttgcagtgagccgagattgtaccactgcactccagcctgaaggacagagtgagactttgtctaaaaaaaaaaaaaaaaaaaggcctgacgcgggggctcacacctgtaatctttgagaggccgaggcaggcaggcagatcaggctggccaacatggtgaaaccttgttctactaaaaacacaaaaaattagccaggcgtggtggtgggcacctgtcttcccagctactcgggaggctgaggcaggagaatcacttgaacccaggaggcggaggttgcagtgagctgagaattgcactccagcctgggcaacaagagagaaattctgtctcaaaaaaaaaataaataaataaaaagaaaagaaaagtgcttccccggacccctgcccaaccctcttactgtactttgagagcctgacatatcatgttaggaagcctggactaggttcctgatgtagtcaagatgagccatcctcagctgtcccttgtagatcaaacagcttgtgaactgctagacatgtgaatgaaggcatcctagaccatgcagtcctagctgagctagctcagatcagaaccagctggctaacctacaaaatcatgagaaataataggtgattctgtattgtcgctgaatttgtatgtgtgtgttttttcttttcgagacagggtgttgctctgtcacccaggctggagtgcagtggcacaatcatagcttactgcagccttgacctcttgtgctcaagcaaccctcctgccccagcctcccaattaactggactacaggcatccgccgctgtgcctggctaatttttatttttatttttgtagagacagagtctcgctatgtggctcaggctggttttgaactcctggccttaaatgatcctcccactcttcctcccaaagtgctgagattacaggtgtgagctactgcaactggcctagggttttttttttgttgttgttgttgttttgagacggagtctcactctatcacccaggttgcagtgcagtggcacggtctcggctcactgcaacctccgcgattctcctgggttcaggcgattctcttgcctcagcttcctgagtagctgggattacaggtgaggtgcgtgccaccacgcccggctaatttttgtatttttagtagagacaggatttcgccatgttggccaggctggtctcgaacttctgacctcaggtgatccgcctgccttggcttcccaaagtgctgggattacaggcgtgagacatcgcaccccactgtagggtggtttttaatgtagcgaaagctaattgatagaatcacacacagacacaacaacatacagtaacaggagagtggccgtcttgacattgtatctatttttagctgtgaggaatgtttccttatgtatcattagctagaactgaatcacaggtctatttctaaacccattactagcaaagggcacggaattaccatgattagcttggaaaagcactggggccatacagagaagagtagactatccttcacatggggctttgcaaaaacataggagccctctatctttttgggagaatcacactgggagaagggatggtcagtgaagggacccttggtttcctattggcattgcattatcggggggaagcaattgtattttctgattcttatcgttctcccacctcccactatggcaaattggactagggatgcactgtggaagaaagattaatcaattagagtctctctctgggaatttggaattgagactatgtgagagcatgtgcgggggatggagattgtgtcaggtacactggggggatgtggggaggcacacacactcctacactcaggaaggaggtatttcccaatttggaaagagaaaagtagatgagaggagaggagagagagatcaatccaattcacattttttgttttctagatctgggggcctcgctggattgctgctcttggcggcatgagacacctcttaattcttgtagtaatttccccttcatttgcttgagttagccctaaagagcttctgtcactcacaataaaagtgtttttaatgtgccattcttatgaagagatgctcaacctcattcataataagataaatgaaaattaaaattccaccaagagactatttatcacttatcagcttggccaaaatagaaaagcatgacaatgttgtgcgtaccgctgtgggggaaactggcattgtcatcatgagtaggatgagtacagaaggccatagcctctgtggagggcaagctggggacatctatcagccttgaaaatgcacttaccctttgacctagcaatccctagttctgggaatttattcgacagttgcactgctgtggggaggagatgatgtatgtccaaggtcatttgttgtagcatcatttgcaatagcaaaagtttggagatgacccaagtttttactgatgagggactggttaaactaacagttatacagaatatgatacagctgtaatgattgatgaagttctctatgttctgatacagaaagaactccagaaaagttgtgagttttttgtttttcttttgtttattttatttgatttgtagagacagggtctcactctgttgcccaggttggagtgcagtggtgcaatcataactcactgcagcctcaaactcccgggctcaagtgattctcccacctcagcctcctgaatagccaggactataggcgtatgccaccacacccagctaattttaactttttttttttttttaatagtgacagggtctcactatgttgctaaggctggtcttgaactcctgagcttaagcaatcctcccacctcagcctcccgaagtgttgggattacaggtgtgagccactgcacccaacccagaaagattgttacgtgaaaaaataaagtgcagaatattttacatagtgagatacttttttttctgtaagaaaagaggaaaggaagaatatatcagaatatatgcagcattgatttttaaaaatatttaaataagtaaatttaataaaggaagtatggaaagaagaataagaaacgataaactaataaatatgattacctctagggggtgaagagaaaggctaggacgggagatgctcctctccatgaaaacctttttatattattttagctcttaaaaaatgaacacattaactgttctaaaaatgaatgcaagtaaaacgtcatattttaaagtgaattcaaatattaagtaattctattctatccaattgtctaaagaattgagggcaggccaggcatggtggctcatgtctgcagtcctggcactttgggagcccaaggtgggagaatggcttgagcccaagagtttgtgaccagcttgggcaacaaaatgagaacctgtctctacaaaaaatagaaaaaatgggctgggtgcagtggctcaagcctgtaatcccagcactttgtgaggctgaggtggacggatcatgaggtcaggagatggagaccatcctggctaacacggtgaaaccctatctctactaaaaatatgaaaaattagccgaacttggtggcatgcgcctgtagtcccagctactcgggtggctgaggcaggagaatcgcttgaacctgggaggcagaggttgcagtgagctgcactccagcctgggcaacagagtgagatttggtctcaaaaaaaaaaaaaaaaacaaaaacaaaaaaacaaaaaagaaaagaaaaaatgagccagggtgtagtggtgtgtgcctgtagtcccatctattcagcaggctgaggtgcgaagatcacttgaccccaggaggtcgaagctgcagtgactcataatcacactttagcctgggtgacagagtgagaccctatctaaaagaaaagaaaagaaaagaaaagaaaagaaaagaaaagaaaagaaaagaaaagaaaagaaaagaaaagacaaaaagaattcagggccagggcagtggaagaaaacatactatgtttataccttgacatttgtttaaaaaaaacacccaaacctggaatgtaccaatgaaaatacaaaagcagagaaagtgtgtggtaagtatccctttaactgagtagtttgtgctttctacatttggcgctgtggttgcttgttgaaacctcccctctccaggtcacactacatccggaagcagtattatggatgggcattctgcttggccagttgaagattaagctgaccagccaagcatagaaaagaattccaggacagagagagatgttgtattaaacatttcttttcaacctgaagggatcaggtggcctcttagagaaatgacagaacctattttctccttctcatctgttctcgccgttggcaatctcttgttgtaggagggagtaagtaaagattgcctgggggtggaggggtaatagagctggcatcttttcacagatgtgggcgggagggttctgttagcctgggagccccatctcattggatactcaggagcatagattcgggagtcagagtggggtggatggagcacagctgtcctacgctagtaactgagtgaccttgggcacacacttgactcctctgtgcctcagtttcttcatctttaaaaggggaaagtgatatcacctacctatatgattaccatgaggattaaatgagttgatacattgaaaaatgttagtagaatgctcagcacatatgaagtcctcaataaatgttagcactgaaagaaataatgataattttattattatatgacttcagactaaataagagagttgacaagtatgtaaatggttgccactccacatctctcgccaaccaatttactgcatccttgtgaagaaggttagaggagagatgtgtggacactgattcacactgatctaagagaataaatatagttccagtagctattatgtgtgaggcactgtgtttggcccagggaaggataaattggtaagcaaaataggactatctctgccttcacagaggtcctaagctacccagggagatgaatgtgatggactgagtatttgtgtttcccccaaattcatgtgttgaagccctaaggcctgtgtgatggtatttggaggtgaggtccttgagagataatcaggtttaggggaggtcgtggtcctcctgatgggattaacgtcattctaagaagaggaagaggccagaactctctttttccatcttgtgaagataaactgagaaggttgctgcctgcaagaggggaagggagccctcatcagactccggatcaggtggcaccttgaacttggacttcccagcctccagaactgtgagaaataaatgtctgttgttcaagctacctaatctgtgatattttgttctggcggcctgagttgatgaagaccatggccaagtaaacagacaacacaatgctgtgtaagtgcaggccagttcaggatgccagaggatcacagggaaggaacatctaatttaaaccctaggaatcaggaaaaacttcttacaggcaaggacaggaacagcagacccccactccacttggtaataaaacaactatctctttcctacagcaaaaatagtagtaatagtaatagtagtagctgtagtagtagcagtagtagtagtatggtaacgataatgctaataattaaaacacattgagggcttgttctaagcatgttacatgcattagctcatttaatcttaacgtcttagtggagctactctgcacttacatgacttggccttaccctaattctgcccaccataacctatatttattttaaaagttgatatttccctcatcagggattttttgcattagttttgatgtttttaaatattgcattaaatgttgtttatcttgcttactgatttttttttttcctttttgagatggagtctgtcgcccaggctggagtgcagtggcatgatctcagctcactgcaacctccacgtcgtgggttcaagtgattctcttgcctcagcctcccaagtagctgggatgacaggcatatgccaccacacctggctaatttttgtatttttagtagagacaggctttcgccatgttggccaggctggtctcaaactgctgacctcaagttatccacccatgttggcctcccaaagtgctgggattataggcatgagccaccacgcctggccttacttactgattttttggcatccctttaattttgcactcagggcaagcatctttctctccttactctagtcctggccctgctgaggaacaccatgtggggaagggtaagcagagctgtctagcctgcccaattcaggctgtctatgcagaaggcatttgcggttcctcctttccagacagcatcatgggaggaaagagaaagagaacgcattccctatttggactcagtcaccccttagcatcctccttcccaaatagggtccctgcaatggcttttagtattactttaacgtggcatcaagtcccactgaatctcacaatgagagtccttccttatttaacttgctttcaattattctaaaaccatcaaggagaaagtgccagatcggtgctaataggtttttaacacctctctaatacttaatgagcaggcctctgactttcctcccctgcctccttgaatgaagagggttatggagctggaattttagaatcacaagtctgtccttgaatctgagccccattactgtactattactgctgggaggaccagacgactgtgatgggaatgatgcttcagtctggatgtctgacctctttgtttgtgccctcgtaccttcatttttttcagtttccctttctagaatttagtaaaccaaacaagaactttccctgacctgaatactgggttcaattgtgctgtgttcattattacgcagcattttacccacgattacttcctgttcaagttcctgtttgttgctgtactctgagaccccacctaggtactggaggctcttcaagggaagaggaagacaaaacctcctttctgaaggggaacttagctcagggagtggggtagatacaggaccacgtggcatcacagatccaactgttcagagtcagtctaaaggacttaaattttagtaattctacttctgggtgtattcctaagagaaataggcacgtatgtccacaaaaagacatgtacaaggatgcttatggtagggttttccaaagtagtcctaaactggaaataacccaagtaactatcaacatttaatggataagtacactgtgatatattcatgaacagcaatacaaaagaacgaacacagatacacacaaaagcatggatgaatcttactgacattatgtcaagtgaaagaatccagaaaccgtatgattttattcatatgaaactcaagaacagggaaaactaatctaccatctcaaccttaaaaaggaaggaaatgctgacacacaatggtacatgaatgaaccttgaagacgttatgctaagtgaaattacagaaagacaaacactgtatgagtctacttttacgaggtacctggagtagtcaaattcatagagacagaaagtaaaatggtgattgccaggagcttggggcagaggaaatggatagttgtttaatgggtatagagtttcagttttgcaagatgaaaagagttctgcagattggttgcacagcaatatgaatgtacataacaccactgaactacaaacttaaaaaggctaagatggtaaatgttatgttatatatttataccacaatttaaaagattctaacaacaacagcaacaaaacctaatctatgatgatgaaagtcagacagtggctcccttttgaggtaatatttcctgggaaaaggtacagaagagtttctggggaactagaacttttctgtatgttgacctggtggaagtcatgtgggtatatacatatataaaaaacatagtctgttgcatgtacagcttattgcatagatgttatactataacaaaaaagtattttaaagaaggtagccatctgctgggcacagtggctcatgcctgtaatcccagcactttgggaagccgaggcgggcagatcacgaggtcaggagtttgagactagcctggccaacatggtgaaaccccgtctctactaaaaatacaaaaaattagctgggcatggttgtgagcacctgtaattccagctgctcaggaggctgagacaagagactgcttgaaccctggaggtggaggttgcagtgagctgagatcgcactactgcactccagcctgggtgagtggctccatctcgagccactggagtgcagtggctcaaacttggctcactgtaacctccgcctcccaggttcaaatgattcttctgcctcagcctcccgagtagctaggattacaggcacatgccagcatacctatctaatttttgtatttttagtagagatggggttataccatgttggccaggctggtcacgaattcctgacctcaagtgatctgcctgccttggcctcccaagtgctgggattacaggtgtgagccaccgtgcccggcccatcttagctatttttaagtgtagtccagtgatgttaagtgcattcatgttgttgtgccaccatcaccaccatccatctccggaactcttttcgtcttgcaaagccaaagctatacccattaaacaataatgctccatttcttcctgctcccagcccccagcaaccaccattctactttctgtccctatgattttgactactctaggtacctcatatgtattagtccattttctgttgcttataacagaatacctgaacctgggtaatataaagaaaaggaatttatttcttacagttatgaaggctgagaagtctaaggttgaggggccacatctggtgagagccttcttgttggtgaggactctctgaagattgcagaggtagctcagggtattatatggtgagggggctgaccatactaatgtacttgttcagatctctcttcctcttcacataaagccaccagttcccctcccattataagacattaatttattaacccattaattcactcatgagggcagaccacatcatgatccaaccatcacttaagggccccacctattaatactaccacactggggattaactttccaacacatgaaatctgggggggtgggggaggcacattaaaacaatatcgtataagtgcaatcatacagtatttgtctttttatgacttgcttctttcacttagcatcatgttctcaaggttcatacatgttgtagcatgtgtcagaattttcttctttttgaggctgaataatatttcattgtatgtatatgctacattttgcttatcttttcatgttttagctactgtgactaatgctgctgtcaacatgggtacaaatatttctttcagaccctgctttcacattttttaatttcaacctatttgtgtctttggatctaaagtaggatctctttattatttatttctttatttatttttgagatggagtcttgctgtgtcacccaggctgaagtgcagtggcttgatctcggctcattgcaaagtccacctaccagggtcaagtgattctcctgcctcagcctctgtagtagctgggattataggtgcccaccaccacgcctggctatttttttttgtgtttttagtagaatgaggtttcactacgttagccagcctggtcttgaactcctgatctcaggtgatctgcctgccctggcctcccaaagtgctgagattacaggtgtgagcaaccatgcctggcctaaggtgagttctcttgttgtagacagcatatagttaggtcgcatttttgaaaatctattctgccaatctctgtcttttgatttgagagtttaatccatttacatttaaagtaattactgagaatgagagacttacttttctcattttgatatttgttttttatataacttatagcttttcttgttcttcttttcctgcattgctatcttattttgtggttagctgatttttttttttttttttgcagtgaaatgttttaattcccttctcattcccttgtgtgtatattctataattattttctatgttgttaccatggggattacattaaaatcctaaagtcagaatattctaatttgaattcataccaacttaactttaataacatacaaaatctctgcttctaatacctctgtccccatccctttcagttattaatgtcataaaattacatcttcatacattgtgcacccaaaaacataaagtagtaattttaaataatgcattagtctcttaaatcacggagaaaacagtaagtggattttatgatgatattagcttttataattgcccatgtatttacttttactgaaatatttatttctttacattgcttcaagacactgtccagtgcactttgatttcaacctgctggacttcctttagtttagtatttcttgcatggcagctctagtggtgacaaactcagcttttgcttatgtggggatgtcttaatttctctcacttttgaaggacggttttgacagttagagaattttgggttgattattttttcttttagcattttgaatgcatcagcccactaccttctaactgctgaagttctgataagaatctgcagataatcttattgaggatcccttgtatatgatgagtcacttctctcttacactttaaagattctctttttgtctttggcttcagacagtctgattataatgtcttggtgtgggtctttttgagttattcctacttgaagtttgctgagcttcttggatgtttatattcatgtcttttatcaaacttggggagtttctggccattatttcttcaaataagctctcaaataattctcctttctctttctctttttctgaaattcccatggtacgctgttggtttgcttgattgtgtcccacaagtgtttcaggctttgttcacttttttcaatcatttttcttttcgttcttcagactcaataatttcaattgtcctatatttaaatttgtgcattcttttttctgcttgcttaaatctgcctttgaaaccatttagtgatttttaaatttcatttattgtattttcacctctagaatttctttttggtttctttttgggttttctatttttttattgacatttctgttatgtttatgcatttttttaactttctccatgtcttcctttagttctttgagcatcttcaatatagttgctttaaagccattgtctagtaggctcaccttctgatcattctctgggacagtttctgttggtttattttttccctttgaaggggccatactcccctctctcccttcctctctccctgccttcctgccttccttcccctctatctctttccttctttctccccctgtctctcttcctgtctttcttttttgagataaggtctcactctgtcacccaaactggagtgtggtggcacaatcatggctcactgcaacccccaactctcaggttcaaatgatcctcctgcctcagcctcctgagtagctgggactacaggtgtggactacctgtctggctaattaaaaaaaagtttttgtggagatggggtctcactatattgcctcaactggtctcaaactcctagactcaagtagtcttcccaccttggcttcccaaagtggaggcataagcctccaccacacctagccttttcttgtttcttactataggtttttagttacaattagtagcagttctaagtgatcttgagagttgccacatttcaaatgctcagcagccacatgtgggtactgtgacaactgtgttgaagagtgcagccttagaacaaagggattgaggccgagcgcggtggctcatgcctgtaatcccagcactttgggaggctgaggcgggtggatcacctgaggtcagaaatttcagaccagcctggccaacatggtgaaaccctgtctctactaaaaatacaaaaattagctgtgcacggtggtgcacgcctgtaatcccagctacttgggaggccgaggcaggagaatgggttgaacctgggaggcggaagttgcagtgagccgaggtcgcatcactccactccagcctgggtgacagagcaagactctgtctcaaaaaaaaccaaaaccaaaacaaaacaaaacaaaaaacaaaagaataaaggggttgagaggcaaactactgtatccttgtcctaccttagagaagaggaaaatgagacacaggaggaagtaagtgacttgcccagggttatgcactgtagtcatttaaatggtagcccccaagaaggtacatccatgttataattcctggaacttgtgaatgtcattttatttggcgaaggggtctttgcaggcataactatattaaggattttgagatgaagagatcatctcggattatccagtgaagccctaaatccaaggaccagtgttcatataaaagatatacaaggtatagggccagtgcagtggctcacgcctgtaatcctagcactttgggaggctgaaggcaggcagatcacctgaggtcaggagtttgagaccagcctggccaacatggtgaaaccctgtctctactaaaagtacaaagattagccgggcatggtggcgggtgcctgtaatcccagctacttgggaggctgaggcaggaaaatcacttgaacccgggaggcagagactgcagtgagccgagaccatgccatttcactccagcctgggcaacaagagcaaaactccatcttggaaaaaaaaaaaaaagaaaagaaaaaagagatatacaggggatattagagaaacagaaggggtgaagataggcacacagaggagagggtgatataaagacagaggaggatgggagcgatgtgaccacaagccagggaagccagggaatgctgacagcctccagaagccacaaaaggcaaggaagcgttcccctctgaaacctccagagggaatgtggccctgctgacactgtgacttatggtttctggcctccagaatgatgagagaataaatttttgttatttctagccaccctgttctgttataattttttatggcagccacaggtctggagcaaagggaccttggactccattctcagccacagcaacctgccccctcactgcctctgaaatctttcaagtgaccagcattcactccttcatgagcagagtgggcctggggggctctggtggcaaggaggacccatgcccaatctacggggagctgctgccctgcagctcctgttggcactatgccatgttgccctaatctcttgcctgatctgctcagttgacctcttcactgctcttcctgcctccaccctttctcctctaatttccacatagtagctagggtaagcttttaaaatgaaaaccccataagttgtatcaggccactcctcagcttccaaccctccaatggcttccattcactggagtgaaatccaaactccttatcacatttgcaaagccctttggggccctgctacctccctgacctcatctcataagtcctctctcctctctgttcatccaaccactgaggccttctcgctatttctccaacataccaagcttgatactcccctaggctctttgcattttctgttttctctgtctggaaactctcgatagtcccctggctcaccctctcactttattcaggccttactcagatgtccccatattataaaggatttccctgtggtctttataataatgctttatttttatttacaaacattctattatacaccaccaggtatggattcgttagttggttaggttattactcccccttccccattagactataagctccactagggcagggacctttgtctggtttgtttaacagtatctggaacagcacacagtaggtgcttaataagcaatttgttgattgaaagaacaaatgtatgagtgagggaggaatgtaggctccatttagctctatcttttttcctagataagtcagaatctggatatttaagtaaaattctatgacccgtgaacttaaaaaacaacaacaacaacaacaacccactgggctagcttaaaaaaaatagagcatctggagccaccagtttgagaccctgacctacaggaatctgggtccaatgggaaccacatttctcatcctcacttggtgcaacgccttcaggaaccaagtggctcttttccatccacagcccttgcatccccaggccccggcgccatgaggtactgtttgttgttacagaccaaagtcatccagggcacttcattcaaaaggcaggatgtgggctgtgagcttccagctcatcagttcaaaggaaatctacttcagcagcaatgtctcctgggatgttttcccaagcctccctgggaggtggtggggcctcttcaaggactaataatagacaggcacatccagtttcccaaacatgtcaaccttaaaagtgaatgctattttttcctccttacctttgaattactatgtaggagagggacattctattattgcagcccttgctctcgacatgctacctaataatgacttaccactcagcagcttccaggcaaaattgtcatagtgggacctgagctcgtgcaactccagcctgccccccttcatccaccactactcaggttcacccctttgtcaccaggatgctttgtagtcaggccagcccaatcaccattcagcaacggtatgactgtgggtgtatcttaatcactctgaacctccccatccttatccataatgaaagttaccagatctacatagggttgttgcgggggctaaataagacagcacaagtacctgatgcccagcaatcacttgatatttattattaaacacctactgggtgtgagtgggggtaagaagtgccgacctttaagtcttcattcattcacttgttcatccatgccctcactcaatcaaccaatatttactggggtcttgggaggtgtcaggcactgagcttggtgctgggcgacatggtggtgaacagcccccctgctctcacagagcctaggtctggtgaaggagctcacagcctaatgaagctctgcgttcccagagtgggggacatggtggcagtgggtatctttaggccttgtgcatgaacagggcgctaaataacattgaattacacattgtagacaattattaccctttcagttaccttcagatcacatcaaggagagagtcctggttggatagtaatgtctttaacacccctctagcatttattaatttcctctcttaacaaataaaagatgacttcagtcgaagatgcttaggacagatgacggcacctggagatattttaataatgtagatacctcttgctgttcaaactcagaccaaaagagataggctttttttcccccagagggtgcacaaatacgaccagaatttgtgaagacgagtcagaaatgaatgaaatttggaaaaatattgatctactgaaatccttcctccccacactattagccctatgttacagttggggaaacggagtcgttttgcagaggggatggacagaaggtagggagttctcttccaaacgtgcaggaggcaagcaaagccaagaatcttctctgtggtggagttagagacatataaaataaagatcgctcctcccctacctctgcagaacgtgtgtgtgtatgtgtgtgtaagtgtgtgcggccacaagcctttccgaatgagtgacagcgggagcccatccctccaggagacgcgtgcagaatgaccaatgggatggatgggggtggatgggtaccagtctccgcagaggccggggtggaattcgctgcgccccaccccttccacccgctccccttcgccccgtaggtctttccactctcgctcctcccctgggcacatctcctgaacgcagccccgggggccgaggacggggtggggtggggggcgaggctcgggtccgacgaccccgggctgcggtcccggcgctgcagagctgcggctgtgcacgcttagccgcgaggcccgcggtagcccgggcgccgatatgtaaagcagctggcagcgctgggcggggcctgggcgcgatgcaaatgaggagggcggggctggcccggggctccgcctccctcccccgcagctggggccagcggtgccaagcgcagctggacgagcggcagcagctgggcgagtgacagccccggctccgcgcgccgcggccgccagagccggcgcaggggaagcgcccgcggccccgggtgcagcagcggccgccgcctcccgcgcctccccggcccgcagcccgcggtcccgcggccccggggccggcacctctcgggctccggctccccgcgcgcaagatggctgacccggctgcggggccgccgccgagcgagggcgaggagagcaccgtgcgcttcgcccgcaaaggcgccctccggcagaagaacgtgcatgaggtcaagaaccacaaattcaccgcccgcttcttcaagcagcccaccttctgcagccactgcaccgacttcatctggtgagcgcgcgcgcgcagggcaccttcccgggcccccgagggcagcgccgcgccagggaccccctctccgcgccctctgcgccctccgcgccctccgcaccctgggaccccgcgtctccggactcccggctccggaccctgctgcccgggactcccggatggacagtcctgccgttgccctgtccccaccctggtcccagacgggccgccgcggggcgcctcctgccctctcctgctctcaggcgcctctagagcgcccaggggcggcgtcgcgggagcctttgctccacctgactaggagcgcgcggggtctgtgcctgccctggagggcagcgcctcgggtgctctccgacccggggttccctatctctccgcctgcttccgggcgcgaggagccctcgccccccaccccttgtttccggggggggcggcgccctgggtgtccttctctatctccctgcgggcatgggacatcctttctcactcctctgtgcctccgggcagcgccctgtgttatctcccattgcccctccccgagggcctgggttcccctttccactcctcggtcacatcactgcgggcccctttcttccccagtccctccagtagtggggcatcctttcctccttcccagtccccctcccagaggacaccaccgccgcggggtcactctcgccctccctctgaatgcgtctttatctcttctcttttcccgagggtgctcggggcatctatgggtacatctgtcgcctgccttcagcccctaccccgacggaaacgctccccactatcccgccacctggtggtcgcagcctcctctcttctgcaggagtgaaggcagatgggggttacagccgagctcccacctacccccacaaaggcggaagactcttgggcacccgcctgtggctgggagtttgcacctggggtacagaggcagggaggaaggcgggtgactctgtgggtaactagctggaggctgggccccccgggctgcctgacatacacctccttctgcttttgcaggggcttcgggaagcagggattccagtgccaaggtaggctctggggctttggggatgctatttgtgggaagagagggtgaaaaatactttatagaagaagttactgagttaggcagagagtgaaagaatcacgttggtcggagtgacctcccaggctaggaattcttcaccacaacagggtcctttcaaggggtgtgtgtgtgactggggccgatggcgcttgggagtcttacatgccaaggaagttcacctacccttcctgccttcccggctctggaagagtcaaagcggtctcctgaagcaatcctggcatggtcagttccgctgggggagaaagtgttttcccgggacgtttctgggagaacctgtcctccttagttcccctttctctgcccatgtcccttccttatctcacccagggaggttctgcctctccctgccttgcagaggtctctgcaggtggctgccgctcctctgcagatggtgcatcccctagaaaggcgactgtgtttgtcgcctgggcctcctctctctctgaaagaagtatttccagagggagtgtttctcagatcctggtttaaatcaccctatcttctgggttgaaacagaaaggtctccagggcactggttacctgagttcttgcatctggcttgagatcctggactctaaccaggggtatcaaacctgctggtggtgagttgatcacgtgtaaagtgtccccctcccccgtctttggggctcatgtctaaaagacagattgcaaattggctctccaggaccaaaagttacccgcagctctgtgtagcccttagggtgtcttacttgtgaatttgatgtgaacgttttagaactgggagatttcacatacacatcctaatttccaactttaactttgctgagaaatggtctcactttcgcttgaaaacaatcgtttggagctgagagccgtcgtcgtagatggggaacagccttaccattttgtctcagttgatcccagtggggaacacttcacccatttctggcccctgtgggcatttaagtttgcaacctctcatctggaaagtttgtgtgttatgttttctttttaatttaaattttaatttttcactcttgggcttggtaagattgagtttggtaagaaacggcacatttctggggtattgtatctttaggggcaaagtgaccaccaccctggtgagctgggtttaaatcaaaagaaagtatttgagtgtggaagagtctgacgtgatttagcactgactgacagttttgtggctgcacctccaccctccagggaaaagtaaagtgatccctagtgagtgtaggtggcatcgtcagtggtgcagaatgtttgcttgctggcagcatggcactgtgctcctctgagactcttgcatactcttctgagatcggggtcccggtgggctcagtgagccctgccaacctacccagcctgtcttaccaagatttggatcctctgcaccacaccagaggactcctcaagtctctttaagtggcaacaacttaggccctggtgcaaacaaatttggattgttttctagaactttgacccctcaaacaaaatgccaatggtgtcttggcaccggaatgtgtaatttcttctttgaggttgcctttcacttccatgaatcagtttcagtctttgtctcttgctgagatcgggggcgatttttaaacatttttaccacggatcttctatgccacctgctctgctgttattgatggatgggaaagtcactttggaatgtgcaaggcatgacacatttgaaataggagatcctttaactcaaagtctggaagataataggaattttctgatgttaagagaaaaaggcagaattaaagtttgtaatgaaatatgggcgctctagagataggagtgtcttttttttttttttgacagggtctcactcttttgccccggctggagtacagtggtatgatcagagctcactgcagcctcaaactcatgggctcaagtgatcctcctgcatcagcctcctgattaattgggactacaagtacgcaccaccatgcctggctaattttaaaacaacttttgtagagaaggggtcttgtgatgttgcaagactggtcttgaactcctggcttcaagcaaccctcccacctcagcccccaagtgttgggattataggtgtgagccactatgcccctctggagtgtctattttttaaattgcctttctttttctcttccctgcctccccaccaagaggcagcgtagagaagtgggcatttgcacaggctaccaggcaagtccctgtcggtctgaatcctagctttgagacttcccaggcatattacttagcctctctgtatttcagcctccttgtctataaaacggagtcagtaacagtaccatagtgtggctgagcagctccaactcattgcaatatccaagattcttggaccagagcttgacacagagtatgctcagaaaatatctgctcttatgattgtccccagactaccccaatggtggggcagctggcacgagagaagactggctctgcagggttgctttgctatggaactgcctgccaggtaagagtcaaaactcagccatgaacttctggtcactctgtgtagctgctttgacagcatattccatttgggcagcagtagggaggagtgaggggaggggcagattggcagtccctgaaattgagatgtttagaatgggaacatataggaaagagggaaatttatccctggtactcagcattgcctgggactaattctggaaccactgaggagttccttagtatctgattgttcttggtatcagatatttcctctgaaagtaaatccacttacgatggaatcaacagtttatacaaaacacataaggttttatgatctcacttaagtcagcaatccagagcccagggcctcaggttcctttgagttttctgctccactatccctggggagtgacaattatctcatggtccaaaaaggatgctagacgctggagtcctcacacccttctttcagctagcaggaaggaagaaaggggtaaagaagggcatatagcacatgctcggtgtcacttgtttaagttgctcaagatccttctacctacatcctcttagctagggtttaatcacatacccacaccttgctgtgagggagcatgtgggaaatgtagtgtttatttcaggcagccactatttagaggatgtttccatttcaaaaatacaagcagagagaggatgttgtctctgccactctggtaggaggtgtgtaggatgatcgcaaggcaaagaaaccattgagagtaaccttcaggctctattacattgtcatggaaattggggacactgctatgggttgggagaggaaggatggaaaactcataaaccttgggaaattatggatttctgtgtgctcaggggagcttaagaatagattttcttgctttcgtatgatgataggacgaaactctaggttgactgcctcataatttctccctttttgtttccactctgtctatttcttataaaaccactctctgggaggtaatttaagaatgtgtttgatgacagggaactggggctgaagatccctattgtaaaattgcctaaattctagagtagaagtggaactcctttgacaagcaaggcagatttctctctatggcatttttttctttgccttttatttatttatttatttattgagacagagtctcactctgttgcccaggctgcagtgcagtggcaccatttcgactcacggtaacctccatctcctggggctcaagcgattcttctgcctcagcctcccaggttgctgggattacgggggcctgccaccacgcctggctaatttttgtatttttagtagagatggggtttcatcattttggccaggctggtcttgaactcctgacctcaggtgatccacccgcctcggactcccaaagtgttcagattacaggcatgagctacagtgctggctgtttctgtggcattctttacaggaacttaggacctgcatttgagctttaattttaattaaagtcttctctaagaagatttttggtagagagaaaaaccttcttcttttattttaaattttgtttttagagacagggtctcactgtgtggcccaggctggagggcagtgacatgatcatagctcactgcagcctcaaactcctgggctcaagtgattctcctgcctcagtgtcctgagtagctgggactgcaggtgtgtgtcaccacggcccttttttttttttttttttttttttgagacggagtcttactctgtcatccaggctggagtgcagtgacgtgatcttagctcactgcaacctccacttcccaggttcaagtgattctcgtgcctcagcctcttgagtagctggaactacaggcacgtgccaccatgcccggctaatttttatatttttagtagaggtggggtttcgccacgttggttaggctggtctcgaactcctgacctcaggtgatctgcccgccttagcttcccaaagtgctaggattacaggtgtgagccactgaacctggccaaatacatattttttaattttaaaattttttgtagagatagtggatcttgctttgctgcctgtgcctggtctcaaactgccagcctcaagccaggagtctcattctgctttggcctcccaaagtgtttgttgtttttgtaaaggaagtgactttggtagaaatagagaggcaataaaatatagagattcagaattcttagcaatgagttggagtccagtagaattgggtatgtatctctgatggagccgcttactccctgtgtgaccttgggcaagtcgtcccccagcagcaactttggtctcctcatctgtaaaatggggataatagcacctaactcatagggttatggtgaagaataatgaggtggtgcatgagaaatagccacagcaagtatcaatgactctaagtgagaccatcagtattacttgattagctgtaggaaactgtgtcaaagtgggacggagttcattctggaacttgttaaatgactaggcctctttcatgtacttagatagtttctcttcttgggtatatttcttcctgggtattgggtaacaccagtgagtgctcagttcagtgtctgggcccagaaacccatgcctggttagcattgtcttttcttctgagaaagatctgaacttgccatggactctctagaaaaaccccagtgtacaaattttctatgaaaagctagaattgatgattataatgagtaagttggctcttccttttcccatgtagattagaaaacatgtttttaaatcttctaattgaaattattcttaaaaaaccccaaagtctgacatgactccaactattgttgttttcatcaatatcaatcctatcaaatcaaagtttattttagtgtgtaattaacacatgtagactagaaaagtttgcacttttttatatcacaaaaaaggttaattttattttctatggaaagctagaattgatgataatgagtaagtcagctcttctttttcccatgtagattagaaaacaggtttttaaatcttgtagttgaaattattcttaaaaaaccccaaatcatgacatgaatccaaccattcttgtttttatcaatattcaccctatcaaatataaagtttattttagtgggtaattaacatgtgtagattagcatagcatatgtgtatttatataacaaaaaatgaatcaaaagttaattttattttgggcagtgttccctagaaacttataatatggccccatgcacttcaggttgaattttcttagtaaaatcataaagaggtccattttttcaaaaaatcaccaagtcaggctgcaagtttagaggttacttctattgtttcacttctctttcttcccagaagcagaccccagagacctgtgagccaaactccactcaccttttagcttattctaaatgtgtcctgcgggcttctctgtgaataaaaggcagaggctttttgacttcgtgtttgatgatttggcttttttcttttttttaccacctgacgggggatttcaggctcaatgtcccaatcgaaataagaatctttgagtgggttaacattgagtcttaaaaaggagggctgatttgttggagaggcaacaacgaattcatttttcactgtagagcactcaggaggagtctgaagctttgtcactgggcaacagaatgcctttctaagtaaatatggaaaatatgacctttgaaaatctagctgatatgatatatagattcttaggatataatttttaaaaaatatattatttccaagcactaatgatactccagagatactgcccacaaccagatgcagcatgtttatagtgtatctaggccaaaaaaaaaaaaaaaaaaaaaaaaaaatagaagatacagaagaaggcaattggtcaaaagattaactgaaggtttgaaaataattttatacacatttgtactgttggggtctctcttctctctgtctctgcttatccttctgtctctgtctctttgtttccatcacacatgcacacacacacacgtgtatacacacacatatatgtaagtagatcaatatgttataattttcacaatacgcatcttcttttgctacttttcagatacaggtcattaaattactaagtataatttaaaatatatggtctggccttttaactctgcagttcaattaattcttgggtagatagggggatctgctgaaaagtttgtctctgacgccttcaaaggtaagtcccttatgttctggcatttgctctaataacatgaattctttgacttcattcatccaatctcttcattgaaattgtgtgaaattccatagatagaatgttagcctttttacagagaatacaacatccacagtgtttacatatggcatttggaggtgtgatggctgcttgaaaatccagtaggaaatttgtctattcaccacatacattcatttattcatccatccatccctccatttatccacccacctctctattcatcatccgtttttctgtttatctatttgtccatccatgcatccatcccttcactccattctccttctaaaagttcttttttttgagacggagtcttgctctgtcgcccaggctggagtgcagtggtgcaatctttggctaactgcaagctccacctcccaggttcacgccattctcctgcctcagcctcccgagtagctgggactacaggcgcccaccacctcgcccggctaattttttgtatttttagtagagatggggtttcaccatgttagccaggatggtatcgatctcctgacattgtgatcctcctgcctcggtctcccaaagtgctgagattataggcgtgagccaccgcgcccagtctcttttttttgtttagacaaactctcactctttcgcccaggctggagtgcagtagtacgatcttggttcactgtaacctccgcctcccaggttcaagtgattctcctgcctcagcctcccaagtagctgcgattacaggtgcccaccacctcgcccagctaatttttgtatttttagtagagacagggtttcaccatgctggccaggctggtctctaactcctgacctcaagtgatctgcccacctcaacctcccaaagtgctgggattacaggagtgagccaccacacctggcctcactgattaagttctatgtgtcaagttctatttgtcaggaactattttaggtgacagaatacaatggtgaatgaaactgagaaaatttctgttgtcatggagcttatgatgtagcggggggagataagacattctacagatcatttcactcatatttaacctcatttttattaggtactttgaagaaaatggactgggtaccgggagaatatataatgggaagctaacctatgtaatggctggggatgcagtcagtggtctgggaattaaaaaaaaaaagcccaacttctcattctcattttctgaggtaactggagaaagtctgagttgtcaaggaactagagctaaaaatctgtattgtaaaactgcccatatcctggataatatatgcaacagggctgaaggcagtggctcatgtctgtaatcacagcactccggaaggccaaggcaagaggattgcttgaggccaggagttcgagaccagcctgggcaacataacaagaccctatctcaattaaaaacaaaacaaaatatgtgcaggagacttatctttgtgacattctatggagaaaccgtaaatatttatttgtatcatggctgcaagtaagatgagtaagtatttggtagaactagcctgttaccttgagatggcttctttcccagtttgacagagaacttcatctcctcttagttaataactcagataatgagctgacttcctttttgtttagggtttacagtttgaggtggctgttctaaagaagaaaaatcagacaatttcagaggtggaggagcaagtctgggccaatagattgaaaataaataaaaagagagagcacggcatttcagtgagaggcattttgagctgaaagtcagttttcagggagcacaagattactcacattgcctgccaaataccttcctcaccctgtgtccatctctgatatattacaactcttcattcctttggcttaggcagtattttctcttgttcagaagatactttttaagtagtttaacaataaacagtgttgactcacttatagagaaaggacttttgtcaagtctgtctttctgatttcattaaggagaaagtctcagttggtgttaatatatctttaacaaccctctaacacaaatctgggcacttagtagatatctgttgaatattctttttttttaattataaaggaactacagggaattatgagaatgtaaaactatgggctgggtatggtggctcatgcctgtaatcccagcactttgggaggctgaggtgggtggatcatctgaggtcaggaattcgagaccagcctggccaacatggtgaaactccttcactactaaaaatacaaaaattagccaggtgtggtggcatgtgcttgtagtcccagcttctcgggaggctgaggcaggagaatcgcttgaacccgggaggcagaggttgcagtgagccaagattgcgccactgcactccagcctggcgacagagcgagactccgtctcaaaaaaaaaaaaaaaaaaaaaaaagttagtttctacctataaaccaacttttttttgagtcagcgagggtacacttttacctaatgttgagcctggttctgttctaccctgagcttgattctgtactggctattcctccttgtgaacagagaagggaagttcagtgtctttcctggaaatttttggtgttgtaaggatgctcagtgttcctgaaggttgagaggaacagcaaggacaggatctggtagagatgtcgcttttattcagaagtgctaagctgttaatcattaccatggttgttattaccttttaattgccatttgtcctgcttgtttgtggtctcctgggcatctccttccccctcagcccacaagcagaaagttgccctacagagtcaggaggagaactcaaacccagaccagagagctctgatccactcctatgggtcttggaactggctaagtagatggaaattaactgattcaagatatgcaacaccattagttcaaccatagctgtgttcctggggtgaattctagctttcttttttctttcatcttgctacttcccagagaccagactttgggcctctagggaaggagtatcaaattgggcttgagagttcaagctcaaaacagacctgattttaaatcttggttctgcttctccatatcttcatgacctttgggtgggtaaaatatgatcctgcctctatctatctatctatctatctatctatctatctatctatctatctatctatctatctgtccatctatctatctatccatccatccacctatccaccaatacatccatccgtctgtccatccatccatccatccatccatccatccatccatccatccacccagctattcttccattcattcatccaaacatccacccatccacccagctattcttccattcatccatccaaccatccatccatccatccatccatccgtctggctatccaaccgtttttccattcatttaatatatatttattggatgcctaccacatatcaggtactgttctaggcattggaactagaacagtgaacagaacagcatcgctggcttcatggaatttacattctagtagaataacagtaataagtgaataacatagaacgaatatattgtataatgtcaggttgccatatgggctttgaagagaagtaagacactgtcctcacccttaaagatcttcctggtcttttaaaaggagaacagcacatggccaattagttctgagacataatgtaaagtgctacaccaagaatgtaaaaacactttggatggcatccctactcctcctcggaccggtgaagattccacagaggaggtgacatttgggaacagtcttacagcaggagtgggagttcccggattgacaaggggatgagggcaggggagggtgtttcaggcacaggacaggacaacgcagttgagatagtgaggagagagaatagggcacatgcagggaacaggaagaagagggtgtgagggagggaggagcaggtgggaggtgaacgtcatatcagaggggttggcccctgtgaaggcagtgtagtgactaggaagtggttgttgtcactgttttaaagtgggatgtgtgggggtgagtgaaatggccaaatgtttgaaaaagaggagcatgagatgcctttggcaacaatacttgccatgactcaaatcctgaaattctaggcctgcagtgatggaagtcaggcaggagaaactgaaatggccatttagaagcagtgggggtgccttaccggagcacctcgtggctgttgctatttttcacaccctaaagagacatttggaatttcatgtcagtcatattgttgattgttctattttgagggtggttactagttatttttatggttctaacaatagggacatctctcttcactgtatccttagacgcggagggccgtagaaatgaattttcctctgaaaggcatcctcccactccctctccctctccactgctgtcacccagtgggtacgtgtttattgagcacatgctgcacatggtggtgaagagttggtgttttggagaaagaaaggcttcgatttaaatcttgacttcttgctgtgggaccttaagcaagttacttaacctcttcgagcttctgttttttcatagctaaaaggatataataataaaacctactttatgtgaagtgtttcttagcaccctacctgacatatatacagtaagcacttgataaatggtagctatttctgttcttcctaggactgggcactgtccttgtccttactgagtttataatcctgttggggaggcaagatgaatgctcttgaatcaaggagacgacgcaagaatggatgtgcttacatgtcgtggtcaatagcattagctgcaccttacagtggatcttagagagaaatgcttggttggggccggagaggtgatttgagtgtgagtgagcacagtgctttctgagaaaccctttcctggcctgcaacactttaatttgtgggaaacctcaggaagtagaattgcaatctgtgatcgccccatcggctgacctcacttcaaaaatgtattggtagcatttcaactttaaatagatttgtgaccatttcacccttctaaatttgggttcccttcaccctttgggtggagtgtttatatcccttttcggttgaagaagctgacagatagtgtaggtgaaggtggagggtgaagtctgaaggacggtcgcttgtctcattgggatagtcagggcagtgatttttgtgggatggccctatattgaagatcttctttccctccctaaaggtagagaccattctttagagtttagtgagtgctgcaaatgaagatttgatcgttatttggatttttttgcatgtgtatgtgtggattttttttggtagttatccagatacattttgtggcaaaatttatggctgagggtattgataattgtttctgagacaaacagtgcacttagggaaacaggattgacatatagagtagagaaggacttctttttatttcagttggatattcatcttttggtggctagctttttttaaaaaaactattaatattatttttgattgacaaatcataattgatggggtacaatgtgatgttttgatacatatatacaatgtgtcatggttaattcaaactaattaatataaccatcagcttgtttacttattttttatggtgagacatttgaaatttacttagttatttgaaatatatgatacacttattattgactatgttaccctgctgtgcaatagatctccaaacctattccccttgtctatctgaaactttgtatcctttgatcaacaactccttccctcatcccagattctggtaaccatcctcctactctctacttctatgactacgactttattagattccacatatacgtgagatcatgctgtatttgtctctgtgtttctggcttattttacttagcataatgtcctccagattcatgtatattgtcacaaatgatataatttctctcttttttttaaagtctgggtaggattctattgtgtgtatacaccatactttctttattcattcatcctctgttgaacacttaggttgattccctatctttgctattgtaagtagtactgcaacaaacatgggaatgcacatattctttgacatattgatttcagttgctttaaatatatgcccagaagtgggattacttaaaaaaaatttaatttaattttttttaatttgagactgagttttgctcttgttgcccaggctggagtacaatggtgcgatctcagctcactgcaacctccacctctcaggttcaagacattctcctgcctcggcctcccaagcagctgggattacgggcatgcaccaccacgcctggctaattttgtatttttgctagagacggggtttcactgtgttggtgaggctggtctcaaactcctgacctcaggtgatccacctgccttggccttccaaagtgctggaattacaggtgtcagccaccatgctcggtggtagttcacttttttgtttttttgagaaacttttagtactgtttttcataaggctatactaacttacattcccaccaacagtgtatgggtccccttttctctacatcttctccaacatgttattttttatctttttgataaaagccattctaacaggtgtgaggtgatatctcactgtggttttaatttgcatttccctagtgcttagtgtgctgaacattttttcaagtacctattggccatttgtgtgtcttcttttgagtaatttctgttcagatcccatttttaaatcaggttatttgtttacttgctattgagttgtttgagttctttgtatattttggatattaacttcttatcagatacagcatttgcaaatatttttcccattctgtgggctgtctcttcactttgttaattgtttcctttgctgtgaggaagctttcagtttgatgccctcccatttgtctccttttgcttttgcttaatcattgcccaaaccaatgttgtggagtttttcccttatgtttttctctagcagttttatagtttcaggttttaagtctttaatcaattttgagttgattgtgtatgtggtttgtaagataaaggtctaattgcattcttctacatgtggatatccagttttcccaacaccatttactgaagagactgtcctttccctcattgtgtgtttttggcacctttatcaaaaatcagttggctataaatgtgcaggtttatatctgggctttctatcctgttccattggttgatgcatctgtttttatgctagtaccgtgctgttttgattacaattgctttataatgtattttgaaattaagtcgtgtgattcctccagctttgttctttttgctcaatgttgtcttggctatttggggtcttttgtggtcccatatgaacttagggattgttttttctatttctgtgaaaaatgacattggaattttgataagaattgcactgaatctgtagattgctttggctagtatggacattttcacaatattaatttgtctagtccatgaacacggaatatcttttcatttatttgtgttttcctcagtttctttcatcagtgttgtatagttttcagtatacagatagtttgcttccttggatacatttacacctaagtaattttttttttgctgctattgtaaattagtttgttttcttaattttctggtctggtagtttgttattagataagctagtatataaaattagaataattagataatctaatatagaaacactactgattgtatgttggttttgcatcctgcagttttattgaatttgttgatcagttctaacagcttttttagtggattctttagggttttctgtatataaaatcaccttgtcaacaaatagagacaagttcacttcttcccttcctattaggatgccttttatttctttctctttcctaattactctggctgggacttccagtactctattgaaaagaaagggtgagagtgggcgtcctgatcttagaggaaaggctttcaacttttcagtgctgagaaggatgttagctacgggtttgtcataatagagcccatagtgtttattgtgttgagtgcatttcctttataccttattgctgagtacttttttcatgaaagaatgttaatttttttcaagtgcttttttttcctgcatctattgagatgatcatatgatttttatcctttattttgttaacatgggtatcacatttattgatttctatgtgttgaaccatccttgcatcccagggagaaatcccacttgatcatggtgaataaaattcttttaatgtgttcttcaatttggtttgctaatattttgttgaggatttttccatctatgttcatcagggatattggtttatagttttcttctcttgtgtttttgtttggctttggtatgatagtcttggataatgagtttagaaatactcccttaattttttggaagagtttaagaagaattgattgacatccagatcaagaaacagaacatgctggtaccctagaagcatcatctcacaatccctatcaaccgtatccttcaggagtaatcactatcctaacctctatcacctatgattactttcatctgttcctgaacttatgcccacttttctgttatgcaactccattgacttatgcccatttttctgttaaaaaatttaaaaagtgcagagctttaagttactgaggctgagcctgagaaatgttagctgggacttttttagttttgcatagaggaagtgaaatccgtatgggagacaggcaccttctggaatcacccattggggaatggtgccgtttgccttctttggggaacatctgcttcctgtttcaatgttgcccatcggttccagactgttcaacaaggaagccagggcattctgacagtttttccacacaataatttagctctgtaaatactaggaaaacttgagctcacaaactatttttagggcttaacatttcaaaaattctgtattagtaagaatctattaaagctgctgtaacagacaaaccttgaagtctctgtggcttgacagaagggagtttatttcttactcatgtcactaaccagtgcaggtggtcctggtcaggacatcttccacagagtcacacaggaccccagggtcctccccattgggccagtggaaggggaaagggaaattgagaaagcacactcatttcacaacaacttcagctggggaaggaagtcacatcacttctgctcacattctatttgccagaacccaggcaaagaggcaaccaacggaagggggtcctgggacatgtcgactagctctatgtccaggaggaaaagaaaacaggttttgatgaactcagtaaatctcactccagtctccaaagccataatttcctttgtctttctttgcggtgatgtatctagttttatctctcacttgactggtaaaactaagatgcaaaactctggacgtctttatcttatcaaacatagcagggaaagagtgagttctatttgtgttcctaaaagtgaaataaagaagcacttttcttgtttttagttattagaacaatctggctcttgtcagactttctagtttttcaatcagtcagaattcttgcctctctggttgcctgttgtattaatccattctcatgctgctaataaaggcataactgagactgggtaatttataaaggaaagaggtttaattgactcacaattcagcatggctggggaggcctcacaatcatggcagaaggcaaaggaaggtcaaggcacttcttacatggcagcaggcaagagagcgtgcacaggggaactgccctttataaaaccatcagatctcgtgagacttattcactatcacgagaacagcattagaaaacccacccccatgattccattaccttccgccaggtccttctcatgacacatggggattatgagagctacaattcaagatgagatttgggtggggacacagccaaaccatatcacctgtggacatcccaagcagatctctttgaggccgggttagttctcttctaagctgacttgttatatagaagaatcctttgttggttctacttccagatatttgactggacacccaacaaatcaattatctattgctggatagcacataacctcaaggcttagtggcttaaagtagccactgttttatttagttttagtttctgtgggtcagtaatttgggctgggctcagctgggtggtctgtctgatctgggcagggattggctgttcttggctgggctcatttaccttcctggggcctcagcagggatgtctaggacaactggggcctctcttcaggtctttcatcttccagtgggctatcctgagcatggtcatatgctgatgggtgcattctctgggcatgagcaagggctgcagggcttcttgaagccaaggctcagaacatgcataacatcacttctgccatattccctggtcaaagcaaatcacaagcccaccccagaagtaaaggaggaaatagagaagagaatagagatgcctcctcttgatgggagaagctgcaaataatttgtgatattttttggaacccaccacactaatttcagtgtggtcctcgcaattgcttggctgtctaaaaacatactccagtctagtgtgcatttctgaaaatgaacttgatcaaaggcaggccccaaatgagtgctcaacatttacacctgataataatactacctacctcctagggaaatggtagggccagatgagatgctgtatgcaaaggatacggccaggacttagtgcacacgcaacactgaatactaccaccatgactactgaatactgccatcaaatactaccgttactaccacttggcactccctaaaagcttgagattcagagaaaggaagacaaagcccctgtacttgaggagggagagaataaagagagccggcgggggagggggtggcaggagagagagagagagagaggcgtgtgagtgagttcttgcaacacagtgtggtcagtgtgatcacagagctgtgatggagtgcggatgaggtctgatgacttactggtcaagagcatgggttcaggcctcagttcctccccaatcacatgtggggtcttaggcatctttctttttaatcttcagtttctttgtctgtgaaatgaagataatggcacagagcctacctcccagagttctatgtggattaaatgagacaggcaaacaacaacaaaaaccacaaacaaacaaaaaacaaaaatgaaaacaaaaatcatgtgattgcttattaaatgttagttatagaaaaaaatataagttcttaaatgtgcccttgtaaaaatgtcctaaagacctcatctttatttagttcttctgcaactctggctagcatcattgataaattgtcttaaaagatgaagatttgtatgcaggtggtttattggggatgtagctcttgggaacaacatctataagggatagagggaagcagggaagaggtagttgaactgtggtgcaatagttgtaatagaggccaaagccaattccatggctggagctgagacggcccttcagaactgggacaagccaatgcatcaagtgggcattgattgtgggctgctctttggaaggcagcattaccttgggcaaagcagctcccttcttcaggggaggagtcccagggaggacacagctgtgagcaattggttttcccagcagctgggggaatgagtgccttgtccctatagatggttttgagggggctgcatttgggggaatgccttctggggttcactgcgtgcttctatgtctttcttagaggttcatttcaaactataccttggttcattcacagtactgatttagttactatccagattcatagactgtacttgctggcactggaatatcatggacagagagtcctaatctgactaggcctagggaatgacatgggaatagcttgtcctgggtcatccagctaccagagaggagagctgggattcatatccaaccaacgatactttatacctcacattacttctgttatgctacacactcctgagtcacaggagattccaacttgtatttcaagcccagactgcatgacttcaatgtcctgttgcccttaacccctgtatcagattgcagccccactctggaaagttttcttgaattcttctatgtatgttttttaaactgtgggtcatcactcattagaagttcatgaagtcaatataataggtcaagaataccatgaagaaagcagaacagaaaatatcacagtgcatcactctcaggaagggtagatattgtttcacgaaactttttttttttttgagacagggtctttgtctgtcgcacaggctggagtgcagtggtacaatcatagctgactgtatcctcaacctcccaggcccaagagatcctcccacctcattctcatgagtagctgggacttgaggcacatgccatcatgcctggctaatttctaaaactttttgtagagatagggtctccctatgttgctcgggctggtctcaaactcctgagctcaaacagtcctcctaccttggcttcccaaagtactgggattataggcatgagccactactcctggcctcatacaatttttatttgatataaacatatatagccatgagtgaactgggtcaaaatgtaaaatgtgtctcttactgcaggtaactgtcaatgtagttcgaatatcactgtgaaatatatagagaagaggctctgggggctcatgaacttggcccatggactgttgaggctttttttttaatctttagagatgatataaatgtagtgctttgaattctttataattagaagttttattcttaccccatcaccatgtcccaagataatttttattatcatctttcagctttaacatatcacagacaaaagttatttttccaaatagaattttaagtatggtataagaggtttttagaaatggaatgattggttttggcggaactgcctggcctgacctgtcactcgggtgaagtgtcagagagctgtgtcgaatgctggcggagaactgtccctctcctgcagagagaaggagctgcttatcctgggggataatgtgggttgagaaagaagtgttttatgagcagaatcagcacagagggagggaggaggaggtgtttaggggctgcagagagccgccagaagatgtgggaacagtatgccagcacggaggtgggtcagatccccatggtgggactctgctgagggttgcctccagccgagacttccaagggctgggattcagtgtgtgtttatgttctctggtgtgcctgataggtgggggcccacatgacagctggcctctctgtgtttcccttctggccgtctctgatttggggcccaagggccataggggggccagggcactccagatgggacgaaaagtcaagtccaagaaaaaaatgaaatccgggctaggcttgtccctgcttgaggatgtgagagagagagagagagtgtgtgtgtgtgtgtgggtgtgtgcgcacgtgcgtctgcagtccctagaaggatctctattcattggacagagaggccaagggaattttccatttcctggatgtcttcaaagatttcaaatgccattaacttgagctgacatttattgagtactcactcggtgactggcactgttctaagtactttacatgtattaacttatttaatcctcacaacagccctgtgtggctgctactgttattgttgccattttatgctgagaaaacagcacaaagaattgagaaatttttccaaagttacagttaggattcaaaaatagacttggttttaggattgtgtaacttcagaattgatggtgacaatgacgttgatgatgaggatgatgatgatgatgatgaaggcagctaatatttcagtgtctgcaatgagctgggcattttcacaaactttatccctttgaatctttaccttccactaagatttgctgctattcttatcccttttgtagataagaaagcaagcttagagaagataaaacatttgcttaagtaactgcagagcgtagattgaattcaggtccattcgagtcagactgtctgttcaccaaggtgaagggctccgggggtcacagaggagcaccatggtgaggaaggccccgtaagagtgtggcagaatggcaaccaggaaggatctggtatacgggatggtgataaggcccatctctcatggccaggaaagtgtgcctgccacagcaatgaatgaaactggcaacatttgacaggaaggggaaattctctagtgggaggaatacttccatcaaactgttttttttttttcccagtgggggagtttgcacatgtgtagatttttttagccatagccttgaataaggaattcagaaagtggcttctagtttgaggactttcattggccacgtgatcacagtaggctgatttcttcatgcctaagttaccaggctgggaggacaggctgagaactatgcaagctgttgagtcacttggaaggaagagggttacatacagcaggcactttcatggaataatacttccctgaagagctgcactaatttattgaggcactgagctggatgcttcacacacatgatctcattgaatgtccacagcaccctaggaggttgatctcattattaacttcatgaagtgactgaggcttagagatattaaatagcttccagcctgggaaacatagtgaaaccccatctctgcaaagaataaaaaaaaatgagctaggtgtggtggctcgtgcttatattcacagctacttaggaggctgaggtgggaggatcccttgagcttgtgagggttgaggctgtagtgagctttgatggcaccactgcactccagtctgggtgacagagtgagaccctctctctaaacaaacaaatcccaggagacattaattaacttgccactggtctctaagctaagtagttgaagagggcaacaaacccaggtggtctgactcctaggcttgaaggtccaggttcagctactccaccagtatccctggtcagtctttggccagggcacagaaggtggcatatcaagttgtggggtctgatttggaaagtgtgagatccctcctttgtatcttttccaaagtccactcagaagagagtagtgtaaaaggagtgatagcacagcgtggtctggctggcatagtcagccgccctgtgatgggcagggggaagctgctttctgtcctcaagcagcccctaaacttgtaggccagactcataaatcacacattgataactcagtgtgatgtgtgctgtaatggtggagaggggggagaaatgccaggagcagctcacctcccagggtcctggggaggctgcacagaggagcctgagttctcagttgggttttgaggcagaggaagcagtgaaagagagaggaagaatgtcagtgaggtgcggggagaagcaagagagagaagacacttggcaggaagaagtagttgaagtacccggggatgtttagcttgaagaatagaaaatttggaggaggcagagaaaaggcaggaaactttaaaagcaggagagaaagacctccaggttcccaaagggagcatggcacttctcaagggggtgaggttgacagcattaggagagagagagagagaaagagagagagagaaagagagagagcgagagagttgtcaaggaagggaaggacccatggaggggagagcacaggtgaaaatgagaagtgatgggaaaatgggtgggaaataaatgaagttttgaggccagttgagaaatcttgcttggtggtttctattttctttgtgaagcagaaaaaaagaggaattagacagacctgcattcaaatctcatgaccccaggcaaatttcttatccttagcttcttcattttgaaaaaggggtgaatgataataggacctacctaataagagttgtcaggatcaaatatgttagtgcttgtgtaagatgcagtggcaccctggcacttagtaccaaaaaaaagtactataaatgttgtcacctattgagggagtccgggtttgggtgcttgatacatagaaatatcatgaatagcagcagagaatacaagaagaagagaaagcttgggggagaagatagagaattatgcgttgggtatgttgaggatgaggtgcctgtgccatatccgggtgtaggtgcccaaaggcaactggaagtcatgagaagtcagggatagaggtaaatgtttgggagttgttaatacaggggtgcatttttaaaatatctgaagtatgttactggtggcactcaaagatttttaatgatgtaaggtattcaacaacatggaactacgtagttttaaaagaaattctcttgtaggccgcgtgtggtggctcacacctgtaatcccagcactttgagaggccaaggtgggtggatcacttgaggtcaggaattccagaccagcctggtgaacatggtgaaaccccatctctactaaaaaaaaaaagaaacaaaacaaatcaaaacaaaaaaaccgggcatggtggtgtgtgcctgtactcccagctactcgggaggctgaggcaggagaattgcttggacccggagtcagaggttgcagtgagccaagatcgcgctactgtactctagcctaggcaacagaatgagactcagtataaaaaagaaaaaaatgtttttttcttttaattcttcgggttaaggagagtgtcttagtttggtgctatcatgtcctaaacatctttctaatgcatgcaaatctcccttttaagctaaaagaatgaagcaatctcagactcagagctatgtacctgctagaatttaataatttaaattttcattgtgttcttcatactcaccttctatttatagcaagtgttactagctctccaattctggaggttgtttcagataggatgcattagttctttttttttttttgagacaaggtcttgctctgtcacccaggctggagtgcagtggcacaaacacagctcactgcagcctcaacctcccaggctcaagcaaacctcccacttcagcctcccaggtagctgggactacaggcatgtcccaccattcctagctaattattttattttttatagaaacagggtctcactgtgtttcccaggctggtcttgaatttgggctcaagcaatcctcacacctccgcctcctaaagtgctgggattacaggcatgagccaccatgcctgacctgctttggttcttaaaaacagaatatctggcgagcctaacaaggaggctggtggttccagggttggtttaatcaaagacttaacactgtcatcaagcgcctctcagttatttgctctgccatcctcaaaatgtgatcagtgtctcccttcttggtcccaggaaggctgtgatagctcccagaatcacatactcacagggcaaagcaggaaggaaggggacataggacaaaggatttgtgtttaagtatttcatgtcacatttgcatgtggtgcttggagctgtggcagctatgttttgaccatgagggacaaggttggcaagctgtaaatggcagtgtaaaaagagggagaggatctgtctccttcacaatatccttgagcccctgaattcactaatcttgatatagctctatctcttgaaattttgttttgttagataattctcttactgcttaaaacgtcttaagatgggttttctgttctttccagtagaatgcattgtatctcacacaatttgaggttattgcctcaacctactctgaatcattgctcctcccccttttttcctggttgattagcttctcttgagattgtgtcttatcttcctggttttttgtatgtcgggtaattttggattgtatcctggacactgtaagtgttgtgctgtggagactctggattcattcgtatttctctgaaaagcattgatgtttttgttttagtaggccattgacttggttggacagtagactgtctctgggacaccagctcagatgtcagttctgttttttattttatccttgagtcttctttgggactgccccatgcatgcatggttcaagagtcagccagacatttgggtggggtttagacacagaatttggggctcttctctcttggctgtctctattatggaattccttcctcactttccagaagccgtgagtgacctgaaacctgtcctctggttctgtacaccagaaagacttgaggcttcatgttgaagttttagctgacagcagcttgcgttcaggggaaaagctgtaaaatgaccattcccttcttccaagtttcaacctctctgcagaatctgctttcttttgttcactttcgagtaatttcaggaaaaaatttttttttcgttgagagtttttacttgttacctatggaaaggttgggtctagctgaagcttgcttgcccataacagaaacgagactcttttctgtctaacacatgggaaaactaacgcccagagaggtgaagtcatttccccaattgtcagaggcacttgagccagagtgactccatcttgagtaagggctaggaaaataagaccgggacttgctgggctgcattcccagaaagaaaggtattcctagcctctagatgtctacagttaagggaacagattgataatgtttactaaacagagccaggcttggcagtgtccagctatcccgatatcttgagaacaaaggcattcctaattttgctttaaggataataatattgattattgcaaaacagagtaattaagaaaattaatcctttatcacaaacccttgtagcagaacacatctctccatgatttttaaaatcatatatatatgatttatatatatgattatataatatataacatatatgatcatataatcatatatatgcatgtgtatgtgtatatatatacacatgcatatatatgtatatatgtgtatacatacatacgtatatatgtgtatatatacatacatatatatgtgtatatatatacatatatatacacatacacacacacacacacacacacacacacacgaatattttacctagggtggacgtgctccttctcttacttttaggaaccccctactctgtctatggagtaactgttctttcaccactttactttcttaataaacttgcttttgctttgcactgtggactcaccctgaattctttcttgtgcaagatccaagaaccctttcttggggtctggatcaggactcctttcctgtaatacaatgtcacagagctcttaagtggcagagcttggggccaaacttaggctgctgcacccgatgtcccagctcctctgccctatctagctgtggatttgtgcctcgaaatagaattgcattttgaatgcagtttcattttcgtatggaaagtgtctatcctgtaaatgtaactgtagcagccccaaagctgagctgggcagttttatggcagcctggagtcagtcttgtccgcttccaatcagggttcctggactggctcctatattaaaattggtattagtagacaatgttccaggcagagttttggatagaaactatccatcagcaccaagaatgtgcctgatttggtaatctttttaccaaagtaaaagtcagtagtaagttgtggttaaaagagaggaagttcagagttcagtacgttatttctctctctctctctctttgtttaaataaaagaggaagttactgctcttatttttgtaccagcccgtcagtaatgggtacagagtaaaatcttagctaagctgaggtcaaacttcaaaacttagtaataaggatctcccttgttcctttgtagggcgactaacatgaaggttctgactcttaacccatagagccacaaaaaatagtcctaggaaaatcatatgattttatttattttaggaacagaaatggtcccttccgaagtagaggcatttctacttctttcctaaacaccatctctgctcagtgagctctcccaccctcaggtactgtgtttcaggcttattgctgtattgctagaagtatcctcaccttcgagattaagaaaagatatttattgccgggcacagtggctcacgcctgcaatcccagtcttttgggaagctgagacgggaggatcacttgagcccaggatcttgagaccagccagggcagtatagtgagaactcatcttgaaaagaaaaatttattgagctcctactgtatactggggatacagcaataggcaagatagcccttgctcctcatgtaacctacagataataaacaagattacaaacaaacaaaataagaggtcgttctagattatgataagtgatggaaaagaaaaaacctgtatctacttcttatagcagagacctgcattgggagttgctgtgatcaaacaggaaacggaaggtggagtttgcttctgtatccctccatccctgagtggaggctgggtgcttctcacgaccagggcctctgagatttctttttttgttttttttaaattattttagattaagggagtacatgtgcagtttcgttacgtggttatggagcgtgatgctaaggttagggtttctattggtcgcgccactcacatagtgaacctagcatctgataggtagttttttgacccccttcccctatgccctctccctcttggggtccctagtgtcggttgtttccatctttatgcccctgtgtacccaatgtttagttcccacttcgaagtgagaacatgtggtatttggttttctgtttctgcattaatttgcttaggataatggcctccagctgcatccatgttgctgcaaaggacacaatccaaataagcacaatcagaaatgaccaagctgacattatgactgatcccacagaaacacaggagatcctcagggatgactatgaacacctctatgcacacaagttagaaaacctagaggaaatgggtaaatttcctttgcacacaacctcacaagattgaacgaggaagaaatagaaatcaagatttattttctgttttgtttgtgtgtgtgtgtgtgtgtgtgtgtgtgtggttttttgtttgtttgtttgttttttggacaggatctcattctgtcactcagactgaggtacagtagcacaatcacacctcactgcaaccctgacctcctgggctcaggtgatcctcccacctcagcctccagggcagctggaactacaggcatgtacaacaatgcccggcatatatatatatatatatatatatatatatatatatatatatatatatatatgtgtgtgtgtgtgtgtgtgtgtgtgtgtgtgtgtgtgtgtgtgtgtgtgtgtatatgtatatttaaatttttatatataaatatatatctatctttgtagaaatggggttttgccatgttgtgcaggctgaaattgagatttcctaatgtaagaaacagagccccaaggggctcttcttgggctggtcgctgtatttcatcaggtgcctctgtgttggacacttacttccctccattgcatagattggatcctttatgcttagcctagactctgccctttgggatgcaaggagctgagtgaaggttctgggagagtaggcttaagcccagaagagggaggcctctctctggatgtcatgctagagcctgccttttagtctttgtgtttccactctccatcctcctcttctggagttcagaaccccttcctggtcaaattgcccccgggctctatgggatcctgtgggattctatcctttgagtctaccccacccttcaagtacttcctgtcttttcacacctaagtgaaagaaagtaggataagaacagcagttgttaacttgattgattgtaaattgccttcattagaaaatgttaattatcgcccctgggaagggattaatcctttaggtctctaggttactagactggcaaaagccaagtgtgccttggttgactgtttctttctgagagtaaagagaaaacatcaggggaggtagaaacctcagtcatggggtaatcattatggccatgtttatccccatacacgtatcttctgctgattctggagtcagctagattttgtgacccagcatagatgatatagtgacattgtcctgctgtgttaaaaaatttaagttcataagaaatgcataagtacaatctcatcaggataaattacacaacatagataagattgaagaccttttaactcttttgacgtctcaatttagtcccctctaccttccccagaagcctattgtttgtaaatttggtgtctcttatagaactctgtagcattccaaagtctgaactttctcccatgcatatggccacttccctgttgatgaacatttagattcttttttggaggggttgtgtctattacaaacagcatggcaatgagcatctttctacacatctcatcaatatgcaagtgtttctcgtgttcctcggaagtataatggcttagccctggggtatacacgattcagcttttaataggttttgccaaatgttctccagaatagctggaccactgtatactcccaccagcagtgtgtgtttccgtctcactgcatctttcccagaccatgatattatcaggccttaacacttttgccaatctgatgggagaaaaatggcatttaattttaatgatcctttcctgtccccttctcttctcttctcttcccttcccttccccttcctttcttccttcccttccttcccttccttcccttccttcccttccttcccttccttccttccttccttccttccttccttccttccttccttccttccttccttctctctctctctctttctttctttctctttctttctttctctttctttctttcttttctttcttcatttcctttcctttctttcctttcttactttccgagtctcactctgtcgcccaggctggaatgccgtggcatgatctcagctcactgcaacctccgcctcccaggttcaagcgattctcctgccttagcctccttagtagctgggattactgccacctcacctggctgattttttttgtatttttagtagagacggggtttcgccatgttggccaggtgggtcttgaactcctgacctcaggtgatccaccggcctcggcctcccaaagtgctgggattacaggcgtgagccgctactcccagccacctcttcttactagtgagactgaacatctttttacatatttattggacaattgtatttcatcttctatgaatgtctccctccccacttttttataatttcatattgatttgtaataatttttatttcaatctactagacactgatcctttgctcgttgtttgtgtttgtgttgtctattttcatcaagtcctgggtcctgtgtcactttagtgccataagggaatgacagactcccttattattggtttagctcttgaagcctaacaaagtgtttccaaacagttcattattcccactttaaggatgtgaagactgaggctcagggtcacaacttgtgcaatcttgggtagactttgaatctctgagcagacttagaagtagaccaaactgctgtgagccacagggagattattattgctaacttttccctgttagccaaacacttctgcttggtccctctagagagaagtctttaattattcatctctttccaagtaattggcgacaagtcctgcagctgggagttggaataaacttggttgctaaaagcatccatcacacataaaacaggggagatctggctccaaagaatggtagatgtagatcttcccctacggatttgttttctgaagatctccttatacactgacctcagccttttgctgacctatccttgtgaactgaaggctgaaaaaaccaatgtagccatggtccacatccatttatcactttcagaaatggcccctgcactttatatttcttcaggtcctgcaaaaaatattgaaaatcctttacaaatagaggcaaggtcaggccatccctgtgggatttccagggagcagtgcactgacccgttttgcagaatgggaagcaaaaaataaaactcagacttagacagctggcataagcaaggacttccctattctgagtgccaaatgtcaatttgaaatacttgaacttttattctctgggacatgtactggcattagtaagaatttctatttattgagcatttatttggggcaggcagatgataagttatacacattaattatcttatttgattttcacaatgacctatcagttacataattgattgtctgcattttatggataaataacctgaggctcagttatttgacttgctcaaggtgatgtaacaagtaaatggcagagccatgatttaaataacaaaacgcatgctcttaatcaccacattaatgtcttgatatcaattaatagaaccatttcccctccattttctctttagtttcagaactggtaagagtttgtctaataagatttttataaagtggtgacatgaatggcttgtggggatggagactggggccggctgccaagggtacccatctcacacgaagcatcaggtccacttgggtttgtttttggctgattacaatcttgaatcaaacttttcagtacagctggtctcccaagaactttctaatgttgatttgagcttccctgaatgaatctcagaaaataagaaagggagagagaatgcctgtgtattgagcttgacccatttcacagatgccgaaatagaagtgaggcgacttgcccagggtccctgtggtggattgtgttgttgtctcaattatttgctcccacctcatacaaggattatacatttcacacatggctatgtgacatacatgtctacttgcagaagggacacactttccttcccactgatgtggagcattggccaatggaacgtgagcagacacaatctactctacatttaaacagaggctttgagaagctattgtgtggtttagccattgttcttcccacctctgccacaagaccaagaaagggctgttgcctcagctgcgtcctgggatggaaaagacacaggaagtagaatcacagagccacagacaactgcagtgacacgtagcacgagtaagagctaaacttcgaatattgtaagtcactagaattttggggttgcttattattgcacttacctaccaaaagctgactaatacagtcatatagccagtaacttgactaagctggagcttgagccaggtcgaactcccaatcctatccatggtctttttcttatttcagtcttccctaatattccattctaacttacatcatattttctgtgtctgtgtgctgtctgtccttttttcttttaaataaatctttttctaccaaagatatagaacaggaaataatatttttctttaaagagtctgttttttcatttcaacccatttattttgaaggaaattttatcatcgtataaatagaaaaacagtgtcatcacaaataattcataactataagcagtggctcacgcctgtaatcccagcactttgggaggctgaggtgggcggatcacctggggtcaggagtttgagaccagcctgaccaacatggtgacactccatctctactaaaaatacaaaaattagccaggcatgctggcagaggcctgtaatcccagctactcaggaggctgaagcaggagaatcgcttaaacctgggaggcggaggttgcggtgagccgagatcgcgccattgcactctagcctgggcgacagagtgagactccatctgaaaaaaaaaaaaagggtaatttaaacaatattatgaagttctagctaggtactgttggcagacaagaatctgattttgaaatatcgtctctctatgttccaaaaaggagtttggcaaatattagaatggtgttcaaaacatacaagcaccaaactgatactttctcctttgataaatcaggaagattaaaaaagaatcagaagaacaatttcttcctagtatggcttggtgtgatgagtgtcatctgtattccatataaaattctttcagatatcaccaatgagtgatatgttcattacaatggggggtgtccctttctttggttcatgtataataactggaaacatgtatatagcatgtggtatgtgccaggtactcttcaagatactttagttatttaatctattgtcagataaggaaacagaggcttggagaggctaaacaacttatcctagctagaaagaggcagaattggggcttcaagtcaggtctgtttgattccagaggcaacatcctaaagcaaagtttccttctaactgctcacttgggacttttaaacgaagccattaggtgcttcactttcttgtggcatgccagagtggtagctgcttcagggcatcagcctggggccacatcaggacctacctgcacgtaggttgatcaggaccctggcagggctgtcaggtacagccacaaagcaagctgtttctgactgtgttcccacactttctcaggcatccaccctggtgtatgaatttgcttcttctttataacaaactacctctaaactgcactctagtctacagatcagctgggcaatgctgttgatctcggctgggcttgctcgtgtgtctttggtcagctagcaggttatctggggcctgattggtctaggatggcttcacttgcacatctggcacttagatgtgtgttagctggagcaatagggggcctggaccccgtgggtctccttttccagcaggccacttgggcttgttcacagggcagatgggcccagttcaaagggtctgagaacacaacggtactgcaggatgagctttggaactgctgcaccgtctcttccactgcattctgcatacgggccctaaacaagtcccaagccttctcagattcaagacatgggggatgggctgtatctcttatggagagagtcacatagcaagggtgtggctctagggaggaatgaagagtggtcaagtgcagcctgccatgctggctccttcaccagcctgtcagttatatgagccaatgggctgaatcatagtcatctttctctccacatgcctggcccgtgaaggatttgcctgcccagcagagaccgtggaatgaatgtgtgctccaggcactctgccttctctctcttctttgacttctctaagctcgttcctgcccctgtccccctctgtctctcttccccaggatcatggcattagtcggatccttcccatcattttcattttagctccagtatcacctctttgagccttccctgactacccttccagcattctctaatcccatcaccttgttttttttatcttttctttttttttgagacggagtctcactgtgttgcccaggatgaagtgcaggggcacaatctcggctcactgcaacctgtgcctcctgggttcaggtgattctctggtttcagccacccgagtagttgtgattacaggcatgtgccaccatgcctggctaatttttgtatttttagtagagacagggtttcatcatgttggtctggctggtttcgaactcctgacctcaggcaatctgcccaactcagcctctcagcctcccaaagttatacaggttttttttttttttttttttttaaatcttttcatagcatctgtaactgtttaaaatattagtttgacttccttttctagaatgtaagctttgggagagcggggtccttgcctgtcttgttctctgttacttctccagctcccagaatggtggctggcactcagggggtgctcaacacacataattgtcaagaacatgctacatcaaggcctgagtggctttgccacggctcttcttgtgactgcaggccttggtgccagcagccaccccagttccaagaaatggtctcttgctggccaacttagcaggaagaactggcagcgttcctgttacagcacttccaggtggctgcttttccctgagtccatgtggcttctccatgtctctctgttggagtcacaagttgtggaaattcacttaggccaacttagaccaagaagtggaatagttaatagttaaatgtcagtctgggcaacatagcaagacttcgtctttacaaaaaatttttaaaaatattagctggtgcggtcgtgtgcacctgtagtcctacctactcggggggctgtggtgggaggatcgcttgagctcaggagttggaagctgcagtgaactatgattgtgccactgcactccagcctggatgacagagcaagaccctttatctaaaaaacaagaaaaaattaataaataaaagttaaatataaggtctctggaggtatcctgtttgggttcagattctggctctgccacttcctagttgggtcacttttgggaagttacttaacctctttgtgcctcagtttttcacctacaaaaatagagcaaagtgtaaaaatatgaactacctcacagggttgtcaggaaaactaaattttgtgtatggaaagcactgattgctgagcagatggtgagcatctctgagtaggagctcctgctgccattattattattattattattggaggttatcatgtgtgattgaagagcaggaacttcagctgggcttcaggagcaactggttagaaaaacggaagacttggcccggcgtggtgtctcatgcctgtaatcccagcactttgggaggtcgaggcgggcagatcatctgaggttaggagttcaagaccagcctgaccaacatggtgaaaccccgactctactaaaaataaaataaaaaataaaaaaaaaattagctgggtgtggtagcggatgcctgtaatcccagcattttgggaggtcgaggtgggtggatcaactgaggtcaggagtccaagaccaggctggccaacgtggctaaaccccgtctctactaaaaacacacacacacacacacacaaaaaaaaaaaaaaaaaaaagaaaaaaaaagttagctgagtgtggtggtgggcgcctgtaatcccagctacttgggaggagactgaggcaggagaattgcttgagcctgggaggtggaggttgcagtgagccgaaatcgtgccattgcactccagcctgggcgatggagtgaaactctgtcaaaaaaaaaaaagagagaaaaaagaaaaaaagaaaaatggaagacttatcgggaatgcaggcagctgtgcgatttcagcttctctttgtttttggaccatgggttttctggttcttctttggttcctgcaggtctgactttctcctttttctgttgatggtctttcttggcctgtgtttgcaatgggtcaaccatgtgctttctggccatacttcacacttacttcccaactgggacagatagcatttcttaagtctaattccaaacttctgggataatctgattgcccttcattgagtcagaagccagtggatagggacatggaagatgctatagctgggctccacccttgcaggtgagaggagcagtttcaggaaagtctgccaggcatgagctgagaccttaagagatgtcagctagaattagccactgtcagtatatctgcttctgggtcccactcttcatcctgcttttcaaggttttcaaatatacactcctactcagtctcatgaaaattattatttttaaaataccctttagcacatttacctctaatgatactagattcttgcctcctgcctctgtaaatcactcggtcacttcccgatcttatatttggctgtcaagaatgtggaaatctcacagaacccttgaatttcaaagttggaagggaaaattgcttgtctatgcttataaaaaatacacacctacacccacgtacacatgtatttactaaaatagtattaggctaaatattcagttgtacagctttctgatttcattaacaatgtctgtctttccgtgtcagaagagatagacatttgaaaaaacggcagcgtaggattttgttctatggatgagctaaaagttctttcacctgtccacaaacttccacctagtccgtgtgccttataaaacacaaattctgaaatcccatgtaacgtgtcagctagattctgcctatcactgagtagagatgaaccatcacatctcatgttctagatttggggttacaaattcaaattcctacaggggccaggcaactgtcttagatgtgtgaaacgtcctagatataagaaatgcctgtaaatgaaaccttaagagtttttataagcatacaaataagtatgtaatattttgaaacatacttattttttggtgtacccacacaggcctagcatcaccagattcttctctctttttttttttttttgttttgccccaagagaggcaggaaatgagtatatttatgggagctttcctaattgtgaagtgttggtaagttcattatttttaaaaaactaaaaaccaacttgcaggccaaacaaaatgtgggccaccaatgtgtaatcactgatgtagataatgcacttcaattaatctaaaatcatcaactattttggcagccctctcagactgctgactcactgagcttttcatctgatgaaatccttaagtgattcacaaatacttaatctgaaaacctcttaatctaacttgtgttcctggacttgtaaattgggtttctggaccttaatacttgctcatgttaaatccattctgttacttatgtttaaggtcctacatctgtcttccagcctgatcacccatcttttcagccatgtgttgtttttgaattcaactcatttgatcctttctctatgtcctttttttttttttttttgagacggggtcttgctctgttgcccaggctggagtgtggtagcacgatcaggactcaatgcaacctcgacttcctgggcttaagcgatcctcctgcctcagcccccacaagtggttgggactacaagcacgtgccaccacacctggctaatttttttgaattttagtagagatgaggtctcactatgttgcccaggctggtcttgaactcctgagctcaagtaatcctcccagctcagtctcccaaagtgctgggattacaagcgtgaaccaccatgcccagcctctctgtgtcttatgataaaaaaaatactggatgagacaagactgaggaggaagacccagggaccctttttagcagagcttaccagcgggtgtccaaggattgaatttcccttcctagacatgttttgcttcaactaaaaagatatatatatatatatatatatatatgatgtatatcacacacatatgtgtatatcacacacatatgtatgtatatcacacacatgtgtatatcaaacacatatgtatatcacacacatatgtatgtatatcacacacatatatgtatgtatatcacacatatatgtatgtatatcacacatatatatgtatgtatatcacacacatatatgtatgtatatcacacatatatatgtatgtatatcacacatatatatgtatgtatatcacacatatatgtatgtatatcacacatatatgtgtgtatatcacacatatatgtgtgtatatcatatatatatatgcatgacccatatttaaaagtaggatatttcataacgaaataccagtattaggtatcttttgaaaaagtgtcgtaactgacagcccaagtctgcattccttcatggcaccagggctagaactgagaagtagctgactttttggggtggatatgggctcccctagtcatgctatatgcctcattttatgtgactggccgggccccataggcgtttatgtttgccactcttttagaggtccctttaaggttgacatatattcattgattgatcaactcatttacacacgcatgcagtcattttttggacccctgtctatgtgctctgcacaatgcgaggtgtgggatataatggtgaccaagacagattccaaccactcactcacagatcccacagcctaccagggaagccagatatggaacaattatatacgtaattttacttgtaagtgccacaaagacaaattgtattaagtagtaccatgtggctgtggaagtttaacttgtcactaatccaccaaactctgagaagacagcatattttccgtcattcccaaaagactatcacaggcaacattgaggaatgctttgttaaactccagggatatattccacatcacacttcccccgtccaccagattagcaactgtccaaggacaaaacaaaacacacactaaaaaggaaatggggttagtccgatatgtctccatctccttatgctggttcttttgtctgcagaagccacggtttctttttctttttgaaaaaaaaaaatgacatttgcgtacctctctgcgtttctctttctccaggattcttctgggatcctaggcagtgtggtttggtgatctcactggtgagatctcttggagccctggaatgcaattcatctgggccagaagagttgaactaatttaaggacatctgagtgcttcactgatgtatttgttctgctctgtcccttcaaaataccactactcaaaacaatgttcagctggagaaagtggttaacactggaattttctttttttctgagacctaagtgacagggaagggtggatgaaggaaacatatcctttgaaaatcctttagttagaatcctttggttgcaagtaacataaatgaactctgattaatgtaagcaaaaaagaatttgttagaaggatatggggggggagggatggacagagatgtgaaggaaaagatgaagaaccaggctttagaaagtcctgaaaccaaatgaattctagggatctaggaagcagggactaatgactgtttccttcaggacaccagagatggggtgaataactctgtaaaagatgcaaatttcccacctgggtaacatagtgagaccctgtccttaaaaaaaaacagtagccaggcacagtgcctgtagtcccagctatgtggaggctgaggcagaaggatcacttaagcccaggagctcaagactgcagtgagctatgatggcactgctgcaccccagcctgggcagcagagggagaccctgtctcttaaaaaacaaatgctaaattttagagagaatagagagaatcttttcttaaaaaggtgctaagtctggggaaggagcttctgattgtcctgccttgagtcacacgaccatctctgacttgttgacccctctacaatcccatataagactccccaagagtagattctgagcaggtaaagcccatgggtgttcccaaaagtcggcctcaacctgaagccacttattcactctgagctcatcaccaatggcatgccgcactgtcaaaactctctttctgtgcatttgtctgggccactcaactcaggaaagttagttgttctgtgtgagtccccatgttctcactgatttcatttcagtctttaagctaaaaatctgtgtaaatggtaatggagaatggctacatcacacttagtatgtgtcaaagcagtatcctaagtgccttagtggtatcagcttatttaagactgacagtactctgaggtgcagtcacttctttttttttttttcctttttttcaaaacagagtctcactccgtcatccacactggagtgcagtggcatgatctcggctcaccgcaacctccgcctcccagggtcaggtgattctcatgcctcagcctcctgagtagttgggactacaggcatgcaccaccactcctggctaatttttgcatttttagtagagatggggtttcaccacgttggccaggccggtcttgaactcctgacctcaggtgatccacccacctgggcctcccaaagtgctgtaattacaggcgtgagccaccgcacccggcctgtcacttcttgtcattcacagtagttatgttctgtaaagtcactgcaaacactgaattaataaacactgaaccattgttcctaggtgaaatacaaagttgggttcctgtgagcctttggtcacagcattttcatccactgatcaacccgtaagcttattctgtgtgtgtttctgtttaaagacaccttaatatatattgttgactcattaacatctaactcactgccaacagcactccaactcgtgcctgatcaaagcttatataacacacgcatgacacatctcggactccttgcacttaggaacaccagatagcacttcaccattaccctatgggaccattttacagcaacgtcaccctcaaaaagcagaaaaatgggaaaaagcatgctgctaatataccacagagagaatgcttgtttacagcatgagagctgaagtctgaaggtagaacatggttttgttcatcctcagctgggaacacatgttggctgactcaaatattttgccactccgtacatgtccgtgagtgatcatgaaagaaccttgagtatggatttggcggttataaataaattttagcaagaggtgaatttgcaaataatgaggattgactataacccctgttattagctctagttaacagatgggggaatggaggtaaacagctctctgcaggtcttgcagccagggagtgtagaggaggctttgtcattctgggtgcacagcctgcgtccttaagaggcaatgtagtgttggctgggtgtggtggtggttcatgctgtaatcctagcactttgggaggctggggtgggtggattacttgaggttaggagttcaagaccaggctggccaacatggtgaaaccccgtctctactaaaaatacaaaaaaatcagtggggcgtggtggcacgcgcctgtaatcccagctactcaggaggttgaggcaggagaatcacttgaacttgggacgcggaggttgcagtgagctgagagcgtgtcactgcactccagcctgggcgacagaatgagactccatctcaaaaaaaaaaagaggcagtgtagtggttgagtgcagtgtagctcctgctgagagctggttttcatgttttgtgggcacacaggaagtagagaatgctgagagctgggcactgaagcagtaggagatatgggagtgggaaagtggttttctttagtaagtctgggctgttttcatagcctaggatgaagttcagcaatactcaaccttgaggttttccaggcaccttctccttgacatgaatctcctgcaaacagatgtcatagtaatctgggaataaacctttgttgttggtcctttagctatccttttttttttttttttttttttttttttttttttttgagacggagccccactgttgccaggagtgcagaagcatgatctcagctcactgcaacctccgcctccccagttcaagtgattctccagcctaggcctcccgagtagctgggattacaggcatgcaccaccatgcctggctaagttttgtatttttagtagagacggggtttcaccatgttggctaggctggtctcgagctcctgacctcaagtgatccgcccgcctcgacctttcaaagtgttgggattataggcgtgagccactgagcccggtgccctggtcctttagctttctaagacagcagcatagtagttcagagcataggctcttgggccatagcttcctgagttcgaatcctagctctgctgttttttaaactctgtgaccttgggcaagtcttaacctctctgtgcctcagttttcttgtctgcaaaatgggattaataaaaacaccgatctcataggattgttgtgaaaatcgagtgagtatgtttatagtgtttaggaaagttcctggtacacaagacatgctctgaaagtgtattaatattatttgtccttagactcagtagtactctgggggaatcgaatccccacccctaagccaggcagcatggtagaagctaggtcagctggcaggctcctgggtcttttccattctgctgcaggagatgcctgactcacctcttgtgctcacacagatgacagctaaatagaagggctctttcctcctagtattagcttaattataggggctccctagaacagtggggaaaatgagctttgagaatccccccaccacacacacaaggcccacactagcacctgaaagaggagtgaacattgcttcctgcctccttctccccctccttctcacatatgcctttgtctctgtgattctgcacgtttaatttttaatcccgggatgggttctattagtttttgtgtattttctctgccctggtttgagctccaaaaggtctgtttgggtctctgtgggtgtctgacagcctctgcaggcctttctgaattatataactcaagctttgtattttctatttgttactgggggttctttctgtgctataattttactcttagaaaatgaagtagggtactagaattttctctgggatcccctagggtttccttctgaatattttttcctgccatattttcttcgctaaaacatttttttttcttatttcagaagcaatacatcttcattatagaacattacaacaagatgcagagaaagaaaataatcttatcaagcagaaatgttaataccttgctatctacccatgtctctctgtctctgtctcctcaaacacacacaaatggggtcaagatgacataagagactatctgcttttcaattcacattttacgatctttttttttgtatggttctgtagtctccactgcttggcttgacgatctttaacaggtgccctccggatggtcatgggggtattttccatttctcactgttacaagcagtgctctgatgaaacaccttttgctggcattcctaattatgtcctgagagcagacttctagaagttttcagcagtgaggttaaagggaatgtttgcctctcctcttcactctgtgatgctcctgggggcccaggcccatgagtctctgtgtccatcttcccaagatgaaagacaaagaatgggcagagcattgacagggccctgtgttgactccttttctctcttttcccagtttttttttttttttttgagacagagtctcgctctgttgcccaggctgaagtgcggtggcgcggtcttggttcactgctacatttgcctcccaggttcaagcaattctcccgcctcagcctcccaagtagttgggattacaggcactcaccaccacacccagctaattttgtatttttaggagagacggggtttcatcatgttgcccaggctggtcttgaactcctagcctcaagtgatccactcaccttggcctcccaaagtgctgggattacaggcgtgagccactgcaccctggcccattcccgttttttaaaaaaatattttattccttttagactatttagccacagttttccattctattccttgggataagtgaaaacttgatttttaaaaaataattacaaaattttaaaatcatggtaaaaaacacataacataaaatttaccatcttaactatttttttaagtgtacagtatcattttaagtacatttacattgttgtgcaacagttaggacttttcatctcgtaaaactgaaactctatacccactggcaataacttcccatttcttcctccccaccgagcctctggtaaccaccattctgcttcctgtttctatgagtttggctattttagatgcctcatgtaagtggactcttgcagtatttgtcttttcatggctggtttcttcctttttttcttttcctttctttctttctttctttctttctttctttctttctttctttctttctttctttcttccttccttccttccttccttccttccttccttcttcctttcctttctttctttcctttttttttttttttgacagggtctccctgtttctcgcaggccaggctggagtgcagtggggcaatcacagctcatggcagccttgacctcctgtgctcaagggatcctcccatctcagcctcctgagtaactgggacttcaggcacacactaccatgcccggttaatttttttcttgatttttaatagagacaaggtcttgctatgttgcccagggttgtctcaaactcctggcctcaagagatcctcccatctcagcctcctgagtagctgggattacaggtgcacactaccatgcccagttaattttttttcttgatttttaatagagacaaggttcttgctatgttgcccaggctggtctcaaactcctggcctcaagtgatcctcccacctcagcctctcaaggtgaagggatgagcctcccaaagtgaaggcgtgagccattgctcctgggatgactggtttatttcacttagtgtaatgccctcagagttcattcatgttgtagcatatgtcagaattttcttcctctttaaggttgattaatattccattgtatgaataggcaacattttgcttatatattaatcggtcaatggacatttgagttgctttcacctcttggctattgtgaataatgctgttgtgaacatgggtatacaaatatcttttttttttttttttttgtagagatggggtctccctatgttggccaggcttgtctcaaactccttggcccaagcaatcctcctacctcagcctcccaaagtgctgagattacaggtgtgaactactgcacctggctgagactccacttccaattcttttggatatagatcctgaagtggaattgctgatggtagaaactgtctcgggaagatttttctggggatttggcttctaactgcaccacagctccagtggaaacatctattcattaaactggcatttattgaggaccagctttgttccagtcactgaacaaggctgggggcatagcgtggcttacataggtccccaccctccatggagctgatattcagcaagaagccagacaatacacaggtaagcaaattgaaaaaaacaggatgagatccactggcgataaatgtcatgatactgaatcaggatttgacaacagagtgatgtggtgagtggctactttagatcagaaaggccttcctaactgggtgacaggtgacctgagaactacaaggtggggaggagctagccacacagaatttgggaaaataccattctgggccctgggatgagcaatggaaaggtcttgaggaggaaagtggctaggcgtgatccttgttgctggggcgtggtgggtgtggggccagatcataaggggccccacaggatgagcctctgtgctaagtgcagtgggaagccactggagagttttaggtaggcgagatgcaaaggatcagatttgtatttaacacaccttccattggctgccaagtagagaatggattgttggggactggagcagaagtgggaggatgagtcaggagtcaattgcagatttctaggtgagagatggtgtctttgtctgcacgggcagcagtgcagagggagagacacaggcagatttgggaggtaaaaggacttactggtaaatgggatatgaattggaagagggaagcaaatgcacagctgggcacctggtacactttacatatgacgtctttgaacttcgtagcaatcccataaccacattttgtagatctgtgttgtccagtagaaatataacatgagccataaacctgagctgtgtatgtaatttaaaatgttcttagcaatcacattaaaatggtcaaaggaaacaggtgaaatgaactgtgagaatgttttctttaactcagcatattccaaatattcccatatcaacatgtaatcaatataaaattattaatgagatattttacttccccgcatagcaagtcttcaacatttgatatgtattttacacgtacagcacatctcaattcaaccacacttcaagtactcagtagccacatatggctagtggttaccatattggtagcacagttatagatgaggaaagagagtctcagagagtataagttcttatgcaagcttatagaattaggacttgaaccctaatttgactctggcacccgtgttgtgctcaaagcactgcatccacccccaatgatgaagacattttcaatgtaagcaaaagtcctggagatttccccacatcatatacatggggacataggaactaacatttgtcatatatttatattttcctttccaaagcagatcaaccccaagttaccttcccttagctctcgttttctgcctctctttgcaaatatcacttcattaaaaattgtgaacattctctttgccttcccttatgggcttcctgtttgaacaccacatccagggcaccctgggaactgaaccatctccttttctttttctttttgagtcagggtttcactctgtcgcctagactggaatgcagtggtgtgaccgtagctcactgcagcttcaatctcttggcctaaaacaatcctcccacctcagcctcctaagtagctgggactacaggaacacaccaccatgcctggctaatttttttatttttattttttgtagctgcaaggtctcactgtgttgcccagactggtctcaaactcctggactcaagcagtcctcccacctcagcctcccaaagtgctaggatgacaggtgtgagccacaatgcctagcccatatctccttttcttttgtggcattctagtagccctttggttcatgcgatcatttagttgttcagcaaatatggatgattgaatggatataataggtgcagggcactcccaggttctcaagatggatgatcttgggcaagttatttaatttctctggattttagtttccttgccagcaaactcaagataatagtaatgcctacttttaagtagttattgtgaagattataaggaattaacaataacgataataataagtaataatgatacatgttgtttattagagcctgctatatgccagacactaactctatgatttaaccttctcctgctaccctttactcttattatttctttaggagtgaaattcactaatcattaagctttttaactaactgaatcaattctgtttcttaagcagatgggagatcctgtggctttttaccactatccacagctctttttttctttttcttttcttttttgagacggagtcttgctctgtcacccaggctggagtgcagtggcatgatctcggctcactgcagtctccgcctccctagttcaagccattctcctgcctcagcctcccgagtagctgaggttataggcgcccgccaccacgcccagctaatttttgtatttttagtagagatggggtttcaccatcttggccaggctggtctcaaactcctgacctagtgatctacctgccttggcctcccaaagtgctgggattacaggcatgagccactgtgcctggcctatccacagctggtttcccctctttgcccccttttctggcattctcttctgattcactctcaactctgatttccaagctacccagctccttcccctagtgtgaatctgtatttgcactggatttatttttaaatgggaaatgaaagccactgtgtgctggaaaatatatatttcagacacgaggaagctggcggggaaatattttttggatgtctttctagatctcttaaaaatcctgtgagccatcaccaggttgatcttgtagtaaggtggccttggccttagtgtatttctttttgactcgatattgggcggcaggaggtttgaggattgtgatactaacaacattaacaacaacaaactttcattgattgattgccatgtgctggaaatgtgctaataaattacatttattttctctttgaatcctcaaaccaactctttgagacaagtgtgttgtattacagctgtagaaactgaggtcctaagaggtcagtagatttgctgaaggtcacagagctgagatccaaatctaagcatcacagcaagaagtatccttaaccatcatctttgctgttggttggcattagtctggctgtgctaagaaagtttcctttgacttgcagatggatcaaggcttttcttgagagaggcttctcttgcctggttctccttgattcttttactctaggagactcagttcttctcaaatccctgtctgtgggactttgggcaaaacattcaacgtcatctttacctcttagagtcactgcgagggttggactatggtgtgttaggtgttttttttttttttttttttttttttgatgaagtctcactctgtcgcccaggctggagtgcaatggcatgatcttggctcactgcaacctccgcctcctgggttcaaccgattcttctgcctcagcctcctgagtagctgggattacaggcacgcaccaccacgcctgactaatttttgtatttttagtagagacgaggtttcactatgttggccaggctggtctcgaactcctgacctcaagtgatcggcctgccttggcctcccgaagtgctgggattacaggcgtgagccaccgtgcccagccgtgttatgagttgaacagatttcttggcttcagcaggggctcagtatgggcctatcatcattttcatttatctccttttatgcctcatgctctatctgtccccttcatctctgcctgtagcagccacagaccctctctttccttggtgcatgtccctccttcccactttcctaatttcagcctgacttagttctctacctgtcagcttggacttaaggaaaggaagttctcttttcttggggggtcactggggccatgggcgtctttccactccatttcttttccaaagctgcctctggaacgaatctgtaaatcccagggcattgcatgagttttcttttctttctttccttctttctttctctctctttctttccttcttgctttcttgctttctttcttgctttcttgctttctgtcactgaaagcaaatattgtagacagatatgcttgtaggatagaaataaaatgccccattctttgaaacatattttgttttttattttagattcatggagtatgtgtgcaagtttgtcacatgggtatattgcgtgatgctgaggtttaggcaatgaacttgttacccaaatagtgagcatagtacccagtaggtagtttttaaaccgttacccccttctctccctcctttccgagttcccagtgtctgttgtttccatatttgtgtctgtgtataccccttgtttagcttccactataggtgagaacatgtggtatttggttttctgtttttctgtgataattcacttaggataatggccttcagctgcatccatgttgctgcaaaggacatgatttcattttttttatggctgtgtagtattccatagtgtatatgcaccacattttctttatccaatccattgttgatgggcacctaggtggattccatgtttttgctgttatggacagtgatgcaataaacatgagagtgaaggtgtctttttggtggaatgatgtgttttcctttgggtatatacccagtaatgggaatgctggattgaatggcaattctatttttagttctttgagaagtctctaaactgcttcccagaggggctgaactaatttacaatttcaccaacagtgtaagagcgtccttttttctccgtaatctcaccaaggcactgcataagctatctgagtggccagcaggcagaatgcttgaaggattctccagctgggggtgctgggcccaaaggctggcagctgtatggtcctggcctttttctctccagcagggtccccatgatcttcccaggtctagttttttcttgagcacacctgcatctgacagttaattgcaagaatctgacttgctgaactctcatttctccctcctcctttagcgcatcaagtccccttctttgttttcccagcttggttcttgcaaggactacctagaggaggacttcaggcaatccctttctccctggtgggctgctgtgttctcaccaataaatcaatgctctctctagtttcaggctgcctcttaggacagatgctgataccaagtgacttttgaggttgttgagttgagacacttggaccaaacagcggaaggcacagcttggctcagctaaaggaagctccgtgaaagctctctgagtgggcctattggctccatgagttggcaggctggccctcctctaggagatggtgggtcctcatgggctgtagcagggccaggccacaggagcagactgctggaggagaacatttagggccatcttccttgctgcctttctgtgatctcttcacccaggaagctgaatgctgttggcaagcaaaagggtgcttggtaaccatttcttttttaagtgtgtgctggtgccagggagggagaaatcctcaaaacccattgtgtctgactcaggcaccactggtttggccataaccgctagtttatcctccctccctctgccaccctcgtcatgtttctcgaccacaacctgtctggaccttccctgggttggccagggcttgataatctttttctgtaaggagttatcccttcctcatctgccaggatggggctactgtgcagggactgggtaacaggcttgaagttgcaagagggctggaagggtctcactagcaagcacacattatgtcttatataggtccctggccttgtgcttcagaccctatcacagcttttccacagctggggctgttgagaatgtaagtggtgacatagctggatggctaagatggggggagtatgagacctgcaagcgtgtgagtctccttttgctagcagagtgtgaatgaaatgtatttattttcccaataaattcgacatgactgatcattcatccacccacttacccacccatctactcactaacccacccactcagtcatctacacagctgttcactcgtccatccatccatccatccatccatccatccatccatccatccatccatccatccgtccatccacattcaatgtagtgtaatgattaagagcatagagtttggagttatcctgcttaggtttgaatcccagctctgccactcaccaagcatgtgatcttggttcagttttaaaacctctccttgtctcagtctcctcagctataaaatgagattgatgttgaaattaataacagagcctaccttacggcattataaaggttatgtgagtcagtatgtgtaaggtgctttcagtagtgcctgggtcatagcagtgctatctaagtgttagctattagcattatggcatctactcacctgtttatcatctataatagtcattaaaggtcttcaataaatatttctggtctttggccttgcaggccaatggtaggattgcactgcttgcctcccttgtgggtaggtggggccgtatgagtagctctgaccagtgagttgtgatccaaagtgatgtatgttcacttttatgctgggacatgtaattgctggttctagattatccagaaaaaatctttgagttatggctgctctatcaacttgctcctggagacatagaacttcttccttagctgatcaggcatgaggctgtagtatgtgagaaaaacaaacttttacctattttgagggttattactgcaggataacccagttctatctctgtctctctcatctatcatctatctatttacaataattccagtctcattttatttcccttcccttttctttttggcacctattactagctggcattttcttatattttttggagtttcctcccaaaatttatttgttattaattataagaatatgttttccatgagaaaaaggacttattcacttatctaattccaatagttagaatggtactttacacatagtagacactcagcacatatttttaaaacaataaatcagttaatgaatggatctacttgacttttagtaggtcctattgaacactgcattccacagctccttgaaaatccttactgaggcagctaatatttaagaaggaacaccctgacctttcactgtccagttttattgcctgaatcaagaaaaatatccctgagatagacctcactgcctctctgcaaacctcttaatacccttagtcaattgtaagaagctgcttggaaccctgtaagatggtctttggccagatcaagtcttgctcctcttcctctgaatcttgtaggggcctttaatctttctgtaactgtgattccccagaacaggatgcctttgttagcctagcatcttttctgttacttctatgaaacaaggagagacgctccctgggacccttaactatttctggaagcaaaatgacccttgccccactgaagacttaggagcctggtcacttccaaccgggcttttcatctttgtgactcccagtcatgggcaagaggctagctagctccaatcctaatgcccgtgccatcaactgcttcatttctggtttcttccttgcttttgtgataccctcattgactctttccactgtaccctgtggacttgcctctatgggacacttcctccccatcctgcctgaagaggaaagagcctgcctttcttctgggaacatcatcccattcagaaacaacaacctttctggagtcaggagtttgctttcctcttgttctttattgctgcttcctggagattgcattcttgtttaaaagctcacctgtaagactctgatcaaatgtccattcttccctctcacttcatccctgaagatgaatgggacatttatctttatatatgtatgtatgcctaggggaaaaaactgaaggaacattatgtatatatataatgcgtgtgtgtgtgtgtgtgtgtatatatataatgtgtgtgtatatatatatataattttttttgagacagggtcttgctagactggagtgcagtggagtgatcatggctcactgcagcctcgacctcctgggcttaagtgagcctcccaactcagcctccctagtagctaggactacaggcatgtgccaccatacccagctaattttaaaatttgtatttattattatttttggtagagatggggtctcactatgctgcctgcgctgttcttgaactcctgggctcaagcaatcctcctgtctcagcctcccaaagtgctggaaatacaggcatgagacactgcatccagtctatgatattcttatgtttttacaatgtgcttattattgagtagggaaattatgagtgatgtgtgtgtatgtatgtgtgtgtatacagatgtatgcatctgtgttcaatttttcctgttgagagtgagtaaacaaatatttttgaaaataataaaatacataaatgaggggcaggggctctcttggacacttccaaaagtactttgctcaattttctatgttaggcctatctgcaagaagcataagggtttgtcaggagctattatgattatttattctacaaatcccagttcaacaaagaagggtgaggcttgagtgttcaattagagaagctggccagttgtggtatcatatcagctctacatccaatgctcagttttcaaggggtcatgttgctctgaaaggcctggtgaggttgatgagtgtcttaatgaagccacttgtgaaagataatgtgacatgtttgtccatcacattgacgcaggaaaggagctttcacaaaagacagcacagaaattttgcaggctcggaccagaagggaatttgtcagtgtttagcttggctgacatcccacaccctaccttcttgtgcagttagaatcccttctagtgtaatgtgtgaaaaaccataggccccctgcccacaccctcctagagctgtatcaccaacagctttcaagtgtgtgcaaattgggagacggctggatcccacatctctgggtgacatttgctgaaacaaatgcctgttaataagtggcacgattcccttggtctcagtgataaagatgtacctgttactgggagcccttgagagaaatctttggtgaaggccttcacactcattttaattggtgatagacagatgtgttgagaaaacttacattttttttctccatccgtctcaattagaatgttatgaaatagcaccccctttgctcttcgtgctttatgccctagactttaaagactgacaacgagtggttaaaaaatctccattgcttcaggatgcagtatcagctgatttggtggattaaatcgttttaaggtcctgagctttaattcttacttcagtgattctcaaaccttgttttgcaaaaccccagagctttaatcttaagggatgagcctgctatttccaagacaacaaaattatttctacttcatattaatacaaaacattaaaatatacattgtctttgtaatatagtttattaattcaaagcacttgcattcccatttatctggtcttcatacaaaaccatgtatgagtgagtaggcagatggtcttatttattacttcgttcaatatatagatttttgagtgcctaccggtatacagcactgaacgaaagagaaaaatactagtttggatgggagctcaacacaatctgaggggatatattggacccattttgcagaggaagaaactttggttcaggaagggaaagtgaactctgaagtttgacataaagttagcttcagaactagaatatctgccttctgatctcagcctatcacctatctcaggttctgtctccacgataccatgtgattggaactggctcattaacctggggatggatcaatcagcatcttttttttttttttaacaggattggatggaaatctgcattccttgatcactcagtctatagggtgaacttacaatggccctcatgcttaatcttgaaatacagggatggtctgatggagtgtgctggagaccctgctgagatctttggacaactcctctccagtccactacctgaatcctttctcttctcctcaaaaaaatctgagactatccaaatgaagagtaaataaagggagaagtaagaaggaaacatgagacagagaggcagcaggagcagaatgaaacttggggagcagagggagaagccaagaaaacttactggacttggagccaataaattggccatggcatgaaggtttctgccagcaatatggcagcccattccagctctttccattttcttttcccagctgtgctgccaagcaccatgcttaggctggtttaacagagattatgctaggaggattttctaacattcatgtcctgattaccccttatctgattccttagcagtagccttcagtggcctcagagaattccaggttcagctgtctgaacagttcaatgactgtttgtaagttctgacttacgatcaaggcaggaaatgtgaaaagcatttttaaaaaggaaaaaaaccatccggcgttgttaacatttttgttattccagtattttcccatgcatataaatatgtgtacttcttttatttttcacaagagtactctcacaccataatattgttttataaccctcttttccactgtgctctagtgtaaacattttactgtaccaaatctttttccacaaaaggatttttaattactgcatagatttctattgaacggatgtactaaaatttacctaaacagctcttattattcaacatgattcaaccattgttacaaataatatagttgtatatttatctttatggaaagctatttctgaatactcctaaggataagttcatgtattagttaggttttgctgtgtaacaaatcatcgcacaacttagtggtgtcaaacaatgactatttacttacctctgcaggtctgcattttgggccaggtagttctgctggactaggctggaatcagtggacataggctctggttacttatgcatttgcaatcagctgggggactgcatgggatgatggtggtatgtcatcttccagcaggccaggttgtttccatagcagttagagttgcaagagcagcaaggaggcaaaccctgatgcacaaactttttttcaagttttggttgcatcacatttgcttctgtcccataggccaaagcatgtgacatggccaagcccggagacagtttgagaagacattaccaaaggcatggctacaaaaggcatgaaagtctcaggaccattgttgtaatcaactcatcacagtccccaaaatgggagtttctgggtcaaaaagtgtggccatttaaaggttttcattgtcacattgctctccagagaaattgtaactaatttacacaccacctagagtacatgcatttccaaattcacttgatcactggatataatcattggtttaatttccccccagaaaataatattattgcttttgaagagtacatgctttgtgagggaagctgtcttgaatgtccagcttccaggtgcaagcgcctgcatgtgtgcacaggtgacaccatgtagaaccgaagaaccacctggctgagtctagccaacccagagaattgtgagggaaaagaatatttttttaaggcagaagaaaaatgtatgttcattgtaaaaacctgaagcaatgtggtacctttatcatcaatatcttccccagtatttgattcattctgacattatgttgttgggttacatttatttctattacatttaggacctttgagtctatattcattagtgaaatttgtctgccatttactctttttttttggtttgctgtctttgacaagtttttgctattttcatcaaaacatctgggaagtcttccatcttttcttgttttttaatgcttaggaagagcataaatggcaaaggatttagaatattttttagaagtttgagtggatttaccatacccccaaagcaaaacaatttctgggcctggtgccttttccaagattagttatttgataattttttctggtgtatttcatgatcatttttggtatactttcaaatgtgttatgtttttttaagaataagcatttaattgagtctctaatttattagcataaaactatatatattgtcctgtaatgatgtgaaaaattgccttgccatctgcaattctcttttctcattcttactgagttcctatttttagtttttgaaaattttcttatgagctttgccagagtgtcactgttttatttttcccctcaaacaaccacctcttaaatttattcttcagttcaacttttttctgtttccagatgcattaatttctgctttttaattatttcctcagttttatcactcttcctagtttcttgagctaaatgtccctatgtactttcaattatatctactgatttgtcaaaaattggatagtatgctcgtctcctactatgatagtgatttttcaacacctttgtatttttttaaacaaattttgttttgtacatttctaatgtacttttatgttataggagttagagtttcatgattctccagtcttattgtgaagttactcagatctgagttcaaattctcctgtgctgcctaccaaatgatgaaccagttttagattctcctaaaagcttggtgataataatgccagtgttgcttatttttaatacttaaattaaatgatataattgatgttaagtgctcatcatagtgccaggcacatggaacacacactgctattggttatattgttattattgatgtactctttatgaatacaaaatatccatctttgtcctatgtaatatttttatgctttacattttatttgtctgataattaatatttctgctcatggcagcttttcccaccttttcattttcattttggatcattttattttcagcaagtctcatgggaaccatgtatatttgaattctattttttctttaaattatgaatctttgtcctttaatgggataattcaatccattcacattttttttttttgcaagacacagcatttggcaagtgtttacttctttcttctcccaatccactttcctgcctttgaagattttagaaccagaatttatgaaaaaaaataaatatatttgatttcccatgaattgctattgacacatgcattatttcatgcaattcaagacttttttaaagatgtgactctcaaacttacttcattactcactttttatgttttttggacccatttccctcttattgaattaattgattgattcattaattcaatcaacaaatatttattgaaaacatactgtatgcagacactgtgctagggtctgagagaaacgtatttgatgtaaacctggtctgtgtcttcactgaatctacatttagattcacaaaattagagacacaaaaatagatgacaaattaaagcagatataaaggaaaccaataagggtctcaaggagagattagtgaacgtgcatgtgagtatctatttagcaagtttaatgaggggatgctttttgtgaaggtgacatttatgctggcagcttaagaagtggcattagctgtgtgaagagaggaaggaagaaaggcattccaggcagaaggactagcatatgcaaagggcttgaaaggggaaagagccttatcctaatgttttcatagaaattatttttaaatactcaacaattagcttttgaattaaaggaatgcacacaagtgaagttaatctcttataggcaaaaccaaatgaaggattggaaaatgcctctgaagagtcagctggaaggctcttcatccatccatccaaccatccatccatccatccatccatccatccatccatccatccactcatccatccattcatccatccatccacccacccatctacccacccatccatccatccattcacccacccactcatccatctatccattcatccatccatccaataagcagtcattgagtgcctactgtgtgccagaccctgtgccaggtgttgatcacaaataatacaagcacctcctggagagtagagcctagttgtgtacatgggatggagggcccatgataataaagctggtacttctcatggagtgggatgggccaggggcatggggaaggcacacgtgctgtgctctgtagagctctgagcagggagggacgcagtgggaaagagctgagaacaattcctgccagatggctttattctttcccctgaaggaagtggggacttcgtgctgtgacatgatacacaagaacagtgtttcctgtgggtttgcaagggcattttgaatataaacactacagctcgctgatgtgtgaaaaaattattttttttgctttttcagactttgtgaagggataatcagatcaattttataagtctggaaaacaggtatttggggtgaattttaatgcacacattatagtggctggaaccctaaccaaaggcagctgtcacctgttggtgggttctcttaggcacgttgtttgttcatctagctgtcacctggcagcttatgccctccagttcctggaactgaccagttatctgcaactgactaagttctggtactggatcctgtgtgatttgactctaacctccaagaaccttactgtctttagctgtgaaatgcggagaagactggactacttgatctctcaacactctatatatctttaaagttaaatcatttgttcagtcatttgccctttcttctgccatttctctttccctctctcccatccatccatccatccacccatccacccacccatccatatatctatttaatatttatattatttatgttatttatttatttatttattttgcaatggagtcttgctctgttgtccaggctggagtgcaatggcgtgatctcggctcactgcaacctccgcctcccaggctcaagcgattcttctgcctcagcttcctgagtagctgggattacaggcacatgcaccaccatgcccggctaattttttttttttttttgagacagagtcttgctctgtcgcccaggccagagtgcagtggtgcgatctcggttcactgcaagctccgcctcccaggttcacgccattctcctgcctcagcctcccgagtagctggaactacaggcgcccaccaccacacctcgctaattttttgtatttttagtagagacagggtttcaccttgttagccaggatggtcttgatctcctgacctccagtgatccgcccatctcggcctcccaaagtgctgggattataggcgtgagccaccgcactggaccctgtctaatatttaattgagtgcctgttgtgtgctaagtactgtgctgggttctcatccagtggccagtaaattagacaatcctcccatcatagagcttgccatctagtagggagacagacaagcaaataattacacaggtaataatacaattacagttatgataagtattacaaatgagaagaatggggtaggtgagcatgtgtattaaggctatcggtctcattttgagggccagagaactctttcttgacaaaatgaagtttaaacaaaaactaggtgaagattggcagaaaagcatcccaggcagagggcacagccagtgtgaaggccttgggataggaaggggcatggccacatcaagggaggtaaaaatacataacaaaataataatatgagtaacaatggcaactactactgaaggaggaccgcctatttgccagggaccatgcgatccttaactgtgtggttttgatcaaatcatctaaactccttgcaccttggtctatgcatctataaaatggggtgatagtgatcgtgtatacttcatcaggttcttctgaggcgccaatgaagtaacgtctgggaaatccttaggtctatgcctggaccataggaagtgtttaagagacagccgttgtgactgttatttttatgaatggtattgggtgagaaaaagttcgtgttgcatctcagggcttgccttggaccctgttgatgatttctatgttgaggtcactcttggagtttctgcagaagtagaactcttggaagtctgctattcagcagatgagtgaaacaagtgcttctccctccgctcccacagaaagaggggcagagatgccagccacagcttggctttcaggcagcaggcacattgggatcagtgattggcatttgcaacattggttggcatcacagagagcatggaaggtcaaggtaataattatcaaggacagtttaagggaaacagtacattccattccttatccattgtaagaccagtacattccctgttctttaactcttgggaagacatctcccccagatctctctgctgaggatcagggccatttctctgttaaaaatgtcaaacagcaacttaccagaggaaacagaatggtggaaatgccatctcagcattcaagaagccccagtaccaaactttgcatgtatatacgtttgaaacaagctttgtaaattacttttgttcatttgtaattacttatccataagaactctctctctctctctctctctctctctctctctctctctctgtgtgtgtgtgtgtgtgtgtgtggtttgttgtcacctgggctggagtgcagtgatgcgaccatggctcactatattcaaaatcctgggctcatgcgatcctcccacctcagccttctgaggagctgggaccgtaggcacgtgccaccaggcccagcaaataaaatttatttatttatttatttatttatttatttatttatttatttatttatttatttattgtagagatagggccttgctatgttgctcaggctggtctcgaactcctggcctcaagtgatcctcctgtctcagcctcccaaagtgcagggattacagttaggtatggagagagaaggaaataaggaagacacagttattactctttaggacccataatttaactcaagtgattttgcccccaggtggtatttggcaatgtctggagacattttgtttgtcacaacttggggtggtgggggttgctactggaatctagtgggtagaggccagggatgctactgaacaaaatatacaagacagcctcacaacaaagaattgaccagtccacagtgtccacagtgccatggttgagaaaccttgatctaactgcttatgacataccacttccataaagccgagagatatcaattcttatgcagttatcactgtgtacaggaaattgtgtgtttgtacatgtgtgtgcatgaatgtgtagatataaagggataaaacctttatcttcctttcctaggtatttttacctctgtattatcaattgaaataatttgtttttgaatatacaatgcaaagtttgaaatcctacaggtacaacaaggtatacagtgaataaagaatctccccattccacttctgtcctcaagtcttcagttctctggaggagtactactgtcattagtctcctatatattagtagagagacattccgcatatgaaccttatacccttagtagcacctcacacatatttttttccttgttgcctttttttttcctatgtgatgacgtatcttagagatattttcatatcagcgcatatagagcagcctcattcattttaacagctgcacaggttttttttttttttttttttttttttttttttgtggctgtcccatacggtcttctgttgatgggcataggttatttctagtcttttgcataacaaacagtgctggagtggatctccttgtacctaactgtggacacacatgtgcaagtacgtctgtaatccaaaatcctgcaagaggaatttctaggttaagatggcatgtgcattttaaatttggctagagatttctgcagtgatgtctgatcctgtgcaccgtgcattcatcatgtgacccatttctagtccttcttgaccgccccctctcctatggggatcctgagctgatagggtcacttctgtctctcccccacactggaacagctctctctaatctacaagattaattttttttcctaatcaaaacacaattgccaaggatagtttgaaaaatattaattgtgtctgtcatcctggggctctgagcacgtgagcgtttgggatataatctttgcaaattgcctatagttcatacagcacagcaagagcctctctctctgcagccagtcctttatgatcgatcatacccaccccctctcccaatgggctgtatcctaagggtaagtagacagcatgggttctcttgcttaaaaaaaatcgttaactcaacgggggcgcctgctgcttgattgggagtatgtcggcatttagagcctgctggctgcaatctcactacgcagactggaagttgtggggtgtttttatcagcaggaaacagctttgagagcggaaggggagtgagagtagatggatagatgagggaattcgaagaggaggaagccgtgggagaaatgtcttcttttaaagacagacaaggcagatttctccagcccatctctctggaatgtcaagtaggaatgaaatgggaagttgggttaattctaccaggcctgcccagcaaccagcctgttcaggttccccaggagttgcagcctgttgtctgagactgtgaggttctcttccctgaagtgtcttgtgggaattggctggtggcagcattttctctgaggtcccaaaaattcgagtggtcaagaagacaccctgcaatgatcattccccaacattggaggccataaaagtcagtctgggtttgcaaatacacactggaagtctcagagctggtgcagacatctcagagctggtgcagacagacactgtggctgagtgtgtgtgccttgttcgttatggtttcactgctactggattggtacctggtacacagtaggcactgaaaaaatattcactgaaagaaagagaaaacttgatggcagttgtaggtctgggtctgttggaatttttacccccaggaagagatttgattttaactcaaagccagttgataaacagcctcacccagcagacagagggcagcttgggggaaactggagggtatgtagggtggggtggggctcttatctgtatggacaatgccatatattttctgaaacttggatttttctccttataagggagaagatccaagaagacaatgaaaaaacatttgcccctgcctttagaaaaaataaccttttaatttttggaataatttcagatttttagaaaagttgcaaaacatttacagagagttccactgcatacccctcacccaaagtttccccctaatgctaacatcttatgcaactgtgatgcctttgcccctaccattttgaggttaacaattaagttagtataatacttattctgtaccgagctctattctatatcattttcctgcagttgtttatttgaccctttcagcatcctttgaggaataagcactgttatagcagtccccattttacagacggggaagctgaggctcagctagactctagctagtgttcgaaacctaagttgtctggctccagtctctcacccctcaccattattatctgcacagtaatgatggtaactgtcatctcttgatgataatgcgttcaggaactgagctcaaaagtttttccctccctcccttcctcccttccttccttccttccttccttccttccttccttccttccttccttcctccctccctccctcccttccttccttccttcctttttttgagatagggtctcactctgtcacccagtctggagtgcagtgtcacgatcgtagttcactgtaaccttgaactactgggctcaagccatcctcccacctcaacttcttgagtagctttgactacaggcataagccatcatgtctacctaatttttagttttttcttttctttttttttttttttcctttttctgtagagacaaagtcttgctatgttgcatggctggtctcaaactcctggcctcaggagccctcctgcttcagcctccccaagttctgggattacaggtgtgagctgccacgcccagcctacttatgttatttctaaaccctcccctgactcagagctgtggtaaagagccccgcttttgttgtcctgctcaggacaaaaatacatggccccaggcttttgtgagtaggatccggaagggaacttaagtgtgtgtgtgtgtgtgtgtgtgtgtgcacccacgtgtgtgtgggggagtgatagagattctcctggtttctgtcctagttttttctaagcgtatggagacaggtctgctccgtacatctggggattggtattaccacatcatttcccccctaacagcagcaaagattctcaaagcttcatcagagcatgaacaatcagaaatgccttaattttgttagtcacaataaataatactttgattaattagcaagcacatgccttgggaatatgagaaagtaaatgatttctaccctagatctttcagatagctgggagggaagagagtattaaaatacgcttttaactatgggttttggatggagaagaggagaatgccggagaggggaaagcagcagtggaattgttcttggagataggagaaactgaaactctttccacccagggtctttgcagaaagtggttcccactgcctggaatactttttcttctctttacatggtgagctctcactctagtctcaacttaaatgtctccccctttgacaggcccttgctaacatcctgtttcaagttccttctggatattgattaggatggtaagcttcatgaggttaaggatctctgtttcatccactgctccatcctctggtgtctgcaacgacgctggcacaccataggcccttattaaatatgtgtcgactaaatgaatatgtggtcttattaaatatgtgtcgactaaatgaatatgtggtctatttcaagtcctcgtttgtgtctgccctagaacttagcactgtttgccattagcttgtctatttccttgtgaatagctagattccctcatgagctataagggccacgatggcagggggtgtgtctaccttgttcaccaagggtacccaggatgaacctggcctgcagctaagggggtgggctctagggtcagattacttgggctcaaatcccagatttcctatgttccagctgtgtgatttctgctaattgtcaagccactctgtgcctcattttccacataggtgcaagaggggtgataatagcatctatctcttggggttgttgaaagaattaaatatgtcagtattggctaaaacacttagaggaagctgggcgtggtggctcatgtctgtaatcccagcactttgggaggctgaggcaggtggattgcttgaggccaggagttcaagaccagcctggccaacatggcgaaaccccatctctactaaaaatacaaaaattagccagacatggttgtgggtgcctgtgatttcagctacttgggaggctgaggcagaagaatcgcttgaacccgggaagtgaaggttgcagtgagctgagatcgcactactgcactccagcctgggtgacagagcgagtcttcatctcaaaagaacaacaacaacaacaacaaaaaaccacaacacttagaagagtatctagcatatagtaagtgcttcagtgctttatacatgtcagttattggtagtactcaaaatatttgggatttaaaagttgggggatttttacataaaaggcacttttcctctttgagtggtaaaatctcccctaagaaagaggcaaggacagatggagatgatctgagaggcccaagagatccttaaaaccaggctttttaagaaatctgatgttttatttctccgtattgtcatggaaaaggccagcttttagcatgcctggtgtttctggtgttttcttctcttcactgttttctacatttctttctttgcattggtcctttttttttcttttttttttttttaataaaaaaaaaatagcacagctcggagtcttgcttgctgacttactgctagagtgtgggatccattgcttccatttagagaagcagccggccctggaatgtggccgcagggctgccaggctgactctgtgagctgagctggcgaggaatgcactttgcagcttgcactgagtttggccttacgtctgtggaatttcttctctcttcttactcattcgtgtcgttaaataaataacaacacaagcagtgcatcctcccggttataatggcaaacagtacaatgtgttacaacacacagtagcttgaagaggatatctctctcctgtggtagatgcttcattccccagaacttcactcctcacccccagaataggttgcccagttaacaggatgcctggttcagtctgcattttgggtaaacaaggaacacctttttagtataagtatgtcccaaatattgcatagcaccaacttatcctaaaacactatttgttgtttatgtgctattcaggtttaactgggcattctgtagttttatttgctaaatctgacaactccagagagtctcctagaaccagtttcctgtattttcttccagtaattttccaagcatgtgcaacctatggatatcttggcagacttactcctggtagaattcccatcacctagaacagtgcttaggacattgtaggtgcttaataaatatgggttgaatgagtgattgactctgtacccaccccatttttcttcacataagtggaaatatattatagtgttgtttcatatgtagcttttccttttaataatgtctcatggggattgatacatagagctgcctcatactcctctaagggtttcctagcattcccttttatgatgcataatgtatttaaccagtcccctgatgatcgacattggtgctgttgagagtctttagctattataaacaataaggtagtgagcattcctatatatgtttacctctgtgggtttgacgacgtgcaaggataggtgtcgcattggaatcatgaggacggaggatatgtgctttaaaatgtggattgatgttgctgaattgctttctgtacaggatctgttcacacttccctcagacagcttgttccccatctccttaccaacatagaatattatcaaactttttcattttgccaatctgatcagtgaaaaactagtatctcgctatcatcttaatttacatctctttgcttatgagaacatttttatgtttgaaagctctatttctttttctgtgaactgcttcttcttttttgcctatttttttctacttattgatttttaaccggtttttgtttgtgaaagaacatgtctgttagcctggcatatgttttatatataatgtaatttataaaattggtgtttaactttgaaaaagtgatttattatggattttttaaactctgtagacattaaaaaattcctcagtagtcaatttatgagtcttttcttccacatattctacattttgtgtcttgcttagaaaggcctcttactcaatgagattatagaggaattctcccatattttcttttactactttaacttctttttttttgcatttaaatctttaatccatctggaatttattttggttttaggagggaggtgaggatctagctttattttttaccagatggccagccagttgtcccaataccatttattgaataatccatcgcttcccacagaattgaaatgctgcctttatcatatattaaattgtggaggagggattttatactcattttctgacagcctccagtgccagctaggcagcaaggattttagggggtttcagctgactagaggcaaagatcctgacctgaaggataaccgcaatttattaaaccagaaatactctgtgtaggaacagtgggtttcctgggtggggacagggttggggtgggggaaagtgagtgtcccgtgctgggaggaatttagttacagcaagatttctcaaccttggcattattgacattggggggtggaataggtctttgttggagcctgtcccatgtagtgtaggatgtttagcagcatccttggtctctacccagtatacaccagtattaacttcaccctgatttgtaacaatcaaaaatgtctccaaacattgccctgggtggcaaaatcatcttcagttgagaattactgctttatcaagcctgggtcgagcagacctcccatccatttcttttaaacagaggcagggtcttgttccgttgcccatgcagtgcatgatgtgatcatagctcactgcagcctcaaattcctggctcaagccatcctcctgcctcagcctctggggaagctaggactataccacatgcccagctaattttttagtttttgtagagacagggtcttactatgttgcataggctggtctcaaactgctggccacaagcaatcctcttgcctaggcctcctgaagcactgggattatgggcgtgagccactgtgcccagcctgaacagaccgttgattagatgcatgtgaggccctttcttgttctgagagtctgtcatcagcagtatcaatggctccagatgtctgggaggcaggaagggaggtgcctatctatctcagagaccagaacacccagatttctggtatgagtgtggggtctgtggggaaagggtggaaccataccggtcgactccgggaggaacagaggttcccacctagccctacaggtgaatcttgcaaaactccctaggacctgcctgggagcctagccattccccctgctaaccacacccccagacaacaaggcctggccatggatccaggaacaatgactctgagaaccggaggtggcagatgttttgtgatttaacagcatatcggtttattgtcttatttttcttaggagtaaaagagtccatgggtgtattgttgggggcagcaggaagcacacgtgtctattcggagatttggggcagcaggtggggagagaaagtccatctagacgagggaggtgtgggagtgagatggaagaggagagggaagtgggtggaatccctgggagctgggggaaggaggaaaacacagagaggagctggctgaggtttgagcaaggcctctggagattggtgagagctggggcggcggggattctttatgacagtgctgcagagggaaaaaggattgttgctgagttgggtggaggtaggtaggagtgatttgaagaaggaggtccccttgggaagttgcattagtgggtgaatgggggttttataggccaggcagagaatatggggagggcaactccagcagatgaacagcttttgcaagacacctgtgtggagcatgtggcaccacctgagcgtcctccccaggtgcggctctaacacaggtgcaggttatgttgggagatagagagccagaactcaggagtgccttgggtgccttgctgtaagatttgggctttccctttatttctttttttttgagacggattctcgctctgtcgccccaggctggagtgcagtggcgccatctcggctcactgcaagctccgcctcccgggttcatgccattctccagcctcccgagtagctgggactacaggtgcccaccaccgtgcccagctaatttttttttttgtatttttagtagagacggggtttcaccgtgatctcgatctcctgacctcatgatccagccgcctcagcctcccaaagtgctgggattacaggcgtgagccaccgcgcccagcctgggctttccctttatttcaaaacactcctcacccactcaatatagaaaaccaaaaaatagaggtgagcaaaaggaagagagtgaagaacagcgtggtgtcacccacccagtggccacctccataaacgctgtccagtttcctctgcacgtccttagcatgctccctgcacacccactgggacaccagctttgtgaaggcaggggtttgttttgttttgtttacagagctaggcgaacagttggcactcagtaactgtgtaatgaatggatctgtactgcaaacctgatatcacttgctcttttcacttcgaagttcatgattcgcttccttgttagtagatacctttctgggacaggtttttaatgggcacaaattattggactgggtaaataggccacatttcacggaaccaacaccctcctgctttttatcagttttcttccacattcctctatcacaagtgctttcatttgtttgggctgctgtaaccatgggtggcttaagtgacggaaatgtattttctcacagttctggagctggaggtctgaggttcttggcgagaccctcctcttggcttatagataacctctttctccttgtattctcacgtggcagagagcagagagaggaaatcagctctctcatgtccctttttaaaaattcacatacatttaagttcaagtgcagttttattacatgggtatattgcatggtggtgaagtctgagctttttgagtaaccatcacccaaataatgtacattgtatctactaagtaatttctcatccctcaccctcttcccaccctcccaagtcactatcattccacactctatgtccgtgcacacacattataagctcccacttgtaagtgagaacatgcggtatttggctttctgtttctgagttgtttcagttaaaatattgacctctagttccttccacattgctgcaaaagatgcgatttcattccttttatggctgagtagtattctgtggtgtatatagaccacatttgcttcatccattttgagtcccttcttataagggccttgatcccattcagaaagtctccatgatctgatctaatctcatgatctaatcacctcccaaaggccccacctcctaaaagcaacacactggggggttaggcttcaaccaattaatctgtagaggacaaacacgttcagtccatagcaggaagcagtgccgccatggggaagagcattgtcgtgaaaccttttgcccctcttgttgagttttctcctccagcacaccctgaacatgctgacagtgtcaccttcctctttacttgtccctcttccgctccaagttgcctcctggcttcccagtgtctctgtgggcttgagaccagagcttgtcataagagatagatgacgtcacttgatggaaagagtcaagtgcagtgaccagcacatagaaggcggccatcaacattggtttcatcctttagagcaaagtttccccaagcgcctggtgtgcactggtgagatttggggacggggtggtacttaagacctggcactaattaacactagatcactgtgtgggaaacatagtcccttttctgttctcttcaaatccttctgatcgggctgaggagaaagcctcaggttggtgctgatgtgcttttttctcccagacccccatcctaacagaaacagagcaggtctcaggctcgggccgttaggcaatgatgtcaagccagaatgaactaacattattttgttctcgttgtgttttattttcatgggaaacttagagttatattcagagatattgatttttttaatcccatttaaaaataatgttttaattgagataaaattcatataatgtaaaattcacattttaaccatttaaaatgtacaattcagtggttttaaacatatttataatgttgtaagccatcaccactatttaattccagaacattctcatcacccccgaaagaaaccctgaaccccattagcagtcgctctccattttttttctctcttccctgcggcccctggtaaccaacaaactaattccgtttctgtagatttgcctatcctagacattttgtataaatagaatcatacaatgaatgatcctttgtgactggcttcttagaataatgttttcaaggctcatccaaggcatgtatcagtacctcattcctcttaatggttagatcactttccattgggtggatggaccatattttgtctatttattcatcaattagtgagcatttgagttgtttccactttttggctgttataaatagccataaacgtatatatgctttttttttttttttttttttttttgagacaaggtcacccaggctggagcgcagtggcacaatcacagctcattgcagccttgaactcccaggctcaagtgatcatcttccacctcagcttcccagatagctgggactacaggcatgtgccactatgcccaactgatttgtttattttttgtagacacagggtctcactttattgcccaggctgttcttcaactcctgagctcaagtgatccacccacctcggcctcccaaagtgctgggattacaggcatgcgctaccatgcctggtccaattttttgtataagcatgttttcaattctcttgggtgtcttcctaggagtggaattgctgggccctataagagctctgtgtttaacttttgcaggccatttcctgagtgactttaagttgaaaagtaagtcagtttaaagaaaactattaatcatattgcagatggtgtgtggacatgacaaacgtcataaacgtggtttgcagtgatggaagagtagaaatcctgcttggacatgacctcctccatcaactgtttcccactcacctttccagcctgtggtgcctctgttcccaggagcctcagtgcagccacgctggcctctgaactgtcttacatgagatgtccttcttcaaagatactgccgtttgtcttgtcctgggatatgcgcgacccacattttttttttttttttttttttttgagatggagtctcactgtttgcccgggctggagtgcagtggcaggatctcggctcactgcaacctccgccttctgggttcaggtgattctcctgcctcagcctcccgagtagctgggatttcaggtgcgcaccaccatgcccagctaagttttgtatttttagtagagacggagttttgccatgttagccacgctagtctcgaactcctgacctcaggtgatccacccacctccgcctcccaaagcgctgggattacagacatgagccactgtacctaactgcgccacccctttataccctccagggagctggacttttcagagatcatctttcacttagaatctaccgtttaacccttaattgcatttcccctcatattattatactcactaatgattttgttggagaatcttttgcctctgctataagccacttgagggtagcatctatattcaagtagtccattgttcctctcatagtgcagcctcacctgatcaatggtgaacagctgctgatgaacagaaccttccctggaggcccctgttctactgaatcttggtcagccccgtgtcctgatgcttgccctgcttgctgttactttttgcctgtggttttactgtttagttaacttcttcttttcctttctttctttcttctttttttttttttttttttttttgagacagagtctctctctgttgcccaggctggagtgcagtggcgtgatctaggctcactgcagtctccgcctcctgggttccagcgattctcctgcctcagcctccagagtagctgggattgcagacgtgtgccacctcacccggctaatttttgtatttttagtatagatggggtctcaccctgttgggcaggctggtctcgaactcctgacctcaggtgatccaccctctttggcctcccaaagggctgggattacaggtgtgagccaccgtgcctggcctttatttatttatttatttatttattttttgatatggagtcatgctctgttgcctaggctggagtgcagtggtgcaatcaaagctcactgcagcctcgaactcctgggctcaagttgtcctcctgcctcagcctcccaagtagctgggactacagatatgtgccaccacgcccagctaattgttgtattttttatagagactggtcttgaactcctgggcttaagcgatctgcccaccttgacctctccaaatgctgggattgcaggcaaatcagattgtttcacagacttcagaatggaggctgaggttcaaggaggtggacaccaggcagccctgggaggccatcttccatccagtatgtagagtaaggaacaggaaagcaggtgtaccgagaggcaagaaccatgaatatggacaaggagaagccgagagaacacaaggggagacccaactgtcttccagttcccagttctcttcctttccttcagccagaccgaccttcctcctattgggcccaaatcatgtcaaaaaaaaaaaatctgactggccaggcttagtcaaggaggggatcatagagtcccagtgccatgggtgagggaggcagtcagtgtagacatcatatcactggggagataagccttcaatggtgcccactattgggtgaaaaggcagacctggagctctgaacttcagcttccccttcttcccaaggttgtagaagtgggaaagccaagctagtcatttctgagtgcgggaggagaataatgtgacaaaaatggttaacatcagactagctagccttgaaagcttgagtctgaacggtgatatcttaggagaggggaaaaaataagcatgaagctgtggctctgctccatttctggggaaggaagctcttctgacttttctggctcagtgcaggaagggttgaagaatctcttaaaatctcctgagtcctctttgtccttcatctcagaattcctgtgcaggtgatgtttggctgtatgctccacgaaaggaatagggaacttggctccctccctccagggactgttgctgctcctctgagtttccttagcttaagctgtgccccctgtgtgccatttgccttgggacagagatggcccccattttccaatcctgttgtaggggtgggaatgctccccagtatgtgaaaatatccccaagctgtgttttttttttcttttcttttggggcaggctcttgtgttgcccaggctggagtgcagtagcacaatcatagctcactgcagcctcaaattcccaggctcaagcaatcttgcttcagcctcccgagttcctaagtagctgagactacaggcatgtgcctccctgcccagctaattttcattttattttattatttttgggatgaggtcttgttatgttgcccgggctcatgtcaaactcctggcctcaagtgatccttctgcctcagcttcctgaacagctgaaatatccctaggcttttaagcctcagttacttaatcaacacagtggggccagtacagcccatcattggcatttgtggatttggcagtggtggttccttttctcattagctacccagaagatccttagcacagcatcataagtcactgtcttgaaactccaccctgaattggatgcttggtgagcatctgggagaggcagaatggtgttggaaccaagattgtgggctctggagtgagatttctctgtaagtctggacaccaccccttggttgggtgatcttgggcaaattaattaatgtctctatgcctcattttccttgcccataagtgcggatgacatagcacccacctcacaaggctgttgggaggtttaaatgagttaagacctgcacagcccttagaacagggagctttcaatatgtgttggccacagctcttgtgcccaatcgatttcactcatttgggcaatgcctgggttctagatgaagggggaggaggctgcctgtagtgtcttcttcatgggccagtccagctctgcagtggactgtactggtgatgtccaccgtgcctcagcttttaagcatatattctccttgaaaactatttaagcagaacacactggggtcaagccagtccaagccagatgtttggggtcctgggtgcttctgttttctccatgtctgtttacctttaacaagatggatgggggctgtgaagcccctctgggcagccttttctggctgtgacatgcaccagaaacccacttttggcctgtttgcactgtgttagaaaacagcaggtgcagttggcagcctctcccctaccccttctcccgttagcccctgatctctggggactccttagactaatgcagttttaatgaatacacattactgtttacatgactgaaatgagaggctggctgcttattttatgctgaggtttacagccctgccttttaaaaccctctctcccttgctctgcttctggccatggcgatattttctggcggcccctatgctgtccctccaaataaggaattcaccatgaagtcctgcagcagtgtcagagccattgccttgccccggaaggagtgaactgtgtagaacaaaagcagaggctgggagctgtagttcacgcctgtaaccccagcacttcgggaggcagaggcagaaggattgcttgagcccaagaggtctagaccagccctgacaacacagtgggaccccagtctctataaaaaatacaaaatacaaaaatacaaaaattgatgacctgcacctgtagtcccagctactagtggacactgaagtaggatgattgcatgagcccaggaggtggaggctgcagtgagctttgattgcaccactgcattccagcctgggcaagagtgagactctctatcaaaaaaaaaaaaaaaaaaaaaaagcagaaagatggattctttatttttttaatttaaaaatactttttacaattcttaaatgcttgcttatgatagaacaattagaaaatgaaggtatacaaagagaagaaaataaaaatcacctctaattccactactcagaaaaaactcgatcgttaacattcctgtttatgttttagcatattttaatcaatctacatttatatgtattttaaattaaaattagaaaccaaacttaatacatgttattcagaaatctgctttttaccctacctcacaattaatatatgatgaatgtctttccgagttaagaaatatagatctgcagtatcttttctttaattttaattttaattttttagagacaggatcttgctcagttgcccaggctggagtgcagtggggtgatcacagctcactgcagcctcaatctcctgggctcaagcgattctcccacctcagcctgccgagtagctgggactacaggtgcatgccaccacatgtggctaattttttttttttttttttttttgagacgaggtcttactatgtagcccaggctggtcttgaactcctggccacaaacaagcagttctcccacctcagccttccaaagtgctgggattacaggcttgagcaccatgctcgatattgcagtatctttttttatgcatcattgtatcctattctataattgtttctatggtctcatttgtagaaaggttaacattaaatttcgaatagttatatgtactcactggttcaaaattaaaaaggcacaagagctttaatacttttattgaaagatttctctcctatccctagcccttaggccactctgttcacctcctttttggcacccaatattcaactaataataccaatttattgtgtatacttctggaaatagttcataatgtacatgcacatcatatacatttatttttctcttcctcaaacacgtacattcaaatgttagcttaccttgctttcttcacttcacaatatcctgtatcttggtgtttgttccatgtcagtgcatatagaacatcctcattcttttttttgaaacagagtctggctttgtcacccaggctggagtgcagtggtgtgatcttggctcactgcagcctctgcctcctgggctcaagcaatcctcctaccttagcctcctaagtagctgggactacaggcacacaccaccatgactggctgatttttgtatttttttttttcattgttgttggtagagacagggtttgtccctgttgcccaggctggtcttaaactcctgggctcaagtgatagggtcacctgggcctcccaaagtgttggggttacaagagtgagccactgcacccaatgtctcattctatttttatttatttattttttgagacagagtctcgctctgttgcccagaccggagtgcagtggtcttgggtcactgcaacctccactttccaggttcatgtgattcttccacctcagtttcctgactagctgggattacaggtgtgtgctaccacacccggctaatttttgtgtttttagtagagatagggttttgccatgttgcccgagctggtctcaaactcctgacttcagatgatccacctgcctcccaaagggttgggattactggcgtgagccaccacgcccggccacctcattctgttttatgattgcatcgtggtccatagtatgggcatccctggggtgtttccaaaattgggatatattgactcagaaacccttcctgtggttctgtccaagctccttgttcatatgacctggcctggggtgactggaggaaggatgtccattcggagattaggagggactgcagctctcgattatgaatgggattggcctccacaggcctgagtgacaaggacaaagcagagctggtgagccccatgccaggtggcggtcactggtggaaggccatttgtgacttctctgcagttctccagatggaccacatttaaaacagaggcactgccattcatttctacttggttgaggaaaggtttcatcgcaggcccagagagaggatcagatgttttttgcagtttctggcaagacattagtgggtatcagagggtaagtgatctcgtaaagctgactcaaagcaagagaaaatttcgtgtctgtcttagaaacacatttgcctccaaagggaaggcagggtgtggaggactaatcaacgcatttcacatttggtttctttgtctttcttggtgatcttacgtgactagccctgaatattttgcatatgtcaaggaaacatttcaaattactaagatgagaggaaaatatggggaatgaataaaatggggtttatcagcaagaacagcaaaagacttcttagagccggctggggattgttttgtgaatctctaaacaagaggggcagtttgacttggggatgggggatgttttgacacttggagggatgggagggagccaacaaagatgtaaagcaaaactgggatggtggtgatggagaagcagtgggggtttctatgggaagacataggaaataatggtctgtccttcacagagtaggtgaggtctactagaagatacttatcttttccctaaatttcagtcaacttcacatgattaagtttccattattaaagacttgttctttgtgttacctttttattattattattattattatttttttttttttgaaatagagtttcactctgtcacccaagttggagtgaattggcgtgatcttggctcactgcaacctccacctcctgggctcaagagattctcgtgcctcagccacccgagtagctgggactacaggcacacaccaccaggcctaactaatatttgtatttttagtagaggtggggtcttgccatgttggccaggctggtctcgaactcctgggctcaagtaatccacccgcctcggcctcccaaagtgctgggattacaggcatgaggcaccatgccaggccttttgtgttacttttgtaagagatgaaatgaaactaatatctaatcaaatctaagcatcaagcaattaaaaatattttcttaaataactattgagttaaataggactcaaaagtacaattgcagagaggctataaatgaaaaaaaatagagtgctatataaaacaatggataagatcagccaatgctgtgcttgcagataagttcatagctttaatacttttatgattaaggattgagatgacttgctttgagcataatctggctattcacttattctaaggaacttgtcatggctcaaacatgtttctagtatcctctttagaaattccgtttagatacagttttctttattaaaccttctaaggtgactatttcaaagatgaaacattcattttgttgtttaaattaacacgtattttttaaagggttatgtaaatgtgttatccatcaagtatatctttgagccttcatcacagtgtgatgtaagggatataagttgttaaggatccagcagtagagaaaatttctgcacaaaagtaactatagctctattacttttggaatattccctaggatacatccaaaaccaaatcaaattatactacttataaaacacatttggaaagatactatgtgaatatgctttgaatactgaggcttatgttagaacagagtcatggacgaatttgcaaaaaaaaaaaaacctccaaaatttcctggagtctgacaaaaataccggatagggttcctgaatatattttcatgatctttgctatataaccagatatctctatattttgaaatggatcatattttattagtttttcttagtacacaagcaacatgctatcattgcagatgccagaaagtaggatcacattgttgtgctatagatctccagaacttctttatcttgcaaaactcaaaaactctatcatttctcaaactcaaaactcaacaattctccattccctcttcctccaccccatggccaccaccattctactttgtctctatgaatttgaatactataggtatctcatataagtggaatcatccagtatttgtcatcttaagatttctttctttgtgtaacgttatcaaggttgatccacattgttgcgtgtgtcagaagttcccttctcttttaaaggctgaatatttcattgctttatagactgcacttttttatccattcatttgtcaatggacagttggattgctctcatcttttggctattgtgaataatgctgctatgaacaggagtgtacaaatatctcttcaaggccctgttttcaattcttttggctatgaacccagaagtggaattgctagattaaatggtaattctatttttaatttgttgagaaccaccatacttgttttcatagtggctgcaccattttgcattcccatcaacagtgcacaaggatttttccacatcctcaccagcacatgttattttctttttctttttttgatagtagccatttaatgggtatgaggtggtatctcattgtggtttttgatttgcattttgctaatgagtgatgctgagcatcttttcatgtgcttattggccatttatgtgtcttctttggagaaattctattcaagttgacttctatgattttgcattatcacatctgtattgattcaagcaagccaactagaataaattctggcatttaaaccgattttgtggtttttctgcaaataaattctgcccccaaataacctccaactttctggaagcagtcagcaggagtacagttctgaagataactttctttaaaaaaggaaattcataaaatatcatgcatcttccttttttgacactaatggaacaatttaatgtaatttcagagggaagcagagcccctggaaaggctggtgtgataagggaaggttacccagctttcctgtcaggcggtgtgtgggagcagagagtggcattctctgcatactcttggggagaagagtgggtgagacaggctgctcagggctggggcagagcccaggggaaggggatggaaggggaagaacagcccttcaagagtcctgcagaaattggtggaagttatttaacagaagtgttcggctccacccagcacattctgttgccttctacatacagagtgtgttagtctgttctcatgctgctaataaagacacacctgagaccaggtaatttataaaggaaagaggtttaatggactcacagttccacatggctggggaggcctcacgatcatggcagaaggcaaatgaggggcaaagtcacgtcttacatggtggcaggcaggagacagcatgtgcaggggaactcccatttatgaaaccgtcagatcacctgagatttattcactaccatgagaacagtatgggggaaaccacccccatgattcagttatttccacctagccccacccttgacatgcagggattattacaattcaaagtgagatttgggtggggccacagccaaaccatatcacagggtaatgaagaatgtgtgcccaagtagtagagggcttaagaaaaccactcttgggctctgagtctctctaggtctcagtttcctcatctttcaaatggcaatattaataagacccacctcatagggattgtgtggggtttaaatgagaaaagacaggtaaggtgctggtaccttataagtgattaagttgccattaaggtattggggacttagtgcttgtccttgaagagctttcggtctcgtgaggagacagcctgatcgttataaactattatagaaaatgggaagaaataagggttgaggtgtgataaagatgtgctaggccaggcaagatggctcacgtctgtaatcccagcactttgggattacaggtgggcagatcacttgaggccaggagttcaagatcagcctgaccaacatggcaaaaccctgtttctactaaaaatacaaaagttagctgggtgtggcggcacccatctgtcatcccagctacttgggaggctgaggcaggagaattgcttgaatctgagaggcagaggttgcagtgagccaaaattgcacaactgtactccagcaagactctgtcaaaaaaagaaaaaataaataaaaaaagatatgctataccctcatatcacaataatgccaggaaatagatcattaattctgaaccctaattcttgggtgggcatcaaggcaggcctcacaagaagaaggcatttgagttgaatcttataggctcagctgggttccaacagcaaagacttagggaaagggcagagcaggcaggggaacagtaagagcaaaggcttgaaggcatggaagttcatgggtaattactgactgagatgtttggtgttatggtgcatagaacactatcggatgataatgaaaacattgaattccagcatgtttagaaggacattggctgataaaaatgacgtcttaatagttatctgtggacaaatttgtaaatgtaaaagagttgtagactcaaatcctacagaaattaggcaggagacctaaatgagtgaagtgggtgggtataaaacagaggtggtggcaggaacccatgttgaattgaatagtgggtgttttgtttaaaggggcaccagtagtaatttttcctctgttggaatatgatcctagggctgccagctcttctactttttcaagagaagccagaaatctggatttcatgcaaaatttcttgtttttctttttattaaagacatggtatggaccaaaaaaagatgtctctaggctagatctctgcaacctctcatctatactctatttgcatttttaaagactatatgcaaatgttatttagcagagctacctagtttttttgtgtgatgatagcatgtgaaagagctatgatacatcttggaaatgtcaactttgaaatatacagtgactgtgttggtcactacagaatgatctctgcagaaacttcagttacattttctctaaatgacacctttgctttgacaacacattttcaaaaagaaaaatagcaaactacccttcctccagggccttagccacagtagctcctgccagcataacacaatgctgcaccttactgagggatcaggaaatgtggtttgatttataattatggcttcatgggtagaatggtggccaatgtccacatgagccacactcagtggctaagatccagagggcatttaatttaggtagccagtgttacagacatagtttagatttttgcagccttgaccaatcttaatagatctgtctgttctttagagttacctttttttcctgcctcctagctacctacaccttttaatgctaaatgtagttagctagtgaatgctgttatttgaatcttaaaatttcaggttgggacagaaccttaaaattcatgtatttcaaccaccctttgtatgaggcaggaatcttggttatgacaggtgacagaaaattcaaactagcttaattcagaagggaatttattgcctttataaaaccaaaaagtccaagggtagctgccttcaggtattgtctgatccaggggtttgttatgtttccaggacatggtttcctttattccatctctgcttatgtattggctcccttctcagatggaagagactcccctcatcaaggtgagatggctatggaagctctactcacatttcctctaggttcaagtccatgtagagaagagcacctctttctcttgttatatctcacaggctctaaattagctactagggccagtgaaaaagcaatgtgctgattgaccacccttatctactcttggagttccggatggaattaacactacctgaattatgtggaccaagagtgggaaaggaatagttctccagaaggatatttggtattgttattaaaataaggttaattgaatactcactgaaccatctaatgcttgaattcccttcatagcacgccattggtgactgtccaatcttcagttactaacatgctacccccaaaatggtgtgtttgtgcagctctaataatgacagggtttctcctaatactgagatgatattggcatctccatagttccagacattatttctggtcccaaccataatcaacctgttttgacacgggtgaacatgtaagggaagggattgctcattgtggtcacagaagtaacctacccaatagaagcacaccaacttgaagcatgcttccatgatcactgagggaggaaaatgattggcaagtctcgtattggtccttgaagcgctccctataaacacttgtcactgccaagcgtgtatcactggccaaagcaagtcacattgtgatatgattagactttgtgtccccacccaaatctcatcttgaattgtaatccccataatccccatgtgtctagggagagaactggtgggaggtgaatggatcataggggcagtttctcccatgctgttctcatgatactgagtgagttctcacaagagctgatggttttataaggggctcctcccccttcactcctcactcttctctctcccgtagccatgtgagaaggtccaagcttgcttccccttcgccttctgtcataattgtaagtttcctgaggcctccccaaccatgcggaactgtgagtcatttaaatctctttcctctagaaattacccagtctcgggtagtatcaagatagcagtgtgagaaccgactaatacgcatggccatgcctaacttcaaagcggctgggcaagtatcatattgctgtgtacttgggaggaggggagaatcagaatatttgatctggcgaccaccacacaactgaacttctctatttctgtgttcttcttgttaaccatctagtttctgtttcctcttgtgacacatatattaattaatttttcaatacccaaacacaagcctctaatatttatctttgtttagttacttcctaataaactaagatatctctacatcctgatcctaaaattcaaaggctccacgtataccatggtgactagttaattccaatatattgcatagttgaaaattgccaagagagtagattttaagtgttctcactacgaaaaaatgcatatgttaaatagcttgatttagccatttcactatgtatacatgtaggaaaacatcatgttgtacactacagatgtatacaatttttacttgtcaattataaacaacaacaacaaaactgcaaagtctccttagacccacccaatcacatgttgtctgctcatttaatgagtaaatgctatataggttcattctggacctgggtaaaatgatttacggactgggaccaagtgggaggaccctatttcaattcattaggtaaggtcttccaggtcaatatttgaccattgattggcacatctggggtatagttatttaactgccttctagtttacctcaatatgacccctcagtggagggaaaatggagcacaatgactagaagaatgttgagagatgaggaaagagagaatgggatggaaagaacataaaataggaaagcattgacattgtcacttcttggctatttcttcctgtaaaattttgcctggagtgccctacaatggggtccccatcctctgccctgataacatcttagtggatcactcctctctcccttttcattctgcaggacttgcccattggggctctttcagacctgactggtcattgggtatctgtggccatgataatcactctcttcctggacgtgaccctcctctcgttaaccaggatgcctgtgttcttaaggttggccgtttccaaggacagagagcttgcatcccatttctaggggactggggatccaaggactccattcttgacattgtcttgtcagccttgaagtgccgaaacccagcatccctgtctgaggtcatcctgtctctcttccaaacatgaggacttcttaaattttttaaaaaaagtttttacttgtataaattgagaaggcacaagtgcaattttgttacatggatatgttatttagtggtagaatctgtgcttttggtatgtccatcacccagatagggtaccctgtactcattaagtgatttcttatccttcactcccccacccaacccttccaagaaggatgactattactcaacagtcattcagtagccattggagaatgactattattccatactctgtgtctatgtgtattatatagttcccatttataactaagaatatgcattatttgactttctctttctgagttttttttttttaagataatggctttgggttccatcctgttgctgcaaaagacatgatttcagactgggcatggtggctcatgcctgtcatattagcacactgggaggctgacgaaggaagatcacttgagcccaggagtttgaaaccagcctgagcaacttggtgagactccggctctataaaaattaaattagccaggcatcgtgttgtgtacctgtggtcccagtttcttgagaggctgaggcaggaggatctcttgagcccaggagttcaaggctgcagtgagctatgatcacacaactgccccccagcctgggtgacagagtgagaccctgttttagtcaggacttcaagaccagccttgccaacatggtgaagccccatctctgcaaaaatacaaaaattagctgggcatgatggcgggtgcctgtagtcccagctactcaggaggccgaggtggaagaatcacttgaacccgggaggtggaggttgcagtgagccgagattgccccactgcactccagcctgggcgacagagtgagactgtttcaaaaaaaataaataataaataaataaataaaaataaaatcaaaggtcttactcttttttatggctgagtagtattctattgtgtgtatgtatatatagatatacatacatataccacacacatacgtgtatatatgtatatatatggtggtatgtgtgtctatatacacacaatgatatgtatattaatatatatgtatatataaatatatatacattttctttatccagtcatccattgattgatgcttaagttgattccatatctttgctattgtactgtgataaacgtatgagtgcaggcatcttttatataataatttcttctttggatagctgcccaaaattcaggtaaaagatctcagtctacaaggcagctcccaagcttcaaaaaattgtcctgccagatttttaaaagcaagttttctcaaaagcttcgatgtatacattggtcgatttatttatccattaaagtatttattgaatacttcttactgcgtatggtggtggtggtgctgaggtgtctcacagtgaacacaacaggcgtagcctctgctattaccaaaattattgtctggtaaagaatgcagatggctaaccaggcaggtgcctgtacggtgagatatgtgctgtgatggctgtaagcgcatggtgtgagcgtagagttgggtgcttaattgaaggcatcaggaaggcttccaggactaaatgatatcaaagtcccaccttaaggatgacaggtttaactaagtaaaggaggatgtggaaagaagggggagagtgctccaggcagaggaaatagtatatacaaaagcacaagaggattgaagaaccaaaatcactttggcatggctggaatgaagggcatgtttgtgtattttcagggtaggggatgtgtttagggacaagctcagagaaaaggaagtaaggaaccctgtcataaagggctcatctgtcctatgaaagagtgtgtacattttattctgagagtacagagccttttcttttttctaagcattacatgattagatttgtcttttagaaaccactctggctgccgttaaaaatgaatttcacagtgacaaggctggaggaaggatcttgggttaggaggcggtggtagtaatctaggcaggacttgaggacgcctgagtggtggtgaggaaggagagaggtggatggaagattcaagagatatttagggggtgttattgagagaacttagtgattgatttggcgtgggaggaatgagaaagtcagggatggctccctggtttctggcttgggtactaggtgcgctggtggtgcttttgacagagatagaaccatgggaggaggaacatgttttgagggaaggctgtctcccttttagacacctagttggtgtccaaatggcacagaccagttggcgtgtggatatcttggggcttagggcgtggatctgggctcagggtggagatctgagccttagctgcacatcagtagtcattgcagtcatggagtgtgctggggttttgccaagagctcatgtagattcaggcgagaagagaggaggggcccaggctgggaatactggctttggaaatactcttgaaatatatagaaatgaaagaatgtatagggctgtttccacagacgtttattttttatttttatttttttgagatggtgtttcactcttgttgcccaggctggagtgcaatggcatgatctcagctcactgcaacctccacctcccaggttcaagcaattctcctgcctcagcctactgagtagctgggattatagatgcccacgaccatgcccggctaatttttttgtatttttagtagagacacggtttcaccatgttggccaggctggtctcgaactcctgacctcaggtgatccacccaccttggcctcccaaagtgctgggattacaggcatgagccaccgcgcccggcccacagacatttactgagcaagagcttgtgcaaggcactctggtatgcatgcagtcggggaccctctgatgaatggaactcaggccttgtataaggaagtgacctccatcagagggtggagacgctgtcagtgaacatccatcacagacaagtgactgagctaggagctggggtaaggtagaaagaggaggacagtgggcgatatgagctgggaaatgcacctctgttgggggactggggagggcttcctggaggaggtgattttggtatctagtggttttgttttgttttgtttgttttttttgttttgagatggggccttgctcttgttgcccaggctggagtgcaatggcatgatctcggctcactgcaacctccgcctcccaggttcaagcgattctcctgcctcagcctcccaagtagctaggattacaggcgcccacaaccatacctggctaatttttgtatttttagtagagacggggttttgccatgttggccaggctgttcccgacctcctgacctcgtgatccgcccgcctcggcatcccaaagtgttgggattacaggcgtgagccactgcgccaggcctgtatccagtgtttaaggagatgttttgtcagataaagctggagttttgtaatggagttttggagatggggaagggcagactggcttaagagggtgctgcataagagatggctcagaggagagaaagtgtacgatgttttcaggacaaattagtccttcaccatggcaggaatctaggcggccgaaggacatttgtgggaaattgtagcagaaaatacgaggaggactttgatgccaggccacagagtttgcagtcctttttggagactcaggggagttattgaacaattagaaactaaaggctgatgtgacctccacaggatactggctaaacgcatgaactcttgaaccagatggacctggatttaagtctggattctgccatttccttgctgtgtggtcttaggcagattattaacctctctgagcctcagttttctcatctgtcaaataggagtgaaatacctcatagagggttgtgaagagtgaagtaaactaatgtggagaaggcattctgcagtgtctggaattcagcgacccctcagtacatgttaacacactaatactttctacgtaatcatacctgtaacaacacagagacgatggtattatctttacagcttgttcgcttctgtatcctgagcatctaggacagtgcctggcatgtaatggatgctggagaaatatttcttgggcaagaaatgaattgcaccagtttctttttgtaagggatctatttttttcttgtctggaaaaatactttgataaaaccttagggaaaagatgaaattccctttcttctggagcctagatttcaaagaggagaggttgagtgctctgcaaagtagaaggagaagattttgggcagtgaggaggagagaattgatgagatggtggggcacagcgtactatgaaatgtgactcttcccccgggacccccgaaaaaatcttctgtaacattttatatgtgtaagacatctctctaccatctgctatggtcgaaatgggatttgtagagagctcatgtgattctcaaacctcctagtaactctgcttacatggagagacagctgtctccaagccagctgttgtcttttggaaagctttaatctgggggaagataacaccttgagaaaagatgtcaggattggaggcagatgttgacggagccagtttctaatgccccaaggcagccacactttgtatggattgtatggatgggcaggtgcacaaggtgagttatttttttccctacccagaaatttatggaagcctggcatggtggctcacccctataatcccagcactttgggaggccaaggtgggcagatcacttgagcccaggagttcgaaaccagcctgggcaacatggtgaaaccctatctctactaaaaatacaaaaattagcctggtatgggggtatgcacctgtagtctcagctactcaggaggctgaggtgggagaactacttggacccaggaggtcgaggcttcagtgaaccatgttcatgccaccacacttcagcctgggtgagagagtgagaacctgtctaaaaaaaaatatgaagttgctcttttgaagagcattctaatgacttatctggagattctaggaaagaaattaaattcagctttcaatgtctgtctttctagatttcttccttctaacgttattgttgttatgtcctcaaacaaaaacatttagtacttattatgagcttcatagggttgttgtggattaatacatgtaaagctcttagtgcaatacacgacacatagataacatttaattttattatcgttactgttgggtagcactcagttcatgaaattcccacacacagtcaagtggtaaatgctattactttgtaaatatcatcgatgaggaacctgaagctcacagaggttgatgacttgcctaggatcgctcagaaagcaggcagcagagctgattgccatggtaaccatttccaagcttcagtgcccagagatggacccagtctggcatgggcttatcccctggagcactgtgagtgtcttgacagataagtaaaggaagtctttaatttctgaaaaatgcccagctgtgattggcattgttaggggtcagtgaagacacgctcaaagaccttactgtccagcttttttatctttcacctttaatgccgctgttagccccaggagctaaccaaaggggagttttctttatcagttccaagagggatgccatggttgtcccaagattctggagctaaaggtgggaccaggaccagaattcagtttctgtgtttccaaattcagttctattctcctctcagtagaccaggaggcctccagacaagacagatggcagacagctacagtagtttaaaatagcctgagctcacttctgaggtagacatgtgcgtggagtgagctggaagacagggacccctgtgtgggaaagattttggcaaagagaagcccagtggggagttctgatgctaggctgagtgtcatcaggttggggtgagggtgtgagaagagacctgagcaggtgccaacctgaggctgagtggggaggagagaagcgagaggacaggtgccaggcaagatgcggcactgccaatcagtagaagcttcctccctcctttccagctgtgctaccgagacggggaggtcaggtggtcgttctgggagggctggtgccttttacttcccggccttctggcctgctgggtcttggagtccagtgcaaaataatgaagttcctataaagacagtttgtatagatccttttaggatgacttgaaagcctatgcatttccttaacaatgatcaattcttggctaatcctctttcatccatatccgcacccaatgcttttcactccatttccatactggatgttttgaaataaatcccagacaccatataatttcagtaattatcaatctcaatatcacagaaagtcaaatagacattatatatcttctaatatgatgcaaatagaagtggccaatgctatctatgcaatattattactaaagatctaaccaaatttacaggaaatacagagaatatgtaggaaattctacatagaaataacttgatttcttcacgaaaccaatggcatggaagtgtgaaaaaaatagaattaaaagatatagcaatctaagatagtgtgtggacctcatttggaaataaattcaaacaaatcatccataaagaaaacattgtgagataatcaaggagaaggaaacattaactgaaatataaaatgataataaagaattgttattgcttttactgggtgggataatggaattgtggttgcttttttgttgttcttatctgtggagatatgctgaagaatttatgggtaaaataaaactaagcgatgctaggtggggaggaacctatgcatttcctattttttggcaaaaaggccccaaggtgtagtccctagcacctatgttcgaacaatgtgacccagcattcctgctgatccctgactgaaccaggtatggctccacttgatcctctctctggggactgggagttagcattcagaaatgccagctagcctccatcaacagcagactggaaggatcaggcatctcaggaatcatgcaatgtgcatcaaaaaatagagaaagcttatcttcagagagacagacaagtgaagctggctcagaggtcatgtggaccagagggatgggggaagcagttgccttggttcctgacaatcctgcattgaagtcaaactgctgttcctttccctggtttctgtttccttgtaacagacttattcctttgcttgaactgggggcttttagtggggttctgttgcttgcaaatcttaagtactctgagaaacagctaaggagatgaagatggaaaactttgtcatgaagggaatgggttactggaatctttctggagggagaatttcagaattacgaggatgcagttctgattgaagggggtcttgtgggtatctgggatttggaagtgagaatgaatgctgtagcagatgctattagctacccatccaatggcgattccttctttgtttctagttttgttcggtggcaatgtgcccaggggacagtgcatgcatgacccatgattatttccctttcagtgattggtctggaagtgggcactggacccagtttgggtcatgtaggaaagactctttcttttcatcctttcttcctgctctggaggctgttaggtgaggacataattgttggagctatggcagccacattatgactatgaacaggtgcctagatttgtagcaacactgactgagagcactgtcattcttgagacactcatacctccttctttcagactttattattttggggatgatatttattgatgagccccttttggttaagttgcatatggttggctcttctgttaattcaagccagaagattcttaattgatacagttaggcttcataatttggaggtttgggaggaaaatgaggtgaaagagcatgcattgttggggaagataatattttaaatcagaaaattaacattttctaccagaagaccttcaattattatattatagactggtttgcagagccttttgagagtggtgtgaactgatatccatccatccatccatccatccatccatccatccatccatccatcatcttctgtttgttgattttctatccatccatccattcatccatccatctatccatccatccattcgtccatccatctatccatctatccactccatccatccatccatccatccatccatccatccatccacccatccatccatcttctgtttgtcgattttctattcatccatccatccatccatccatccatccatccatcatcttgtttgtcaattttctacccatccatccatccatccttccattcatccatccatccatccatccatccacctacctcatccatccatccatccatccatccatccatcatcttctgtttgttgattttctacccactcatccatccatccatccatccatccatccatccacccatttgactttctttttacgaaactttccctttgatcaatggaggatttccttcctggacttgcttggttctgtctattatcagctgggtataaaatgcttttccttcttcagttaggtcacgtgtagagaattgatattagatagctatggtgaggagtgaatgggattctgcctggcctctctctagggacactttgccttctgcagtgtctggcatttctaagaaacgttgatttttaggcattgaggaaaaaagctgttttttttttttttttttgacattaaaagctctagttttcccttattttattccctggagcttctttcaacatattcaagcactgttggcttcaggcgtggctttgtgggctggaaagggccagggtatgttttcagaggaatcctgtgggattgaattaggaatgctgccttcaggggataagtattattttaataggaagatattctttattttttgattcttaggaattgctgtttctcatgtagatgtacttacctttgttacattaataagttccataaaatattttcagcgtatagaatttttatatatctagaccattgtctgtttcaggttaggaattgtcagtgtttatacgtgcgcctaatcccttgtagtctgttcgttactgggatggtggtgatgggggcactagagggtggaatttgcgcacatggagagaggagatggtgcatgtcagtgtgttttccagttgaggcccttggggttgtgggtggggaggaaagaggaggaggaggaagccagtgtggtaggagtgtgatccacattctcaggaagaaccatatttgatttcatttagaaaacggaattcttacttcttgaacaaagttggcttttcttctctgaacgtggcctttgcaaatgcttgagtctttgagtatggtgatgactgagtgagaggagggatttgcttggggcagcaggcacatctggaaccattgaccacaaacctggctgagcacagagccacccggatgatgggcttaataggtacaaactgggaacttcccctcaggcatgccaactcaggaggttgtcaccagtggctgcagcttggagtgatctggggatcttttaaatgccccaatgccctgcctctacctctgtcagtgaaagcaggctgtctgggagtagaatcagagcagcagtattcattaaaggctctccaggtgactgtcatcagcatccaggtttgagagccactgtggggaaataatctgtactttctataaagccagaagcagtcagttttctgaacatcactgattagaccgtagccattttccagtatggacaaagtaggttctctcctgccatcccccagctgcagcaaacttctcactaatgggcatgctttgagaaacaccaaactgcagggacccaaaggagcatacaattaacgttaaatcacaccagctttgggcatatatatccctcctccaccccaaaatctcttttaaaatagtgttttaaatgtattttttgtagtatgttcacaggactcaaaaaaaaatacaaaatgctgcactattcacaataacaaagatatggaatcaacccaggtgcccatcagtggcagaatactatgcagtcataaaagagaatgaaatcatatcctttgcagcaacatggatggagctggaggccattattttaagcaaattagagcaagaacagaaaatcaaatactgcatattctcactgataagggagagctaagcattgagcacacatagacataaatatgaaactagacactggactactggaagttagagggaggggtgggtttaaaaactacctgtcgagcactgtgctcactgccagggtgacgggatctgtacaccaaacctcagcatcttgcattattcccgtgtaacaaatctgcacatgtacctactgtatctaaaatgaaagttgaaatttaaaaaatgtttaaaatccacacagttttaaagtctcttattctcttctgttctccatccacccatttcccacccccttctctggatatcttttcagaaatcttttccttcaccccctttgttgtcacacaaaagatgacatactgcaacccctattctccaccttgttttttttttttcctgctaatatttggctagtaagcaccagcatggtgtaatgactggcatttgttctgatttgttgagcatcctcagtgactggcagaagctcacatggtgctgccagtctttagatatttgaattacttcccctgtccaccccacgtctagaagatctctctaagcaatgcaaagacagcttccttatactactttttaaaatagatgtagagtatatatatatttgagacagggtctcgctctcacccaggttgcagtacattggtgcgatcttggcttactacaacctctgcctcccaggcttgagtgatcctcccacctcagcttcctgcgtaggtgaggtcacaggtgtgcaccaccacacccaactaatttttttttttttttttttttttttgcatttttggtagagacagagtttcaccatgttgctcaggctggtctcgaactcaagcgatccacctgccttggcctcccaaaatgctgggattacagatgtgagcctggcccaagtattcattttttaatagatgtaaagtatggataattcataatttattaaacaagtcctgtagggatggactttaggtgatttccaatttggggccattacaaacaatgccattaagaatagtgtggccaatgcatcacttcagatgtgtagaaatccatctgtagagttcccataagtgctatttcttggtcaaggggcatgtgtagagtatctttagcgacgggaaatttcacgaaggcatcacattttccagtttgctgtagcaggcagctctgcttctgaaattgtagtaggtacagggttttcttttctttttttccattggtggctttgaggaactttcagatgggatagttgaaaaatgtacatctaatggttttagaggagatgcttctggagctgcagttctcctagggcctttcttgaatgacctgcaggcaccatctggtgtttgttaaaaatgtggaccctgagccctattagactctttgaggcaaggcccaataaatttttaacacaagcttcccaagcgatgcttctgtgcactgaagtttcagaaccactgttctaagggatttgttgtagaacaatgccgtgagaggacatcttttcatatgattagcacagtggaaccacactggtttactcgggacaaagtctgcgactgccatgaacattgcaagctcaataatgccaagcaaagactgagtcttggcatcgggttgaaaataacatttggctatcaacctctgatgcagcatttacaagtttgccctcaaatgcccatagaataggaggaacagggtcaacaacactgaaaatagtcagataaccagttgctggaatctcagtgaaatatccattaactcaaaggcagatggcactggattggatctacccttcacagtcaacacctccaacaagatggaacaagaccaactggaaacagctttgtctatcttccactgtcctattcctagactaagagactcagcttcgtaccaagtgggaagtcactctcttctgctcaaaattaagtttttgaaatgaccacaggcctcttacgatggctaattttcctacattcattcagagaagccagcaagggaaggggaggcagttaacttgtgcagtggtttgtgtagggaactgctggtggtgaattgaacgttcagttgtgtggctgccatacgttaggtgcatagaagagaccgaaggaactagggtgtgagtgcattgtggaatcagagaatcagattgtggaggtgggagaagagtctgaggcagttcaagagagctgcagtggatgagtgcttgctaaaatcccagtgctatatgtgtagttctgccctccaaccatggcttgagaagaggactggaccattactagcgaaaacatcactaggaagggcagcctatacaaccaatcttctggcagacacagggcctggatatatctttccaaagaataacccagtacttaagacaatgcagctgcgtttacagagttttgaagggaaatgttatcatctacatatttgattctcagtcaaactgtcacttatgtgtgaaggcaacagaaagacagttttcagatataaaaaggcactgcaaatctaccaccactgaaaaagttaattgaagatgtactctgattgagagcagatccaaaattaggaacttaagaatgaagaagtcatggtatggaggaactgggatgagcacttccagtaattaaacataatattgagtccaaataattgttataagtctccaattaagtgtcagacaacaataattatttgtgaatgagtagctatatggtgtaaaattagcttcatgatctatttgagtgcaaaatcctagcatataaatgaagactgggaagtagataacataggagcaaggatatgaaaactttacttaatctatcatcttttattggttttacttaatttttcatctttcattgtggaagacagtcagaaaacatgctgttaactttctttaatcacaatgaagtaaaactagaagttaataacaaaggttataaaaaatcaatgacttaaatataaaatactttccttaatgaccctgggacgtgttcaacatagtgctgtatgttcctgttggtccttaccattgcaatacggcaaaaaagaaagaaagaaagaaagcatacaaagaaagaaataaaactgtatttatttgcaaacgacatgcgtatctgtgcagaaaataccaaggaatctataaaacaaaccaatcaaccataaacaagccatcctacaacacataagtgaattcagcaaggttgccagatacaggggaaacatacaaaaaacaattgtatttctataaactagcaatgaatacgggaagactgaaattgaaaatataatactattgacaattgattgctcaaaggaaaaaaataattagctgtaaatccaacaaaacatttgcaggacttatgtactgaaaactgtaaaatgttgatgaaagaaataaagaatatctacataaatgaagacatactgtgttcatgaattgaaagactcaatatagtaaaggtagcagctatccccaaattgatatacaggtttaatgtgattcttataaaaatcccaacaaaattactttgtagatataaataagattattctataatttatatgagaaggcaaaggaactagcatagctaaaacagttttgaagaagtagaataaaatgggaggaatcagtctaccgtagtcaagactatgtgatattggtggagggacagacacataaatcaatagaacagaatagataacccagaaatacacccacacaagtatgctcaattgatttttgacaaaggcacaaaaggagttcaatggagaaatgaattttcaacacatagtgctagaacaattggatatttattggccaaaaaatgaacctcagcccaagtcttgcactttatacaaaaattaactcaaaattgatcatgctattaaatgtaaaatataaaactatacaacttttagaagaaaacataggagaaaatttttggaatctagggtcagggaaaatttcttagactttacaccaaaatcatgatccataaaaggaaaaattgaatagtcggacttcatcgaaactaaacgctattgttctgcaaaacgctgttgagagaatgaaaaggcaaactacaatctggaccaaatatttgcaaatcacttatctgacaaaggactattatctaggatacataaagagccctcaagtttcagctgtaagaaacaaacaatccaattaaaaaagggcaaaagctatcaacagacatttcaccaaagagggaacacagatgacaaataaacacatgaaaagatgttctacatcattggcttttaggaaaatgcaaattaaaagcacaatgagatatcactacagatcaaaatgtcaaaaatgaaaaataatggtaatgccaaattctagcaagggaggctgaggaacaactagatcacccacacatggttgctgagaatgggaactgcagtagccactctggaaaactggcagttttttaaaacatgccaactgccctatgacccagcagttgcactcttgggcatctatcctagataaatcaaagcttaaaggctcatacaaaaacctctgtgtgaatatttatagcaagcaaggaaaaaaaaacccacaagagaaacctaaggtgaactggagtaagaatatagatgagaatatataatattttatattctgatgaaatatagtgttaggatatataaaaaggattgtgttgatacctctaagagttagtcctggaaaacagaacaaagcaaagcaaacaaaagagccaataaaacatctacttctaattatatatttaatcatatatatagatcatatatatatcacgcatatatttatgtaacatatacaatgaatatatatagcaaatatatatatgaacaacatgcaagttagaagtgagaaaggacttataaatccagagatagaaaaattataagacgagatgtgctattacaatggtgttcagactggtactctcggatttatgtcgtagcttttccactactgttttctgaccttgggtgattatttactctctcagtctcaatctcctccactataaaacagggataataacgcagtagttgtatggatttggttaaataatgcatgcaaatagctcaacccagtgttggatgcctcatagaactaggatgatagctgtttttcaatttttggtattaagtttgaaagtccaagaagacagaaatgctcaaattgtctaccataaaagatagactgcctagattaggggttggcaaatgttttcttacaggactagatagtaaatattttaggtttatggggcatctgagcaactactcaatgctactattgtagcatgaaggcagccgtggacaatttataaagaagtgagcatggctgtgttccaataaatctttatcaaaacaggtggcaggcctgcaggctgtagtttactggcctctagtctaaaccaataacaagaaggaagtaatgaaagttttcaaaatcctcaccaaaacctatataacaaatgatccttttggtttttaaaacatttctctagaccatagggaaaaaggacactgtctcacttctctcctcttaccctagcatcatacatacacaaaaatctaacaaagataaggcaaaaaataaagccatggtctaatttcacttataaacacagagaaaacagtcctaaataaaatcttggcaagttgaatcctctaggatattaaaagaacaatgcatcatgatcaaggaagcttcattctagaaatacattatgatttattattaggaagtctattaatacgtcccatcaatatgtcaaaggaaaaatatgatcatagatgcaaaaaaaagcatttgttaaaatttcaatatttgttcttggtgaaaattcttggagaaaggactaagaacaaaaagatactttttcagcatgatgaagactatatgtggccaaccagtagccaaaaatatacttaattttgagatacttaaggaattcccattaaagttaagaataaatgaaagatggttgatagcaacactgttatttgtcattgttttggatgttctagtcaatgaaacaagaaaagaaacatataaatactaattacatattggaaaaatgaataccaaattaacactattcacaggttatattatttattttagcaactctaaaggaatccattgaaaaactattagtacaaataacagaattagttaagagggctgattacaaaacatgtcaaccaaaatcaataactttcttagagagcatctctaacttggtggatgacataatggaaaaataatcccttttggtctccagatgccaccagctcccttttcctcctccgcatgcttggcagaaggccagaggaagtactgtagtcctctactacagagggaagtgtaggaaactggaatattaaccatggattggcaatctgtgtgtctaaaggaaagtggtttacattttcttttaaacgtcacacttggcatgccagatccccatggcgttggagcataccaaagtgatagagcgtgggcataatatgtttcaggcaaaatgtttagcatttgcacagttaggttctcaccaatggtgtgttccttccatagacatgtgagcctggagcttggagcattggagtttgagaaatggcttgatgagggcattgagaagcactagaaaggatatggatagcaactcgattcaaattttatttttgtctacttttctaagtttgtttacttcaagcacttaaactccacttctttgagcctttgttgccttgcctacatactgaggataattaaacctttctcctagggtcttgtagcagtaaatatgattggatgaaaaatacgaaagcatgtcaacaactgcttgttaaaagttagttacctttctgcttccttcttatgcttgactagctcccttgactctttgaaaacatcagaaagcctagccttaaactcctttttggaaactaagcattgggtcccagagcctgaggtttcttaacgtctgcccctagtctggttcagcttctgcctgtttctcaactttgctctcatttcaggaaaggagacaaatgaattattcacgattattgtctcttgaggggcagtgactgtctcttctatcttgttcttccactcccctccggagcatccagagcaactctagaaataggagtgtagaaataaaacccaggaaagagggactttagaaacaagaggcaatgccatggacaggggtggcagaactgttgcccttccagtctttgctctgccatccaccagacttgttgcatgggaaactcagtcaaactctgaagcttcggagtgttctccactataaaaggagaaaaatgatcatctaccttagggtggtgttgtaaaggtcacatatgtgtggccaggcacagtggcttatgcctgtaatcctagtgctttgggaggctgagatgggaagatcacttgaggtcaggagttcaagaccaacgtggacaacatagcaagaccccatctctacaaaaaaagttaaacaatactaaccaggctagttgacatacacctgcagtcccagctacttgggaggctgaggcgggaggatcactggagcccaggaggtggaggttgcagtgagccatgattgtgccactgcatttcagcctgggtgatagagtgagactctctctctctctctttttaaagatacatgtgtgaatgtgtcttatttaactatgttacacatacatataaatataaattctgtttattaatagctcatataatatacagactctgcgcctgtacaaatgtaaaggcaatgcattttacgtaggaaaaatggttgagtcgaatgatttaatttttttacaaatcacacaatacttgcatgaaatagcaacaggtgcgaacctcctaggcagataggagtgcagtgctttgtttcacagataccatcaagcctaacctttattgtgggcttactatgtgtcaggcctgttctaggatcttgttaatgaactgattcatttttttctcataacaacatagaggggaaaagatcacatggggaaggcaccaggtccctggactttgcctcgcgtgctcctggcattttgtagagaggtaaggacttggttccttatggacttttaagctcatgattggtttggtctggtttcaattctcatcttcatgtatgctcttagaaataatctcattttaggagagaaattcagagtcaacacggaaactgaaaagctctagtactgcctgaagtctcagaataaagggtgccttcattttcacttttccaaataatctatgagagggacttttagtagatccgtaagatgtgatactaacatagtatctgcatattgtgaaaaatttataactgtatccataaaggttatttgactccattgcctcaaagtctatataattagaattccatgatgtcatctttgagctttaatatagcttaaaattatccttctgtaggttgtgtttctttctgaaacattttaaatttagaaaattaacttgttaaacttttttaagttaaatctttagatttttttttattcaccctgctgtgggggagtcagaatgacaaatgcttgaatcatcaaagtcaaatgttagggcattttagcccctctgggaaagctaaggtctccatggcccaagaatctaactctacttatggggatgatgatctcacatgatctcatgatctctgtgttttgccaacattccttcttggcaggacttaggagtgcagatgggccccagagagcatgccttgctcaagccaggtccccctcctgctgccactttgggtggctggaaaaacctcacaaagggtgcagtgtctgcggttgggagactggtctcaattttcctccatcacctgctcataaactctcatgggtttctgggtcacagtgcagccctaggtcaatcttccaaaagctgatttgctgaatttcatgtgaattgactagcttcatgtcagcattttagggaacatttgattggtcttcatgcctgctttctgcctttgcaggctgagaaacaatgaggggagagaatgagggacagagagaggaggggactgaggggccaaggaggttccgatgagcaaaaatggaagagaaagaacgtcagagaggaggctattgggggatgaggagagagaccagagatcaagaagcatgaaggtattgagggccagagaggggacttctagggacatggagaggctgcaggacagagaaagggctaggggaacgggacagtggttctttcatttcaatgatcaaagttcccagctttttgacaccacaggggcaccctgacaattctggcaataagaacatgaaaggcctggtctttatttcactcaattcctgctatgtgtggtgagtgtgggtgagccaaggggaaggtgatcctattgtcaggaggtaatttaccatgaataggggatgatatggaaataatgtgtgtgatccttcccctgccactgttgggatgtctttttaatttccttccctcatttgtcacagccgtgaaaatactttttctgatatgatgaatgacagatggcagggtgccggcagcccttctggagggatgggaggttgtgtgtgtccacgataggggcccaataagtactggctgaatgagaaaatgaggagcctcactgtgggctttctttggggtgaatggaggtgctgagtgacctctcagcttcctagaagtcacaggccagaagccgtggaatctcagtggtggaaagtcctactgatttgaggatcagggagggagagaatcagcaatggtgtgctgataaatgtttagtagttggctctctggtaaaaaagaaaaagaaaaagaaaaagaaaacaaaaacaaaacaaaacaaaaaaaacaaacaatgaacaaccctggtatgcagtgcttgccactggtcagtttccatggtcagtttctcaccatgggcaatttcatgtgccatcactgaacacagagtagggaagagatccacgccattggctcacaagctggccctaccacaccaccaggaggaatatatattgggcaacgactaatagcaatagaaaaactcatgcttctttctcctggcatgacttcatgtatatgacatacatcctctcattttatgcttgtagcaactctgaaacctaagatttatttcctcattgcaggtggggaagccaaagctcagaggggttaaataatgtttctgttattgtacagcaaatcagtggcagagtggattctaagattcgtgccttctctactcacttcactgggctgtcagaggttaagggaagagttacataagccacctctgattattagagaatgacagggctggctaattctgcctggatagtattgaagaggagcttcattcaggggcaccgctttgctaaagagaccacccaaagaatgagtagttttgagtcaccaggtaccctgaagtggtacctgaaggtacagctggtatgatggatgacagatgccggtaccttgctgtcatccatcatatcagttgtcagttaccaggtagacctagcggtaaagggtaagttatatctcttgcctaaatgtcagtttcctcatctgtaaaatgggaccctgaaagtctactttagagggctatagggttgttaagatttaatgagttaagtccataaagaacctaacgtagtgtcagacacataatagatccagagaaatgctgattcttagcaggctaactttttctttttgaattcctctttaggccagaactgactagtataggcttttcaaactttagcgtgcagaagaatcacctgtggatctaattaagatgcaggttgtgatccagtaggtctggggaggggccgggcctggaatcctacatttctaacaagctgccagatggtgctgattctgctagtccatagatcacacgttttctttcattctttctttgtctttgtcttttttttttttgagacagggtcttgtgccgtcatccaggctgaagtgcagtggtgtgatctcagctcactgcaacctccaccttctaggcttaagcgattctcttgccttagcctcccaagtagctgggattacaggcatatgcaaccactgctggctaatttttgtatttttagtagagacggggttttaccatgttggccaggctggtctcgaacttctgatctcaaacgatccacctgccttggcctcccaaagcgctggcattacaggcgtgagccaccatgcccagcccatggatcacactttgagtagcaaggggctaagggatcctgacatagcattttggggtcctgcagcttcaacttactctgctgcctgttcccatgacctctaagactgctcttctcgagacagcatccttgttctgcactggttcctttggagcagctgctcagccctgctaaaggcatcttgctcagtgcaatattagtttgctgcggaagatctgggacctgggctcctctcctcattctccttgatcttagttttggttctgccaggactttgctgggcaatctttgtcatgtcctttcccctttttagattcaatttcttgatttgcaaaacaagacagtaggagagagtcactttctagtttaggcattctgaagttctgtgaatctgtgataccagctggttggtgcattttcctgccaggccataagcagtacttgcctttatttctgggctccagtgggggtcttcagagatacatagatgcatatagtcaggacaagagttaggaggagtaaaggtaagggttcaatccaaaccttttggaatagtaacagggtggcccagagagatgaagaatgattggggcacaggaatcttcttgctttggggcctaaacgacatctccagggaatggctactcattgggcacatatgagccaggcactgtgccaagagctaatgggagacacttgtcattctttctggccacacactctggagccgctttttttttttttttttttaatatttgtgaattcgccacctcataaacccatgtctctttaatgcacaactcagaaacccactcgcccaacctcccttgcagctagagcacagacatgtgacctaggatctgtcaatcaggtgagtccttgctggactctgaattggtggctagaagcagcagacactgtgtttgatctgttctggagggggaggtgttaagtatgtccagactgcagagtcagctatggtggggcttctagcaagatctgtcccttgtgaatgttgaatattcacagcatctgtagtgcagattgcctggtctggactctggagtggtggcagcgggttctgtactgtggtcaagatgtttcttctggctttctaaatgtgtcctaattggattctcagggcctcccaaagcttgtctttcctggttaaactggttagagtgggcttccatgtttataaataagaatcttgactgcttacaacactttatgtgtgttatctcattgaattctttttttaatttttgagatggagtcttgctctgttgcccaggctggagtgcagtggtgcgatcttggctcactgcaacctccacctccagggttcaagcgagtctcatgccgcagcctcccaggtagctgggattacaggcacacagcaccatgcctggctaatttttgtatttttagtagagactaataaggttcaccatgttggccaggctggtctcaaactcctgacctcaagtgatccacctgccttggcctcccaaagtgctgggattacaggtgtgagccaccgtgcctggccctccttgaattctcacagtaacctagtgaggtaggtgttattatcctcttcttgtaactgaagaaactgagtcaagaagagatgaactaacttgctcaaggttccactgtcgataagtggaggcccaggatttgagtccagatcctctggttccaaagcacacattcttaaccaccatgcatctcctgtcagagatttgtgggtgtggaaaggtccttgcaaatcacttgtcagtagtacagggtttcatgagatctacacctgggctgggcacgcctgttggttttttactgacaacgcataatttttcgaggagtggtaatcagaggcaaccgttctagtgacagtgattcaggcgtaaacacttggctttggcccagaggttgcactgtgtgagaccacaggtgaacactagaatgtttacactcttccggagtctgtaggtggatgccagggacagagaatgagattgtaacccagagaaagaaagaaaagaaagaacgaacaaacaaaagaaagaaagaacgaacgaatggacaaaagaaagaacgaatgaaagaaagggccagcccctggggcctccttagataaggaagagaaaggagaccttgcctcaagctcagaaactggttaaaacacgagcccagtcacctagtgataagcagtgcttggttctattaactctgacaacatagtactatcttgggcagagctctttggagaagcaggttggctaactggccaacctcagttgattctcatggtcttggaactttcctgggggtccaacttcctccgttctgcccctcttttttctctaccttctatcgttttattctttgtctcctttatttttcttcaacaaatatttttgagcacctattgttaacaattcaaccaatatttattgggtgtttgctcggtgccacttacagttctaagtgctggagatacagcagtgaactagccagacaagctgtcatagagtttccaatttagtggcagtggggtagtccagtaggcatgaagccaggcaggtaccagttgttgaggtggtggtagttccacccagtactaggaagataacattcttatccccattttacagatgaagacactgaggcaagagagcttaaattaattgcctgaggtctcacaggtaggctgggatctctgtgagatctaggagtgccagagccacttgggtccagccacccacacctcttccctgtgcctcaggctgggatgacacccagagcctctcctttctccctcacctgggcccagagaccacctccttccctctccttgcattgctgctgcccatgctaaccgaaggagcctcgccgtggggcggatgtggcctccccagtggcccacttcctcctgcttctgccaacagcagcattggcccctatgatttgaattttttttttttttttttttttttttctgttgatccctctagcggcaccagatgtgggtggggtggagggtgggtacacccacactcccttaagcctggaagtaacctaggttccagactctgtgtgtccctgaatggtaatagtgactctcttcttagctgtctgtcccactgggtcctcccactccccaactggtgctcctgcttttcctcagaatgggggacataaatctccttctagtcccaacccattgtcaggcagggcttcctcctggagggctgacttcccaggactgggccagctaaaagctaagcagtatgggtaagagcacggggttctggagtcagacagacctaagttcaaaccccagtactgccgtggacaagctgtgtggcctcagacaagttgattaacctctctgagttccttttaaaataggctgaggtctgtagggataaggtacctgaggtcttagtgcctggcacagagtaaacccacgtgttggctgtttccattattgggtagaacagaggggcctcctggcatcagtgggcattttgggcctgctgctgtcttgtctatctaggccttggttttgcctttcaggctggtgcctctttgcagtttcactttagcaagtgaaactttatttttcctgtttctcctgatctgtttcctccttattttccatagtgaataatcacacataagcctttcttttctcagggcaaggttgctgtctgtgaaggagtggaatgcctgagcatccctggtaggaaaggaagagtgaccagcatcaatggggtactctattccctgagtagcaagccctcttcccgccttgtccctggctcccacacctgttatcctgccggcagtcatctccagtatcccagaggagccatagggatgggtgtttgaatataagaacactctgcagctcagatatgcggcattacttttcctgtttgactcagttctgcagagggttgctgagtgactgtcatgtgcaaagcacgtgggaggaaagatgaataatgagagcaatcgaatgcccattcccttgcatccagggtgctctactagacctgcgttcttccatcattctttcagcccacgtggttgccaatactgggagttatcagtcttttccatttttgccaatctaatggataaaatatcttgtattaatttgcatttcccagatattcatgagattaggcatacgctttttgggcacttgtatttttttctctgggaattccctcttcgtattactttgtcaatttttctagtggcttttttatttgagacagggtcttcctctgtcacccaggctggggtacagtgtccagatcacagctcactgtaacctcaactccagtgatcttcccaccttagcctccctagtaaatgggactacaggcacacaccactatgccaggctttttttttttttttttttgtagagacagggttttgccatgttgcccaggctggtcttaaactcctgggatcaactcatcctcccaacttagcctcccaaggtgctgagattacaggcatgagccactgcacctggtcccctgtctttttttttttaattaattgatagtaactctttatatattctagatgccaatccgtgatttagtctaaaaataaatccccttggtctgtcctatgtcttttcttttggtttatgaaatcttttgtaatacaggaacgtcacacttccacagtcaaatgtgtcagtcttctaaatagatataggtaccttgtatatactccttgatatatcacattgattggtggtgacctgtttgtctccctggctgtcagactgtgagaaacttgagggcaggggctgtactttattcttctctgtctctctagggactagtgcaaagctgggcacagagttttgtgcctgaatgagttttttttgtgtgtaaacgtggtataaaacaggtcttgtgactgaatgagggaatgaatgaaaaagccctgtcctgccctccctgcagagatggggtctgctgcagagatgggagtgagtcagggagtgaatcacaagctcttccgtggctcagctgacatttcaaaagccctgagcagagaagcccccctcattccaagagagcctccgcctctttgagcaggcacagtgaagctctgctgattatcaaactctgtgtgtgtatgtgcacgcacgtcaggggtttagcagttaaaactcttagtgctgcatattctgcgtatgtgtgaacaaggctttaaaaaatctctcagaggacctgtgtatgtgtgtgggtgctgggggctgcatagagagagagttaaaagagatgagggggtgtttagaatcgttgcaatgtattgcatttgtttctgggagggtggggcgactggagggggttaaatagctcccagaggcgctcttgtgagcggagcttcctgaaatctctttatctgtggccacatgctgttcttggttgtccacgtggttccctggtgtccctgttgctgaaggcacttctgttttgttcttggaggcttggcttctcattgccattttctaaagcagtagagagtgccagttagattgttagacccaaataatctgaaatgtgtgaaaaaatagtaaatatttactgtaccttttgtggaacaggttattgccatggaaatgcactgtacacgaatctggatgatggagggaagctggctcaggagctatgggagtgtttggataccatgccgcctgaattggcaggtttaggagtgagtgccgtgggtttagaatcacagtgtggttgggtgaggctgaaacacttggtccccagtcaacctgtactgagaggggcatttattcattgcttcccacatgcagggtgcttcctagagcattctccatgcattattgcgtttaatcatcatgccaccccaatgaggtgccattatcctccctgttttacggagacacagagtgtttgatctacttgcttgaaggtacgcagtcaatgaatggcagagccccctgactctgttctctggagcttgatccttccctgctcagctgtttctctcactgtgatttaccctagagaaagctaaccagctgtctaccggggttttattttccaatattgacttcggggctgacatttagaaaccatcaacaatttccagcttctcttgaaaatgtgcacaatctggctactgtgtggggcttccctagtggctgctcccgagcagccatccaggttagccgggcatcagctctgcagttggcgctgggcatcctcctgttgcagctggggagaaagcatggggtatcacacccaggggctccttgaattaattgagaactgtctgttgagagctcctcatcctgttagacttgacatttaatttagctgttgttttcatttgccaattagagcttttgagattcttttgattttcttcctgtggtctcaaggaatttgtgggtggttgagtgaagatcttcatggcaggaaaggaaggctgcaacaggagatgtaatgcgtgagcacattcattcattcattcattcatttacttgtttattcatttgttcaacatattcattgagtattggatgttgaagttacaacagtggaagtatggcaataaataagacagacccagtcactgctctcaaggagcatatagtcaaagagggcagtcagacatcaactatgatgcacgttacagggaaggcatccatcttttttttttttctgtgtcacccaggctggaatgcagtgatgtgatctcagctcactgcaacctctgcctcccgggttcaagcgattctcctgcctcagccttccaagtagctgagattacaggcacccaccaccatgcccggctaatttttttttaaattttattattattatattttaagttttagggtacatgtgcacaatgtgcaggtttgttacatatgtatacatgtgccatgtagtagagacggggtttcatcatgttgaccaggctggtcttgaactcctgacctcaggtgatctgcccaccttggcctctcaaagtgctgggattacaggcatgagacaccacgcctgaccagggaaggcatcgatcttagactgacttagtggtgtctaggtctctgaaggaggtgtcagagaaggtctccttggctaatctttgtgaccaccggagctctgttagtttcataagacataagtctcagcaactgttgcagaaagacccttcctcagtaaggatgatgggctcctcgggctcttgcccttcccgtcctgggaggaaccttctatcaagagccatggctagtcatttcatccattgggaatgagcttactggctccatttatgagagttagtttagactgaggagtaaaggaggagtgaaggagtttgggagttgtcagtgataagcatgcacatttggagttgacaggacagcatggacactagagcctgaacaccttagttcagcttagctgcactgcctattatgtgatactgggctggtttcttaactgttctatgcctcagtttccccatctgaagttgggaataaaatactcatctcatagggttattgtgaagagtaaatgagtcaagctgggtgtagcggctcatgcctgtaatcccagcactttggaaggccgaagtgggtggatggcttgaggtcaggagtttgagaacagtctggacaacacgatgaaaccctgtctctactaaaactacagaacattagctgggattacacatatgcaggtgtgtaatcccatgaaacacatttcaaataattgctaaaatttttcaagctgtggcataagagacaacagtcctgaagaggactgaaaggtcttgggatgcaggggagcttaatgtattaaaaggtgacattttggatcagtagggaaaaaattacacacaggtgtgtgtgtaatcccagctacttgggaggttgaggcacgacaatcacttgaatctgggaggtggaggttgtagtgagccaagatggcaccactgcactccagcctgggcgagcgagactgtctcaaacacacacacatgcacacacacacacacacacacagccaggcaaaggatgaagagaagcagttaataaatgtgagccattcacgtgtgtattatgattatcacgtgatatcagccagtcctgcttgagactcacttttccgacagttctttcttcggtggactgtacccatgcccctgtgtgccatatatttgtgatttccagccttcctttctgataacttcaattcattgctcttcccaggcaagtccttcaatggttatggggtgccgcgcttgccctcatccccagctgagtgttctgcgtttggggacttgtgtttataagtgtgggaggctgtcccctgggggttactgcccagacagttagggttgtccataataacagaaaagtgcatggagagagaaggtgcaggtccgcctatttgatgttgggtaggatgtgctgcttgatgaccggtgaaacatttacttctcccaccatgggcgagaccttggatgtgtcctttacctctctctttgtcacttctgtcctgaactgcccatgagtgaccaggggcttccgacagaagtgtctcacaatccaaccacacagcagaaaggcattttcctttggatttgagctttgtccctgcactgactttttgtgtcatctcctcttcattcaatgtgagatactcaccttgattcatagaatgttttctcattccaggtttgtatttttttaatcaccaaaagaagcacttatcataaaagactgtgatgatgtataactgtgtatttagtttgaaaatcttcaccttatagaagcaataaacaatatttaggtgtattatcctgtgaaatttttataaatataagactttattacgaataaacaaaaaaagagatcatatcctatatactttttttataattttttttgagagagggccttgctgtgtcatctaggctgaagtgcagtggtgtgatctcagctcactgcaacctccacctccagggctcaatcctcccacctcagactctcaagtagctgggactacaggcacgcgccaccacgtccagctaatttttgtaatattttttttttgtagagatggggttttgccctgttgcccaggctagtaactttttcccttattaataccttatttagatccaccttatgttttaaatggctgcagagtgtttcataatatggccaccatattatttacattcatatttataatttgtctaaaacattagcaataggcatttggattatttccaagttttctctataatgaacagtgcaacagtgaacactcttgggcactgtagtggggatttccatagaacaattcttagaaatggggtgtttagggcaaaggatattaacatttttagttgtaatagatattgctaaattgctctcaaatgttgtgccaatttatgcacccaccaacagcgcacgaaagtgcctcttagaaaatgtcttttagaagataaaatacctattgttaagccatgaaacacatttcaaataattgctaaaatttttctagctgtggcataagagacaagagtcctgaggaggactgaaaggtcttgggatgcaggggagcttaatgtattaaaaggtgacattttggatcagtaggaaaaaaaatggcttatttaatacatggtgctggcataattgggaggccatgtggaaggatgctgagtttgattcctaactcatacaaaaataaattacaggtggagtaagctataggcagtaaaaaaaaaaaaaaaaaaaaaaaaaaagaatattagaggaagttttaggagcatacttctgtaaccttgagtgagggaaatccagaagccataaagaaaaagattagacagtttcaattatgtaaaaataatttaatcttttaaaaggagaatgtattcatgaattgcttatgtaataagaaagactattaaaaataggtccagtagataatgtacaatggtttccaatgtgaataaagttgaagttaataaagaaaagaaagttttaggacatgtcagggagtttttgttcaaggattgagattctgcaatgtttattctaaataaagatgaatgatagactagtgcacatgtagtaaactagtaaatgtgtagcccataaaccttgtaagccctggaagggtaaagaaaaagggaaggaaatgttgttttctgcctctttattttttgttgttttgagaaagttgagtacccacccaaagccccaggtgtcccaggagagagaagattgaaaacatgccatcaaaacaggagcttcagcctcagccacaagctccagtgtttactgggggccagtgcccttattcccacgtgaagcatctgccttttttgcccccttgaagtctgagtctctcgtctgttcctggagatttttagccaagcccctcctccccacccctcaccttagtatttgtaccaccctctgaatcaaccccaaagacacccctttgtactcttcccttcatctggccatcaccagggtactgtggtcattgaagctgagtgtgtgccctcactttccgtaaactcacagttcctttattctgcaccttcagggattgcaaatcgttaagggtatgccttcaaataccagccctctgacttcctagctcaataacctcacacagctctatatctcagtttcctcatctgaaaaacagtcatgaaatggcaccacctcctagcattaatgtgaagattgttattattatgtgttattaattattattatgttatcctattaatatatgagacagaatctcactctgttgcccaggctggagtgcagtggcacaatcttggctcactgcaacctctgcttcccaagttcaagggattctcctgcctcagcctcctgagtagctgggattacaggtgtgtgccaccacgcctggctaatttttgtatttttagtagagacagggtttcgccatgttggccagggtggtcttgaactcctgatctcaggtgatctgcccaccttggcctcccaaagtactgggattacaagtgtgagccactgcgcctggcctatcttattattattattattattactttttgagatgggatctcactctgtcacccaggtgggagtgcagcagtgcaatctcagctcactgcaatgtctgcctcctgggttcaagcgattcttctgcctcagcctcctgagtagctgggaccacaggcacccaccaccatgcccggctaatttttgcatttttagtagagatggggtgtcaccatattggccaggctgatctcgaactcctgacctcgtgatccacccacctcggcctcccaatgtgctgggattacaggtgtgagccactgcgcccagcctctttttattattatacttagcacggcacttggcacttaggaaatgttcagtatatgttagctattattggctactgttatttcttcttcttctcctcctcctcttcttctttctcctcttattcctcctcctcccccactcccttccaccccctcttcttattcctcctccttctcctcattattattttaagtacctccttaccaatgcctacagaaatagactgacctagtaccaggatctagaggagttcaatcaagttcgtctgttgccttcaaggtaacagcgtagtggtggttccgagccagatgccagacccagtctgcctttgttcaaatcctggttttacacttaatactgtaggtacctcgggcaagttacctaacatttcttcacctcaatttctccatttgtaaaatgtatataatgatagtacctaccacgcatggttgttaggaagattaaatcaattaatatttgtaaagtagagcagccggctcattgtaagtattgggagtattggttaaaataattacaaaataaacaatctcacttagatacatcccttaccccctgtggattatgtcaagggtgaaagaaacagtgtgcttgaaatcctgctgtgcgccgagctgtatatcagaggtgttatggtgattcgtcatcattctcctgaccactttccatttttcttttagagtcaacactggccaatctttagggaggagctctgatcattgagaaactgacactgtggaagggggcatttctgactctctcttcctagctccatttgatcttcctaaatctttcaataatgtgtcattggggtaggaccaaagaaaaacggggtgaatgtacggttgctgctttgtttcccatagtgggagtgactctgatgtttcacaaaggcaggggtggagaggcagcgcctcgcaggaaagccttcttgctaaatcgaggacttctgcacagaaatagatacaaacttgcttactgtttaaatagaatattagcgattatcttttatccagctggagtctcctcggtttggtactgcctcaaatgagcagcctgcaatcttgggtgtcacttcctcactggttctgctttccataactgtgttgaaatcactcccccagaaggtcaccaaaagggaaaatattagtgtgtgtttattggcacgatcttgcaggtgctgggctaagtgtagacatgatttattttcatttaatcttcaaggtagttctaggcgatgtccccccactttgcagatggggacactgatgtgcaggaaatgaagtgacatgctgtagcactgttggtgctctgctgtgtcccctcacccttccatttcattgcattctggcctggcttccaatgggcagcaactgcagctgttcacctgagggcttgctctgccgtagtccattcggtccataggcatgtcaggctgtggaagcacaggaggagaggtgagggatggtgcaggagagaggagaggatgattaatgtcccccagggcccatcctcaaccaatgacttatgggaaacaacctcctagagttgtattaagctccagtgacccagaatggtaacaagctcacaaacacttccttttttaaaaaatttcacaaaaatactttattatacccatacctccttgttttagcccatcccagtacggtggtatcttcagaacacttccactttcccctctcctcacctcttccctcccacccttgagatgtaatctttggaccacttttacttctttgctttctctcagcaccctttctcccctactctatggtgactttgtgtttttgaattgaagtcgtttcatgtctgtgtcttttttttttcttcaactgttattttaagttctagggtacatgtgcaggatgtgcagatttgttacataggtaaacacgtgccatggtggtttgctgcacagatcgacccatcacctaggtattaagcccagcatccattagctattcttcctgatgctctccctcttccctccccactctgacatggcccagtgtgtgtcattccccaccaccaaatgtccatgtgttctcattattcagcgcccacttataagtgagaacatgcagtaaaacactgcctttataggcttccttcccttcactgtcttacttccccactccctactgctgctctctgggatcacctctcacagaagctgtttgtactttaatcattgtctgagagtctggggtatcccaaactaagataattgcccaaggtcttagctaaattcaacagccctatttgtctttatcctccttgtggcaatgccactactaatggatgtcccttcttaaaattcttccccattttggcttttgtgacacgtaatagaattcttctacttctgattatttctttcctttttcattaattggcagctctttctttttaaaaaaatttgctagatttttgcttatttttttttttaagaaatgaggtctcattatgttgcgcagactggccttggaatcctaggctcaagcgatcctcccatctcgtcctccgaagtgctgggattacaggcgtgagccactgtgcccatctttcttttcctttctttagccacccagttttaggtacctccagtatcccagtattttagttgtaagtgacagaaaatctgactcaaattggtttatgtataacaaaatgtaagttattggatcacatacttgggaatcttaggataggtggcttcagggaagatatgatcaaggtgttcagcaatctgattctctctccatcatgattcagctttcctctgtattgcttgattctcaggcatgtgcttgactaatgaggcaacaacaacttgcaggtccaatcttatcttcatcaatggtatcttaactacatcagtggtataggactgcttctttccttagagtcccactgtaagttttgggtttcattctcattggcctgtgttgagtgatgtatacatttctaaaccaatcacagttgccacggagatgtaatacaggttgagcatctcttatccaaaatgcttgggaccagaagcatttctgagtgtggattttttttttcttcagattttgaactatttgcattttacttgccagttgagcatcccaaatccaaaaagttaaaatccaaaatgctccaatgagcctttccttggagcatcatgtcagtgctcaaaaggttttgggttttggagcatttcacattttgggttcctggatttggggtgccctcatttcccaggctgggtcacataatcacccttggagctaaggttagagttgagccctactccataaggactgagagtggggagaggtgatttcgcaaaggaaagtcaaagtgctgtcacatgaggggatgggtactggagaggcaaaaacaacagatgttcatactccgcatctctgggttcatttatctgctcttctctttctctgtgaatcatctgatgatttccactcctgcctgcctgagtaggactctgaaactcctgcctccagatctgactccacttctgagttgtagcctcctttcccccaccctctagagttaggcatttccatttggtggtgccatgcagacctgaaactcagtgtgccacaaccctcgccacctcccacctggtttcgctccctaacgtccctgtctttgtcagtggtgccagttgggtttccatctctccctcatccgtcccaacccccacctaatttccagccccattgtgctgcttttgattccttgaatgcacctttgcaatgcttttccttggtttgtaaccctctttagcatattcttggtttggtgaacccctggccatatttagatatcagctcagaattcacttatttgggaacctctaacctggtcacccatctctgccaagcctgagttagatgctctttccctgagttctactaggccttcatctcgtctaccacagcacttctcactcagactccaatgactggctccattgcctgccttccccgtaagggcaggggcacatctgtgtaattcaccattgtatcttcagcagtccagcctgacaattgagtctaggctggtgtccaacaaaccagtctttgttttttttttcttttattttaattttgatagttttgggggagcaagtggtttttttggttacatggataagttctttcatggtgatttctgagattttggtgcacccatcactgtaacagtatatgtggtatccaatatgtagtcttttattcttcaccccctcccaccattccccggagtcctcaaagtccattatatcactcttatgcttttgcatcctcatagcttagcttcatttacaagtgagaatatatggtatttggttttccagtcctgagttacttcccttagaacaatggcctccaacttcatccaaggtgctgcaaaggccattatttcgttccgttttatggctgagtagtattccatcatgtatgtgtaccacattttctttatccactagagataaaccaggttttgaattcaggatccacctctcctgagctgtgagcacatgggcaagtttcctcaccagtccaagcctgttttctcatctctaaaatggagacaatgacggttcctccctcactgagcacttgtgagaagtaagtggtgatcacggttacaaagtgttcagcacagtgcctggaacacggtaagcgttcaatcagtgccaatgatcatttattatactcactatgaacattatttttacctcatgcagtgtctagaacataatcaactctcaacaaatgacagctcttattattagccaagaatggaacctgaaacatagtacgctccatggatcattgaagctttgtttttgaaagtttgaaattaacaaaaagagcctttgatgtttcccttgctgcacattcttcccctccaggtggagtgggcagtttccactgggtgctggaaccaaccctcctgtagttggaggtgatcttctctgatgtcactagggtgccgaggtgatgtgtcaccagcacttgtttgcttgtgtgatgtaatgagggtggacttgcttctcctagggaagagcctcattaaggttagcaaggggcttgttcctgggaagttctaaggaccgcctggggctgccacataaggaactccccttttctcattttgtctccggtaagttgttattgatctgtacatgatgtttctctttcttaccagccgtgggaatgggccatcctctggcatcactgttgccttgaacgttaccatcaccaccgttgccatgaagtcatgacagcagcaccattggctctggtttattgggtgtctaccatggacagtagtagggctagacatttagtatactccagggctactgcggggattaaatgaggtatgaagcatctataaccccacggtccaatagggtagccactagccatgtgtgcctactgagatatacattttaattaaagttaaataaagaaaaaattcaatttatcatgcacagtagccacatttcaagtgctcagtatgtgctcatggctgatgtagctggcagtgaagatggggaacattgtcatcatcacagaaaattcttccacagcgctgatctagatagaacaggattcagtccgctgtggcttgtggatccatggactgaattcatacacacagaattttgtgggaacacagctgtgcctgtttgtttatgccttatctatggctgcctttgcgctacaaggatggaattgagtagttgtgacagagaccatgtggcctgcaaaacctaaaatactcagtctcttatccttgaagaaaaagtttgtcagcctctggtctagaacattgcctggctcttggtaaggttaaatacatgtttggaactttttatttattgaaaataatatacattttgttctccacctaaccttttaaggtaagtattgttatccctgtcctagagatgagaaaactgggactggaattctgtactgtcacttccagggggcaaacacctcatgaggttttttttttttttttggcagtcttgctctgtctcccaggctggactgcagtgtcgcgatctcagctcactgcagcctctgcctcctggggttcaagtgattctcctgcttcagcctccccagtagctgggattataggtacctgccccctctccccgctaattcttgtatttttagtagagatagggtttcatcatgttggccaggctggtcttgaattcctgacctcaagtgatccacccgccttggcctcccaaagtgctgggattacaggtgtgagctaccatgcctggtctcatgagtcttgttcatcacttacctccttttgttcttccagcttcagtttcaggttcagggggtacatgtacaggtttgttacatgggtaaattgcatgtccctggagtttggtgtactaatgatttcatcacccaggtagtgagcatagtacctgatagtagtttttgatcctcaccttccaccctcaaggaggtctcagtgtctgttgttcccttctttgtgtcatgagtgcctgatgtttagctcccacttataagtgagaatatgcagcatttggttttctgttcctgtattaactcacttaggatagtggcctccagctgcgtccatgttgcagcaaagagcatggtttcattcttttttatgcctgcatagtattccatggtgtttatataccacattttctttatcccatgcaccgtggatgggcacctccgttgatttcttgtctttgctattgcatcacttactcttgaatctggagcagtgcctagcacataatagacattcaggacatgtttgttgagcaatgaatggatgagttaggaatcaattacatataaatcaataatcaataatcatcaatgatgaatttctatgaacaaatatgaaaattagatcggccgcattgtagagatgaggagacagccctgtagaaggaaagtgcctcatcaaaatgcaacatcgctgtgaaagtgtagacttggagctccagctgaagtcatctgtgtattttctaagctgtcccctctaccatcctgccttctccgggagctgccaaagtgcagcgctgatgcctcctctctctgtcccacagcctgacttttgttcagctcctgcttctcttcttcaccaactgccagcttcagctgctttgtggcaccctggggcttgaagcttcatttctggtgctgtggcaccacaaagctctgccccagtgtcacttgagtccaagtagatcagccaagtttgaatgatctctctcttggccacttcagtctatgaagctggagttgagaccatctgtgattttacacattcgttacagcaaaaccaagagggccatggggtaagagggccattaagctagaggctgagcaaaactctgctcttgaagcaccttctgagatggcttctcatggaacgtctgcgcaaagtggcttcacatccaattaagtcaaagatgcattaaatgaatccagtttgtaactgcttccaaccatgaagtcacagttccatctcttgccctgggaggggcttctttcaggctctgaggactggagccctggagactttattgccttacggtttcctcctctaccatcagatgtttctttttcatgtgttctggcctggatttgaatagactgcctggatttgaatgctgccttcacctctttctggtgtgtaatcttggacaagttaccttctttctcagtgcctcagtttcctcttcagtacaataaggataataataagacctaccacatagctgtagagaggattaaaggagccaatatgtggaaagtatttacaacagtgtactgcatagtagcttttctataagtgattattattattatcccttcgaatctaaaatccctctagtttgtttcagaggagcaaggattgtgtctcgcctgcctttaaatccctttaagttgggtgtctcaagcccaaccatctgcaggagactagaaggggacttacatgagtgaattgaatcaggtgtggatttctgtgaactagagaatgcaaggctgtctgaaaggggaactattccttattcatgcatcacatatacactggtgtgccaagccctgttctgcatctggggacacagcagagaatgaaccgggcaaaattccctgcccccttggagttgatgttgtagtggactaagctctgatgactctgttgctgcatgagaatgtgggcccactgctgacaaaacttctgatttttctgtaagaaaagccggaaacctggatttgtaaaaaccgtgaactctcctagcttaagaattggcagtggtttccatttttttttttttttaaagcacagtacatgctgtgaacccaagagccagtttgcagcccctgccttaagacactcctctaattgctctgggaggaggcctgtctctgccctgcaaatcagcagctggtcggatttcaaggtcgttggtgtggagggcgcctcctccctctcctgcgtggaggttattgtggctttttctgcccacagagcagatgacgctgccaccaggcagtgagttagaatattccttctcttatccttccttttggatggtggccttggctgggttcccagccccctgacagcagaagacaaaaggatggaagcagcttcctcatagtcacccatgggggcgatagggtggtgatggtgatgtggagaaaatgcattgggtcaggacagccacctttgaagccagaaaattaatgatctctgttgcctgaatcttttcaaagtggagaagtaatttaaaagcttgtgtgggaaggattgagaatgggattgagaaaagaagtttaggttgctatcaggaacaattcctaacagcaggaggtttttggagaggcagtggtgaaattccttggaaatttttgtgtggtgtctttttttcttttttctttctttctttcctcttttttgtttttgtttttctttttttgagatagagtctcattctgtcacataggctggagtgcaatggcacaaccccggcccactgcaacctccacctcccaggttcaagagattctcctgcctcagcctcccgagtagctgggactacaggcacccgccaccatgcccagctaatttttgtatgtttagtagagacagggttttgccttgttggccaggttggccttgaactcctgacctcaagtgaggtccacctgccgtggccttccaaagtgtttggattataggcgtgagccactgcgccgggccttttatggtgtctttgaagtgcttgtttaaatttacatgtggttgcctctcagtggggtgcatgctctctggttttccccaagccccaccactccctgttgtgctttacccacttgcctgacttagttatgcttactggcctggcctttgtgggtctttgagtttgtgccttctgctctgaaggaagcatgcttgagatgatggaatctaggttcaaacctacctgccctatctgccctttactgacttgtgtgactgtggacaagttcctccacccctgaggttgtcaggaccctgcaggaaatagaaccattcaggtggctgcaagaagaaagtttcatgaaaggactatttagggagacttgggcaaggttaagattacaaataaggaatgtggaagcacctagggccttgcaacagcaggaggcggttaccgtctgtaaagaggaagaagcaagcggagggaatagtttggagcctattgagagctggggctaagaaggaaggcatcgccagcaggaaccatggtcctggagggatgaaccgcttcccaaatagcagtaccgaggcagggaggaagagggggaagaaacaccccagcttctcttcacctctcccattgcctgttggcctcacccactggctgaacccagctggaaaccagaaggaccagatgatgaattctgtaagggtcagccttttggggctcagctcacagcagaatcagagagaaaaaaatggatctgagaggtgaaacaaggaacaagcagcacgtaactctcagcttccctaccttgaaagtggaggagaatgagataactgaccttggaaggttattgggtggctcatgtactctcgaagggaagggcctggtcaatattaagtactcataaatgctgagattcagtgtgggtttcaaaccgtttctaggagctaaaggtcctgagaaagggcttcagtttcagtatcaagagacattctcaggtgggcagatctcttgaagccaggagttcgagaccagcctgcccatcatggtgagaccccatctctactaaaaatacaaaaattagctggatgtggtggtgggtgcctgtaatccaagctactcaggaggctgaggcaagtgaattgcttgaacctgggaggcggaggttgcagtgagctgagatcgcgccactgcactccagcctgggcgacagggtgagaccctgtctcaaaaaccaaaaccaaaaagacattctcctccttcccctgcagtggggcccactgggaatggttgcatcttccatggggagtttaaagtgaatgtgtagtggctaagagcaaagaccctagaaccaagtaggtggacactgtggtagtccatcagtgtggtagacactgatctttctgttactatagattaatggccttgtacagtatgcactattttgtgtctgccttctttcacttaaaataatgtttttgagactcacgcatgcatgtgcctgtattggagtctattgagagctggtttccagtcctgattgccactgacagtcaagttacttaacttttcatgccttattttctcatctgtaaaatgaggatgttagtagtttctacctcattgggttctgaggattaaaatgagttaatctacgtaaagagcttaacacagtgtctaacacatagtagacaatcaatagatgttagctattgtaattgccatcatcgtcatcatcatcatcattatcatcatcatcgtcaccatctccatggatcagctcaaatcaaaactgacccattgtcaatagaaaaattctctgtgggatgaagtccatgccaccaggcctctcgggaacttcattgatcataccattatcttctcatcctcccacagatatgatatttcagggagtgattgataggtgtgtgtgtgtgtacgtggggaagggtgggcttgtgcctgactccagggacagagtgctttgttatgcagaatagcttgcctgtcatcccactacaggccccttccttgaaaagttccaggctatttttgagccctcatggctcacatgttcctttctacatcatgtcaatgccagtacagaaaaattgaaaccttttggcagcatctaaagcaaaagagatttcaaagtgcatggaggatgagtgttgctcaaatgacagggtattaaaacgtgacaagaaggctgagttaagagactgcaggcagcttgtgtgtttgtatttggaccttgctggatttcttgggaaatcagtggagttgtccaaggttaatgtcatctccaagaaggcaccaaagggtagtaacactccttcaccctcatttgtacatacactctgcaagagcggaagatgatgcagccagtggagtgggcggttgtcccagagcaccacctgggctctgagctacaggattctgcaggggaaagcacctgaggacagagtgaggtgggttggtgccacctgggagctccaggcttttgtgtgctgatgtgcaggcagatactggagccagaccgaattgtgtgcgaaatgtgggtctaagagtgaaggcaccaaaccctcactttttttactttcattcagccttcccatttttcttcaaagggcagaatatgactttggagtcaggtagacctgaattcaaatccctcttcttcttcagtgagtagctaaatctttccaatgctttatttaaaaggaatcacgatcacactttcagggttgttgagaggtttagagattgtggtgttacagggcccctggggctcaaaaggtgtttgctgaacccctgtcttgtgttaaatagtcacaatagtcccaaggggaggatgaacaggtagcactgccatttcataaacaggtgactgaggtgcagagtggcttatccataatgacacaggaggtgaatgctggagctggattgaaggctgagtcattggactctcctctgagggaggcagtacagagtagtggtcagggcttgaccaacctctagagtccatgggcagattttctgggcctctggcttagttttcctcatgcataaatggaatgtggggattatagtagatgtactttctatggttgtgaaggttacatatacatgagataattctataaattcttagcatgtgcttgagttacagtaaatatgcaatgaagtattcactactgttttagtattatttttattagaagccgtggcagtagttaccatcattgtcaccatctccatcgatcagctctaatcaaaactgacccattgtcaacagaaaaattccctgtggatgaagtacatgttgtaggtgtagcgggcaatcgtgatcgccatcagaaattcatattggggtttggtttacaagtgttggcctctgggagtgtttcctacgtgctccttctctcctcccctttgaggacggatggtgtgatggttcctctccatttggtccctcctctgggaccagcattctcctgccttctttgtcctactctgtgtcccaggaggtagacccctgtggactgtatctcctggactcccttgctggttgacttttgtctgagttaagccaaagggaggtggcagcaagagacgagaaggtgggaggagagagagtttggggtatttccacctgcagctccctctgtccatctctggccccgctctgtgatgctagcccccgcgaggttgcccatctctcagggtttcctctcttacttgcccctgttacgtcatttcatgggactatacctttagctttaggtgcagaacagttttccacagttaaatgtctttaattgaacatctagaatgcaaaacatattataagataatgtgttggattgttttcctttaaaaaatggtacaaccactttgcaaaacaatggcagtttcttattaagttaaacatagagttacagtatgatacagcaattccactcctaggtatttatccaagaggaattaaattgtatgcccacacaaaaaatgaatgaataaattaagacttataaatgaatgttcatagcagctttattcataataaccagatactgttaaaaaaaccccagaatattgatcagtagatgaatggataagcaaactttagaataatcatataatggaatattattcagcagtaaagatgaactaactgctaatacagacacgtgcatgcgcgagtctcaaaaacattattttaagtgaaagaaggcagacacaaaatagtgcatactgtacgaggccattaatctatatagtaacagaaagtggatcagtgtctaccacaggctgggggtgtgtacagggaaactttttaggtggtgcccatgctctgtatctcaattttggtggtacatgcgtataatacatttgtattgtcttgtatcaaagtatgcctcatgaagttcaggtatatgaaaatttgtatttgctttattatatttaaatatcagagaatgcaaaattgtaaaaagaaaaagaaatcctgaaagtccttttaactagagacaaccaccaccatccacattttatctatttcctttcagtttttaattttttcctgtacttaggttttccccttcactgtcttatttaaataaaaaagaaagcaaatggaaagtctcccatacgaaggcctttttgctatgagtttaccttgtctaagggcatctagcatgatggtgagaaggttttgtcttgtataactaaaatgtattgggaggaaatgaaaatgtttagcctggtgaaggggaaacattggggagaaaagtgagggagagtgtggtctacagtcgtgagctttaaatcacaaccaatcagccaattaaatactgagctcctgttatgtgtcagtattaggaagacagtagtgaacaaaacatatggctcctctgatttaatggagttaacagtctgggagggaaagatatttttattatttgcaacaacaatagtaatagctaatatttatgatgagctagtgcctattatggtgttaaggtttagttttttcttttagtgtttttaatgtgttgtcacatttaatcccagcaactccatgagtaggtactcttaattctcatttcatggttgaaaataataaagtggcttggagatgttaagtcaaatggggtcatacagtgagcatgttaaacctagactggcaggtcaggacggaagtgatatttaatcctcagtgaaatgatttttttctttttaatttttatttttattgagacagaatctcactctgttgcccaggctggagtgcagtggcacaatcttggctcactgcaaccttcacctcccgggttcaagcaattctcctgcatcagcctcccaagtagctgggattacaagcacccgccaccacgcccggctaatttttgtatttttagtagagatggggatttcaccatgttagccaggctggtttctaactcctgacctcaggtgattcacctgcctcggcctctcaaagtgctgggattacaggcgtgagccaccgggcccggcctctttcagtgtttttaatgtgttgtcacatttaatcccagcaactctatgagtaggtactctttttattcctactttatggttgaaaataacaaagtgacttggagacattaagtcaaatgggaacatacagtgagcatgttaaacctagattggcacgtcaggacagaagtgatatttaatccccaagaaaataatatattttttttctttttttgagacagggtctcactctgttgcccaggctggagtgcattggcatgatcacggctcactgcagcctcgacctcctgggctcaagtgatcctcccaccccagctacctgggtacaggcatgcaccaccttgccccgctactgttttgtgtttttgcagagatagggttttgctgtgttgcccaggctggtctcaaacacctgggctcaagcaattcacctttcttggcctcccaaagtgctgggattacaggcgtaaggcactctgaccagctggaaatgatatttaatctgatatctgaaggatgataggagttaaacaagaatcaagtgtcagagaccagagatatgaggtctcatatatatatatttgctcagggcagggggctggttttgggtgataattaggggctagactgaacagaattagtgtttggaagtgagtggtggtggtggtgagggaggagagaagggtgagtcccagggtaagggatgcaggcacatcctgagaaatgaggcagaagaatgagaacttggcttggggcatgttctgttcatctgaatggtggtgctgaggagacaggtggacagagaggtgtggggttcagggaggagcacaggactgagagggaccagcaggaatagaattcctgaagtcccttggattgacaagatgcttcagtgagagagagtccacagggtagagatcagcacctaggacagagcctcgagaacttcctctaggatagggaagggctggagaacaggaggaggagccaaggagaggaggaaggggccaagagggcaggatcaggactgaggcaggccgacttctgcgcagttgaagaactctaatgtcagagctgtccttaggaggcagagaacccctcgtcctggaagagtgcagggagctgcttggtgaccatcctttggggatgtcatggaaaagatatttgcatcaatctggggtgagattaggtgtctggattggttcaggttcttttgtcatttgtaagcacacaaaagaactctagttatctaaaggaaaaaaaaaactggaaatattatgggttggcacacgagtggtgccaggcctcagagagtacagggcccagggtggctctggggatctgggtggcaggagcgaatggatgaccttcacagggtgacaccatcgggaggaatcagctccagctgttttctgtccttgtcccaagaatcaaatcccagggagaacagtgtgattccccaatgttgtgaggttcagtcatgtgcaaggggaaagccgggcacctcgattgacagccccaccaggactgcataccgtggagaaaggatggcttcccaaagaaaaacaacattccagctaccagagaaaagggagtggacgctgggcaggcaaagccaacagacactttttgtagtctccatggtcctgtgtatgattcagtgatttttgcagtattcacttagcaagtcattcctcgttgcagaattgttgctagtgtttttcctggctggggattaagctttttccatttgcctattttagagtgagttgggggcctgggattgacacgcatttgtctctgggcttcaaggtagcccagagattatgccacctcaggaggcacaatttggtggctgtcactccttgtcatgtcaacaaagggtgtggcttgtggctctgtggcctctgctttaccagcaaggggaggatgctggtagtagcaaagggtctaaatcgctgttgcatcagcgaggtggatgtgcctatcctaaaggcacctactgagaagatgcccaagtaacagacactcatgggcacagtagacctgtcaaacctcatagttcctggctgactctctttgggtgacctgagtcacacgcccacgcctgaacacccactgaaactcctaggtgcattacgtcttctgcaatatctaaaggaattaagggaaggatgaaactctgtatctcaactttcctgaattcaccagtatggactgatggaattgagtgctagtaacaccaagctcctaaataataataataaaggcttacttataggaacgtacgaagcacaagagaaataagggcccccacggcccacccttcaacttctcacatttggtttgttagtcaggactcctttggtcacaagagacaaaaaaaacaattcaagttggtttaggaaaagaggcatttattggcttgtacagaggagttgagagttctttaggtctggctggatttaggtgctccagcatggtcatggggcatctcttggctcagcttttctctgtgttggcttcattctcaaaaaaacttttccttggtgatggtaaagatggcagatgcagcactttgggagcctgaggcaagaagaccacttgaggccaggagttcgaaaccagcctggtcaacctagtgagaccccatctctacaaaagaaaaaaaaattcaggtgtaatggtgtgcacctgtagtagctactagggatgttaagtgggagttgcatgaatccaggtgctcaaggttgcagtgagccataatcgcaccattgcactccaccttgggtgacagagtgagattctgtctcaaaaaaacccacaaaaaccgcccccccaaaaacggatggcagatgcaaatttattccctaccagtttaacaactctgctggaaaataaaccctctttcctaataattccagcaaaagtcctgaagctgattctctttgggtgtcctgagtcacacgcccatgcctgaatccccactgtggcccaggtcccatgtccacccttagagccagaggatgagggcagccttagctggcccacacaatcagtgagccagtgaagagcgattcctcacaggagaagcatggaggatgggtgctgtcaggcagaaacaagacatgccaccacacttggttttggggttaggcctgcttctggtctgagcaatctgctgctggatatggctggtgagtgaagagatattgatgtgtcatccccttagaccatggcattgtgtcctgctctctgcatctttgggggcctgatcaaaagcgggaagtcatggggtcaaggacagtctccacgtgccacccaaacaggaaggatgtccccagcaggtgttctgctcagggtctggctctcccagggttgttactgcagagggaagggtaggggcagctttcttctggtggatttatttacttctcaggcctgttcttttcctcatgttggctcaactgttttatcttgcttagttaaataaatttggtaacattataaaggaaaacagtcttttccggcagttgctgaccactgcaaaattactgctctttcttttgtttttcctttttagtgctgggctgtgaataagcaaatgaagtttgctatctcttcctcccctcttccaggaagaaataatcaccatcagaactttaagagtttcccataagactgggcaaattagaggaaggacctctatacggtggaacagatgcaattgtgcaaacagaatggggttattctctacatatggagatggaacagaccctcccagatgtgttagtgtggggaaaagcaggtggtggaggtgcgttcagagtagcagtgttcagctctcccaagcacattcaaatcacccaggagcttttaaaacgtactgatgcctgcccaccaccctctcctcacagccccattaaatcagaatctctgggagtgggacttgagcacttttcattttaaaagctccctggtgactcctggggagccaggactgagaactagtgctgtagaattgtatatgggcaaaacagcagggatctagataaaaaaagaaaactgaagtagggaatatctcagtccgtacctacagatagcctcacacatgtggtcgcgcatacagagaacgtctctagaaggatacacaggagactggaaagaacggttctctccagtgatgaagtacagtggtgattctcaactgtatactcgtttgtaatgttggaattttgaagccacaagcataaatgctcactgtgtactgaaagctggccagacagggctgtaagatgacccctgaactctagcttgtctgtgttggggccggctgcccacagattcacacaaaccatctccctgcccgtggtctctgcttgccctcctctactcagctgcaatgagtggtttccgagtgtgggagagaccagaagagctcattcattcattcattcgctcacatttttagtaagaattaggtataagccaggcacgtggtaggcacgtgaatctgatctcaccttcacaaccgtatgtgaaattggtggtcttatctccattctaagattggggatattttaacacagaaattcatacaaccaagctgtaaatatttgaggccgaatgaccagctaagagagcttataaactggcagcacttagatgtgtttggatggcctgtacagaactttttaaaaaaatcctatttcacgactctggaccagtgaacccagggccactgttggctagagctgagtgtcccttggaagggcatatgcccctcagttcagcgcagtccccccatatcccttcccttctgtgtcacaccagccttgcatcactcagtcacaggcctagcctctgcaggcatttgcgtttgtcacccctgtgttaaggtaggtaggatgagtgaactgtcgtctgtcctgcagggatgctgagctgaagtgtcctgtggaatgtgccatttctattccaatctggccctctgtctgctggctggaaaaccaagctcctttgctttaagtttcatttgtggactgcatgggatgggctgtgggtattgatttgtttgtggaaaagatgtgcacaatagggaatgtgtaaaatacatcatggaaatggatggttaatgccgcctggctggagtgtggggcagtggagtgacaagagatgagagtcaagttagatggtggggtatactgtgggtagatgccgggctaagcattttgaactttaacctttaggctactgctgtccaataagactttctatggtgctggaaatttcttatatctgtactatccaatgttgtctccagacgcatgtggcatcaagcacttgaaaagtagctggcatgaatgaagatttttattggcattttagattttatttaattaatttacttttacatagctccatgtggctggtagctaccacactgggcgctgcagatttaggcaatagcagtggatgtgttggagcagggaaataatatcaaagctgaatcttcagaaggtgatttttccaggagtgtacaggccgcatggggtgagcagaagtaggtagggataatattgacacttcttagcatctattaggcacttcttgtgtccacacactgtgctaagataactcacttattcctcataacaactctatgaggaaagtactatcattgtccctattttatagactagaaaatgagacacagcaaagacaatgggcatattcaaggtcacacagctaatcaacagtggcacacggtgtagaatccaggcagctcagctgtagagcttgtaccatgaatccttccatcctggaaggaaataaatgaaccttcattgagaatataccttctgctgtcccctggtgctgggcattcacacgtaaaatctcatttagatttttgttaacactcatgtgccattcggtggatttagatcctttgtgtttatggaaacttgggctcatagggatgagatatcaaggcaactgcaatctctgtggacaccagttaaggctttattgtaaaattccatgcctgtgggggaaatcacaggctgtgggagtcggggggaatgtacaggaagatatggcataaaaggtgttgcgaaggaagaatcagtgggatttagcaactgactgaatggcgggggtgaggaaagcgggggaggctttctcctggaacagtgagatgaatgacaaacacacatgtaactgcactgtgtgagttgagagtgtgggctctagaggaagacaaactggtttcaaatacaagtgttaacacggactagctgaacaaccttgggcaaattacttctctccgagcatcagtgtccctgttaatataacgaggaccgaaggcaggaggatcacttgaggtcaggagtttgagaccagcctgggcaacatagtgagatcccgtctctagaaaaaacttaaaaaattagccaggcatggtgatgcatgcctgtagtcccatctactcaggaggctgaggccagaggatcacttgagcccaggagtttgcggctacagtgagctgtgattgcaccattgcactccagcctgggtgacagagcaagactttgtctctataaaagatataatgagaatcatagcaccttcctcacaggactgtgatgaggctcaggttaagcacggatatgaaagccctttgcaaactcaatagcatgaccctgtgagtcactcttcttagtgctggtgagaccagccattgggcagaaatggtgaccagaactttctgtctttgatcatggaaacagttcgggaaattgcctgggggaaccccacttcatcttaggtacttggtagagtttaatgcggataagtctgtgggtcagctttgacctaggaggaaagagtggttctcccagcagctgtagagcaaaatctgcatgccagtggctccaacttaaatgcccttttccaccaaacagtttgcatgtgttgtcttatttgagctgcacaacaaccttatatacataggtactgtgataaaataaggctcagagaggtggagacactgagctaatgtccttcagcttataggtagtaaaatgagtgttcaaacgaaggtcctcctgcttccagaaacttagcctgtaattcctgtaggtgatgggcttctcatttcttctcctaccacagatatctgcaactagcgctagaatttctatcccagattgacatggatttaagggtaaaggttgcttcctaagaatgtcagttttccactatagaccccagtaagaattgtgtacaagaggggaatcgactccaaacagaatatatatatatatatgatttaatttagtcctctttggaatgcaatgagtaaattttagtggttagagtaaaccactaaaatttgggagttaggggtgaagtgcagtgtgaagcagagttgagatctcagtgcttttcctggggcagaaacatccgagagggcccctgtcacccaagcttttggctacagtctactccttccatctgggattaaccaggcgtttcttatccttgctgatctagtgtttcttattgctgctgtaacaaattaccacaaatttcctggcctaaaatggcacacatttattatcttatacttctagatgtcaacattctgaacagcaggtcttccggggctgaaatcgaggtgtcagcagggctgccttccttctggaggctctaggggacaatctgtttcttaccttttctagaggccacccacattccttggcttgcgttcccttccagaaatggcacaattccaacctctgcttccatcatcacgtctcatcctctgactccgagtctcttccctccctcctataaggacccctgtgatcacactgggctcatccagataatctagtataaccccctttctcaagatccttaatttaatcacatctgcaaaatcaattttgtcatgtaagtaatatattcacaggtcccaggattaggacacggatatctggtggtggtgtcagggggtcgggggtaggggatgggaacattattctgcctacagagctggcaggtggcctttcttctttcctttcttttcctttcctttccttcccttcccttccctttcctttccctttcccttcccttttttccctttcttttctccttcccttccttttttccctttctcttccccttccccttcccttccccttcccttccccttccctttcccttccccttcccttccccttcccttccccttcccttccctttcccttccccttcccttccccttcccttccccttcccttccccttcccttccccttcccttccccttccccttcccttcccttcccttccccttccccttcccctccccttccccttcccttccccttcccctccccttccccttcccttccccttccccttcccttcccttccccttcccttccctttcccttccccttcactttcccttccccttcccttccctttcccttccttttcccttccacttcccctttcccttccacttccctttcccttcaccttccccttccctttcccttccccttctctttcccttccctttcccttccctttccttttcccttcccttccctttcccttccccttcccttccctttcccttccctttcccttccccttccctttcccttccctttccctttcccttcctcttcccttccccttcccttccccttcccttcgccttcccttccccttcccttccccttcccttccccttcccttcccttccctttcccttctccttcccttccccttcccttccctttcccttccctttcccttccccttccctttccctttcccttccctttcccttccccttccctttcccttgcctttcccttccccttcgcttctgcttcccttccccttctcttctcttttcttttttttctggagtcagggtctcattctgttgcccaggctggagtgcagtggtgctaacacagctcactacagccttgatttcccagcctcccgggttcaaccaattccccccacctcagcttcccaagtagctgggaccacaggtgcccaccaccaagcctggctaattttaaaaattttttagagatggagtcttgccatgttgcccaggatggtcttgaactcctgggctcaagcaatcctcctgcctcgacctcccaaagtgctaggattataggtgtgagccactgcactcagctgcaggtggcctttctgatcttgcctgtaataagggagggtgggaggtggatagagccggagacatctttttcattctctgctggagctgagtagcaatttccccttttaaacaggccatgtgtgcagtcccctacctggccgtcagacattttcattgctcacctggcccctaggcatttgagtttcagaccccattttgtagttctagtaaagccttgctatagactggggtcagagggctgcaggctttcaacctttgtagagcaaggggttattgaataaattatgaagcatctggagattctgggctcttaactgggtacctgtttgaaagtagggtctagtacatttttttcagtagctcagtaaatgttgcctcttcttaaaaaaaaaaaaaacagaaaacaaaaactggtcttactctgaatttgccaaatagaaatgagggggcgtttatttgtgtcacaaaaggatttgatttctttaaataggcagccctactattttcttcaaagtgttttagttaatgggaaatttgatttgcacaacttttcagaaacacactgtgtaaaggaattacctgcaccagaagctcatgaggtttttcaaagtctgttctcagcttctctgcacatcatgctggggttcacttggcctattgattctgcctcagtggggatggactattcatttctgtgggtaattggaagcctacctaaagtgaccttgtcaatggttggattgacaaatatccaggctggtgggatgtcaggcgatcatccaggagctacatctaccatgaagttggttatgttttctcctttttctatgactgatgatattcattttttggttcattcattcaccaaacatttatttactgaatatcaattatgtaccaggaattgtggtagacactaggagactagagatgagctatctttatccccttctgtctccaaaggggataaagatgaataagataataattgatttttttttttgagacagagtctcgctctgtctcttaggctggagtgcagtggcgtgatctcggctcactgcagcctctgcctccctggttccagtgattctcctgcctcagtctcctgggtagctgggattaccggggcctgccaccacactttgctaatttttgtattttttgtagagaataactgatattttagatgtttggaagaaaggttgtagaataaagcacctacttgaaaatgggggaaactactttcctaaatatttctgggtcaaagaataaattaaaaccatactaatagaccacttagaaacttgatacaatgatgggactaaatataaaacataggatgcagccaaaactgtacttaaaagagggtttttagccataacatctttaaatgtttaatgaagaggaatgggaataaattaattgagcagtcaattcaagaagctttaaaaagaacagtggataatattagctgacatttgtagaatagtcatgatatggttggcatggttctgggcatggaataactcatttagttctgacaacaccactgtgatatgggtcctattgttgctgtcattttccagagaggaaactgaagtacaggaagatgaggtagtgtacctagtcttagagtttgcaaatgatagacacaggatatacacctgatcatcagactccagaattcacattcccaaccaataagtaatacaaatacaagtaagcaatacaatcacagacacacagaacaaaaaaagttaaagtagcaattaataaagtaggctaaaaccaggtagagttgataaatataatcataatctgcttctttaacatgatagaaagataaaaatagacaagaaagaacacaaacttctggaaaaaaaataacgagagactacctaacaatgcaatatgaagaaagaaacaaagaaagagaaaaggtgtaatatcatcccagataagatgctacaatttaaacacgttgagaagaacactgtggataatttccaaggaaaatataaattccaaaagtttgtttgagtagaggtgaaaaactttcctgtgtggttgaagtgtagagagggagagggaggtgaagctggggaaagctcagggatggggcgagactatgctgtcatccctttactttcatgttgaataaaagggaaagttaaacatggaactacgacagggggaaaagagagaataataaaaatattatttggggtaatacggttttctatctggaaaactcaaaggaagcaactaaaactccacaaaagctatttgagtttttttaaaaaatgctttaaaataaatatgctaacaatctattgctttcctattgtttttgtttgtttgtttgttttgtgttttgagatggagtctcgctctgttgcccaggctggagtgcagtggcatgatattggctcacttcaacctccgcctcctgggttcaagcaatctactgcctcagccttccaagtacctgggactactacaggcacctaccaccacgcccagctaattttttttgtatttttaatagagacggggtttcaccatgttggccaggctggtctcgaacttctggcctcaagtgatctgcctgcctcagtctcccaaagtgctaggattacaggcatgaaccactgcgcacagctatttgctttcctatttttaaacaatgaccagttgggaaacaaaatgaagacatgtcaaatttacaatagcataaaaaagaatcccttagatgatgctaaagggaaaatgtgtaggacttatatggagaaaataagagttcaacaaggggacaatcatttcctgatggaaagactcattgttgtcaaggcatcaattatcttgaatttaatttctaaatttaacacaatttcaatcaaagtcccaatcattttttggaggctgagggttgactgaatacaatcccaataaaaattccattggtatttttaaaatcttgataaactgattctaaagtttacttggaagaataaatatgcagtgatagccaagaaaatgttgaaaataaggataatgagggtggacttgccctgccaagatataacatattacagagctactataattaaagcccatattgctatactagaagacagatcagtggcacagaatagaaggcccaaagacagaccccagtatatataattattaaacatataataaagttggcatttgaaatcagtggggaagggatgaattattcaataaaggatgctgggacaattggttacctctttggaaaaaaatggcaaattggattcccatttcacatcagattccaagaaattagacatggatcaaagagtttaaagtggaaatgatgccatataaaagtacaaaaaaactccaaagagtaatatttatatgaccttggagcatgaagaaggctgtttgaggtgtacttggactgtctttctttgtccagttttcccttttagtggtttaaaaggaatacatagtagtttttatatttttatttatttatgtatttatttttgaaacagggtctcattaggtcacccaggctggagtgcagtggtgcagtcatggctcactgcagccccaacttcctgggctcaagcgatcctcccacctcagcctccggagtagctggactgcaggcatgcaccaccatgtctggctaatcttttattttttgtagagatggggtctcactatgttgcccaggttggtcttaaactcctgggctcaagtgatcctcctgccttggtgtcccaaagtgctgggattacagatgtgagccaccacacccggtttctattcttatttttaatacttaattgttaacacgtatatttaaacttataatgtcctatatgcaatttctcaatatcaataatcttttgaggaatataagactcagcacattttcatcttgtaaccctcctgcaactcccatttcttatgacttgggttttctctacttctctatctcttcctctgttgaaaacttttcatattatggaaaaaattaaacatatataaaagtaacattagtataatgcatccttgtgtatgcatcacccagttcaataatgacccatcatgatcaatttctttttcatctgtaatcctcccctttctctccccaccttggcatactgaattattttaaattattttatccataaagatgttaatgtatcctcaaagataaggattctataagcaaagaaaaacaagaccattatcacaccaaatatttttcattccctaatatcagtaacaataattcccttatgtcatcagaaagtgagtatatccatttccctgattgccttacagttttttaaactgttggtttttttccacttagaatccaaacaaggtccacatgttaaatttagttgatatgggttgataggtgcagcaaaccaccatggcacatgtatacctgtgtaacaaacctgaatgttctgcacgtgtatcccagaatttaaagtaaaattaaaaaaatttagttgatatgtttcttaaattcctttgaaaatatacgtttctcgtcctattttctccccacttgcagtcctctcttgtagtctatttgttgaagataccatattctttgccttgtagttttctacattctgggtatttggttggggtgggggggggtgtgtttgctgatcgcatccctgtggtgtcatttaatatgttcctctgtcacttgtattttctgtaaatctgtatttgcatcaagagacttgaaccaatcatatttgattatttgacaagtgtacttcataggtagtgaagtgagctttcctctgtaggcaagtggtatctttttgtgaccttagcaaccatagatgaatgtcacctagactcattgtgtcactagggatggccttgaggtttcctgttctattttcatttactaagcatgcactttagaaaggctctgagctgctccctgaagcatggcacccgtcctccagaaacccgcagtctagaggttgtaaaagaagatttgaacaccaagactgtaaaagatgatttgaacaacaacaacaacaacaaagcagttttattttgtatacattctttcattgtacctcccccagagggatataacctccaaataggggagccataccatagatgcattaaattcacaccaattcaaatgtgtgtatatatgtatttgcttgcagactactaaagtgacaatgtaaacgttgctgcctatttttcccactcttctattagattgacgttgcttttggtgagatggggcatgagtccaccatcctgtcccctctgtttccacatgaccctcatcgtatgaacacctctcttaagtgtgattctaggatttaaagatacatatttcttatgcattatgcacctaaacacaagccaactacttcatctggcacctgatccaagaaacaacattctgttccaaaatcaatagaagacaaggcactttaagggatcttcaagggagtgtaattttgagcatatggaatctttctaaccctagctaactttagaagtttaactcctatgcaagatgaagcatctatgttcccaagagtttgacttcagcaaaggacaagctgcagaagctgacattattgtttattttggcataaaggctttacttgttggtgaagttcaagtttaatgatctcttcctccctttctctctcttcctcctctccgctttccttcttcccttcctcccaccctgattttctcttttgcagtttgctgctttgtggtgcacaagcggtgccatgaatttgtcacattctcctgccctggcgctgacaagggtccagcctccgatgtaagtaatgggcatcgattgcttttctctgtccacagtcaatgctgccttgtgattaaatgtgagtgagcattcttagacgagtaagtgtggacgatctcactctaaggcatgtggtggtccctatagcttttgagacagttttccttttagtggaaaacaaaattttggagggagtgtggctggataggaagtcagctagtttgtctactatgattttgctaatgtcttcactttgagagctggagcacggagggtgagaggcaggggcctacttggtagtgtggctgcaaaaaggtagtttcggtggtactttgcagtgcacgttatggcactttgttagggtgttctttcttttgttattgttattattatttttattatttttcagatggagtcttgctctatcgcccaggctggagtgcagtggagcaatctcagctcactgcaagctccgcctcctgggttcatgccattctcctgcctcagcctcccgaggagctgggactacaggcacctgccactatgcctggctaattttttgttttgtatttttggtagagacggggtttcaccgtgttagacaggatggtctcgatctcctgacctcgtgatccgccgcctcggcctcccaaagtgctgggattacaggtgtgagtcactgtgcccggcctattattattattatttaagagtgttgcccaggctggtctcaaattcctgggctcaagcaatcctcctgccttggcctcccaaagtgttgggattccaggcgtgagccagtgcaccctgcttgttagggtgttcctaatatcagggcccaggaatgaggaggaaatgaatttatcctgctaccatgaatctcaaagtatgactactgctagtgggacaagagatgcttgtaggtaaaatgtgcaaaaaatttttgttttaatcattataaatgtattttaatgtggattgggaaaaatgtatctagtagtggttttgcatttatgataaggatatagaatttcctacctaagtaaagatttttaggttaaacaaaagataaactgatttgaggacaatattaagtgaatgacagtatgggtgatataaggatatggcaaaagttttggtacaaatgtgtttaaagtttagggtacattgttgattggcctacccagcagccattcacagccttcatccttctggcagaggctacctctcatgatggaagctaaaaatgcctaatacttgcttttcccggctctcttgtagctgctgaatgaggatgtgacccaatcctgctaatgggaactgaggggaagacctgggaaagagtctaggaaagatttttcctttctgataagagagagacatcccttcccttgtcctcttgggcatttttgtacaaggatataatgcttggagttgtggcagcccttttgggtcaatgagggacacattgccgacatcctgagcatggcagagtggaaaacttaaaagaaccgtgggtccatgatgatgctgatgagctgttgataccactcacagtccttttatccccaagctggatagatgggagaagaagctttttttttggccaggcacggtggctcacgcctgtaatcccagcactttgggaggctgaggcgggcagatcacaaggtcaggagatcgaaaccatcctggctaacatggtgaaaccccgtctctactaaaaatacaaaaaattagccaggcatggtggtgggcgcctgtagtcctagctccttgggaggctgaggcaggagaatggcgtgaacctgggaggcagagcttgcagtaagcggagatcgcaccactgcactccagcctgggcgacagagtgagactctgtctcgaaaaaaaagaaaaaaaagaagctttttttttttttttctttttttttttaagcaaagtcttactctttgaagccttctcttttatttttgtttttttctcttttgagacagaatcttgctctgttgcccaggccagagtgtggtggcatgatcatgtctcactcactgcagcttaacctccctggctctagcaacccccccacctcagccgcccacgtagctgggcctacaagtgcatgccaccacacctggctaattttttatttgcttgtaaagataggttttccctatgttgcccaggctggtctcgaattcctgggctgaagccctcctcctaccttgacctcccaaagtgctagaattacaggcatgagtcactgtacctgaccctgggggcattcttttacatgcagctgaaactgtcctagctgagaaggctttccaccatgcacagtctttcattgcccaataatgaactgcattcagcataccccaatgcagccatcacccctagttctcttactttgtttctgctttgaatccccttcttgaaatttctcccattggctttgtctccattactggttctgttacccacttagacttgacagctgacagcttgcccaaagtgagtagtgactatcttctgtcattggatttctttagctcctgctggtcttctgcaaatggtcatctgccaatttgctgcaaactggggtgggagtttgtggggagggcatatctgttgccatagcaacacaaagatgctggagcatatgttggatattctttgcttggaaaatgtggtaattgaggttaagaactccaagaaacatggaacaaccaaagtccttggaaatctgtttgcaaagacaaagtttgagactgtttgtcatgttctctcagatcctatgccctagcccttgtagtgcaatttcttctctcctccctagcaaaataggcaggggagtttggggagactgccctactcagtatgcagctctgagtgttcatgcagactgaaacttgatactcaacttgcagccaagaagatggtgtttcccatattctatctatctgctgaatgtttctgttgcctaagacagaaactcagctcaaactgacttatatgaaaaggaaaattttgggtccttgaaatagaaaaggcctaagggttgacttggcttcaagcacagtgaatcaaagttctaaataatgtcctcaagaacctgtttctccccttcttggcttagcctttgtctgtgttgattttattttcaggaaggcttgtctcctatgcgagcatggtggctgcaacacctttaatcttatatcttatcagtgctgcagtgcagtaacaagagctaaagtctcattagaccatgaatcacatattgccagaagaatgggttatgctgattggccaggcctgggtatatgctgctgtggtgtgaatgttttgtttctccaaacttatatcctgaaatcctaacacccaaggtatggtgttagaaggtgggccccttgggaggtgatcagttcatgggggaagagccctcataaatgagatagtgcccctataaaaaagaccccagagatatccgtcaccccttctaccatgtgaggttgcaatgagaagacagttgtgtatgagaaagtgagctctcactggagaccgaatcttccagtgccttgatcttgtactttctagcctccagaactgtgaggaataagtttatcatttaaaaatcactcaggttttggtattttgttacagcagccagaagggactaggacagaaaattttggtactaacagtgtatagaggaacaaaattttaaggatgggttttctgaattggtttcggggatttggtaattggctgccaaatctgattagatttaagaatgctaattaccctatttctagtagtaaagagagcctggatagtccgtggcatgatctgtttatagagatacacaaatcatctgcattggatactcctaatcaaccatttataagaagcaaggagccaagtgattcgatatatgatacccaaacacttttggaaaactaaggcatataatgacttgctcctaatgtctctggacaaagtggagaaagaaaaagatgagctcagggatttgaattcccagctcaaagagtttcataaatgatctaagagcttctaggtgtgccctgaaggagagccttctagcctgtagttgcagggctgaaatttctgaaaattaaatgcacaacctcatcctgcaattggctgaattacaatgcaaattggactccccaccacacagggtgtctgctctaaaagcaagggcaagggcattgatcagaaaagaatgggatcccataaggtgggaagactctgatgaagaccctaatgaagctggggacattgagcccctaaattctgacaagtcttttttttaccagtggaagtggcctccttacctcaagcaaaagtgtcatccccactcagggtggcattggcctttccatcttgtctaagggaactaaccctgcattgccctaagaaacagtaatggctttccctgaggcagttgccatgccaggcaatgctgattcttgtcagcaccgaatcccaccaccccttcaagtcctagcaggctcctaaacgtgagatgcactgtgtgacccacggggaggtatgctataccccaaaagaactatttgagttttctaatttatacaagcagaaccatagggaatatgcatgggaatgatattaagggggtaggataatggtggaagtaacatgaagttgaatcaggctgaatttattgatagaagttcactaagcagagattctgaatgtaatgttccagcttaaggagttaggaagggctctaacagtttagctggttggctgaaacatggattaaaagatggcctatcatgagtgagttggagatgcctgacctcccctggtttaatgtagaggaaaggattcaaaagcttagggagattagaatgccagagtggatttgtcatttaatacccgctcacccatgctgggaaggtcagacatacctttaagaaaggtatgtctctgtcaatactttgagaaatatatttgtgaggggagccccagcgtcctttaagagctctgtgatccctcttctctatagaccaaaccttactatgggaaccacagccacttaattggaaaacttaaatgcaatgggaataattgggtcctggagtatcaggggccatttggtggcactcaactgttaaaggcaaggtaggtgcggttaccttaatggatcgcagagttacaacaacaatcggaatagcctgactcatgcagacctatggcactgcctaatcatggtgttgctagaagtgaaataggtgggaagcctactaaattcttacttgatctgtatagcagaaaaattctaggtgaagtgaacagaagtctaacttgaatcataaaaatagagaatcatagcccctcagtccattcccagacttgagccagtttatagacccagaaccctttgaatgaaagggaggtaaaatttccttgagaaagcgattatactgctaaaagtttatcctgttaatctttctcccagccttgcccaaagggacctactgctttttatcaggataactgtgcactagagaaaaggaaatgatgagaccttttggggactactgaacactagttctgaactgacactgattctaggagacctaaaatgtcacttgtccctccagtcagaataggggcttatggtggtcaggtgatcaatggaattttagctcaggtctgtcttacagtggatccagtgagtccccaaacacatcctgcagttatttccccagttccagaatggataattagaatagacatacttagcagttggcagaatccccatactggttctttgacctgtagagtgaggcccactatgatgggtgaagccaagaggaagccattagaactgccccagcctaggaaaacagccaaccaagagcaatactacatccttagagggacagcagagatcagtgccatcatcaatgacttgaaagatgcagaggtagtgattcccaccatatcccttattcagctctcttatttggcttctgcagaagacagatgaatctagaagaatgtcagtggataatcataagcttaaccaagtgatcactccaagtgtagctgctgtatcaaatgtggtttcattggttgagcaaattaattcatcctctggtagctagtatgtagctattgatttatcaaatgcctttttctccatctctgtccataagacccaccagagcagttttattgcagctggtaaggctagcaatacaccttcactgtcctacttcaggggtatatcaactcttcagtcgtatgtcataatttagtttgcagggatcttgatcattttttccttccacaagctatgacaatggtcctttacattgatgacattatgctgatttgtcctagtgaatgagaagtagcaactactctagacattggtaagacatttgtgtgttagaggatgggaaataaatccaactaaaatttagggaccttcttcctcagtgaaatttctaggggtcagtggtgtgtggcatgttaagataccccttttaacgtgaaggataagttgttgcatctggacccttctacatccgagaaagagacagatggcctactgggcctacttggattttggaggcaacacattcctcatttaagtgtgttatgctggcctacttaccaaggggccccaagagcttctggttttcagtagggcccagaacagtagaaggctctgcaacaggtccagactgctgtgcaagctgctttgccacttgggccatctgacccagcaaatccaatggtggttggttagtggcagagagggatactgtgtggggcctttggcaagcctttataggtgaattgaagcacaagtatttaagattttggaatatagtcctgccataatccacagatagctagtttcctattaagagacagctcttggcctgctaccgggccttcgtggaaactgacgatttgaccatgggccactaaattgccgtatgacccgaattgctcttcattaactgggtcttatctaaaccaccgagccataaagtgggcatgcacagcagcacttcatcatcaaatggaagtggtatgtatgtgatcaagcctgggcaggctctaaaggcacaagtacgatacatgaagaaatggcctggatgcctgtgctccccactcttgctaccctgccttctctctcccaacttgcacctttgggctcatgaggagttagttccctatgatcagttgacaaaggaagagcagactaggacccagtttacagatgtttctgtacggtgtgcagacaccacccagaagtggacagctacagcactgtagtcactttaggacatccctgagggacaatagtgaagggaaatcttctcggtgggcagaactttgagcagtgcacctggttgtgcactttgcttgggaggagaagtggccatacatgtgactatatcctgattcatgggctgtagccaattatttgactggctgggcagggacttggaaggaatatgattgaaaaaattggtgacaaaaaagtgtggggatgaggtgtgtggatagacatctctgagtgggcaataaacatgaaaatatttgtgtcctaggtgagtgcttaccaaagggtgacctcagcagaggaggattttaataattgacttgatagaatgacccgttctttggataccaggcagcctctttccccagacaccctgtcatcacacaatgggctcatgaacaaagtggccgtggtggcagggatggaggttatgcatgggctcagcagcatagacttccactcatcaaggctgacctggctatggccaccgctgagtgctcaatctgccagcagcagagaccaacactgagttcctgatatggcaccatgcctaggggttatcagccagctacctggcggcaggttgattacattggaccccttccattatggaagaggcagcattttatccttatggaaatagacatgctggatacagatttgccttccctgcctgcagtgcttctactgaaactgccattcatggacttagagcatgctttattcactgttatgaaattccacacagcattgtgtctgatcaaagaaatcacttcaaagccaaagaggtgggcagtgaactcacactcatggaattcactggtcttaccatgttccccatcattctgaagcagctggcttgatagaatggtggaatggccttttgaagagtcagttatgttgccagctaggtagcaataccttgcatgcctgggcaagattctccagaaggctatatatgctctgaatcagcatctagtatatggtgctttttctctgatagccagaaatttatggatctgggaatcaaggaagtggaatgggagtggtaccactcattattacccctagtaattttaccaccagcaaaattttgctttcttttcccatgactttatgctctcccagcatggaggtctcagttccagagggaggaatacttccagcaggagacagaacaatgattctattgatagttaacactgccacccagccactttggggttcccatgcctctgagttaacaggccaagaaggaagttatgaagttggctggagtgattgatctggactactaaggggaaattggacactactctacaatggagaaaaggaaaaatgtgtctggatacaggagatccctaaagacatctcttagtattaccattacctgtgattaagatcaatgaaaaactacaacaactcaatacaggcaaaactatgaatggcccagaccctttaagaatgaaggtttgggtcaccctgccaggtaaggaaccaccaccagctgaggtgcccactgaaggtaaagggaatacagaataggtaatagaagaaagtagttacaaataccagctatgaccgtgtgaccagttacagaaacaaggactgtgattggcatgattattggcattattttgttatggatatgtttgtgtgtatatatacatatggtgagcaaatatctttgttttctttgctcttttagttctttatcatgtaacgtaagatgtattgactttatatcagtatttttatgtcttagtatttaagttataggataccaggacaagaggaatcattactcaaggacttcatctccttttctggggaggggattattgcattttcagttgtacaaagtctaattgtatcacatcaggtggaattatgtccttgttattctttatttggaggttctttatttaagaaggtgtgtatggatgccaagttgagaaagggtggacttgtgatggttaattttgcacatgcagttaaccttgactgggctaaggggggtacccagatagctggtaatacatgatttctgggcatgtctgtgagggtgttttcaagaaattatcatttgaatcagtagactgagtagaaaaattgccttcattgacataggcaggcaccatctaatctgttgaggactcagaacaaaaaggcagaggaagggtaaattcactctctctttttgagctggaacattaattttttcccgcctttgggtgttggtgctccaggttctcagtccttcagacgtggaccaggacctactccattggcacctatggttctcaggtctttgggctcagatttcaaacattggactaaactatacccctggctttcttggttctctggcttgcagatggaagactgtaggacttcttggcttccataattatgtacaccaattcacgttattgatttttttttggagaaccctgactaatacattgtgcctacaccgtagatgagggcgtgagtgccccttccatggattgagagtggggaagaggtagtttctctgaggaaagctagagaaacggtattgtgtcctggttaaaatcacggattatggagccagcattcctagcctcagatctgtgtgaccttggacaaataacttaaatccatttatgccttagattcctcagctaaaaaatgagttaaataatagtttctacttgatagcattgttatgagtatcaaatacatagatatctgtaaaagcacttaggacagtgtctggtgcatggcaagagctatatatgtgatgatgatgatgacaatgacaatgaataacagtgcacacatgctgagcagccagcaaggacaggtgtcttgtcagacagaccaggaaagggtgaagaatgagcaggttctctgtctgccacctggcagtccttcctagaagtgtggaggctctgtaagtggcatgagacccctctctgtatgaatgaaggagtgcagccattcattgccttgagcatgaggagagcaggaagtactccctgcagccagcatgcataggatttggcagcctacctgaaatgattctatctctggatacagttccaaaaaggtcagttggcaccaaggatgatgaattggtccagacacctgaactggcttgactcagttcattgacctttttctgctcatggttggaggcatgattaaagacctagccacacctgcttgcccacctggccagactctcctttagctgcccctgatactcatgcaggtatggaggggtgccctctccttctgcatgaccttggaggaactggtgtgcagcaagttcgtgaagcagaaacacacaggcggtgaccttggacaaggctccatccacgataaaggatgtgcttggttgcatcctctaccctctgctgttccaagcccagtctgagccaggcaatattatggatattagtagagctttgtgctgttggcattatcctacagctatgttcacatcatatcacattgaggcaattttatgaaccaggcactgtcccgtgaacctagctactgagccaaccattcaataacaatgagaatagacaacatttatgggcactcgccattggagggccacaaagtgtggcagagttcatggatgatgctcctggtcacccacagtcatccttcttgttcttgatctcaccaggcaggaaatcctcaattcatctgtctcttgtacctcttagagagaccaggtctctggtactgtcataagcattacttatggacattataggttattcagcactcagaatactgaccacatacacagcctcctgtgacatctcagaacaagaaacagaggagttgtctctgagggttgggactagggtgagtcaagtgaggtactttccctgggcacagtttaaggggttcttgtctgtgtctgtggatagctggttggttggctggtgggtggatgatctaagatggcccctttcacatgactgacgacgagcaggttgtcggcctgtgtgatttggctctcgtccatgtggcatcatcctccatccaactggctagctctgacttgttcatatggtggtttccaggctccaagaagagcaagagagcatctcccaacactttttaagcctttgtatcatgtttgctaatgtcctaaaaagctagtctctggccaagtccagattcaagtggtagaaaaatagattccagtgcctcattggagaggaagtatctatggttaatctattgcagatcctgttaacccaagaggccatagcagaacagaacccctggagaccatcacactggactttataaaaatctgcatgttatagtgtggctcagagtcatagatggcctcatcaaaagaatgcacctaatttattccctgcctcaatcgccagtggacttaaccacctctagctataagtggttaatgtggcagtttattgatcacgtcaatggtggttaagagtatggactctgaaatcagacatacctgaatttgagtcttgattctgcccagatactcattaggaaaacttgggcatgtcgttcgacttctctatgccctagtctccttatatgtaaaataggatgttagtaccaaccacataggtttatagtgataattttaaaaatatttaaaatgagaaagagttcacaaacaaaagacaaatgaatttcaaagcccttacatgaaagcgcttggcacagtgcatagcaagcccttggtacatgtagctaaggccatttccattgctccacctaggtccataatcaagaatgtactgacaattctctacattcttccacccagagcatgcccttatgaggtgattacagtttccatttccattacttcacacaaacctcaaattctgtgatgcagtgctaagaaaagaactcaaactttggagccagaaaatgctggtgtcaaattccaaatggtctctgctatgtattgctccaatgaccttgggaaaataactttaagttctgtgaccctcagtttatgtctttaaaatagagaaaataatacctaaataaagcggtttttttttttttggtaactattcaataggagactgcttgaaccatccctagaataatgtctggcacaaagaaggcactcaatacctggttttaaaatcattattaatgtctggaggagcctctcctgctctataagggatacaggttaccctctgacctgccaagaaataatagctaataataatagctaactttattgaacagggtctctgggcaggcagtacaaaaggactctttgtctggtttgtctaaagatacctttttcaacactttatggctttagaaataatttcttatgatttatagtcaagttactgagtaaaacccactgttaggtcctgtgatctcctaattccatcactaaatcaggtcaattagagatggtagacactaatgttgaccttatccttttgatcaagtctcactttgtgataagatagattaaaaatcataaacttgttaaacttgttaaatgttgaagatttgataaaacagaaatgaaagtattaaatgtatgtatacattaaagtatgtaaataagtgagaacatgtttgaaaatctggttgaaatggatgattttctcataaaattgtcaattttgtctcaaaaagaaattgaaaaccagaataggcaaataaccgagaaagaaatgaaaacattattcaaggatcttttcttctcgtaaaaccccagacaaatatgtttcatgggtaaaacttcttaaattttagagcaacgaagaatttctgttcatttaaaattgtacctgattacaaagaagaaataaacctttacaattttttttaaatgaaaatgagagaaatccagctcaaattagcagtaggaaaagagggcccattgactcctgagaaggacattgggagtagagtaagagcttcaggaccaaggacctcaaaggctggaactgaagctccagtacttgcaagatacttttccatttctgctttattggttagttattttgctctgtaacaaaccattccaaaatttagtggcttgaaacatcagttatttgtggtttctcatgattgtgtgggttacttgggtgattcttctgacctgggtttatttgggtaatccctgctgggctctgtcctgggtcttggtcagctagtggctgggccgatgctggattacctagaacagccttgctagcattgactgagggctggcaggctgtcgatctgggcatttcatttttcctccatgcgtcctcttttcctccaccaggctagcttagtttcacggttccaagcacggcaagagagggaaatcccaaagcacaggtgtgtgtgtgtgtatgtgtgtgtgcgtgcgtgtgtgtgtgtgcgtgcgtgcgtgtgtgtgtgtgaaatggagtctctttctgttacccaggctggagtgcagtggtgtgatctcggctcaccgcaaccctcccagatacaagtgattctcctgcctcagcctcctgagtagctcggattataggcacccaccaccacgcctagctaatttttgtattttttgtagagacggggtttcaccatgttggccagctggttttgaactcctgacctcaagcgttctgcctgcctcagcctcccaaagtgctaggattacaggtgtgagccactgcgcctggccagcataggtgttttttaagcctttgtttgtgtcacagtggttatggacaagatcagatttggggtggagaaacaaacttcatctctggatgggaagaatagcaaagtcacatggccaaggagcatgcggggatgggagacattggtggccattgtgcagtctaccacactgacccttatctgctgtgccagatgcctcgtttgcccttccaatccactctgctttctctgagagactaagccataatgactgcttcaactggggctcccttaccctctgacctgacctctggttggactcaaggggaggggctaataggagacttggggaggggagagtgagaccctccccgagtcagtcagtatttattatggagtcatcttcactctaccttttgactataggttgctgctcctctacagatcatcttctctatgtaattctctccttctgggttccaggagctactcccttcctttgtcctctggctcttactagcctccaatcccttatactttcccaacaccatgcccacacctttagaaacagtcctttcattgaacctttcttaaacactcttcactttagtatgccatctgtttcctgcggggcccctgactgatgcatctgctttgtcttgcctcatttgctcctgctgtagatggaacatgtctgcaaacatcgttacagttgaccccatggaaagatggcaaccctagtggaggaattagccttcttcctgcattcgttttttttttttttttgagacaaagtctcgctctgttgcccaggctggagtgcagtggtacgatctcagctcactgcaacctctgcctcctgaattcaagcaattctcctgcctcagcctcccaagtagctgggactacagatgtgcaccaccatactcagctaatttttgtattttcagtagagataaggtttcagcatattggccaggctggtctcgaactcctgatctcaagtgatctccctgtctcagcctctcaaagtgctaggattacaggcgtgagcgactgcacccagccatcttccctgcattcataattgatctcagaaaatgttctgatggagttggttctctatcactgggagaacgaactcttataacctcagacctggatcccatggcatccctttcacccaggagcagtgtatgttataagaagagtgaaggagaaactttgatgcgctgatgaaagtaataactaattattataagcttgcttaaccacaataaccgctattacctagtaaagttggcataaaaagtaaactacaagccagtctcatacatgagtctagatgaacatatcccaaataaaatagtgaatgctattttattgttgtcacggacattatgcattcaaataatgtggaggaaacaatctagagataaaacaacaaagaaaattatgatcaatataacaaaatataggaataaagataaaaatatgccagcaaggaaccgtggaatctggaaagcataaatttagatggtagaagtgatagcagaatgttacccaaccaatgtaaatggattgaaattctctactgaaaggcaaagactatgagattggatgagcaatgtacaactcttggcagtgtataaaagatgcttaaagcacaggttttaaaaataaaagggacaaaagtgtatcatgaaaatacatatataaaaatgaaacatggtcttaataatgatatcaaaagaaataggactcaaaacaaaaagcataaacgggggcagatgtcccagcagatcacttgagctcaggagtttgagaccagcctgggcaacatggcgaaaccaagtctctacaaaaaaaaaaaaaaaaaaaagaaaaaattagccaggcatggtggcatgcacctgtagtcccagctactcaggaggctgatgtgggaggatcacttaagcctgggaggtggaggctgcaatgagctgtgattgcaccactgcactccagcctgggcaacagagtgagattctgtctcaaataaacaaaactaaacaaaaacataaaacagggaaggagaaaacatgaactctaatgcattactggtgagtggcaaattagtatatgttttctaaagagcaaattttccatacatatccagagctttaaacacatttttgacctaagaattactaaatctaatcattttgacctaagaatgacaattctaggaatttttggtaagaaaccatttcaggataaatgcatagatttatctagagtgatattcattgcatcagtatttataatatcaaaaatttgaaaatgacccaagtctcactaccaattagagtttatataagtaaaatatattacagtcatatggtggaatgctggccagtgattcagtgtcacagtgtctggggataaggggaatgttctgtgtcttgactgggatggtgcctatacaggtgtacacatttttcaaaactcatcaaactatatgcttaaactctgtacattactgtatgtaaattatactttaataaaaagtcacagtgattaaaatgccattggcctggaaatgcagtcataatatattgctaaatgaaaaaaaaaaagcagacaacaaaacattaggtcaggtatgatagatttaaaaatataaaaatatatacacatgtaaagccaaaggccacattccctaaataaattttcgtgaatacttaattctgttcactgtcttatgccagacttgttacctgcagagctctgaaggtcactttgggatgttctgtagctggtttctccagttttgtttgtttctggggccactccacctctagtgcagactcaggtttcccacttagttcagtgaggaccaaacttgagtggcggttccggcgtaatcgggagtcacttacagttccttccaaatgtggttactcttgaggtcctccatccgctgggagtcagctcagttcctggactgagcatcttcaggtgcttctaataagattctggcctctgataagtcttgacttcaattcatttttggccccagagaaggggaatcttggctctgccaacaaggccctgtccatttcctgcctcagtgtgagtggcaggaagaccaccttgatcttcagggcaaaggctcgcttcctcctcttggtgtcatccggtctccttggctcagtaaagcaacgtaacagtcaagtgcacttttctcaacgcctggtttcttctgtcttacataaccccaagtggggacacccacagtgaactttcaaaaataatgctccttccagggagcgaagcagcaatgagggttgaacatctctcttgggatgaccatcacctggaccaaaagacccatttacatctctcaaggataagtaatgtcaggggcaatttagtctaaatgatacagtctccacctcccttcctcccttcctcccttcttccctctctcacttatctattatctccctacatctgaaagtgcaccatcctgctgaaatcacatcctgttcacataacactgcagtccatagcttctgaatccacacagaagttctcgtgggcgataccaaatgccaagaggatgccttagaaggagtctggagatactcgaggattggcctctctagctcagaggttacactgtcatcaaatgtccaaagagctcttgtacagaatttttgtggtgcagttctaaaggagaagtaggactgaggtccatctgtgcaggctaacgaagaacagcccatactgaccaactggttgctacataataatattagctccccatccgaggatagtaaagctcaattgccaggcatgctgtagagggcatagctgtggtagatgtgggtttctaccatgttggtggttctactagcttttgttgttttgttgcatgcaacagaaaccatctttggttaacataagttggaaaggaattcattggaaaagatgtggcatccttcagagcgttgaaagaaaacttgaacaaccagaccagttctatctgattttggttcttgtgttacattcagcctaaattcaaattccagaaggagagagattatctggccgagctcaagttgcctaacaaactcttgggtcgggcttttaaaatgttctttcaaagactaaacgctgtgggggtaggatggcttttcaaaggagaatcgaagtactgatacggggagcagggggtggggagggggaagaaggcacagatgttgcgccaattggaacaacgtgtttgctacaatttctaaatgctacattgcagattgcagagagattggatgacaggcttcacctgaagagatagagatcaggacctgggaatccatgtgttaaaaagttcttgggtaattctgatggatagctgggtttagaagccagtgtaaggcaatatgtataaaagctctgaaaccagaatgactgagtttgaattccagtttggccactaactagctgataatcttgggctagttacctaacctccctgcttcagtttcctcatctataaaaagaggataaaatggcacccacctcatagggtccacgtgaggattaaatgagttaacctagatggtaagagcttcatgccgtaactggcacataggacatgctagttaatattattgccacaaatgatcctttcaagtcttagattgtgcatttcaaaagtccatccttatttttggaattgcatgcatttatcttgctttctgcaaaatggaaaggcatctcccatgggctggttggagagaggggctgataaaatgatggtaatgtgataaaatgcagttctcttgattgtcaagtgaattctgcatgattcttctgctctcatttgccacgggctgactgcttctgcaatgcagaacccgcttgtaaaggtcagaatgaattgcttccaaacatccctttgtccctcactgtcacgaagacacagagctgcatgctgtggaggaagaagcaaatccatgatgctggaaggccagagaacagaaaccaaccgtgcacagagaggcgagctgctgggacttgaatgaagctgatgcgtcccatctataaattattgtggcttctcctagttgggaggcaggaccagcctcacaatttcccagaagaccgtaatttctggagcctgcaggcctgggggcaaatggagaaatcaaaaggcagatggccttggagataggcagccagaaaggatgtgaaaggccctggttctggactcaagagacctcacgtttcctagtcttctttctgtctctgctcttttgtgttcatgaggttcatgccctcatgagggctcccccacctccagtggtctaggattctaggatgtcttggtattctttttcaaaaaaaaaaaactaagagccagcatttatagatataattctgtcctaaacactttacatataataattcttcattcttcattacaccctgtgagataggttatcattgttataattccatttcacagatgaggaaactgaggtactcagagactaaatgacttgctcaaggtcacttgtgagaggtccagctctaggccctctggcccgtggggctatgctcttacctagtacctcaaactgcctggtagacctcaaccctgtgtacctgcacaaatggtcctgaagcaggcagctttcttccctgagagctgcctttccagatatgcactgccaaaggtctgtgaccctacagccttggcctgatttggtccagatgcgtgtggacatctctcccaaacaggatcaaattggcctcttctaggagtttagaatttggaatcaagggtgctggttttagtctggactggtcacacagtttttgacaactgtttattgtacgggaaaagtgtccagcttgatgaattctcacacagtgaatttttctttgtaagcagagccccagaagcccttctttgctccttctaatctctacacgtccctccccatccatcaaaataaccactaccagaccagcaatcctttggctgcttttccccccacccccagtgatctattttattttattttggaaagaacacgtaacatgaaatctatcctcttaacaaagttttaagtgtaaaatgcatcattgttgatgatggatgcagtacgagacagcagatctctggggcttattcatcatgcttgactgaaacttgatgcccattggtaagtaattccccattttgcccttcttccaggctgtagccaccaccctttcactctgattttctatcaatttgactatttttgttactttacgtaagtggaatcatctagtatttgttttcctgtgactagtgtttttcatttaccataatgtcctcagggttcatctatgttgtctcattgcagaacttccttctttttggggggctgaaaaatattccatcatatgcataaacacattttccttatccatttgttcgtcagtggacacctagattgcttccacgtttagctgttgtgaagagtgctgcaatgaacatggaactgctaacatttcttcaggatgttaatttcaattcttttgggtaaatacccagaggtgagggtgctgaatcatatggtagttctatttttaatgttttgaggaaccttcacacgggctaaggacttgaataggcagttgtccgaggaagacatacaaatgaccaaaaggcatatgaaaatttaaaaagctaaacatcactaatcactaggcaaatgcaaatcaaaaccacaatgagatattatctcacacttgttaggatgactattttttttttttttttgagatggagtcttgctctgttgcccaggctggagtgcaatggcgtgatcctggctcactgcaacctccacctcccgggttcaagtgattctgctgcctcagcctcccagagtgctgggattacaggtgggagccaccacgcccggcctatttttttttttaaaaaagacaagtgttagcaaagatatggagagattggaacccttgtacactgttggcaggaatacaaaatgttgcagatactatggaaaacagtttgcctgcttttgagcacttaaaaaacaaaactaggctgggcccggtggctcacatctgtaatcccagcactttgggaggccgaggtaggggggatcacttgaggtcaggagtttgagaccagcctgaccaacatggcagaaccccgtccctgctgaaaatacaaaaactagcctggcatgatggtttttgtatctgtaatcccagctactcaggaggctgaggcaggagaatcgcttgaggttgcggtgagccgagatcatgctactgcactccagcctgggtaacagagcaagactccatctcaaacaaaaaccaaaaaacagaattatagagtagaccatctcttgtgtctggctggtttctttcatatgtgtgtgtgtgtggccacatgatattgaaaggacacatagcatcctgttcatcaggatgtccagcttcagagccagcaggggccaggcaggtgggtgaatgagtgacgtgtgtgaccacaggcatgtcccattggcccattgaacaccctatctgaaaggggcagcggcactcagctccgtttcctaattcctgctgtttaaaggatgaaggtctaagttttcccatttttttccagagaaatctgaaatcccctaaatttagattttgacagagaattcaagaattacaactgtggtgtattttaaacacatttttggactggattccttctgtgaacctccggtttacaacttctgcattcgtaggtggggactgtcagtggaaggtctcccccaccccacatcggaggggagaagggaaaatgtaaatttagtcaaatgggctttctttggagagtagagagtgtgcaatagtccaaggcagggagctttaaaagaatgcagaagtcttttttctctcttggtgtctgagctctaaattggctgggacatatccttagttaggagtcagtggctatagcgccccctgctgtcctttagcaccctcttcgtgtccagtgagatctgcaggtgagcctggaagccacttgcttctcctgcaggttttgggaggaagattcatcattttaaatattgctcaagtgcctgctgctgccagtgacttcataggctcctgttagactcaccttcacttatatttggtcaattacctactccctcagtcagaccttgccactcgattttttttttctttttgatacaaggtctcactgtgttgcctacgagtgcaatggtaccatcacggctcactgcagcctctgcttcccaggcttaagtgatcctcctgcctcagtctcccaagtagctggggctacaggcatgtgccgctacgcctggttgattttttaatttttttgtagagatggggtttcatcatgttgcccaggctggtctcaaactcttgggctcaagcaatcctcccaccttggcctcccaaagtgctgggactactcaggcataagccaccatgcccagccaccactctatttttttttaaattggaggtagggtaagaaggactgggccaggtcgtccttcccacaattccagtctcactgtttctatctattgaaaagcatttctggcatttgcttggtacctttccctggtttctgggctgaaatagattttatcccatttttaaacaattccttctgatactttcaggggtagtttgtggatgagagcagagtgaaatgcataggctcaggtttgtggccttgcaagttaataaagagtgtggactttggaactagcctgcctgggctccaatcttggctctggtacctactagctgtgtatcattgttttcattgttttgttttgttttattttgttttgtttgagacaggatctcactctgttgttggggccagagttcagtggtgcaatcatagctcactgcagcctccaattcctgggatcaagtgatcctcccacctcagcctcctgagtggttaggaccacaggcatacaccaccacacctggctaattttaaatttttttgtagagatggggtcttgctatgttgcccggatgggtcttagcctcccaaagtgctgggattacaggcatgaaccattgtgtcccaccttagctgtgcactttaaataagtcacttgacctctctgttcctgtttcttcatttacaaggtgaagatgataatatactacttcttagggtgagtattaaataagttaacctatgcaaagaggttaaaacagtgcctagcatatcatagaaatgtttgcttgacccagaggcctgaacctgctttgccttcagtgttggtctttaggtcctggcttcactccttaatgctgcatctcagcctttcctcatgaaactttctgtctttgatccttttcactccttaactgtgaatctcccaaattccactgagcagtgatcaattcttggggcatcttgctctgtgttcccagacattccttcaccctcattttctctccatggccaaatcctatagtgcctcctaaataattatagctgacatgtatgtagcacctatcatatgccacgtgctgttctaagtgattgatatatgctaactcatttaatcctcaccctatgagaaagatgcttttttaacacctattttatagaggaggaaactgaggcccagagaagtgaactgacttgccaggtcacataactaataagcagagtctggatttgagtttggctctagagcctgctcttagccaccatgtcccatcctcactgagaggacccttgttcaactccactaaccctctctggacaagtagcctctggtcctgtctccctgcttcctctctgtctcactggcctaccctttccacacctttctaaaaaccaaatgtgatcatgtcatcctctttgttgaaaacatgtcaatggcttcccattgttcttgggacaaagtaaatactctttgaagtggctgcgaagcagggtggacatacgtcctcctctgccaagctt

SEQ ID NO: 2838 - DNA, 738 bp, Homo sapiens
aactacggctaggtgcgggtcgggtgttaatcggccgaggtctgctcgggctcctggtgcagcagatcatcttcttcctgggaaccacggccctggccttcctggtgctcatgcctgtgctccatggcaggaacctcctgctcttccgttccctggagtcctcgtggcccttctggctgactttggccctggctgtgatcctgcagaacatggcagcccattgggtcttcctggagactcatgatggacacccacagctgaccaaccggcgagtgctctatgcagccacctttcttttcttccccctcaatgtgctggtgggtgccatggtggccacctggcgagtgctcctctctgccctctacaacgccatccaccttggccagatggacctcagcctgctgccaccgagagccgccactctcgaccccggctactacacgtaccgaaacttcttgaagattgaagtcagccagtcgcatccagccatgacagccttctgctccctgctcctgcaagcgcagagcctcctacccaggaccatggcagccccccaggacagcctcaagaccaggggaggaagacgaagggatgcagctgctacagacaaaggactccatggccaaggagctaggccggggccagccgcggcagggctcgctggggtctggctacacgctgtgcacaacccaacctgcaggtcttccgcaagacgggcctgttgggtgccatggtgcc

SEQ ID NO: 2839 - DNA, 4445 bp, Homo sapiens
atgctctttgagggcttggatctggtgtcggcgctggccaccctcgccgcgtgcctggtgtccgtgacgctgctgctggccgtgtcgcagcagctgtggcagctgcgctgggccgccactcgcgacaagagctgcaagctgcccatccccaagggatccatgggcttcccgctcatcggagagaccggccactggctgctgcagggttctggcttccagtcgtcgcggagggagaagtatggcaacgtgttcaagacgcatttgttggggcggccgctgatacgcgtgaccggcgcggagaacgtgcgcaagatcctcatgggcgagcaccacctcgtgagcaccgagtggcctcgcagcacccgcatgttgctgggccccaacacggtgtccaattccattggcgacatccaccgcaacaagcgcaaggtcttctccaagatcttcagccacgaggccctggagagttacctgcccaagatccagctggtgatccaggacacactgcgcgcctggagcagccaccccgaggccatcaacgtgtaccaggaggcgcagaagctgaccttccgcatggccatccgggtgctgctgggcttcagcatccctgaggaggaccttgggcacctctttgaggtctaccagcagtttgtggacaatgtcttctccctgcctgtcgacctgcccttcagtggctaccggcggggcattcaggctcggcagatcctgcagaaggggctggagaaggccatccgggagaagctgcagtgcacacagggcaaggactacttggacgccctggacctcctcattgagagcagcaaggagcacgggaaggagatgaccatgcaggagctgaaggacgggaccctggagctgatctttgcggcctatgccaccacggccagcgccagcacctcactcatcatgcagctgctgaagcaccccactgtgctggagaagctgcgggatgagctgcgggctcatggcatcctgcacagtggcggctgcccctgcgagggcacactgcgcctggacacgctcagtgggctgcgctacctggactgcgtcatcaaggaggtcatgcgcctgttcacgcccatttccggcggctaccgcactgtgctgcagaccttcgagcttgatggtttccagatccccaaaggctggagtgtcatgtatagcatccgggacacccatgacacagcgcccgtgttcaaagacgtgaacgtgttcgaccccgatcgcttcagccaggcgcggagcgaggacaaggatggccgcttccattacctcccgttcggtggcggtgtccggacctgcctgggcaagcacctggccaagctgttcctgaaggtgctggcggtggagctggctagcaccagccgctttgagctggctacacggaccttcccccgcatcaccttggtccccgtcctgcaccccgtggatggcctcagcgtcaagttctttggcctggactccaaccagaacgagatcctgccggagacggaggccatgctgagcgccacagtctaacccaagacccacccgcctcagcccagcccaggcagcggggtggtggttgtgggaggtagaaacctgtgtgtgggagggggccggaacggggagggcgagtggcccccatacttgccctcccttgctccccctccctggcaaaccctacccaaagccagtgggccccattcctagggctgggctccccttctggctccagcttccctccagccactccccatttaccatcagctcagcccctgggaagggcgtggcaggggctctgcatgcccgtgacagtgttaggtgtcagcgcgtgctacagtgtttttgtgatgttctgaactgctcccttccctccgttcctttcggacccttttagctggggttgggggacgggaagagccgtgcccccttgggcgcactcttcagcgtctcctcctcctgcgcccccactgcgtctgcccaggaacagcatcctgggtagcagaacaggagtcaaccttggcggggcgggggctgcgtccaacctggagattgcccttccctatgccacggttcccaccctccctcaccagtttggacaatttgaaattacctattgctgctacttgttctgtcctctgaccttggggcaaaggagccccaggccctgtctccccagcatcctccctggtggccctgggcaggtgcactgacacccccaccttcccatcccctgctgaaccaggccctgttacacacagccgcctaaggcccgcggctcatgtgctgcccgcccccatatttattcactgatagagaatcttggggatgctggggtctggagtgaacatctcctccccttcatgccctagcctgtgttctagctgtcctggcgagacttctgtgagtgaagaggaaggggtctctggtcaaacccagcccccagggcctagggttgaaagccttccccggctccgggcattatttgggtttaatctcggagcctcactcctggactgaagtccggtgcctctgccttatccctggtggagatggaatgtggcccattgcctcctccctctcctgtcaaaaaccctgatcaggtagatttggaggcggccacgatttcctgtttggcccctgttcaccccagtgcactggccctgactccaggcgtgagtatggggaaggatacgggttcttctgacggggagcaagggcctccgtcttcccttccttaactctccccctttgccctccgccctgaaaaaggtgtccttgaagtcccttccacctctatgccactgtctgcttagcccagctcaggggtggggaagaggcgaaagcgtgggggaggtgagcgcagcggcagttctgcctcggagctgattgcagggccctgtgtggtctccggacagctgcgggaaggctgccgcagctgaagctgaagaggcggctacgtgcggtttgtcagggggattgggttgaaaactggccagtcgggatgactgggtgaaagaggagtagctcctgccactggcgttttgagtgttggcaatttgggatgcctcctggggaaggtttccgggcgtttggtgagtctctagatttttccttgctttctgtgtttattggtttttgatgttgtaaaagcaatgaatcccctttacaagaaaatcgaaaacacagaagaatgaaggacatgccagtccccgatcgctgctgtgagcacctcagtggctccctcagaccagatcccgtaggcagccccacagaccgaccctgaccccactcacagccaccctgaagatagactataggaacgggcccataccacacagactgctctccaatccctgagtctcagatgtttcatttatttcctacttttccactactaaaaaacagtgtggaatagacattattggcaaaattgctcatccctaatcctgaaaaacaggccagaatgggtaaagacttgtcaaagcttgcaacatagctacatggtgcacccggacctgtaccccctccccccaacacaaaaccagtgtctgggaggttcattttcctttaaactgatccagctggccctgaaccaattgtttttgactgagtatctaggagagcagtaagtggaacttcagacaagcccactgggtctggtccaggtgaggggcagggggcatggggctgggaggtctcaggggccttccctgggggtggccagcctggtagggggcagagaaggaaaagctgaggggggtccctgtgagggaggaaagaaggatcatttgccccgctgggtctcaaaggcagtgagaagagagctgaagaaagctctggctggctgacaggatccctgtgttgtaattggtccctcctttcagctctctagtgagatgcccgtgtctgtgcgtgtgcgtgtgtgtttcatacagctagcattagatgggtgatgtttcttacttatcatccctaactattgcaacttgaccttaaaaagacaaaaccccacaaaactcttcctgccacgggcttgcagattgaagcactttcgatgttgggcgctggcgtttgtgttctgggcaccaccgtgaccctgcccagatggctataatattattttatacacaaaccttttttttcataaatgttataattttgtgtctgtctttataaactattataagtactatttttgttataattcaaaatagatatttagtataaagtttttgctgttaaatatttgttatttagtaaaatatgaattttgctctattgtaaacatggttcaaaatattaatatgtttttatcacagtcgttttaatattgaaaaagcacttgtgtgttttgttttgatatgaaactggtaccgtgtgagtgtttttgctgtcgtggttttaatctgtatataatattccatgttgcatattaaaaa

SEQ ID NO: 2840 - protein, 512 aa, Homo sapiens
MLFEGLDLVSALATLAACLVSVTLLLAVSQQLWQLRWAATRDKSCKLPIPKGSMGFPLIGETGHWLLQGSGFQSSRREKYGNVFKTHLLGRPLIRVTGAENVRKILMGEHHLVSTEWPRSTRMLLGPNTVSNSIGDIHRNKRKVFSKIFSHEALESYLPKIQLVIQDTLRAWSSHPEAINVYQEAQKLTFRMAIRVLLGFSIPEEDLGHLFEVYQQFVDNVFSLPVDLPFSGYRRGIQARQILQKGLEKAIREKLQCTQGKDYLDALDLLIESSKEHGKEMTMQELKDGTLELIFAAYATTASASTSLIMQLLKHPTVLEKLRDELRAHGILHSGGCPCEGTLRLDTLSGLRYLDCVIKEVMRLFTPISGGYRTVLQTFELDGFQIPKGWSVMYSIRDTHDTAPVFKDVNVFDPDRFSQARSEDKDGRFHYLPFGGGVRTCLGKHLAKLFLKVLAVELASTSRFELATRTFPRITLVPVLHPVDGLSVKFFGLDSNQNEILPETEAMLSATV

SEQ ID NO: 2841 - DNA, 400 bp, Homo sapiens
tttttttttttttttttttccaatctgtaaaaaatattttcattatgtttattataaaaatataaatgtttccactacaaatcattttacattagtaagaggccatctacattgtacaacataaactgagtaatattttgaaaagacaagtttaaagtaaacacatattgccaatcatatcacatttatacatggcttgattgatatttagcacagcataaactgagtgagttaccagaaataaataatatatgtaaatcaaatttaagatacaaaacagatcatatggtacataacatcatgtaggagttgtggctttatgtttactgaaagtcaatgcagttcctgtacaaagagatggccgtaagcattctagtacctctactccatggttaagaat

SEQ ID NO: 2842 - DNA, 560 bp, Homo sapiens
  misc_feature (399)..(399): n is a, c, g, or t
  misc_feature (454)..(454): n is a, c, g, or t
  misc_feature (460)..(460): n is a, c, g, or t
  misc_feature (499)..(499): n is a, c, g, or t
cctctacgacggccactttggttttgttacttggtgaggaaaggataattgtctgacagtagagaggggaaagaaaaaaaggcactataagagggttaagctttttttttttttatctttagcttggtaggaattggtctcggaacaatagcgcatgactttgaagatggcgatgcttttttgactggggtatgatgggtctgcatttttttgttgttgtttggactgcagtcttggtggttagaagcacgagatagggtccttcccaagctggtttgagttttccttctttccagcttctgatgagaacatcatccccaggctgatgctgatgtgctgggaactccaagggtggcatctgtactaaaaagcctttagcttttgagggaagagaaagtngaagagagacccagtacatagctcttgagaaactgacctttagtttccaacgtangaatgntccacagtgaagtgtgagtaaaggccgcccatacagcantttcccaaggagataagccacttcctttctgagggacagttcggaccccttaataaggcca

SEQ ID NO: 2843 - DNA, 5927 bp, Homo sapiens
ctgttctggccttgaaaatgatccttcttaaaaggattttcctccttcctcaagggaaagaaaacctattgatataaaacttcacttcccattcagtttcccctgctaaatgccactccagtagagactgagtgttgataaatacaggggaaggaaaaagtcgtaagctgagcctggtcacattgccccttgtgatatcgttttatttttaacttcgcaacacttggactatttctgttgaagttttctctcctttccctgccttcccaacagaacgctgtcctctactgcagctgatgcaacccagccacctcccggcaatccgcttacttgcaatcaagggttcaggtgcaagcagatgctgactcagcctgttccattaagagctaagaagcaagaagaaattggggcgccatggggaaagcccgcagatccccgccagggcaccacaggcattgtgagggatgcttcaaccgccactgccacattcctgtggaacccaacacctcctgcctggtaataagctgccacctgctctgtggtgccaccttccacatgtgcaaagaggcagagcaccagctcctctgccctttagagcaggttccgtgcctcaactccgaatatggctgccctctgtccatgtcccgccacaaactggccaagcacctgcaggtgtgccccgccagcgtggtctgctgctccatggagtggaaccgctggccaaatgtggactctgaaaccacccttcatgaaaacatcatgaaagagacccccagtgaggagtgtttggacacagccctggccctgcaggatcagaaggtcctcttcagatccttgaaaatggtggaacttttcccagaaactagagaggctactgaggaggaaccaactatgaatggtgaaaccagtgtggaggaaatgggaggagcagtgggtggagtggatatcggtttggtaccacatggtctgtcagcaactaatggggagatggcagagctaagtcaagaagaacgggaggtgctagccaaaaccaaagaagggatggacctggtcaagtttggccagtgggaaaatattttcagcaaagagcacgcagcctctgctttaacaaattcatcagcgagctgtgagagcaagaacaagaatgactccgagaaagaacagatttccagtggccataacatggtagaaggagagggcgctcccaaaaagaaagaaccacaggaaaatcagaagcagcaggacgttcgtacagccatggaaaccacagggcttgccccttggcaggatggtgttctggaaagactgaaaacagctgtggatgcaaaggactataacatgtatctagtgcacaatgggcggatgctgatacactttggtcagatgcctgcttgtacacccaaggagagagactttgtttatggcaagctggaggctcaggaagttaagactgtttacaccttcaaagttcctgtgagctactgtggaaagcgagctcgacttggagatgccatgttgagttgtaagccaagtgaacacaaggcagtggatacttcagatttggggatcactgtggaggacctgcccaaatcagatctcatcaagaccaccctccagtgtgctttggaaagagaactcaaaggccacgtcatctctgaatccagaagcattgatggactgttcatggattttgccacacaaacatacaactttgagccagaacagttttcctctgggacagtgctggctgacctaaccgctgccaccccagggggactccacgtggagctccacagcgagtgtgtgaccaggagacacaacaaaagcagctctgccttcactttcacttgcaacaaattcttcaggagggatgagttccccctgcacttcaagaatgtccacacagacattcagtcatgtctcaatggctggttccagcatcgatgccccctcgcctacttgggatgtacatttgttcaaaaccatttccgtcccccagggcaaaaggcaaaagtaatctatagccaggagctcaagacctttgccattaagccggaggttgctccagagctgagcgagggaaggaagaacaaccatcttttgggtcatggaggaaaaagccagaattctttaaccagcctgcccctggagattttgaagtacattgctgggttcttggacagcgtcagcctggcccagctctcccaggtgtctgtgctgatgaggaatatctgtgccactttgttacaagagagaggaatggtccttttgcaatggaagaaaaagaggtattcccatggaggcacctcctggagagtccacagagagatctggcagttcagcagcctcttctccaaaatcaagagctgggagtttaatgaagtcacctccatgtctgagcacctgaagtcctgtcctttcaacattgtagagcacaaaactgacccgattcttttgactagcatgtgtcagccccgtgagcaggcccgagagagcttagtctccacctttagaatcagaccacgaggaagatacgtctcctaaaaattcagatgccactcgatgcacccttcttggatttcttctcggagttcctgaagtaggacagagtgtgtggttttgaggactcccttctgtaaactgcctatttgcttatcggggtgtattggaacacgcaatgtccttcgaaacctcaacacgaggcctaagaatttcctaagccatgtcttgtaccatagtgccacattgatgacttgtttccttttttcttttcttttcttttcttttttctttctttctaaaatagattggtctgagaagaaaataagtaatttgaggccatttggaagatgggcccaatttcttaagtgatgagagagcacgaaattccataaccagtacaggcctgtgcttttacatgggctttttagttcacaaagcactttcaaatttatgggacaggaaatgcaggatgggactccccagggaacgcagggtgaagggaacaaagctggaggctctggagctgggtctgttttgacggtcaagtccagggctcattttggttattctactgcctctaggccagggtagtcctaacacagcctgacataggagagcccctggctgagcatggcagccttgaagacaccacaggccaaaacatgaggggcagaaatgggatcacagagtctgttgctagaatcttggcaacatacagcaggaaagccttgataaatcgggagtccaaaggagacaccatatttatggagaacattaggacaaaaagtcaccaacttactttgtaacattttaataatgacttaagggtcaagatttttttcttctgaaaattatgttctgagttaggcagaacatagccatggtcctgggccaccctgtgctatctgaaatgacctcaatacactaatgccaacctcagtgtcatgccagaatgcacagggcagcccagggagatcacacctttggcaaagtccagacaaggcccactgcagttcctatggcgccagtcaccagctcctagacagcacttgggtaccccattggggtcttggagaggaagacatgtgaacataacggctccctgaaattgctcctacccatccatatttctggtcatgctttcagtctgacaaaaatggatgatactgctgtttttggtaacaaacagtgaatattcataagaacaaaagtaacagaaaaaaagacacagtagaaactggcatcccctaaagcagggcttcttagccttggaactattgacatttttaaatggataattcttttttttttttttctaggtggggaggggatggagttcactcttgttgcccaggctggagcgcaatgacatggtctcggctcactgcaacctctgcctcctgggttcaagcgattctcctgcctcagcctcccgagtagctgggattactcgcctggctaattttgtatttttagtagagacgggctttctccatgttgttcaggctggtctcaaactcccgacctcaggtgactcgcccgccttggccttccagggtgctgggtttgcaggtgtgagccactgcgccctgcctgaactggataattctttgttgcaagggactgttctgtgtactacaggatacttggcagcatccttggcctatccattaaatgtcagtagcacccccacagtggcaacaatcaaaaatgtcaccagacattgctaaatattggggagcaaaatggctccccgttgaaaatccctaaaggatgtcatactagtgacaataagttaggatatgcttattttttagtacagcaaaatcttatcgcacatagctatccacaatagttatgatttaatgcagctctttatttatgaaataggttttagacatgtggtgattttaagttgggaaccagaaggaaatgattcgtttggtatggcttcatgtccttcagccacccccaagaatgtatcctttcagctctctttggttatacctgaagccaggagcgttgagttattagccttgtgtttatattcctctcactgtaattggtgtcattttcccagcagtcctagcagtcctcaagcaagtgggaaatcggaaaagaaaaggacaggcattgtagggaagcagaggataaagaatttagccaacaaaagaaacaatctagtcaatctgggtgcttttatttcctgggttctctctaaacatggctcagagctggtgtagatgaagtaggtgaaacctctgaaaagagtctagaaggcagtagagcaagtcccagaccagaaacatgctcatcttttcatcgtaatgtgccactcggtactatttggtaatgtcactctatttttcctaatcccatcctttggtttgtatttcatatttgtatataaggcaccattttctaaaaatatgactagggtgtgacctaaggttttattctgtgaagatgagtaactggaaagaagctaacactgcagtgggaaggaaggaagagagttgtccaggtggtagttcgacgtgttttgaatctagtccttcctacatggaggataaaagctcctaaagtccactctgggtttgtgattttaatagaaatagaaagggaaactatagaccaatggagatgaaaatcaggggctatcgacagatggaggagaaataaggtgctacatagagaaaggaagagggcagaaggctttcccttcccaaactgggtgagctggggaagccttggttcaggagagtggcactgcccacaactgctttgtgggttgtgcacttccagccgcactctccccctccagttgctgccttcagagccgtactgaagcacgagcttcaataagacaagcacacttcatagtgagagggcagcggtaccaaagcctttcagagagactatggattagacagaaatgatttgtgagaggaagctggagtgaacagcatgaacagcgagtgttacctgacagaggcaagacagctagaagtggcttcagatttagaaacagctgaggggagcaaagacggactgtgtacacagggagggaggatgtctatgggcagagcccttggtgagtatcatcaccaagaaaggcagtccagagtagagatcagccgaatatggaggctgaggtctgtagaactgggccagagaggaccttactgccttagtagcataagggtctggaaaagaagtttctatctcacaacaaaggaaaaagtgaaaagcaaggtggaacttgaagatacgtcacgaaaatcactataaaagtctgatttatgtgtgatgtcaaatcaaactgaaatgaagaatgagattgagtatatctgtggtgactgacctctgtatactagaaacctcaacatctctagaagaggaaataaaagctgctttgcactctg

SEQ ID NO: 2844 - protein, 717 aa, Homo sapiens
EARRNWGAMGKARRSPPGHHRHCEGCFNRHCHIPVEPNTSCLVISCHLLCGATFHMCKEAEHQLLCPLEQVPCLNSEYGCPLSMSRHKLAKHLQVCPASVVCCSMEWNRWPNVDSETTLHENIMKETPSEECLDTALALQDQKVLFRSLKMVELFPETREATEEEPTMNGETSVEEMGGAVGGVDIGLVPHGLSATNGEMAELSQEEREVLAKTKEGMDLVKFGQWENIFSKEHAASALTNSSASCESKNKNDSEKEQISSGHNMVEGEGAPKKKEPQENQKQQDVRTAMETTGLAPWQDGVLERLKTAVDAKDYNMYLVHNGRMLIHFGQMPACTPKERDFVYGKLEAQEVKTVYTFKVPVSYCGKRARLGDAMLSCKPSEHKAVDTSDLGITVEDLPKSDLIKTTLQCALERELKGHVISESRSIDGLFMDFATQTYNFEPEQFSSGTVLADLTAATPGGLHVELHSECVTRRHNKSSSAFTFTCNKFFRRDEFPLHFKNVHTDIQSCLNGWFQHRCPLAYLGCTFVQNHFRPPGQKAKVIYSQELKTFAIKPEVAPELSEGRKNNHLLGHGGKSQNSLTSLPLEILKYIAGFLDSVSLAQLSQVSVLMRNICATLLQERGMVLLQWKKKRYSHGGTSWRVHREIWQFSSLFSKIKSWEFNEVTSMSEHLKSCPFNIVEHKTDPILLTSMCQPREQARESLVSTFRIRPRGRYVS

SEQ ID NO: 2845 - DNA, 704 bp, Homo sapiens
  misc_feature (494)..(494): n is a, c, g, or t
gtctgtgcctactcccccggaggcaactgggaggtcaacgggaagacaatcgtcccctataagaagggtgcctggtgttcgctctgcacagccagtgtctcatgctgcttcaaagcctgggaccatgcaggggggctctgtgaggtccccaggaattcttgtcgcatgagctgccagaaccacggacgtctcaacatcagcacctgccactgccactgtccccctggctacacgggcagatactgccaagtgaggtgcagcctgcagtgtgtgcacggccggttccgggaggaggagtgctcgtgcgtctgtgacatcggctacggggagcccagtgcgccaccaaggtgcattttcccttccacacctgtgacctgaggatcgacggatactgcttcatggtgtcttcaagaggcagacacctattacagagccagatgaaatgtcagaggaaagcggggtgctggcccagatcaagagccacaaagtgcaangacatcctcgccttctatctgggccgcctggagaccaccaacgaggtgattgacagtgacttctagaccagaacttctggatcgggctcacctacaagaccgccaggactccttccgctgggccacaggggagcaccaggccttcaccagttttggctttgggcagcctgacaaccacgggtttggcaactgcgtggagctgcaggcttc

SEQ ID NO: 2846 - DNA, 527 bp, Homo sapiens
agaacaccataccatgggaactttaattagaacagagacatgtttcgtacaggctgaaaaaccagaaaccccgggaaggttatgcttagctttggagaccagaaatcaagctagccatggctgctgtgtcactgggcagaggacagggtcccaggatgctggaggacacagcagcttctttccatctgatgtgaatgctccaggcagaggctgtctggtcaggctgagctgggctcatggtgggtcctcgggttgggaattttccagaggagattcgcagcctccaatgcagagaaatggccttggggtgcaccacgtccccttggccaatgtggtggattatgctaggtccttggccaatcattgcttgaggaaatagctaagaattgggagaaaaaaaaatacagtgcagagagaagttcttatagcacaggaccccggagaaaaagctaccaagggaatgttggacattgagtcaagctgatctgagctcaagggagcttgggcatgtcaactccccctcctga

SEQ ID NO: 2847 - DNA, 2457 bp, Homo sapiens
cgctgttgcctccgccacctcctccgccgccgcgcgcccctcggagttccgcgccccaccatgcccaacatcgtgctgttcagcggcagctcgcatcaggacctatcccagcgcgtggccgaccgcctgggcctggagctgggcaaggtggtcacgaagaagttcagcaaccaggagaccagcgtggagattggtgaaagcgtgagaggggaagatgtctacatcatccagagcggctgcggggaaattaacgacaacctgatggaactcctcatcatgatcaatgcctgcaagattgcgtcatcatccagagtaactgccgtgatcccgtgtttcccatacgcccgacaagataaaaaggacaagagtcgtgccccaatttctgcaaaacttgtggccaatatgctgtcggtggctggggcggatcacatcatcaccatggacctgcatgcttctcagatacagggattctttgatattcctgtggataatttgtatgcggagcccgcagtcctgcagtggattcgggaaaacattgccgagtggaagaactgtatcattgtttcacctgacgcagggggagccaaaagggttacatcaattgcagacaggttgaatgtggaatttgctttgatccacaaagagaggaagaaggcgaatgaagtggaccggatggtcctggtgggcgacgtgaaggaccgtgtggccatcctcgtggatgacatggctgacacttgcggcaccatctgccatgctgcggacaagctgctgtcagctggagccaccaaagtgtatgctatccttacccatgggatcttctctggaccagctatttccagaataaataatgccgcctttgaggctgttgtcgtcacaaacacaattccgcaagaggacaaaatgaaacactgcaccaagattcaggtcattgacatttccatgatcttggccgaagcaatccgaaggacacacaatggggaatccgtgtcctacctgttcagccatgtcccgctataaatccagaatgggaagtgtccagcaagcctactctgacttctgacttgtttttgttttctggatttttagctgtaggtattcagcaatgataggttaatcactggcaaaagcatcagatctttgtatatgctaagatttattgtttccccttctaaagctcaagatcatttctttccagtttttggggaaatggtggtggttatttggtctttaagtgaactgtcttaaatgagaaacgtttttgtcattttgacttttaacaggtacaggtgatctcttcctttgttctttcagtactttgaggcgacaactttcaagtatataatttcattgtggaagtcatagtttatatatttcgaggttgccaaaggtgacttcacattaaagccttctgtgtaaatatatactgataatgcctatggacatttgggtaaaaccctgtatagaattaattatccttttactttggagtgaaccttggaaaatttataattataataccatggattttgaattttccttttttttttttttttttggataactcagtttcagataaaccatcttggttactgtgcttaatttggaccaaattttatttagcttaatatggacactgacacattttggggggtatacattagacatatcagagcagtgtatttctggatcattttttaaatgacctcttctaaaacataactgtcacttacctgaaatgctgcatcctaaaattccaaaattatattgagcaatcgccaaggcctaaagccaactgacttaaaggtaatcatttcagctaagattaaatttaaagcctaagaatgtatagagctagttttaaaataatgatctcagatttttaaaaaggatataggaacctgcattgtcattctctgaattaagaactgatggtttctatcattatttagccccacctttgtattttaaaatccttcagaatacatttatgaaccaatgcgactggacttagccacacacaatggaaattcagaccttgactatttggtgtttccagttcacaaaggtgatgaagactgtcttgggagcagcttaatcccaaaatttgtacatttcttgctgctcctggcgtggaaacttaagtgagaccaccaaatacattggtcctgtccaattctactgaatgggggtggacctggcatttatctggccaaaaacaggagccagagaaatatgaatataccaaagttgtttgtttagcctccaacttaaattacattagtcaacttatagatactcatatgatcacttttctttttagatactacatcaactagattcaggagtatatcatttgcagtgcttgtattggtttaaaatgtaagattttaagatcctctaacactgtactaaaacatttcaataaaatcattctgactgcgttcaaaaaaaaaaaaa

SEQ ID NO: 2848 - protein, 318 aa, Homo sapiens
MPNIVLFSGSSHQDLSQRVADRLGLELGKVVTKKFSNQETSVEIGESVRGEDVYIIQSGCGEINDNLMELLIMINACKIASSSRVTAVIPCFPYARQDKKDKSRAPISAKLVANMLSVAGADHIITMDLHASQIQGFFDIPVDNLYAEPAVLQWIRENIAEWKNCIIVSPDAGGAKRVTSIADRLNVEFALIHKERKKANEVDRMVLVGDVKDRVAILVDDMADTCGTICHAADKLLSAGATKVYAILTHGIFSGPAISRINNAAFEAVVVTNTIPQEDKMKHCTKIQVIDISMILAEAIRRTHNGESVSYLFSHVPL

SEQ ID NO: 2849 - DNA, 3805 bp, Homo sapiens
ggctcggctcctagagctgccacggccatggccagagcccgcccgccgccgccgccgtcgccgccgccggggcttctgccgctgctccctccgctgctgctgctgccgctgctgctgctgcccgccggctgccgggcgctggaagagaccctcatggacacaaaatgggtaacatctgagttggcgtggacatctcatccagaaagtgggtgggaagaggtgagtggctacgatgaggccatgaatcccatccgcacataccaggtgtgtaatgtgcgcgagtcaagccagaacaactggcttcgcacggggttcatctggcggcgggatgtgcagcgggtctacgtggagctcaagttcactgtgcgtgactgcaacagcatccccaacatccccggctcctgcaaggagaccttcaacctcttctactacgaggctgacagcgatgtggcctcagcctcctcccccttctggatggagaacccctacgtgaaagtggacaccattgcacccgatgagagcttctcgcggctggatgccggccgtgtcaacaccaaggtgcgcagctttgggccactttccaaggctggcttctacctggccttccaggaccagggcgcctgcatgtcgctcatctccgtgcgcgccttctacaagaagtgtgcatccaccaccgcaggcttcgcactcttccccgagaccctcactggggcggagcccacctcgctggtcattgctcctggcacctgcatccctaacgccgtggaggtgtcggtgccactcaagctctactgcaacggcgatggggagtggatggtgcctgtgggtgcctgcacctgtgccaccggccatgagccagctgccaaggagtcccagtgccgcccctgtccccctgggagctacaaggcgaagcagggagaggggccctgcctcccatgtccccccaacagccgtaccacctccccagccgccagcatctgcacctgccacaataacttctaccgtgcagactcggactctgcggacagtgcctgtaccaccgtgccatctccaccccgaggtgtgatctccaatgtgaatgaaacctcactgatcctcgagtggagtgagccccgggacctgggtgtccgggatgacctcctgtacaatgtcatctgcaagaagtgccatggggctggaggggcctcagcctgctcacgctgtgatgacaacgtggagtttgtgcctcggcagctgggcctgtcggagccccgggtccacaccagccatctgctggcccacacgcgctacacctttgaggtgcaggcggtcaacggtgtctcgggcaagagccctctgccgcctcgttatgcggccgtgaatatcaccacaaaccaggctgccccgtctgaagtgcccacactacgcctgcacagcagctcaggcagcagcctcaccctatcctgggcacccccagagcggcccaacggagtcatcctggactacgagatgaagtactttgagaagagcgagggcatcgcctccacagtgaccagccagatgaactccgtgcagctggacgggcttcggcctgacgcccgctatgtggtccaggtccgtgcccgcacagtagctggctatgggcagtacagccgccctgccgagtttgagaccacaagtgagagaggctctggggcccagcagctccaggagcagcttcccctcatcgtgggctccgctacagctgggcttgtcttcgtggtggctgtcgtggtcatcgctatcgtctgcctcaggaagcagcgacacggctctgattcggagtacacggagaagctgcagcagtacattgctcctggaatgaaggtttatattgacccttttacctacgaggaccctaatgaggctgttcgggagtttgccaaggagatcgacgtgtcctgcgtcaagatcgaggaggtgatcggagctggggaatttggggaagtgtgccgtggtcgactgaaacagcctggccgccgagaggtgtttgtggccatcaagacgctgaaggtgggctacaccgagaggcagcggcgggacttcctaagcgaggcctccatcatgggtcagtttgatcaccccaatataatccggctcgagggcgtggtcaccaaaagtcggccagttatgatcctcactgagttcatggaaaactgcgccctggactccttcctccggctcaacgatgggcagttcacggtcatccagctggtgggcatgttgcggggcattgctgccggcatgaagtacctgtccgagatgaactatgtgcaccgcgacctggctgctcgcaacatccttgtcaacagcaacctggtctgcaaagtctcagactttggcctctcccgcttcctggaggatgacccctccgatcctacctacaccagttccctgggcgggaagatccccatccgctggactgccccagaggccatagcctatcggaagttcacttctgctagtgatgtctggagctacggaattgtcatgtgggaggtcatgagctatggagagcgaccctactgggacatgagcaaccaggatgtcatcaatgccgtggagcaggattaccggctgccaccacccatggactgtcccacagcactgcaccagctcatgctggactgctgggtgcgggaccggaacctcaggcccaaattctcccagattgtcaataccctggacaagctcatccgcaatgctgccagcctcaaggtcattgccagcgctcagtctggcatgtcacagcccctcctggaccgcacggtcccagattacacaaccttcacgacagttggtgattggctggatgccatcaagatggggcggtacaaggagagcttcgtcagtgcggggtttgcatcttttgacctggtggcccagatgacggcagaagacctgctccgtattggggtcaccctggccggccaccagaagaagatcctgagcagtatccaggacatgcggctgcagatgaaccagacgctgcctgtgcaggtctgacaccggctcccacggggaccctgaggaccgtgcagggatgccaagcagccggctggactttcggactcttggacttttggatgcctggccttaggctgtggcccagaagctggaagtttgggaaaggcccaagctgggacttctccaggcctgtgttccctccccaggaagtgcgccccaaacctcttcatattgaagatggattaggagagggggtgatgacccctccccaagcccctcagggcccagaccttcctgctctccagcaggggatccccacaacctcacacttgtctgttcttcagtgctggaggtcctggcagggtcaggctggggtaagccggggttccacagggcccagccctggcaggggtctggccccccaggtaggcggagagcagtccctccctcaggaactggaggaggggactccaggaatggggaaatgtgacaccaccatcctgaagccagcttgcacctccagtttgcacagggatttgtcctgggggctgagggccctgtccccacccccgcccttggtgctgtcataaaagggcaggcaggggcaggctgaggagttgcccgttgccccccagagactgactctcagagccagagatgggatgtgtgagtgtgtgtgtgtgtgtgtgcgcgcgcgcgcgcgtgtgtgtgtgcacgcactggcctgcacagagagcatgggtgagcgtgtaaaagcttggccctgtgccctacagtggggacagctgggccgacagcagaataaaggcaataagatgaa

SEQ ID NO: 2850 - protein, 998 aa, Homo sapiens [sequence omitted]

SEQ ID NO: 2851 - DNA, 446 bp, Homo sapiens
  misc_feature (91)..(91): n is a, c, g, or t
  misc_feature (167)..(167): n is a, c, g, or t
  misc_feature (257)..(257): n is a, c, g, or t
  misc_feature (296)..(296): n is a, c, g, or t
  misc_feature (311)..(311): n is a, c, g, or t
  misc_feature (367)..(367): n is a, c, g, or t
  misc_feature (374)..(374): n is a, c, g, or t
  misc_feature (385)..(385): n is a, c, g, or t
  misc_feature (397)..(397): n is a, c, g, or t
  misc_feature (427)..(427): n is a, c, g, or t
tttttttttttttttttttttttttttttttttttttttttgcacttcccatgagcatttttattaaattgaaacaagttgttgattcganaattacaagacttgtacaaaaattcacagcgcctgtgaggagcctttggtgggaactggtgacacctggtgcctcnccggacagaggaaggaagtcccaccccgccttccagcagcagcgagcctgtgtctggcattccctgttccgctgctcccaccctcactgnggggcagcagttctttaggaacattcagctgtcaaaggngagaaccagccccanaggcctgggctcgcaggcttaaggagcacttgttggcactgttagctcagcacctntcccagntccagcccatnggcttggagganggaaaaggggcagaaaacacaaatctcacnctggaaacacatacacata

SEQ ID NO: 2852 - DNA, 580 bp, Homo sapiens
gatctgatgggtttatcaggcttttctgcgttgcttcttcctcattctttcttgctgccaccatgtaagaagtgcctttgccctccaccatgattatgagacctcccagccgtgtggaactgagtgattggggcagatgtgagagggcacggcctcatctgtgaggggcagccagtgacgtcacggctggctgtcatctgtggaacgtcttcttgtcacatggggatcagcaaagacccgatttttgtaccaggcgtctgggggccttatttctcagccatggtacctgggttctggctgaatgaaggtggtcagagcgttactggaaaattgatagaccacatggtacaaggccatgctgcttttccagaactacaagtaaaggccacagccagatgccagagtatatatgcatatttgaacagtcacctggatctgattaagaaggctcagcctgtgggtttccttactgttgatttacatgtttggccagatttccatggcaaccggtctcccttagcagatctgacactaaagggcatggtcaccggattgaaactgtctcaggaccttgatgatc

SEQ ID NO: 2853 - DNA, 327 bp, Homo sapiens
  misc_feature (3)..(4): n is a, c, g, or t
  misc_feature (9)..(10): n is a, c, g, or t
  misc_feature (12)..(12): n is a, c, g, or t
  misc_feature (19)..(19): n is a, c, g, or t
  misc_feature (22)..(22): n is a, c, g, or t
  misc_feature (28)..(33): n is a, c, g, or t
  misc_feature (45)..(45): n is a, c, g, or t
aannccccnncncttaggnaangccggnnnnnncgactgaacctncaactggcaatgctggcctactgggtgcgtcacgagtgccggtcgcgggaaggggatttggattgttgcgcctctgctctgaagaaagtgctttctggctccaactccagttctttggcctgagcagcgcctggaacctaacccttcccactctgtcaccttctcgatcccgccggcgctttagagccgcagtccagtcttggatccttcagagcctcagccactagctgcgatgcatgtgatcaagcgagatggccgccaagaacgagtcatgtttgacaa

SEQ ID NO: 2854 - DNA, 458 bp, Homo sapiens
gcacgagcacaaggaagttactgggaattcttctgtctagccttacaggaaaaaaacccgtttccaacgaaggcctctaagtggtcaaaatatccacgtgcagactttacaaacagagtgtttccaaactgctgaatgaaaagaaaagttaaactctgagagttgaacgcacacatcgcagagcagcttctgagaatgattctgtctagtttttatacgaagatatttccttttctgcctttggcctcaaagcgcttgaaatctccacttgcaaattccacaaaaagagtgtttcaaatctgctctgtgtaaatcaaagttcaactctgtgagttgaacacacacaacacaaggaagttactggggattcttctgtctagccttatatgaaaaacacccgttttcaacgaaggcctcagagagggctgaatatccacttgcagactttacaagcagag

SEQ ID NO: 2855 - DNA, 455 bp, Homo sapiens
tttttttttcatagttctctcttccaaattaacagcactctaacatactgtgacaatgtccggcatcctttagggcattttgttacccagaattttctaactatggaagttactaatgaatgcttctattacgcttattacagggtgtgaaaaaagttaaatcattacaaaagtaaaaaggaaaataactacaaaaccaacattagtgctgttagaagtcccacgggctgagcaagtgctggctgcaaggcattgaggcaagcaggcagggctgctgctcaggagccacggcaatgccaccgtgtcgcaatactatcagtgcagtgtataattcaggctaaaaacaaatctgcggcatttgcattatttcaaattttgagcattaagaagggttttatttttcaaatagcataacgaaaattagcataaaatgcattgcactgctttaaatcacc

SEQ ID NO: 2856 - DNA, 1946 bp, Homo sapiens
aacagtccccaggcatcaccattcaagatgcatccaggggtcctggctgccttcctcttcttgagctggactcattgtcgggccctgccccttcccagtggtggtgatgaagatgatttgtctgaggaagacctccagtttgcagagcgctacctgagatcatactaccatcctacaaatctcgcgggaatcctgaaggagaatgcagcaagctccatgactgagaggctccgagaaatgcagtctttcttcggcttagaggtgactggcaaacttgacgataacaccttagatgtcatgaaaaagccaagatgcggggttcctgatgtgggtgaatacaatgttttccctcgaactcttaaatggtccaaaatgaatttaacctacagaattgtgaattacacccctgatatgactcattctgaagtcgaaaaggcattcaaaaaagccttcaaagtttggtccgatgtaactcctctgaattttaccagacttcacgatggcattgctgacatcatgatctcttttggaattaaggagcatggcgacttctacccatttgatgggccctctggcctgctggctcatgcttttcctcctgggccaaattatggaggagatgcccattttgatgatgatgaaacctggacaagtagttccaaaggctacaacttgtttcttgttgctgcgcatgagttcggccactccttaggtcttgaccactccaaggaccctggagcactcatgtttcctatctacacctacaccggcaaaagccactttatgcttcctgatgacgatgtacaagggatccagtctctctatggtccaggagatgaagaccccaaccctaaacatccaaaaacgccagacaaatgtgacccttccttatcccttgatgccattaccagtctccgaggagaaacaatgatctttaaagacagattcttctggcgcctgcatcctcagcaggttgatgcggagctgtttttaacgaaatcattttggccagaacttcccaaccgtattgatgctgcatatgagcacccttctcatgacctcatcttcatcttcagaggtagaaaattttgggctcttaatggttatgacattctggaaggttatcccaaaaaaatatctgaactgggtcttccaaaagaagttaagaagataagtgcagctgttcactttgaggatacaggcaagactctcctgttctcaggaaaccaggtctggagatatgatgatactaaccatattatggataaagactatccgagactaatagaagaagacttcccaggaattggtgataaagtagatgctgtctatgagaaaaatggttatatctattttttcaacggacccatacagtttgaatacagcatctggagtaaccgtattgttcgcgtcatgccagcaaattccattttgtggtgttaagtgtctttttaaaaattgttatttaaatcctgaagagcatttggggtaatacttccagaagtgcggggtaggggaagaagagctatcaggagaaagcttggttctgtgaacaagcttcagtaagttatctttgaatatgtagtatctatatgactatgcgtggctggaaccacattgaagaatgttagagtaatgaaatggaggatctctaaagagcatctgattcttgttgctgtacaaaagcaatggttgatgatacttcccacaccacaaatgggacacatggtctgtcaatgagagcataatttaaaaatatatttataaggaaattttacaagggcataaagtaaatacatgcatataatgaataaatcattcttactaaaaagtataaaatagtatgaaaatggaaatttgggagagccatacataaaagaaataaaccaaaggaaaatgtctgtaataatagactgtaacttccaaataaataattttcattttgc

SEQ ID NO: 2857 - protein, 471 aa, Homo sapiens
MHPGVLAAFLFLSWTHCRALPLPSGGDEDDLSEEDLQFAERYLRSYYHPTNLAGILKENAASSMTERLREMQSFFGLEVTGKLDDNTLDVMKKPRCGVPDVGEYNVFPRTLKWSKMNLTYRIVNYTPDMTHSEVEKAFKKAFKVWSDVTPLNFTRLHDGIADIMISFGIKEHGDFYPFDGPSGLLAHAFPPGPNYGGDAHFDDDETWTSSSKGYNLFLVAAHEFGHSLGLDHSKDPGALMFPIYTYTGKSHFMLPDDDVQGIQSLYGPGDEDPNPKHPKTPDKCDPSLSLDAITSLRGETMIFKDRFFWRLHPQQVDAELFLTKSFWPELPNRIDAAYEHPSHDLIFIFRGRKFWALNGYDILEGYPKKISELGLPKEVKKISAAVHFEDTGKTLLFSGNQVWRYDDTNHIMDKDYPRLIEEDFPGIGDKVDAVYEKNGYIYFFNGPIQFEYSIWSNRIVRVMPANSILWC

SEQ ID NO: 2858 - DNA, 522 bp, Homo sapiens
  misc_feature (497)..(497): n is a, c, g, or t
cgcatcagcatccttgctgctgccgatgctggaatggctagtgatgctgttgaggcttgagatgctatctgaggagttttgtctcttgatccgaagttctttgggtgtggtttctgaggcattaagggctccctgaatgactgcctgggcctcagagttctttttcttcagaaagtctatggtttctcgcaaatccagcagctcagtgtccttctcctcggccgtctctgccaggtgtcgcaggcgggatgtcatattcaccaggctctgctcaaaagcagccaccagattagcattggcagaaagctgagacgtcaaggtggccactttttcctgggatgattccagttccctacgaagcttccggatttgctcagattgcatcctctcctcagctgaggagtaggtggaggaggcactggaggccagggacagcactgagccgtgaacatcgtccgtggggtctcggaaggatcctgaccgaatcattcccttgngtctctcggccagggacagggtgct

SEQ ID NO: 2859 - DNA, 507 bp, Homo sapiens
ttttttttttggtttgaagaaagaaatctttattaataatcttaataatactgttagtttgaatggtcacaccttggaagcatacagaatggtaagaaaggaagcccggggctcggctgcagtcctggggatctgagtgagtcccggggttgagctgctgcaagacaagggtccggaacagcagaggggacagggggctctgtacagaggacaaagccggacgagggctgtggggctatgtacaacgggaatagaaaaggagaattccatttcaatagctgatgctgaatagaaagtgaggtgtatttttaaatttttgacacttcatgagacagtggagccacgttgggagcctgtattttttgctgcttccctacttcagtgctccctgcctcgccaggggttcctccctgccacctgctctgctcctgctcctcccaccgggtaagcctggctgtccttggtgctgctcccgccacctggacacctgccttgggaacatggaaa

SEQ ID NO: 2860 - DNA, 347 bp, Homo sapiens
ctcctctcccctcccctccccggcactgcagcaccagccgtctgcagctccggccgccacttgcgcctctccagcctccgcaggcccaaccgccgccagcaccatggccagcaccatttccgcctacaaggagaagatgaaggagctgtcggtgctgtcgctcatctgctcctgcttctacacacagccgcaccccaataccgtctaccagtacggggacatggaggtgaagcagctggacaagcgggcctcaggccagagcttcgaggtcatcctcaagtccccttctgacctgtccccagagagccctatgctctcctccccacccaagaagaaggacacctccc

SEQ ID NO: 2861 - DNA, 576 bp, Homo sapiens
tgcatgctgcgtgctgctgctgctgcgccgccgtcgcctgtcctgcgctcttcggtctctgctcccgggacccgggctccgccgcagccagccagcatgtcggggatcaagaagcaaaagacggagaaccagcagaaatccaccaatgtagtctatcaggcccaccatgtgagcaggaataagagagggcaagtggttggaacaaggggtgggttccgaggatgtaccgtgtggctaacaggtctctctggtgctggaaaaacaacgataagttttgccctggaggagtaccttgtctcccatgccatcccttgttactccctggatggggacaatgtccgtcatggccttaacagaaatctcggattctctcctggggacagagaggaaaatatccgccggattgctgaggtggctaagctgtatgctgatgctggtctggtctgcattaccagctttatttctccattcgcaaaggatcgtgagaatgcccgctaaatacatgaatcagcagggctgccattctttgaaactataggtagatgcacctctaaatatctgtgaaagcagagacgc

SEQ ID NO: 2862 - DNA, 2372 bp, Homo sapiens
tttaaagatgtggctaactagctagtgatgcatgaacaattgttttagaaacctaccattgtggtcctgttggtatctaggaagttttttcatttgttggtggcaactgagtgatctgttatgtctacttttcctctctccctgtcccctcccccatcttcttctctctcttttctttctccctttttttcagtcaaggtagacttgagataggggacttgcatggctatagtagatcataatacatgaggccccccaaataagagagtgaaacattgtctgggatgtattttctgctcgaactcatcgtcatttttctgtgtatttcttacattagcccccagaaaagcatttttcaaagactttgagaaccaaaggttctctctgtaaggaaatgtgttaacctgatttccttgttctcatgtaattttctctcttaaagccataataatagtgtcagaggcagctttctagttagtgtgagtaatgtggttactgtattttctatttttattttaatgtgcttttcctgctgtggattttttttttctttcttgattttaaaaacagcagttgagtaaatgtggttatttgaagactggcgtatattgcatcttctctgagatgcaattttgaaggaaggctctgtgcacaataggcattttttttcagattccttagtaggataaataggagaatgtttggaacacagatcagtgacaatattggtttatggtcatggtaggtcaggcttcctcagagaaactgacaatagagtatcccataggttttgtctctagagagtctgttaatatgaagtctgtttattttatgatgtgttgataagaaaattaggtaaccagggaagcaccttaaattgctgcattcatttgcctctttttaagcatgcacacacattgagaaattttgaattaacaacaacaaaatacacttaaattcccctggaaagagtaattaagagctacttgtctctgtgctgtcatctctgccagaattagagttcctgctgagtatattccattgagtcagccatcattccatcaccagcagggattgcttttctgcttttccacgtattgacatgtgagggaatgtctgtcttgcagtagccatgggcttgtgccagattttgagatccatagaggcagttctgggagcttttcaattctgaatcagggttccaattcataatagctgagccagggaaaccgggttgaatctgtggccaaaaccgtggtaaaaaactttttccccctttcctttcttgcagtgctttattgctttaaaatatgagtgcctctgtccattgattctctggtgactttccgttggattcaaattgtggtctcttaggtgaaaaggtcagtgtgttattcattcagccacacatcgatggagattaactgagagcagtacaagacatttggatcctgccagacctagggcacctgaaggaagtttatttcttttctctctagcctttactatgcctgctgcagaagaggatggccctgtcttctgggagtaggggagggttttgattggctgtatgttaactgcctcaaatccatggccatagggcgagtaagaaccctggagaatcaaacatgtcatctttgtagcatcacctgatttagtgcttttcctcaggtctgagatgtctcagggggcctttttcccttgcagcactgatctttcaatgaggtgctagtgtctgtcctgagcaataacaaggagaaaccatgaagtgtgaacagctcttattaggggggtaaatgtcattagcgcctttgtagccttctctgcaatctgaatgctcctgtcaaaagagcgacttactgaagcctcctttaaaatcacataaatggaatttaagatgctgaagttttacattttaattaagcaaggccattaactccctttacatatacacttttttgtagccagttatgcttgtatgccttataaggctattgaaaaattatccacgaaaattattttaaggatttgagaaatagttggttaactttaagtcaaagttttagatatagagaccctatactcatgtgcccaaccattgtaatatgcgtattgacgtatatgataggagaaaacactagcattttgagttaataagtaggtcagtttggattaatggaaagtttgaagcttagagtgtttaaataatgattttattcttttcaatacacaagtggaaatgtttctccagtctaaattccccctagtattctcctgaaacaaaatttttatatgcagatatttgcttcttttgcaagtttgagaatttcacagtaacttctggttaccctgggttgtgtcttgcagttacc

SEQ ID NO: 2863 - DNA, 242 bp, Homo sapiens
ttttttttttttttttttttttttttttccaaaacttatttttgtttatagaaacaagacaacacacagtaaaattggggaaatacaatagttttttcaatatagtaccacaagccattttttctgtaaaggaccaaatattagatactatcacaaaacattttatcactcattcaaaacaagaatcattcagttgccccaggaaaaaacacactgaaattattttagatagcataataagc

SEQ ID NO: 2864 - DNA, 1158 bp, Homo sapiens
cacgaggccgcgggggcaaggcctggagctgtggttcgaatttgtgcaggcagcgggtgctggcttttagggtccgccgcctctctgcctaatgagctgcaccagaatgatccaggttttagatccacgtcctttgacaagttcggtcatgcccgtggatgtggccatgaggctttgcttggcacattcaccacctgtgaagagtttcctgggcccgtacgatgaatttcaacgacgacattttgtgaataaattaaagcccctgaaatcatgtctcaatataaaacacaaagccaaatcacagaatgactggaagtgctcacacaaccaagccaagaagcgcgttgtgtttgctgactccaagggcctctctctcactgcgatccatgtcttctccgacctcccagaagaaccagcgtgggatctgcagtttgatctcttggaccttaatgatatctcctctgccttaaaacaccacgaggagaaaaacttgattttagatttccctcaaccttcaaccgattacttaagtttccggagccactttcagaagaactttgtctgtctggagaactgctcattgcaagagcgaacagtgacagggactgttaaagtcaaaaatgtgagttttgagaagaaagttcagatccgtatcactttcgattcttggaaaaactacactgacgtagactgtgtctatatgaaaaatgtgtatggtggcacagatagtgataccttctcatttgccattgacttaccccctgtcattccaactgagcagaaaattgagttctgcatttcttaccatgctaatgggcaagtcttttgggacaacaatgatggtcagaattatagaattgttcatgttcaatggaagcctgatggggtgcagacacagatggcaccccaggactgtgcattccaccagacgtctcctaagacagagttagagtcaacaatctttggcagtccgaggctggctagtgggctcttcccagagtggcagagctgggggagaatggagaacttggcctcttatcgatgaattaagcaacaatgtaactggtcttgacttgtcatattcccccatgcaatcctaggtctgtattgctcaattttaggaagcctttgctactccatcagtaggtttagatttga

SEQ ID NO: 2865 - protein, 317 aa, Homo sapiens
MSCTRMIQVLDPRPLTSSVMPVDVAMRLCLAHSPPVKSFLGPYDEFQRRHFVNKLKPLKSCLNIKHKAKSQNDWKCSHNQAKKRVVFADSKGLSLTAIHVFSDLPEEPAWDLQFDLLDLNDISSALKHHEEKNLILDFPQPSTDYLSFRSHFQKNFVCLENCSLQERTVTGTVKVKNVSFEKKVQIRITFDSWKNYTDVDCVYMKNVYGGTDSDTFSFAIDLPPVIPTEQKIEFCISYHANGQVFWDNNDGQNYRIVHVQWKPDGVQTQMAPQDCAFHQTSPKTELESTIFGSPRLASGLFPEWQSWGRMENLASYR

SEQ ID NO: 2866 - DNA, 291 bp, Homo sapiens
aaaactttttttttttttttttttttcacttgatagtttaatgttatatttgcagcataaataaggcacaatatatgccagggcaccgtttggagggagaaggcatagctggggggataactgctaagtggcaagggggaaaggaagacagtatggttagggagaatagagcgaagcctctgcctcagcccagtcccaggagattgtgagaaccagctcacagggatcatgctgaatcaggtggaggggaaaagggaaaagacagttttgtaacataaaacaaaatagcct

SEQ ID NO: 2867 - DNA, 491 bp, Homo sapiens
gcacgagcggggctggcgtgtgggtctcgcagcgttgctcacagaacagagtagaggcggcggcggcggcggccggacccagactggtagtgaggcgttggaccccgagccgctgcaatgccgctggagctggagctgtgtcccgggcgctgggtgggcgggcaacacccgtgcttcatcattgccgagatcggccagaaccaccagggcgacctggatgtagccaagcgcatgatccgcatggccaaggagtgtggggctgattgtgccaagttccagaagagtgagctagaattcaagtttaatcggaaagccttggagaggccatacacctcgaagcattcctgggggaagacgtacggggagcacaaacgacatctggagttcagccatgaccagtacagggagctgcagaggtacgccgaggaggttgggatcttcttcactgcctctggcatggatgagatggcaattgaattcctgcatgaact

SEQ ID NO: 2868 - DNA, 1809 bp, Homo sapiens
actgcattagaaggcaagccattgggatttgcagtaaatgtattacagaacacaagtgacttgctgatactgcttgtttagcagtttgcaagggcaatggcagtatggatttttgaattagaagggaagggctgttctttctctgtgtgggaacatctagttgatggctggggagaaaattgatttagagaacaaaatgcagccaccgttatttgtgccatttgaaaggcctctatggattagtgagtgaaaataaaaaggttgctttcggtttaggaaagagggtcttaacattgatctgcgtcttggtctggtatggagagaataaaggatggaccaccagatggagaaagggcatccaggccccatgcagcctgcagatacaggtacacactccattctcacatagttgtctttctcagctctttggctttcagaagtcggctttttgggtttattattacagtaagcttttccaatgacaacattagagttgtcatagcccccatccgtggagctcccatgtgccctaggaattggtccgccagaagccgccccctccccgtatcaaccttcccagcctccctttgtgtggatactaattattccaccttgaaaaagagaaaacaggtgagtgggattaggggatgacagtagcacctaccccatagggtaattaccaagattaagtgagttaccaaatgcaggagcagttgcgtagtttcctggcatgggggcgctctgagggatagctgtgatctaaatagcagtccctttaaaactctacccctgctcttggacttctaggccatgcttcactgatacttccattttgtttttgcaaacccagcttccttcctacctctgaactgattttcccattaccgtgttttatttctttccttctaagatcataagcatttatctttaggcttaaaaggagaaaaaaaaaaaaggacttgttggcagtctgttttttttttttttttttttttttaaatgaagtctcgctcttgtcccccaggctggagtgcaatggcgcaatctcggttcactgcaacctccacctcccaggttcaagcgattctgttgcctcagcctcccgagtagctgggattacaggcgtgcgccaccatgcccagctgatttttgtatttgtagtagagtcgggatttcaccatgttggccaggctggtcacaaactcctgacctcaagtaatctgcctccctcagcctcccaaagtgctgggattacaggcgtgagccaccgcgtccggccttgttggcagtctttattgtctaagtaaaatgtcttactttggccaaacagcagaatgtgtccttggaaggcaatagctttaagtaatgtaactatcagtaagaataaagttgtgttgagttttttcatttaaagggatggaagaacaacaaaggatttggttcattctatcaaagtaagttttggcagaataaggactaggaggtatatttcagagtttttctttcgaatgtaacatggaaaatttgtcattttgaaaacaagcagggtatggaattagagggtcaagttgttgcttggttacagaaagaaaaaatttcattttgatgagggatatgtacacctgtggggagtgtgtgcatgtagttttctttttgctctgtaaagtactgtgcaaaagttgtgagtagagtagttgtggtgctgtctttcttcgtctactccatgggcttgagatttttgttgacagtcaaggttcacagctgctgctgatgtactaatatttggggaagcaaaaaaaaaaaaaaaaa

SEQ ID NO: 2869 - DNA, 3511 bp, Homo sapiens
cggggcggcggcgggggccgggggggcccgggcgcgcgggagcgggagcggccgggggagccggagcgcaccatggaggcggcggcaggcggccgcggctgtttccagccgcacccggggctgcagaagacgctggagcagttccacctgagctccatgagctcgctgggcggcccggccgctttctcggcgcgctgggcgcaggaggcctacaagaaggagagcgccaaggaggcgggcgcggccgcggtgccggcgccggtgcccgcagccaccgagccgccgcccgtgctgcacctgcccgccatccagccgccgccgcccgtgctgcccgggcccttcttcatgccgtccgaccgctccaccgagcgctgcgagaccgtactggaaggcgagaccatctcgtgcttcgtggtgggaggcgagaagcgcctgtgtctgccgcagattctcaactcggtgctgcgcgacttctcgctgcagcagatcaacgcggtgtgcgacgagctccacatctactgctcgcgctgcacggccgaccagctggagatcctcaaagtcatgggcatcctgcccttctcggcgccctcgtgcgggctcatcaccaagacggacgccgagcgcctgtgcaacgcgctgctctacggcggcgcctacccgccgccctgcaagaaggagctggccgccagcctggcgctgggcctggagctcagcgagcgcagcgtccgcgtgtaccacgagtgcttcggcaagtgtaaggggctgctggtgcccgagctctacagcagcccgagcgccgcctgcatccagtgcctggactgccgcctcatgtacccgccgcacaagttcgtggtgcactcgcacaaggccctggagaaccggacctgccactggggcttcgactcggccaactggcgggcctacatcctgctgagccaggattacacgggcaaggaggagcaggcgcgcctcggccgctgcctggacgacgtgaaggagaaattcgactatggcaacaagtacaagcggcgggtgccccgggtctcctctgagcctccggcctccataagacccaaaacagatgacacctcttcccagtcccccgcgccttccgaaaaggacaagccgtccagctggctgcggaccttggccggctcttccaataagagcctgggctgtgttcaccctcgccagcgcctctctgctttccgaccctggtcccccgcagtgtcagcgagtgagaaagagctctccccacacctcccggccctcatccgagacagcttctactcctacaagagctttgagacagccgtggcgcccaacgtggccctcgcaccgccggcccagcagaaggttgtgagcagccctccgtgtgccgccgccgtctcccgggcccccgagcctctcgccacttgcacccagcctcggaagcggaagctgactgtggacaccccaggagccccagagacgctggcgcccgtggctgccccagaggaggacaaggactcggaggcggaggtggaagttgaaagcagggaggaattcacctcctccttgtcctcgctctcttccccgtcctttacctcatccagctccgccaaggacctgggctccccgggtgcgcgtgccctgccctcggccgtccctgatgctgcggcccctgccgacgcccccagtgggctggaggcggagctggagcacctgcggcaggcactggagggcggcctggacaccaaggaagccaaagagaagttcctgcatgaggtggtcaagatgcgcgtgaagcaggaggagaagctcagcgcagccctgcaggccaagcgcagcctccaccaggagctggagttcctacgcgtggccaagaaggagaagctgcgggaggccacggaggccaagcgtaacctgcggaaggagatcgagcgtctccgcgccgagaacgagaagaagatgaaagaggccaacgagtcacggctgcgcctgaagcgggagctggagcaggcgcggcaggcccgggtgtgcgacaagggctgcgaggcgggccgcctgcgcgccaagtactcggcccagatcgaagacctgcaggtgaagctgcagcacgcggaggcggaccgggagcagctgcgggccgacctgctgcgggagcgcgaggcccgggagcacctggagaaggtggtgaaggagctgcaggaacagctgtggccgcgggcccgccccgaggctgcgggcagcgagggcgctgcggagctggagccgtagattccgtgcctgccgccgcagcgccgccgacaacgcgggtgcaggggggcgcggctgggcggtgcagctccgcccggctccgcccctgcagcccacacagcacaacgtcttaccgtgcctattaccaagcgagtgtttgtaaccatgtagttttggaacccactgcaaaattttctactggccaagttcaagtgagtaagccgcgtcccccaactacagctggagacggggccagctcggcggcctgctggtcctctgcttgctggaacattctaacatttacacttttgttataagctatttaaaaccagtaaggagacttgaaattcagaaaatcaacacatttttaaatgactaacttctaaaagccccaacacatgacgccatctgaagacccgcaacggagtgggggtggcggccgccccaccctccccacccggggaagccatcacagctcatctgcccgcggctgcgtgaggacagcaggggtttttcttcagagtctattttttcagcgacaaggacccaggtcttcctgctgctgccagggagagcagggacagtgccgcgtgcgagatgagctcgaacactgcccgccttactgccgcctaccccgcccgccacgccgccgtcgatgccagcgctgtccccacgggtaccaggaagtgcagagccgcacaggagctgccccggagctgaggggacggtcttcggctcctctgcaccccgtgattctgcccacgctcctccaccacgaggcactgacctgcgtcgggtggtgaccgtggctggcggtcacgccctcagccctccgggcacacgtgccgcctgaccgggcgacccttttcagttcggcaaacgtcgctcccttcattttgggactgaggctgcagcattggaacaaaagagcattatttcaatttttctttctttttttttgttcgttcatttaaacgtatatttagaactgcactttgtccacaaccttcccttctctttctattccccagtgaactgaggtttttaccgactttatagagcagtcaaatccgaagtgctcgagtgcttagaaaccccctctggtgcttggttgaacaagggaatcacaaaaaaacgaaaatgcaaaaactgaacttcgggggtcgttctgtgccttccagcatcttgtacagcaaatcctgactcgtgtctttttacccccaagatatctgtcttcagtagcgactgaatctgccactctcagaataagttc

SEQ ID NO: 2870 - protein, 728 aa, Homo sapiens
MEAAAGGRGCFQPHPGLQKTLEQFHLSSMSSLGGPAAFSARWAQEAYKKESAKEAGAAAVPAPVPAATEPPPVLHLPAIQPPPPVLPGPFFMPSDRSTERCETVLEGETISCFVVGGEKRLCLPQILNSVLRDFSLQQINAVCDELHIYCSRCTADQLEILKVMGILPFSAPSCGLITKTDAERLCNALLYGGAYPPPCKKELAASLALGLELSERSVRVYHECFGKCKGLLVPELYSSPSAACIQCLDCRLMYPPHKFVVHSHKALENRTCHWGFDSANWRAYILLSQDYTGKEEQARLGRCLDDVKEKFDYGNKYKRRVPRVSSEPPASIRPKTDDTSSQSPAPSEKDKPSSWLRTLAGSSNKSLGCVHPRQRLSAFRPWSPAVSASEKELSPHLPALIRDSFYSYKSFETAVAPNVALAPPAQQKVVSSPPCAAAVSRAPEPLATCTQPRKRKLTVDTPGAPETLAPVAAPEEDKDSEAEVEVESREEFTSSLSSLSSPSFTSSSSAKDLGSPGARALPSAVPDAAAPADAPSGLEAELEHLRQALEGGLDTKEAKEKFLHEVVKMRVKQEEKLSAALQAKRSLHQELEFLRVAKKEKLREATEAKRNLRKEIERLRAENEKKMKEANESRLRLKRELEQARQARVCDKGCEAGRLRAKYSAQIEDLQVKLQHAEADREQLRADLLREREAREHLEKVVKELQEQLWPRARPEAAGSEGAAELEP

SEQ ID NO: 2871 - DNA, 302 bp, Homo sapiens
gagaagacgacagaagggtgaaggttagatagatggaatctctgtcaggggacaaacagctgtagcatccccttagcatctttctagccaatgagccccctccccaggaggagggatggcctgactgaaacaggtgagagtttgcttccccctttcagcagcattctttttagatttaggtactgaagaatcccagtgagttctgcatttgtatcttgcaagtttgtataaacccaatacaggaaataaaatgaatggtttgtcaaaaaaaaaaaaaaaaaaaaaaaaaaaagtcgtatcga

SEQ ID NO: 2872 - DNA, 444 bp, Homo sapiens
  misc_feature (11)..(11): n is a, c, g, or t
  misc_feature (294)..(294): n is a, c, g, or t
  misc_feature (314)..(314): n is a, c, g, or t
  misc_feature (322)..(322): n is a, c, g, or t
  misc_feature (327)..(327): n is a, c, g, or t
  misc_feature (366)..(366): n is a, c, g, or t
  misc_feature (409)..(409): n is a, c, g, or t
  misc_feature (427)..(427): n is a, c, g, or t
tgctgagcatngatgtttgtatattgattaggagtaaaaatgttcatttttacaaaatattacaacttctccctctcccctccttccacccagtatcccctgttcctcccccaggcattctggtcactgttcctttttgttgagatcattctcggtgtctcatatagctgggttgcagctccgttctttgccaggaggtggtaatagaggattccacgcactcagaatgcctcaggcaggcgcctgtggttgctctcaatggagggaagtgtcctgcagggggcgctgttggtncttcaggcaaggtcgggttncctcgaantctcntgtcttaacagtttgcttggtccttcaagaaaacaattnggggcaacaaatttttcctcattttgtggttgtgtaacctttngggcaaagttggcttccnggtctcctgaagcgtca

SEQ ID NO: 2873 - DNA, 491 bp, Homo sapiens
tttttttttttttttttttttttttttttttggtgaaaaatttgcatgaatcccacagacatgcggctgctacacatctctaccaggtatcaagtaaggcattctaagcagcacttctaggtatatttgctatcttacaggcagagaaatcaaagcaattgataggtaaacgtcatgcagtctttagatacccttcacaataattaaaacatcggttatcagcaattgagtggagttcccttataatctacagaataacttaaagcatccagacacgcctcagtgctaccactcacgttctcttactggccacattgcatatattcaaattaccacaagcttcattcaccaaatctgcctggtgccctgccctaccatactcccccaatcctgtttacacattaaaaaactgacaactggtaaagtaactgaaattcaggtgggggggctcacctgcaatgcccgttgctcccggctgagctgactggaat

SEQ ID NO: 2874 - DNA, 516 bp, Homo sapiens
aatttctgtaaatcagaatattcagatgttgaaaaagtctttgccttcagatttaaaagatacctttgaaatgtagcatatcccaaaatgcaacccagaggctggcaatgtcaacatttttctgttttaaaaaacctcttatgaaaactattgccatactaaattttttacttgctgatgacttacagctggaaaggattctgtacatataagacatcaaatattgaggatactggaacttttaaattaatggcaaagaaagtcaacaaaggaagttcatatgaaatcaaactagtaatatgattaaaaaaaaaaaagtttaaaatttttcttggccccagtcttatcatttctgagccaaatacaattctatcgaaatcacctgaaactgaaatcaccattctaggctggttttcccataaagatggactgctccaaaaagaggaatcaagaaagaatttggctcacagtgaattattcactttgtcttagttaagcaaaaaaaaaatctgactg

SEQ ID NO: 2875 - DNA, 269 bp, Homo sapiens
ttgaatttaggtgacactatagaagagctatgacgtcgcatgcacgcgtacgtaagcttggatcctctagagcggccgcctactactactaaattcgcggccgcgtcgacttttttttttttttttgtccaaaaaggaaaaaaaaataggaagaggttgtttaaaatggctgaatcatgtaaacatgatttaaagctgtcttcttaaagaaacaacacaactagctggaaaggggaaaacctaatctttcgagcagcaggtttatgtac

SEQ ID NO: 2876 - DNA, 638 bp, Homo sapiens
tttttttttttttttttgcctgcatggaaatattcattcaatcagaccacactccatttattaaggtctgtactcaggtgttacctctgtctagaggggacaaatgtatctaatctctacaaggtaatttgtaaaattgcagtaggccagaaaagaagtacttcatttagaacacagacagacggacccatgaggacttttagcagacagacagagggacccacgaggacttctgactgacagatgggtcactgttagttgcccatatcaaaagttgaaatgtcatggttgtaaaatcataagaaaaagaagtaataataatgtttgtaaaactacacattaatggataattaagttaacaacatacaaccacatttatattacatatgtgtttgtatatatatatatatatatttatactagtatcttaaagactgtacatacatcagctcattttttttctataaatccttatgaggaagattctgttatatttcccatttgaaactgatatagagtaattatatagagaaggttgaatattaagctatatgctgggattcaaaatcggatttttgtcatccccaaatcaattcatatactcactctgctatgctgaaattataaaatctgaatta

SEQ ID NO: 2877 - DNA, 577 bp, Homo sapiens
  misc_feature (471)..(471): n is a, c, g, or t
  misc_feature (482)..(482): n is a, c, g, or t
  misc_feature (496)..(496): n is a, c, g, or t
  misc_feature (502)..(502): n is a, c, g, or t
  misc_feature (519)..(519): n is a, c, g, or t
tgcaagtacaagggtaactttattgacccccagctgggcactgcttggcccctacatcattacccccctattttggctgttgcccccatggcactgcctgtcaacttctacaacctggtgatgtctggcatcaacccctcccaaagatggaggggattctcttgcgagtgatggtggcagctgtttcagggggcacagggctaaggctgagacgtgtcacctcaactgaagcagaagaggtggattatggcattggccacgaagaaaaggaaaatgcctccgctcatgctgctggatgctgaggggctgctggtttggctggtgtcgttttgtcctgagagtccagtttgtatctgtaccataaccaggaggctgatggtgagtaggaggaagaggaacgcttcattttggtaggacttcgtggctgtcttggtagcactttttaggtgatcccagggctgtctggagctnttttggtttantgcttttgaacagnctcgtncgaatcttggcctcgangcaaattcctatagtgagccgattaaatcgtaacatgcatactgtcccgtggaagtgg

SEQ ID NO: 2878 - DNA, 397 bp, Homo sapiens
ttgccagaaagcaaggaagccatccaagtccaacaggatcacgtcaaaaggccatgggagtcaacttgaagagatacttattaacctgagacaatatgagcatctaaaacaattaatagtgactacaatgggctcaaatgcaaacaataatctatgagctcattacgatattcaggaaaaaaaactattggtcactacagtggaggttactagtcactaactcattattctgaaaaatgacttaaaatgggagatagggtggagaattaggtatttatccagtttttcctgtacaaatgtaaatgtttagggagattgaagtagatgaaacaagtctggcaaaattgagataactgtttaatccgggtgttgggtacatggaggttcattatatttc

SEQ ID NO: 2879 - DNA, 435 bp, Homo sapiens
ggagttgtgaagggcgcgggtggggggcgctgccggcctcgtgggtacgttcgtgccgcgtctgtcccagagctggggccgcaggagcggaggcaagaggggcactatggcagacaaagttaggaggcagaggccgaggaggcgagtctgttgggccttggtggctgtgctcttggcagacctgttggcactgagtgatacactggcagtgatgtctgtggacctgggcagtgagtccatgaaggtggccattgtcaaacctggagtgcccatggaaattgtcttgaataaggaatctcggaggaaaacaccggtgatcgtgaccctgaaagaaaatgaaagattctttggagacagtgcagcaagcatggcgattaagaatccaaaggctacgctacgttacttccagcacctcctggggaagcaggcagataa

SEQ ID NO: 2880 - DNA, 3589 bp, Homo sapiens
actggcggccatggaactcaccggtaatagaggacacatctcttaactgggttgctctaagaactgatgtctaaaccgtctcagcatggcctgtagaggaggagctgggaatggccaccgtgcctcagctacactctctcgggttagccctggaagtctttacacatgtagaacccgtacccataatatatgcatggtatctgactttttctacccaaatatgggaggcgtggaaagccacatttaccagctctctcagtgcctgattgaaagagggcataaggttataattgtcacccatgcttatggaaatcgaaaaggcatccgttacctcaccagtggcctcaaagtctattacttgcctctgaaagtcatgtacaaccagtctacagccacgaccctctttcacagtctgccattgctcaggtacatatttgttcgggagagagtcacgataatccattcacatagttctttttctgctatggcccatgatgctctcttccacgccaagacaatggggcttcagacagtcttcacggaccattccctttttggatttgctgatgtcagctcggtgcttacaaacaagcttctaaccgtgtctctttgtgatacaaaccacatcatttgtgtgtcttatactagtaaggaaaatactgtactaagagcagcactgaatcctgaaatagtgtccgtcattcctaatgctgtagatcctactgacttcactccagacccatttagaaggcatgatagtataactattgttgttgtcagcagacttgtttacagaaaagggatcgatttgcttagtggtataatacctgaactctgtcagaaatatccagatttaaatttcataattggaggagagggaccaaagagaatcattttggaagaagttcgggaaagataccagctgcatgacagggtgcgtcttttgggagctttagaacacaaggatgttagaaatgtcttagttcaaggacatatttttctgaatacctcccttactgaagcattctgcatggcgatcgtggaagcagccagttgtggtttacaggttgtaagtaccagagttggtggaattcctgaggtgcttccagaaaaccttattattttatgtgagccttcagtaaaatctttgtgtgaaggattggaaaaggctattttccaactgaagtcagggacattgccagctccagaaaacatccataacatagtaaagactttctacacctggaggaatgttgcagaaagaactgaaaaggtatatgaccgggtatcagtggaagctgtgttgccaatggacaaacgactggacagacttatttctcactgcggcccagtaacaggctacatctttgctttgttggcagttttcaacttcctcttcctcattttcttgagatggatgactccagattctatcattgatgttgcaatagatgccactgggccacggggtgcctggactaataactattctcacagtaaaagagggggtgagaataatgagatatctgaaaccaggtagaaggaagcctagattgtaagattttaaacatttgtaatagttctataaagactatggaaaataaccttgcttttggggggtttttgtttttttagagttaatttagtaagttatgctacctctatatcattcaatattttctgttgaggaaagataaaaatgtatgcaattcctgagtgtagaaacttcttgcacttatttaaaatttaggagagaacatttaagccactcaggtatgcaatttttcagactactgaaatccctgtagcagagatgttttaacattatattttgagagctttgggtgctgaagggccaaacgttttctgggcattttttggccagtttttaatgtaacaccattagacactcaccagatgtttacaagttttctttaggggaactacaacaattatatgaactgttttatatcatgttcatatacatttattaggaatctaaatcatgtctttgaacatttattaggttcactcagtaggtgttacatgtaattaacaggttccttgagtaagatagtccatcagttaccagcacattttgaacccctgctctgtgtagaatgttgaactagatgcttcccgccattaaggaccaggggtgcattcactctttgtttaccattcaaatggcttacttcatcataattgtggttgatatgagatcaatatccaacatgccaaaaatgctcatgccagttaatgccaggaaaaaaatcaccgacacactactagtactttgttcctgttgtatgcattctcctaggtagagcctccatcttcagttgtgtttgtgaaggtattttttgctttttaaatactggggaccgatatcactgttgatagtgcagagaaaccctccacatttttcagtgcataattgagttttctataaatgccttcgtgttttctgagcagaatgtacgaggtgtgccatcccaaaaccagctgctaccctgtccttttaatgtaagtcactccccttcactgtggcctcgctgatgtctgataagtattgtcagtgtgcaaaaggctttacttcagaatggtttatttatagcaaactaagttgaaaattttagaaacagtctttgtgggtggatgttattaactgtcattgttgttgcccagagccatgggttttttaaccccaaattatccacatggtgtgtattatgaattctttgaactcttaaggtttttgtgagaaaaggactgtgaattcaaaacaataaggcacttgtgggtgcactacatagattctgacagtgttgtgattctgtataggatttttaaaaatgacaacattcacaaaatttattactttttaaaaaataacatgcctattaactggttgcactgatataaaagaaatatatttgtgttttgtttgtactaaaatgcaaaagcaagagtgcaatttttaaaatctagaagttaggggttttgttggagaaaaatggactgatctttaaactattcagtcttactgggatttttatgcatagaaactcacatataaacatgaaataaacagtgccagtattcataggaaagtgagaaactgtaatatttggccattattctattcaacaggttttagaggcatgccaccattttttccttatatttttgcttaatttttttaaattgtcatttaattcttaaactgtcatttatttgagatggaaataagatctaaagttagttgcctttgcctgtaaaacatgtgatttgcaaattattattttcctttttttttaacaaatggaagtaaatttgtttcacgtaaatcttaattttcaacctttctggataccttaattgtaactgtcagtttgcactggtcggtatatggaaacacattgctctaccctgctacttagttgattttaaagtgaatttacagtgatgagaaatttgtgaaaaatatattgtatttcttttgatgtttcaaaaggttgcctatgaaaaactgatttgttaaaacatgctacatgtccaaaaataaagaccagaatgacattttgat

SEQ ID NO: 2881 - protein, 484 aa, Homo sapiens
MACRGGAGNGHRASATLSRVSPGSLYTCRTRTHNICMVSDFFYPNMGGVESHIYQLSQCLIERGHKVIIVTHAYGNRKGIRYLTSGLKVYYLPLKVMYNQSTATTLFHSLPLLRYIFVRERVTIIHSHSSFSAMAHDALFHAKTMGLQTVFTDHSLFGFADVSSVLTNKLLTVSLCDTNHIICVSYTSKENTVLRAALNPEIVSVIPNAVDPTDFTPDPFRRHDSITIVVVSRLVYRKGIDLLSGIIPELCQKYPDLNFIIGGEGPKRIILEEVRERYQLHDRVRLLGALEHKDVRNVLVQGHIFLNTSLTEAFCMAIVEAASCGLQVVSTRVGGIPEVLPENLIILCEPSVKSLCEGLEKAIFQLKSGTLPAPENIHNIVKTFYTWRNVAERTEKVYDRVSVEAVLPMDKRLDRLISHCGPVTGYIFALLAVFNFLFLIFLRWMTPDSIIDVAIDATGPRGAWTNNYSHSKRGGENNEISETR

SEQ ID NO: 2882 - DNA, 371 bp, Homo sapiens
ttttttttttttttttttttttttttttttttttggcagggccctatttattttcaaacattctcccttcacaaaaaaaaacaggggggggggctcaaaaaaaaggctgcccaagggaaaagcacgggaaccctgaactggccgaggggcttgtcctcatcctcaggggtagggggaagcccccatctgccagtctggctggaagggaataaatataaagcaaaggccctgagtggaaggtgacagttaaccaaacagccaaggccaaggagaggaggggccctaaggcttaaaaaggccctgaggaccaaccttgctttgccatttgaccttgcccttgtaggcctcctttgaactcccaaaatgtgacc

SEQ ID NO: 2883 - DNA, 432 bp, Homo sapiens
tgaatttaggtgacactatagaagagctatgacgtcgcatgcacgcgtacgtaagcttggatcctctagagcggccgcctactactactactaaattcgcggccgcgtcgacttttttttttttttgtcttatgtctctaatctgcactgttcagctcttttaggcactgcaaagttgtcttgaattaggaaagaggtgctagaatgtgggcgtgggtgttgacctacatctgaacaatttacatatgattcaccacaattaaacaatttggtttgaaatagctataattaagttattatcagagaagtatttactagtctagaaattctaaatgtcgacgcggccgcgaatttagtagtagtagtcgacccgggaattccggaccggtacctgcaggcgtaccagctttccctatagtgagtcgtattaga

SEQ ID NO: 2884 - DNA, 597 bp, Homo sapiens
ggtgggggacgctgcagctggggccatttgaggggagcccatggggcctgaaaggcatctgtcaggcgcccctgcccggatggcaacagtagttctaggaggagacaccatgggccctgagcgtatcttccccaatcagactgaggaactgggacatcagggcccttcagaaggcactggggattggagcagtgaggagcctgaggaagagcaggaggaaacggggtcgggcccagctggctactcctaccagcccctgaaccaagatcctgaacaagaggaggtggaactggcaccagtgggggatggagatgtagttgctgacatccaggatcgaatccaggccctggggcttcatttgccagacccaccattagagagtgaagatgaagatgaggagggagctacagcgttgaacaaccacagctctattcccatggacccagaacatgtagagctggtgaaaaggacaatggctggagtaagcctgcctgcgccaggggttcctgcctgggctcgggagatatcggatgcccagtgggaagatgtggtacagaaagccctccagccggaggcatccctgctggagttgaccag

SEQ ID NO: 2885 - DNA, 305 bp, Homo sapiens
  misc_feature (116)..(116): n is a, c, g, or t
  misc_feature (174)..(174): n is a, c, g, or t
  misc_feature (270)..(270): n is a, c, g, or t
cggacgcgtgggctggtgggcaagggcccctgggctctaatagggtcatctctggcagcccacttgggccagctacgtgggagggaggaattacacagctgaccgaatccggcttnggatgaggtgagggaggagcaggtcaggaggggggccctcgtagggacgcgtacactnacacggacacacatggccacacgcatgtgcgggtgccataaccggcgaggctgggccagccgctccaccatttccccgactgcatggagacagtanaattagtgaacccctgagttaacccgtaaggcctt

SEQ ID NO: 2886 - DNA, 481 bp, Homo sapiens
tttttttttttttttatattacaaactgtatggatgcaggtatggggatgctagccgtcctcttccacaccatacagacagcctgtcagtggcagagtaaggccagcatgcaaatagagcaaaggtatacaagccaagtaatatcaagacaaaagtcagggattattacactctgagatcatttgagactctagatttgtctcttaaaccaaaattagattgtgttagccaatgactacattttcccctcttaaactagattgagttgtattttgctacttgcaataagaagaatcctaatatacttatcaaattgccagtgttccaaatttaaaactttaatgatgataaagttcaagaaaatgacactctaaaatacaactaggtcaaactttctagaagataaacaggcaattacattgaaagctttaaaatggatactttttgaccctgtaattctacttcttctaatttattatta

SEQ ID NO: 2887 - DNA, 555 bp, Homo sapiens
gaggcagctgagccgggcagggcccctgcctctgctacggcagcccccgatcatgcagcccccactggacctcaagcagatcctgcccttcccactcgagccagcccctacccttggcctcttcagcaactacagcaccatggaccctgtgcagaaggctgtgctctcccacacttttgggggaccctgctcaagaccaagcggcccgtcatttcctgtaatatctgtcaaatccgcttcaagttctcagagccaggctgaggcgcactacaaaggtaatcgccacgcccgacgagtcaaaggcattgaggctgccaagaccagaggcagggagcctggcgtccgagaacctggagacccagctcccccaggcagcaccccaacaaatggggatggtgtagcaccccgtccagtttccatggagaatggactggggccagccccaggatccccagagaaacagcctggctccccatcccctcccagcattccggagactggtcagggtgtaaccaagggtgaaggggggactccagccccggcttccttgcctgg

SEQ ID NO: 2888 - DNA, 567 bp, Homo sapiens
tttttttggcttttttttttttcaaaattaacacaaagctaataagctgaatacacaatgcaaagcatcctaaatcttgggcaataacaaaatctaagatcctaagatcatgatatttaaggtaggaaaaaagtaatcagactagactgggcgcggtggctcacgcctgtaatcaatcccagcactttgggaggcagagatgggtggatcacctgacgtcgggagtttgagaccagcctgaccaacatggagaaaccccatctctactaaaactacaaaattagccgggcgtggtgccacatgcctgtaatcctagctactccgaaggctaaggcaggagaattgcttgaacccaggaggtgaaggttgtggtgagctgagattgtgccactgcactctagactgggcaacaagagcaagactccatctcaaaaaaaaaaaaaaaaaaaagtaatcagatagcaaaggcaagttatttaatccagaccccatacccaatgcttaaaaattgtcatggatgatttgagaactgtaaaacctcataaaatagagagaggaaaagcctga

SEQ ID NO: 2889 - DNA, 2478 bp, Homo sapiens
ggcccacggagcccaccatgccgcgcccggcccccgcgcgccgcctcccgggactcctcctgctgctctggccgctgctgctgctgccctccgccgcccccgaccccgtggcccgcccgggcttccggaggctggagacccgaggtcccgggggcagccctggacgccgcccctctcctgcggctcccgacggcgcgcccgcttccgggaccagcgagcctggccgcgcccgcggtgcaggtgtttgcaagagcagacccttggacctggtgtttatcattgatagttctcgtagcgtacggcccctggaattcaccaaagtgaaaacttttgtctcccggataatcgacactctggacattgggccagccgacacgcgggtggcagtggtgaactatgctagcactgtgaagatcgagttccaactccaggcctacacagataagcagtccctgaagcaggctgtgggtcgaatcacacccttgtcaacaggcaccatgtcaggcctagccatccagacagcaatggacgaagccttcacagtggaggcaggggctcgagagccctcttctaacatccctaaggtggccatcattgttacagatgggaggccccaggaccaggtgaatgaagtggcggctcgggcccaagcatctggtattgagctctatgctgtgggcgtggaccgggcagacatggcgtccctcaagatgatggccagtgagcccctagaggagcatgttttctacgtggagacctatggggtcattgagaaactttcctctagattccaggaaaccttctgtgcgctggacccctgtgtgcttggaacacaccagtgccagcacgtctgcatcagtgatggggaaggcaagcaccactgtgagtgtagccaaggatacaccttgaatgccgacaagaaaacgtgttcagctcttgataggtgtgctcttaacacccacggatgtgagcacatctgtgtgaatgacagaagtggctcttatcattgtgagtgctatgaaggttataccttgaatgaagacaggaaaacttgttcagctcaagataaatgtgctttgggtacccatgggtgtcagcacatttgtgtgaatgacagaacagggtcccatcattgtgaatgctatgagggctacactctgaatgcagataaaaaaacatgttcagtccgtgacaagtgtgccctaggctctcatggttgccagcacatttgtgtgagtgatggggccgcatcctaccactgtgattgctatcctggctacaccttaaatgaggacaagaaaacatgttcagccactgaggaagcacgaagacttgtttccactgaagatgcttgtggatgtgaagctacactggcattccaggacaaggtcagctcgtatcttcaaagactgaacactaaacttgatgacattttggagaagttgaaaataaatgaatatggacaaatacatcgttaaattgctccaatttctcacctgaaaatgtggacagcttggtgtacttaatactcatgcattcttttgcacacctgttattgccaatgttcctgctaataatttgccattatctgtattaatgcttgaatattactggataaattgtatgaagatcttctgcagaatcagcatgatttttccaaggaaatacatatgcagatacttattaagagcaaactttagtgtctctaagttatgactgtgaaatgattggtaggaaatagaatgaaaagtttagtgtttctttatctactaattgagccatttaatttttaaatgtttatattagataaccatattcacaatggaaactttaggtctagtttcttttgatagtatttataatataaatcaatcttattactgagagtgcaaattgtacaaggtatttacacatacaacttcatataactgagatgaatgtaattttgaactgtttaacactttttgttttttgcttattttgttggagtattattgaagatgtgatcaatagattgtaatacacatatctaaaaatagttaacacagatcaagtgaacattacattgccatttttaattcattctggtctttgaaagaaatgtactactaaagagcactagttgtgaatttagggtgttaaactttttaccaagtacaaaaatcccaaattcactttattattttgcttcaggatccaagtgacaaagttatatatttataaaattgctataaatcgacaaaatctaatgttgtctttttaatgttagtgatccacctgcctcagcctcccaaagtgctgggattacaggcttgaaagtctaacttttttttacttatatatttgatacatataattcttttggctttgaaacttgcaactttgagaacaaaacagtcctttaaattttgcactgctcaattctgtttttcgtttgcattgtctttaatataataaaagttattacctttacatatt

SEQ ID NO: 2890 - protein, 486 aa, Homo sapiens
MPRPAPARRLPGLLLLLWPLLLLPSAAPDPVARPGFRRLETRGPGGSPGRRPSPAAPDGAPASGTSEPGRARGAGVCKSRPLDLVFIIDSSRSVRPLEFTKVKTFVSRIIDTLDIGPADTRVAVVNYASTVKIEFQLQAYTDKQSLKQAVGRITPLSTGTMSGLAIQTAMDEAFTVEAGAREPSSNIPKVAIIVTDGRPQDQVNEVAARAQASGIELYAVGVDRADMASLKMMASEPLEEHVFYVETYGVIEKLSSRFQETFCALDPCVLGTHQCQHVCISDGEGKHHCECSQGYTLNADKKTCSALDRCALNTHGCEHICVNDRSGSYHCECYEGYTLNEDRKTCSAQDKCALGTHGCQHICVNDRTGSHHCECYEGYTLNADKKTCSVRDKCALGSHGCQHICVSDGAASYHCDCYPGYTLNEDKKTCSATEEARRLVSTEDACGCEATLAFQDKVSSYLQRLNTKLDDILEKLKINEYGQIHR

SEQ ID NO: 2891 - DNA, 1040 bp, Homo sapiens
aacacatttcatctgggcttcttaaatctaaatctttaaaatgactaagttttcttccttttctctgtttttcctaatagttggggcttatatgactcatgtgtgtttcaatatggaaattattggagggaaagaagtgtcacctcattccaggccatttatggcctccatccagtatggcggacatcacgtttgtggaggtgttctgattgatccacagtgggtgctgacagcagcccactgccaatatcggtttaccaaaggccagtctcccactgtggttttaggcgcacactctctctcaaagaatgaggcctccaaacaaacactggagatcaaaaaatttataccattctcaagagttacatcagatcctcaatcaaatgatatcatgctggttaagcttcaaacagccgcaaaactcaataaacatgtcaagatgctccacataagatccaaaacctctcttagatctggaaccaaatgcaaggttactggctggggagccaccgatccagattcattaagaccttctgacaccctgcgagaagtcactgttactgtcctaagtcgaaaactttgcaacagccaaagttactacaacggcgacccttttatcaccaaagacatggtctgtgcaggagatgccaaaggccagaaggattcctgtaagggtgactcagggggccccttgatctgtaaaggtgtcttccacgctatagtctctggaggtcatgaatgtggtgttgccacaaagcctggaatctacaccctgttaaccaagaaataccagacttggatcaaaagcaaccttgtcccgcctcatacaaattaagttacaaataattttattggatgcacttgcttcttttttcctaatatgctcgcaggttagagttgggtgtaagtaaagcagagcacatatggggtccatttttgcacttgtaagtcattttattaaggaatcaagttctttttcacttgtatcactgatgtatttctaccatgctggttttattctaaataaaatttagaagact

SEQ ID NO: 2892 - protein, 264 aa, Homo sapiens
MTKFSSFSLFFLIVGAYMTHVCFNMEIIGGKEVSPHSRPFMASIQYGGHHVCGGVLIDPQWVLTAAHCQYRFTKGQSPTVVLGAHSLSKNEASKQTLEIKKFIPFSRVTSDPQSNDIMLVKLQTAAKLNKHVKMLHIRSKTSLRSGTKCKVTGWGATDPDSLRPSDTLREVTVTVLSRKLCNSQSYYNGDPFITKDMVCAGDAKGQKDSCKGDSGGPLICKGVFHAIVSGGHECGVATKPGIYTLLTKKYQTWIKSNLVPPHTN

SEQ ID NO: 2893 - DNA, 254 bp, Homo sapiens
ttttttttttttttttttttgcttataacaaggttttaataaaataaaaagttcaagtgcttccaatcccccaacatacccctttctggtgtggaggaggggagggagctcccaccccaatagcaccaggatagcaccatgagaaagatgaggtcacacccggcctccctgagacccacggggggtggtgaggggaacatgcctccagacaccccccaaccttccccccaccgcagacagctgcagagctgaga

SEQ ID NO: 2894 - DNA, 680 bp, Homo sapiens
  misc_feature (552)..(552): n is a, c, g, or t
  misc_feature (579)..(579): n is a, c, g, or t
  misc_feature (585)..(585): n is a, c, g, or t
  misc_feature (641)..(642): n is a, c, g, or t
gcggccgccacaaagctcgggcgccgcggggctgcatgcggcgtacctggcccggcgcggcgactgctgtccgggctggcgggggccggccgcgagccccgggggccccgaggccgcagcttgcctgcgcgctctgagccttcgcaactcgcgagcaaagtttggtggaggcaacgccaagcctgagtcctttcttcctctcgttccccaaatccgagggcagcccgcgggcgtcatgcccgcgctcctccgcagcctggggtacgcgtgaagcccgggaggcttggcgccggcgaagacccaaggaccactcttctgcgtttggagttgctccccacaaccccgggctcgtcgctttctccatcccgacccacgcggggcgcggggacaacacaggtcgcggaggagcgttgccattcaagtgactgcagcagcagcggcagcgcctcggttcctgagcccaccgcaggctgaaggcattgcgcgtagtccatgcccgtagaggaagtgtgcagatgggattaacgtccacatggagatatggaagagganccgggattggtaccgtaaccatggtcnagctgnggtcgttcatctggcctgtcgggtcaccatggcaaccttgtccctggcccgccctnncttcagttagttgaggataccacattagagccagaaga

SEQ ID NO: 2895 - DNA, 350 bp, Homo sapiens
  misc_feature (126)..(126): n is a, c, g, or t
  misc_feature (134)..(134): n is a, c, g, or t
  misc_feature (139)..(139): n is a, c, g, or t
  misc_feature (219)..(219): n is a, c, g, or t
  misc_feature (285)..(285): n is a, c, g, or t
  misc_feature (292)..(292): n is a, c, g, or t
  misc_feature (299)..(299): n is a, c, g, or t
  misc_feature (307)..(307): n is a, c, g, or t
  misc_feature (321)..(321): n is a, c, g, or t
  misc_feature (345)..(345): n is a, c, g, or t
ggtgaggtcagcttcacattctcaggaactctccttctttgggccacggaattaacccgagcaggcatggaggcctctgctctcacctcatcagcagtgaccagtgtggccaaagtggtcagggtngcctctgntctgncgtagttttgcccctggccaggattgctacagttgtgattggaggagttgtggctgtgccatggtgctcagtgccatggntttcacttgcggcgggaatcgcttcgtcctccatagcagccaagatgatgtccgcggcggccattngccaatngggggtnggagtttncctcgggagccttnttgctaattttgcagtcaattggnagcaa

SEQ ID NO: 2896 - DNA, 399 bp, Homo sapiens
ttttttttttttttttttttttttttggttctgcatatgctttaattgggccatgcctttttttttcaaatatttgaaaatgaatacctatggccttttataatttttttaatacaaagtatactggaggcaaagaaaatattttttgtaaccctaagtcatagatacatatttgaacttattatttcctttaaaaaaattgactgaaggccctcaaagaatatgggggaaataccaaggaataaaagagaaagcatcacatgttcaggtaggggacatcaatttacataacacactgacctacattaaaaataatagcttaaaaaaagaatgatttttaaatcataaaactattttaatgtaattgtttcactttaatcaaggaggaaaagaatgaac

SEQ ID NO: 2897 - DNA, 2980 bp, Homo sapiens
gtccaacttggccggaagctgcggagaggctcagccaccggaagtcagtggagggttcggccggacgctctagaatcccggaggaccgggatctctgtggttggccgtgacgggcaccctctaccggggatgacacattcccagagctcctgggaccaagcaaatggcggacacaattccctgggcggaaggggacttcgggagccagtagccaagacaccatggccgagcctctgaaggaggaagacggcgaggacggctctgcggagccccccgggcccgtgaaggtcgaacccgcccacaccgctgcctctgtagcggccaagaacctggccctgcttaaagcccgctccttcgatgtgacctttgacgtgggcgacgagtacgagatcatcgagaccataggcaacggggcctatggagtggtgtcctccgcccgccgccgcctcaccggccagcaggtggccatcaagaagatccctaatgctttcgatgtggtgaccaatgccaagcggaccctcagggagctgaagatcctcaagcactttaaacacgacaacatcatcgccatcaaggacatcctgaggcccaccgtgccctatggcgaattcaaatctgtctacgtggtcctggacctgatggaaagcgacctgcaccagatcatccactcctcacagcccctcacactggaacacgtgcgctacttcctgtaccaactgctgcggggcctgaagtacatgcactcggctcaggtcatccaccgtgacctgaagccctccaacctattggtgaatgagaactgtgagctcaagattggtgactttggtatggctcgtggcctgtgcacctcgcccgctgaacatcagtacttcatgactgagtatgtggccacgcgctggtaccgtgcgcccgagctcatgctctctttgcatgagtatacacaggctattgacctctggtctgtgggctgcatctttggtgagatgctggcccggcgccagctcttcccaggcaaaaactatgtacaccagctacagctcatcatgatggtgctgggtaccccatcaccagccgtgattcaggctgtgggggctgagagggtgcgggcctatatccagagcttgccaccacgccagcctgtgccctgggagacagtgtacccaggtgccgaccgccaggccctatcactgctgggtcgcatgctgcgttttgagcccagcgctcgcatctcagcagctgctgcccttcgccaccctttcctggccaagtaccatgatcctgatgatgagcctgactgtgccccgccctttgactttgcctttgaccgcgaagccctcactcgggagcgcattaaggaggccattgtggctgaaattgaggacttccatgcaaggcgtgagggcatccgccaacagatccgcttccagccttctctacagcctgtggctagtgagcctggctgtccagatgttgaaatgcccagtccctgggctcccagtggggactgtgccatggagtctccaccaccagccccgccaccatgccccggccctgcacctgacaccattgatctgaccctgcagccacctccaccagtcagtgagcctgccccaccaaagaaagatggtgccatctcagacaatactaaggctgcccttaaagctgccctgctcaagtctttgaggagccggctcagagatggccccagcgcacccctggaggctcctgagcctcggaagccggtgacagcccaggagcgccagcgggagcgggaggagaagcggcggaggcggcaagaacgagccaaggagcgggagaaacggcggcaggagcgggagcgaaaggaacggggggctggggcctctgggggcccctccactgaccccttggctggactagtgctcagtgacaatgacagaagcctgttggaacgctggactcgaatggcccggcccgcagccccagccctcacctctgtgccggcccctgccccagcgccaacgccaaccccaaccccagtccaacctaccagtcctcctcctggccctgtagcccagcccactggcccgcaaccacaatctgcgggctctacctctggccctgtaccccagcctgcctgcccaccccctggccctgcaccccaccccactggccctcctgggcccatccctgtccccgcgccaccccagattgccacctccaccagcctcctggctgcccagtcacttgtgccaccccctgggctgcctggctccagcaccccaggagttttgccttacttcccacctggcctgccgcccccagacgccgggggagcccctcagtcttccatgtcagagtcacctgatgtcaaccttgtgacccagcagctatctaagtcacaggtggaggaccccctgccccctgtgttctcaggcacaccaaagggcagtggggctggctacggtgttggctttgacctggaggaattcttaaaccagtctttcgacatgggcgtggctgatgggccacaggatggccaggcagattcagcctctctctcagcctccctgcttgctgactggctcgaaggccatggcatgaaccctgccgatattgagtccctgcagcgtgagatccagatggactccccaatgctgctggctgacctgcctgacctccaggacccctgaggcccccagcctgtgccttgctgccacagtagacctagttccaggatccatgggagcattctcaaaggctttagccctggacccagcaggtgaggctcggcttggattattctgcaggttcatctcagacccacctttcagccttaagcagccacctgagccaccaccgagccatggcaggatcgggagaccccaactccccctgaacaatccttttcagtattatatttttattattattatgttattattacactgtctttttgccatcaaaatgaggcctgtgaaatacaaggttcccttctgca

SEQ ID NO: 2898 - protein, 816 aa, Homo sapiens
MAEPLKEEDGEDGSAEPPGPVKVEPAHTAASVAAKNLALLKARSFDVTFDVGDEYEIIETIGNGAYGVVSSARRRLTGQQVAIKKIPNAFDVVTNAKRTLRELKILKHFKHDNIIAIKDILRPTVPYGEFKSVYVVLDLMESDLHQIIHSSQPLTLEHVRYFLYQLLRGLKYMHSAQVIHRDLKPSNLLVNENCELKIGDFGMARGLCTSPAEHQYFMTEYVATRWYRAPELMLSLHEYTQAIDLWSVGCIFGEMLARRQLFPGKNYVHQLQLIMMVLGTPSPAVIQAVGAERVRAYIQSLPPRQPVPWETVYPGADRQALSLLGRMLRFEPSARISAAAALRHPFLAKYHDPDDEPDCAPPFDFAFDREALTRERIKEAIVAEIEDFHARREGIRQQIRFQPSLQPVASEPGCPDVEMPSPWAPSGDCAMESPPPAPPPCPGPAPDTIDLTLQPPPPVSEPAPPKKDGAISDNTKAALKAALLKSLRSRLRDGPSAPLEAPEPRKPVTAQERQREREEKRRRRQERAKEREKRRQERERKERGAGASGGPSTDPLAGLVLSDNDRSLLERWTRMARPAAPALTSVPAPAPAPTPTPTPVQPTSPPPGPVAQPTGPQPQSAGSTSGPVPQPACPPPGPAPHPTGPPGPIPVPAPPQIATSTSLLAAQSLVPPPGLPGSSTPGVLPYFPPGLPPPDAGGAPQSSMSESPDVNLVTQQLSKSQVEDPLPPVFSGTPKGSGAGYGVGFDLEEFLNQSFDMGVADGPQDGQADSASLSASLLADWLEGHGMNPADIESLQREIQMDSPMLLADLPDLQDP

SEQ ID NO: 2899 - DNA, 548 bp, Homo sapiens
cggcccgtgaattgaatttaggtgacactatagaagagctatgacgtcgcatgcacgcgtacgtaagcttggatcctctagagcggccgcctactactactaaattcgcggccgcgtcgacggccagggtgccggaagtgtccacaggtcttagattccctgttcagacgaaaagatttgtgcctttaatgataaaagtgatctgcatagagtcaaaaattcaagccatgggtataaaatgcaagtaaaatccctgccctcacctatcccaccctactacacagagatgtcctctcgagtttcctagactcactctggaaatttctgtatacacacagaagcttgtgcctctgctcgtgaaggcagagggagggagagctgaagggccagcaccttctcacctgtgggccccctcagtgctcggtcccagagcatgcaggactgtgcctcgtgttcagtttgctggtctgacttcatgctccttgggcaggatatgcatgtgccatgcttggagacatggtgatgtgaaacttggggacaatggcccc

SEQ ID NO: 2900 - DNA, 240 bp, Homo sapiens
tttttttttttttttttatgaaaaaattacttttttaatgtacaaaaagacttatttacaagttgagcatgtcatctcaattcatagcatgtagaaaaagctaaaaatgttttggagatataaatttggctggacgactcacctacagtatattcagggatgtcttctgtacagaatatatacaggttgggactggcaagggaaatcctatctcaggaaggcgatgaacacctcgtgccg

SEQ ID NO: 2901 - DNA, 266 bp, Homo sapiens
gcggagaggcgggaggcgctgagagtctgtgcggaggtccatgcacagactgctttgcctgttgttgctcttcggaggcggcgatccccgaagcgagctgaaatacggctgcaggctacaatttgcagccgaccattaaggaagacgacgagcggagaggtggccaccctcatggagcgctttcctcggatggctcgattcccattactacataaaccgtatcatctgagagatcacagagctgtctacgtgtatctgagaactga

SEQ ID NO: 2902 - DNA, 2206 bp, Homo sapiens
cagaagacagatgtgctgtgtgcagacgaagaagaggattgccaggctgcctccctgctgcagaaatacaccgacaacagcgagaagccatccgggaagagactgtgcaaaaccaaacacttgatccctcaggagtccaggcggggattgccactgacaggggaatactacgtggagaatgccgatggcaaggtgactgtccggagattcagaaagcggccggagcccagttcggactatgatctgtcaccagccaagcaggagccaaagcccttcgaccgcttgcagcaactgctaccagcctcccagtccacacagctgccatgctcaagttcccctcaggagaccacccagtctcgccctatgccgccggaagcacggagacttattgtcagtaagaacgctggcgagacccttctgcagcgggcagccaggcttggctatgaggaagtggtcctgtactgcttagagaacaagatttgtgatgtaaatcatcgggacaacgcaggttactgcgccctgcatgaagcttgtgctaggggctggctcaacattgtgcgacacctccttgaatatggcgctgatgtcaactgtagtgcccaggatggaaccaggcctctgcacgatgctgttgagaacgatcacttggaaattgtccgactacttctctcttatggtgctgaccccaccttggctacgtactcaggtagaaccatcatgaaaatgacccacagtgaacttatggaaaggttcttaacagattatttaaatgacctccagggtcgcaatgatgatgacgccagtggcacttgggacttctatggcagctctgtttgtgaaccagatgatgaaagtggctatgatgttttagccaaccccccaggaccagaagaccaggatgatgatgacgatgcctatagcgatgtgtttgaatttgaattttcagagacccccctcttaccgtgttataacatccaagtatctgtggctcaggggtgagcatggctgtcatgtgattgaaaactagctgagctgctcttgaggccacgaaactggctactgctttcggatgtccttaagaaattgaaaatgtcctcccgcatatttcgctgcaattttccaaacgtggaaattgtcaccattgcagaggcagaattttatcggcaggtttctgcaagtctcttgttctcttgctccaaagacctggaagccttcaaccctgaaagtaaggagctgttagatctggtggaattcacgaacgaaattcagactctgctgggctcctctgtagagtggctccaccccagtgatctggcctcagacaactactggtgagcaagctggacccaccatgtacagtgtgttatagtgttaatccttgtgcatatgtgtcataatacaactatttctgtaaagaaaggacactattacatatgaaaatatctcttctttatataagagaaattactccagtcagaaggacttagaaacatgtttttttccttttaaacttttaagtcagtttttatgaagttgttataatgtttctttacttttcaatgcacacatgctttgggatacgtttgtttttacttggaacatttgtttcttttcttttttaaggagaaaaaaaaaatgagtaaaaggagctccacactttgacttaatttcatacaaagctctgatgacaggccatgactgtagagtggtcagaactgtgtggttggtttgagggagcgaattcggggaaggcacttggtgatataactttgttttgtttacagagtacctgctcgggccaggtaaatgctattggatgtaatccagtagtgtgtaatataaattcaaaccatatccacacacaacaactaattgtatgaaacttttatatcctaatttaaaagctgtgaaattagttttcacgcatcaaaccggattgtttatatgtttaaacattttatgctcttatttaaagaagactttgagctatttttttctgtaccctgtaaaatattgaaaactaacataatatgttgaggttgcttggaaatgtacataaaactaaaattttctgaatcgtgtgtttatgtttgaaatctgtgttttaactttgtaagtaaattctctgcctttgtatttatattttacaaaattttcttaaaaggcataaaactgttgaggaaaggagaaaaaaaaaaaaaaaaaa

SEQ ID NO: 2903 - protein, 211 aa, Homo sapiens
MPPEARRLIVSKNAGETLLQRAARLGYEEVVLYCLENKICDVNHRDNAGYCALHEACARGWLNIVRHLLEYGADVNCSAQDGTRPLHDAVENDHLEIVRLLLSYGADPTLATYSGRTIMKMTHSELMERFLTDYLNDLQGRNDDDASGTWDFYGSSVCEPDDESGYDVLANPPGPEDQDDDDDAYSDVFEFEFSETPLLPCYNIQVSVAQG

SEQ ID NO: 2904 - DNA, 213 bp, Homo sapiens
  misc_feature (159)..(159): n is a, c, g, or t
  misc_feature (166)..(166): n is a, c, g, or t
  misc_feature (196)..(196): n is a, c, g, or t
  misc_feature (207)..(207): n is a, c, g, or t
tttagatatgttgtagatagtggggttcttcaaggacaaatcgtaaaggtagtgttttagacttctgcacacaaatggaaattcaggtagaatatctttctttcttttctagaaccatctatcttactcaaaaaggaaccgggtatgtccctccaagtnggggccntattgggggtttttaaaaaaaaaaaaaagncggggggtttnaattgg

SEQ ID NO: 2905 - DNA, 1173 bp, Homo sapiens
caaatgggaaaaaaaaaaaaaaagggaagtagcaggtggagataatttaaatagcacagggacccctgcttaccaatccctccacagagttttgccctggagtaagcatgacatcagggtgcttgctgcttcctccagtggcccgagctctgtgtgcctttgttgaacaaggttttcgtggagctgaggtgactctcatgaacagagaatacctgtccttcatacagagaagcacccaaatgcaaacatctactttttctggtgttcaaccaggtaaacctctgtttagcaagaaacatcatccccagagtggggactgtcttgtcctttcagaagctagtaccctaagcaagactcataaggaaggtcgggcctccataggtctctgtttcttctgaacagtgatgagctaggtgcagagagagttaaaggtcctatgcagcttgacaagtgtgacccagttcccagtaaattccacttggctggggtttcagaggtgagcaagcaggctttttactcattacacaagaatctagacatccctttaattgggtggcattctgggtgctaaaaggaaggggctttgagaggcaaagatgatgggatatcataaatttttttgttccttttaatgtagcgcagctcctatacttcagatttaactttgaaatgtagcatagctaagatctggtccaaaaagatttctgatatctccatgaatcctagttagggattgataggaaaaaaaaatcttgtgccacagcttcatgctatttttaggaacctttctgaaaccagtggcagcccaagttagagcccagcattaagtccgcctctgcacatctacagttgccagcttatggtaaaagctttctgcaaagcttttctgctcctgggttaaggccttccagcatcagtcacatgtaattaacagctacattgtgtgcttactttttgctagatgtttcataaacattatctcatataaacctcacaataactaggtattattatcccgtatccctgttttacagctgtggaaagtgaagtgaaggatttttgtcatacagccagtaagtgccagaactgacttgaacctagctctctgtcttgattcaggaactactgctctttccattggtggctcctggctaatcaatgtgatagtctttg

SEQ ID NO: 2906 - protein, 96 aa, Homo sapiens
MTSGCLLLPPVARALCAFVEQGFRGAEVTLMNREYLSFIQRSTQMQTSTFSGVQPGKPLFSKKHHPQSGDCLVLSEASTLSKTHKEGRASIGLCFF

SEQ ID NO: 2907 - DNA, 1932 bp, Homo sapiens
atggatgatattgctgataggatgaggatggatgctggagaagtgactttagtgaaccacaactccgtattcaaaacccacctcctgccacaaacaggttttccagaggaccagctttcgctttctgaccagcagattttatcttccaggcaaggacatttggaccgatcttttacatgttccacaagaagtgcagcttataatccaagctattactcagataatccttcctcagacagttttcttggctcaggcgatttaagaacctttggccagagtgcaaatggccaatggagaaattctaccccatcgtcaagctcatctttacaaaaatcaagaaacagccgaagtctttacctcgaaacccgaaagacctcaagtggattatcaaacagttttgcgggaaagtcaaaccatcactgccatgtatctgcatatgaaaaatcttttcctattaaacctgttccaagtccatcttggagtggttcatgtcgtcgaagtcttttgagccccaagaaaactcagaggcgacatgttagtacagcagaagagacagttcaagaagaagaaagagagatttacagacagctgctacagatggtcacagggaaacagtttactatagccaaacccaccacacattttcctttacacctgtctcgatgtcttagttccagtaaaaatactttgaaagactcactgtttaaaaatggaaactcttgtgcatctcagatcattggctctgatacttcatcatctggatctgccagcattttaactaaccaggaacagctgtcccacagtgtatattccctatcttcttataccccagatgttgcatttggatccaaagattctggtactcttcatcatccccatcatcaccactctgttccacatcagccagataacttagcagcttcaaatacacaatctgaaggatcagactctgtgattttactgaaagtgaaagattcccagactccaactcccagttctactttcttccaggcagagctgtggatcaaagaattaactagtgtttatgattctcgagcacgagaaagattgcgccagattgaagaacagaaggcattggccttacagcttcaaaaccagagattgcaggagcgggaacattcagtacatgattcagtagaactacatcttcgtgtacctcttgaaaaggagattcctgttactgttgtccaagaaacacaaaaaaaaggtcataaattaactgatagtgaagatgaatttcctgaaattacagaggaaatggagaaagaaataaagaatgtatttcgtaatgggaatcaggatgaagttctcagtgaagcatttcgcctgaccattacacgcaaagatattcaaactctaaaccatctgaattggctcaatgatgagatcatcaatttctacatgaatatgctgatggagcgaagtaaagagaagggcttgccaagtgtgcatgcatttaatacctttttcttcactaaattaaaaacggctggttatcaggcagtgaaacgttggacaaagaaagtagatgtattttctgttgacattcttttggtgcccattcacctgggagtacactggtgtctagctgttgtggactttagaaagaagaatattacctattacgactccatgggtgggataaacaatgaagcctgcagaatactcttgcaatacctaaagcaagaaagcattgacaagaaaaggaaagagtttgacaccaatggctggcagcttttcagcaagaaaagccagattcctcagcagatgaatggaagtgactgtgggatgtttgcctgcaaatatgctgactgtattaccaaagacagaccaatcaacttcacacagcaacacatgccatacttccggaagcggatggtctgggagatcctccaccgaaaactcttgtga

SEQ ID NO: 2908 - protein, 643 aa, Homo sapiens
MDDIADRMRMDAGEVTLVNHNSVFKTHLLPQTGFPEDQLSLSDQQILSSRQGHLDRSFTCSTRSAAYNPSYYSDNPSSDSFLGSGDLRTFGQSANGQWRNSTPSSSSSLQKSRNSRSLYLETRKTSSGLSNSFAGKSNHHCHVSAYEKSFPIKPVPSPSWSGSCRRSLLSPKKTQRRHVSTAEETVQEEEREIYRQLLQMVTGKQFTIAKPTTHFPLHLSRCLSSSKNTLKDSLFKNGNSCASQIIGSDTSSSGSASILTNQEQLSHSVYSLSSYTPDVAFGSKDSGTLHHPHHHHSVPHQPDNLAASNTQSEGSDSVILLKVKDSQTPTPSSTFFQAELWIKELTSVYDSRARERLRQIEEQKALALQLQNQRLQEREHSVHDSVELHLRVPLEKEIPVTVVQETQKKGHKLTDSEDEFPEITEEMEKEIKNVFRNGNQDEVLSEAFRLTITRKDIQTLNHLNWLNDEIINFYMNMLMERSKEKGLPSVHAFNTFFFTKLKTAGYQAVKRWTKKVDVFSVDILLVPIHLGVHWCLAVVDFRKKNITYYDSMGGINNEACRILLQYLKQESIDKKRKEFDTNGWQLFSKKSQIPQQMNGSDCGMFACKYADCITKDRPINFTQQHMPYFRKRMVWEILHRKLL

SEQ ID NO: 2909 - DNA, 574 bp, Homo sapiens
aggaggtggtgggctcgcaggaaggttcctctcccagtggccatgggtagcaacagtgggcaggctggccgccacatctataaatccctagctgatgatggcccctttgactctgtggagccgcctaaaagacccaccagcagactcatcatgcacagcatggccatgttcggaagagagttctgctacgcggtggaggcagcgtatgtgaccccagtcctgctcagcgtaggtctgcccagcagcctgtacagcattgtgtggttcctcagccccatcctgggattcctgctgcagcccgtggtcggatcggccagcgaccactgccggtccaggtggggccgccggagaccctacatcctcaccctgggagtcatgatgctcgtgggcatggctctgtacctcaatggggctactgttgtagcagctttgattgctaacccaaggaggaagctggtttgggccataagtgtcaccatgataggtgtcgttctctttgattttgctgccgacttcattgatgggcccatcaaagcctacttatttgatgtctgctcccatcaggaccaggaga

SEQ ID NO: 2910 - DNA, 520 bp, Homo sapiens
  misc_feature (365)..(365): n is a, c, g, or t
tataattcatgacaggtttaatcaggtaattccaggaggggaaaaaaccattaaaacaaattcttatgataatcatctgctatgtccaattacacgggtatgaagtaacagaaatggttacaaacttattatgtattatttacattatatactcaaaactatcaagctagttaactatatctgaggagacacattatgacatgagttaaacagtttttcattgttcattagaaagaatgcagtcaagcttttaatgggaaataatatacaagtgaggcacttttgaggtcagaaatagaaagcaaacgacactacacactggaaatgttcacaaaaatctatgtgtatttttaatacaaagactnttcaactagtttattcttgaaaaaatttcaaaacaactgatgcaatttaagaagctttcaggaataatggctaacatttatcagtgtaccaaagcatatgaatcttttataaccacctggctgctaggcaaacagtacctaataccttaaagcct

SEQ ID NO: 2911 - DNA, 320 bp, Homo sapiens
  misc_feature (300)..(300): n is a, c, g, or t
ggttggacgaggggagctggtgggcagggtttgatcccagggcctgggcaacggaggtgtagctggcagcagcgggcaggtgaggaccccatctgccgggcaggtgagtcccttccctccccaggcctcgcttccccagccttctgaaagaaggaggtttaggggatcgagggctggcggggagaagcagacaccctcccagcagaggggcaggatgggggcaggagagttagcaaaggtgacatcttctcggggggagccgagactgcgcaaggctggggggctatgggcccgttccangcagaaagagcaagagggca

SEQ ID NO: 2912 - DNA, 541 bp, Homo sapiens
ttgaatttaggtgacactatagaagagctatgacgtcgcatgcacgcgtacgtaagcttggatcctctagagcggccgcctactactactactaaattcgcggccgcgtcgactttttttttttttttgctaccatctaaaaatataaaaatcattcttagctccaagatggatttggcccataggttgtgcggtctgccacctcctagcttaaaacaacatcctaatcccaatagtccgtctaacctaccttttgtttattttgttgggaaagggggctctgtgaattatcacctatttaattcatgttaaaaaccactatgcaactatttccaatttccaaaagaagaatcccactcaggcataggaacaccccaaaaactaaacaaaactgacaaaaaaattgaacactgcctagagcaaaagtgccaaataggttttaccttcggagtcaattccaatcagcgttagtaatggctgcctagggcactataccaagaaagattttgaggatatttttagagaggatttcatagtattg

SEQ ID NO: 2913 - DNA, 450 bp, Homo sapiens
  misc_feature (102)..(102): n is a, c, g, or t
  misc_feature (108)..(108): n is a, c, g, or t
  misc_feature (110)..(110): n is a, c, g, or t
  misc_feature (112)..(112): n is a, c, g, or t
  misc_feature (114)..(114): n is a, c, g, or t
  misc_feature (120)..(120): n is a, c, g, or t
  misc_feature (124)..(124): n is a, c, g, or t
  misc_feature (238)..(238): n is a, c, g, or t
  misc_feature (241)..(243): n is a, c, g, or t
  misc_feature (284)..(284): n is a, c, g, or t
  misc_feature (430)..(430): n is a, c, g, or t
gcgttctggtttcatagcaacttctaggtggtgtgggcgaagtttgggactggtttagggcggggacaagaccaagaacacaagtttccttgtactacgggntactangnangngagganattngagaccccagcacccccttgctcactctcttgctcacagtccacgatggcccggtccctggtgtgccttggtgtcatcatcttgctgtctgccttctccggacctggtgtcagnggnnngtcctatgcccaagctggctgaccggaagctgtgtgcggancaggacgtgcaagccaccctatctccaatggctgtggcccttcaggactacatggcccccgactgccgattcctggaccattcaccggggccaagtggtgtatgtcttctccaagctgaagggccgtgggcggctcttctggggangcagcgttcagggagattac

SEQ ID NO: 2914 - DNA, 678 bp, Homo sapiens
ctcagtgctcagccgggagcagtcggaaggggttggagcgagggtccggagaagcattggcagacccgagttaaaaaatctggatccgtttttactgtttgatgaatttaaaggaggtagaccaggaggatttcctgatcatccacatcgaggttttgaaacagtatcctacctcctggaagggggcagcatggcccatgaagacttctgtggacacactggtaaaatgaacccaggagatttgcagtggatgactgcgggccggggcattctgcacgctgagatgccttgctcagaggagccagcccatggcctacaactgtgggttaatttgaggagctcagagaagatggtggagcctcagtaccaggaactgaaaagtgaagaaatccctaaacccagtaaggatggtgtgacagttgctgtcatttctggagaagccctgggaataaagtccaaggtttacactcgcacaccaaccttatatttggacttcaaattggacccaggagccaaacattcccaacctatccctaaagggtggacaagcttcatttacacgatatctggagatgtgtatattgggcccgatgatgcacaacaaaaaaatagaacctcatcacacagcagtgcttggagaaggtgacagtgtccaggtgcagaccacgatccaagaga

SEQ ID NO: 2915 - DNA, 2504 bp, Homo sapiens
cgcaagcttcgcctcttgggttcatgccattctcctgcctcagcctcccgggtagctgggactacaggcgcctgccaccagcctggctaatttttttgtatttttagtagagacggggtttcaccgtgttgaccaggatggtctccatctccagacctcgtgatccgcccgcctcggactcccaaagtgctgggattacaggcatgagccaccgcgcccggtggcttgcatgttttcttaaaaagctacagaaatttccaaatatcttctttcagataatagttggtggagtggcaagtacatcacaagatatgcatacttatgctgcctgcacatttttggctgcaagtatgaaagaagggaagcaaggaattcagagaaatcaagagtctgttcagcttggagcgattgaggcctgtgtgatgtggctactagaaaatgaattcatccagagtacagaagccagtgatggaacagaaggtaagtgtgacttctcagttgcaatttactcactttttcttctttagtgagggtgtatgactgctcagtgaatggaaattgtcttttcatgtagtataaaaggaatttgattttttgagcagtgtatcaactcatttttagtaaatcagtattgtatttagcaacttcagaccattatgatagagcctgctcatacattttcatgctctggataaggtactatttgtaaaatttatcagccgggagggttagcatggaaaacagaaagatagtattttgttttattttattttgaatgtttgttcctctgtttcctcaccctaaccctaaaccaggaaaggtgtatcatccaacacatcttggttcggccactctttcttcttcactttctccagctgatactttagatatttttgctgacctgcaaagagcaatgaagggctttgttttagagaatgatcttcatattctctatctggtaagttctgttttaacaattatgtttgtgaaaatagggagaaaaaaatagatatataatcctgaacatcaaagataccctaacagaacatctcgtctgttttccatgcctaggttagtactggtgggaatagagaagaggtaagaagataattgttttaaagtaataatctaaatgttctagttacctttaaatttattttctccaacctcctttcaaaaaagatttgagttgttttataaaaaatatatatttttacaacgtataaaagaacagcaaagaaaaatgggatatcagaaaattaaagatcggatcatgatgtaaaactcaagcaaaggtcagtacacaaacatgcgtgccattaagtcatgtccaatgctgttgtcaactttgattctgggttttctagcaactaaaagaaagaggaaagcttgattagtgttaatattcataagataaaaaacaaaacaagtttaggaaaaacattgcatttccctgcctaagagaaatttagtcctaaaaggatactttggaacttaacattgtttgataaaaatctctataataaatgcaataaggaattttaaaagtttgtttatattagacaatgctctgtgaatattattttgtataacaaagatattaataagaattggatagtgtttaaggtcatgttctctggcaagaacctgatcagaaataattaattttgtcagttaagagcagatgcatgcattttgataagcaagtgataaggggaggtgagtaaaattgaaattctcattagaatgaagggggcttatcaggaaatgtgtttcaataaaaatcgctatgtagtgagcagaggggaaatgtctagacagtaccaattttcttttattacaaactcgcataatacatgggtgataataggctcaaaggtctgtgcccaagaatgtggctgggaggaatctcaaagcaggtttcaccggtcatctatcatggccttaaaaataagtcatttattatacagtggctaagattgtgggctctaggatcagactgccttagttcaacttttggcctcatcacttagtaatcatataaccttgggtaagtatttaacctctcttacgattccatttcctcatttgtaaaatggagataataatacccacctcagggctgatagtctttgatgaatgtttggtatctgaataaatgtttaataacatctattatttctagtaaattctcccataaacattatgtaagtcatttgccaaattacctaactactcctactcctgttccctctctaaaacgtgaagactgttggcagtgttagtatgctgaatgcttgtggttagtggtcttgtatacttctctcaccattcgagttgtatgcccttcaagagttagttgtgttcccaaacttgttcatgtcagtttgcttctgagaaaattaggctgaggcagaaggatcacctgagtccaggaatttgagaccagcatgggaaacagagcaagaatctgtcgctaccaaacaaaaaaaaaaaaaaaaaaa

SEQ ID NO: 2916 - protein, 129 aa, Homo sapiens
MVSISRPRDPPASDSQSAGITGMSHRARWLACFLKKLQKFPNIFFQIIVGGVASTSQDMHTYAACTFLAASMKEGKQGIQRNQESVQLGAIEACVMWLLENEFIQSTEASDGTEGKCDFSVAIYSLFLL

SEQ ID NO: 2917 - DNA, 523 bp, Homo sapiens
tttttttttttttttttgagacggagtctcgctgtgttgccaggctggagtgcagtggtgtgatctctgctcactgcaacctccgcctgccagtttcaagtgattctctgcctcagccttctgagtagctgggactacaggtgcacgccaccacgcccagctaactttttgtattttagtagagacagggtttcgccatgtcggccagggtggtcttgatctcctgacctcatgatccacccgcctcagcctcccaaagtgctgggattacaggtatgagccactgcaccgggcctgttctatttttctagttaagggaactgaagctcagagaggtgtcaccagcaggtgttcattcccatgccagccttgccccccggcttttcccaggcaggctcctgcgtgcccactggctccagcctggtcctctgtctcttggctgcttcactcctgctctttgtcccgactctggccctgcttacaggggccactacctgctggtgcctccataacaagcgtctgg

SEQ ID NO: 2918 - DNA, 237 bp, Homo sapiens
ttttttttttcctaaaaaaggcttatatttacttgatttgaattttgctagcatgctttttcttctgaattcaagtgactagaactgaaattattccacctggggagaagagacagctgaaaccaatttagtattggttttcaaatacatgaagggtactcagagagaggatgattgccaaagaaaatggtctttgaaccatagaaagaatctgagcttgctctaaagttaaatttc

SEQ ID NO: 2919 - DNA, 521 bp, Homo sapiens
tttctcttttttttgaacaactttattgagatataattcacatagcatacaattcactcatttaaaatgtacaattaaatggttttcagtatatgcagagttttaaatacaaccatcagcacaatcaattttggaacatttcatcaacccagaatgaaacctgtacccattagctaacctactttatgtccttagatttagctattctgtacatttcatgtaagtggaatcgtgaaatgtatggtctttgtgtctggcttctttcacttagcataatgtctttaacgcacatccacattatagcacatgtccatacttcattccttctcacagctgaacaagattcccttctgtggatatatcacattttgtttatccattcatcagtagatggtgtgtttaattttataagtgaagaaactaaggtaaataagtgcctgggttgggaccattcaaagccaggtcccctggctcccaatccagggctcactccattaaatctactaggtcccataatttta

SEQ ID NO: 2920 - DNA, 207 bp, Homo sapiens
cggtagacatatgcattcgggaaattgaagcaagaggattaaaatcggaaggcctttacagagtctctgggttcactgaacacattgaagatgtcaaaatggcatttgacagagatggtgaaaaggccgatatatctgccaatgtctatccagacataaacatcatcactggagcccttaaactgtatttcagagacttacccatcc

SEQ ID NO: 2921 - DNA, 347 bp, Homo sapiens
  misc_feature (28)..(28): n is a, c, g, or t
  misc_feature (85)..(85): n is a, c, g, or t
  misc_feature (112)..(112): n is a, c, g, or t
  misc_feature (234)..(234): n is a, c, g, or t
  misc_feature (280)..(280): n is a, c, g, or t
  misc_feature (289)..(289): n is a, c, g, or t
  misc_feature (300)..(300): n is a, c, g, or t
  misc_feature (310)..(310): n is a, c, g, or t
  misc_feature (326)..(326): n is a, c, g, or t
ttttttttttcaaggggaagatgaccgnctttttattaaaggttaacaccaacggaaagaattgagaaggaatacacaaaaggangggggagggacacaaagtcaccacttnaggaggtggaagggcggcacatcagtaaaagaacctcaggacagccacatgctccatgccctggttgggggaagagggagagaaaagcgccattgatagcttggagctcgtagaagggtctnaagcccctgaacctaacaccagagccacaagccctgcccctgaggnttcacacantactacacaantagacacacntaacacacacaagacnttttgaaggcaacacccgaga

SEQ ID NO: 2922 - DNA, 436 bp, Homo sapiens
tgaatatgttaatttttattcattgctaggtgaatgtaaagcaaagttttatttgcatttttaccaaatctggagacattccagatggtctgacttaaaacgttgccatggaatagaaatgatgtttagtctggtgattggcagtagcaccgcaaagagataagcaggtatccttcccagcagttgtggatattgattggctaagaagctgctttgcacatggcaagtctacatagtgtgcttcagggtgaacagcagcagggagttataaatgcagagatggataattattttcttgagccatgatgggttggttcactagttcataagtttgaataatcaatgtttgatactccacactctgatggctgaagagtcaaaatttgaattttccaatttatcattaaggagaaatgtcaggagaaagtcaagtggt

SEQ ID NO: 2923 - DNA, 703 bp, Homo sapiens
agtggcgccagggatttgaaccgcgctgacgaagtttggtgatccatcttccgagtatcgccgggatttcgaatcgcgatgatcatcccctctctagaggagctggactccctcaagtacagtgacctgcagaacttagccaagagtctgggtctccgggccaacctgagggcaaccaagttgttaaaagccttgaaaggctacattaaacatgaggcaagaaaaggaaatgagaatcaggatgaaagtcaaacttctgcatcctcttgtgatgagactgagatacagatcagcaaccaggaagaagctgagagacagccacttggccatgtcaccaaaacaaggagaaggtgcaagactgtccgtgtggaccctgactcacagcagaatcattcagagataaaaataagtaatcccactgaattccagaatcatgaaaagcaggaaagccaggatctcagagctactgcaaaagttccttctccaccagacgagcaccaagaagctgagaatgctgtttcctcaggtaacagagattcaaaggtaccttcagaaggaaagaaatctctctacacagatgagtcatccaaacctgggaaaaaataaaagaactgcaatcactactccaaactttaagaagcttcatgaagctcattttaaggaaatggagtccattgatcaatatattgaggagaaaaaaaaa

SEQ ID NO: 2924 - protein, 175 aa, Homo sapiens [sequence omitted]

SEQ ID NO: 2925 - DNA, 618 bp, Homo sapiens
gccgggtgaccacgggcccggcccgcagaaaggaggcggcgcggccggcagggatcaggactggagggggcggagcctccctcgcggccgggcccggagtgggaggggcctccgggaccaggcctctagtgcgcactctcggaagcgcagccgaacccgccctccgaatccagagaggcgctgctgacaccgccgccacaccgccgccacaccgccgctgcctcagtcatgccgaagcacgagttctctgtggacatgacctgtggaggctgtgctgaagctgtctctcgggtcctcaataagcttggaggagttaagtatgacattgacctgcccaacaagaaggtctgcattgaatctgagcacagcatggacactctgcttgcaaccctgaagaaaacaggaaagactgtttcctaccttgggcttgagtagcaggggcctggtccccacagcccacaggatggacccaagggggcaggatgctgatcctcccgctggcttccagacagacctgggacttggcagtcatgccgggtgatggtgttcctgcggagaccctcagttgtcctattccttcctagcttccctgcaataaaatcaagctgcttttgttgg

SEQ ID NO: 2926 - protein, 68 aa, Homo sapiens
MPKHEFSVDMTCGGCAEAVSRVLNKLGGVKYDIDLPNKKVCIESEHSMDTLLATLKKTGKTVSYLGLE

SEQ ID NO: 2927 - DNA, 521 bp, Homo sapiens
tcttgagggttttccatgttgcgtcatcatcaacattttgggggttgtgttggatgggatgatctgttgcagagggagaggcagggaaccctgctccttcgggccccaggttgatcctgtgactgaggctccccctcatgtagcctccccaggcccagggccctgaggcctgctagaatcactgccgctgtgctttcgtggaaatgacagttccttgttttttttgtttctgtttttgttttacattagtcattggaccacagccattcaggaactaccccctgccccacaaagaaatgaacagttgtagggagacccagcagcacctttcctccacacaccttcattttgatgttcgggtttttgtgttaagttaatctgtacattctgtttgccattgttacttgtactatacatctgtatatagtgtacggcaaaagagtattaatccactatctctagtgcttgactttaaatcagtacagtacctgtacctgcacggtcacccgctccgtgtgtcg

SEQ ID NO: 2928 - DNA, 448 bp, Homo sapiens
  misc_feature (437)..(437): n is a, c, g, or t
gcggccgcggcgagcctttgaggggaacgacttgtcggagccctaaccaggggtgtctctgagcctggtgggatccccggagcgtcacatcactttccgatcacttcaaagtggttaaaaactaatatttatatgacagaagaaaaagatgtcattccgtaaagtaaacatcatcatcttggtcctggctgttgctctcttcttactggttttgcaccataacttcctcagcttgagcagtttgttaaggaatgaggttacagattcaggaattgtagggcctcaacctatagactttgtcccaaatgctctccgacatgcagtagatgggagacaagaggagattcctgtggtcatcgctgcatctgaagacaggcttgggggggccattgcagctataaacagcattcagcacaacactcgctccaatgtgattntctacattgtt

SEQ ID NO: 2929 - DNA, 394 bp, Homo sapiens
tttttttttttttttttcagtgactgataaatctttaatataaaaattgtacaagaattttgatacaaattacaagaggtatttggacaaaatatgaataaaattccatttacatccccaaacccttatgcattttatgcaaaagacatactgtaggcagttatagtacagaaaatacaaccaaagtaacagcaaattaaaaaatttaattaccttagcctaccaataaaaacaaaaagcaaaacagaacaaaacaaaaataaaacccttgttcaaggtacatacagtatttaggaagctaccaacgtcacaatgattagatcagggtgatgcacactgtcccatcccttggtgcagttaccttttgaagtacagactttgattctgcggcagg

SEQ ID NO: 2930 - DNA, 600 bp, Homo sapiens
  misc_feature (18)..(18): n is a, c, g, or t
  misc_feature (46)..(46): n is a, c, g, or t
  misc_feature (63)..(63): n is a, c, g, or t
  misc_feature (462)..(462): n is a, c, g, or t
  misc_feature (539)..(539): n is a, c, g, or t
  misc_feature (560)..(560): n is a, c, g, or t
  misc_feature (575)..(575): n is a, c, g, or t
  misc_feature (592)..(592): n is a, c, g, or t
  misc_feature (598)..(598): n is a, c, g, or t
agagatgggggtctcacnatgttgcccaggctggtctcaaactccngggctcaagcgatcctntggcctcggctcccaaagtgcatgagccaccatgcctggcctgtttagttttgtttcaagttgaaatacctttcttgtgttttctaattagaaaagtaatatctactcattgtaaaaactcaaacagtgcagaaatgtagaaagtagaaagtgtaagtccctggttgtcccttctgcctgagacaaccactgctcacagtttgatgtatatccttccagagactctcaaatttaagcaaataatttttattaccatgtctttttatttgaagaccgtacatttgcctccaaagttcaacacaagttcaactggaccatatccttccatgacctgaatagatgctatcctttatcacgatgttcaattggcctttgaaagagagtagtccaggtatattnctgatcaaaatttggcatttttgatgatactactctacacagatcagactcatgtgcagaatcgtgcctggagaganaggtttggttaagacggaganttctggaaacattcnaattgcaaatgggaaantggaancc

SEQ ID NO: 2931 - DNA, 353 bp, Homo sapiens
  misc_feature (152)..(152): n is a, c, g, or t
  misc_feature (160)..(160): n is a, c, g, or t
  misc_feature (189)..(189): n is a, c, g, or t
  misc_feature (248)..(248): n is a, c, g, or t
  misc_feature (253)..(253): n is a, c, g, or t
  misc_feature (269)..(269): n is a, c, g, or t
  misc_feature (303)..(303): n is a, c, g, or t
  misc_feature (307)..(307): n is a, c, g, or t
  misc_feature (310)..(310): n is a, c, g, or t
ccaccccagcctccttggagctatccctttctatccccctccatccagcccctggccaccaccattatatctattctggaattcccacaggaaaagcaggcactttataaatcagcgagggattcacggcgaaatgagactgttcgtgagtnatggcgtnccgggttgcttgccggtgctggccgccgncgggagagcccggggcagagcagaggtgctcatcagcactgtaggcccggaagattgtntggtnccgttcctgacccggnctaaggtccctgtcttgcagctggatagcggcanctanctnttctccactagtgcaatctgccgatattttttttttgttatct

SEQ ID NO: 2932 - DNA, 533 bp, Homo sapiens
  misc_feature (418)..(418): n is a, c, g, or t
  misc_feature (444)..(444): n is a, c, g, or t
  misc_feature (449)..(449): n is a, c, g, or t
  misc_feature (458)..(458): n is a, c, g, or t
  misc_feature (489)..(489): n is a, c, g, or t
  misc_feature (504)..(504): n is a, c, g, or t
  misc_feature (510)..(510): n is a, c, g, or t
aggtctccagaaacacttaattgataatgagtcaaaaggcattactcttggcatgtgaatattggatgtgactcaagggtgagtcaaatgcctgtggagcctggattcatgttcttttccccgtttgtcagtaatcctttctaatgttccagttccatgatgtgattttagtggaattaaacttgaaccacttagttatgatgttgttactgtgttgggaacgcagcagccaccagaccaccaagagcaactgtaggttgggcttggtggtgctggtttagtgttgtggctgatgaggtgtaacccagggaaatttttatttttgcttttaaaaaaacaactcatctgtggtcatcttgtaagtgaagtattgggactataaagggactcttggagcccgaaaaacatttttgtgganttagcccgaggctaacaggaataaanttgtncccctgttncagatagtttagggcatatctggagttggtngagggaatgtgatcngttccnaggccccatgtgctaggcaggtt

SEQ ID NO: 2933 - DNA, 340 bp, Homo sapiens
  misc_feature (49)..(49): n is a, c, g, or t
  misc_feature (56)..(56): n is a, c, g, or t
  misc_feature (58)..(58): n is a, c, g, or t
  misc_feature (95)..(95): n is a, c, g, or t
  misc_feature (97)..(97): n is a, c, g, or t
  misc_feature (99)..(99): n is a, c, g, or t
  misc_feature (104)..(104): n is a, c, g, or t
  misc_feature (222)..(222): n is a, c, g, or t
  misc_feature (225)..(225): n is a, c, g, or t
  misc_feature (307)..(307): n is a, c, g, or t
  misc_feature (323)..(323): n is a, c, g, or t
attcggcactaggccgagcgagaaagcggaagatggcggcggcggcggnaacggangngaagagcggcggctgcgagggcggccattggcgcggnangngcctncggacacttgcgggtcgttagggcgcgacgctgggaggcatgtcggagcacgtggagcccgcagctccggggcccggccaaacggcggcggcggcggcccggcccccgcgcgcgcctncgnacccccaatctcaaccccaaccccctcatcaacgtgcgcgaccggctcttccacgcgctgttcttcaagatggctgttcacntatttcgcggctcttnccgcccgcctttccgcc

SEQ ID NO: 2934 - DNA, 1908 bp, Homo sapiens
gggacgtcagcggacggggcgctcgcgggccggggctgtatggggctcccgcgcgggtcgttcttctgggtgctgctcctgctcacggctgcctgctcggggctcctctttgccctgtacttctcggcggtgcagcggtacccggggccagcggccggagccagggacaccacatcatttgaagcattctttcaatccaaggcatcgaattcttggacaggaaagggccaggcctgccgacacctgcttcacctggccattcagcggcacccccacttccgtggcctgttcaatctctccattccagtgctgctgtggggggacctcttcaccccagcgctctgggaccgcctgagccaacacaaagccccgtatggctggcgggggctctctcaccaagtcatcgcctccaccctgagccttctgaacggctcagagagtgccaagctgtttgccccgcccagggacacccctccaaagtgtatccggtgtgccgtggtgggcaacggaggcattctgaatgggtcccgccagggtcccaacatcgatgcccatgactatgtattcagactcaatggagctgtgatcaaaggcttcgagcgcgatgtgggcaccaagacttccttctatggtttcactgtgaacacgatgaagaactccctcgtctcctactggaatctgggcttcacctccgtgccacaaggacaggacctgcagtatatcttcatcccctcagacatccgcgactatgtgatgctgagatcggccattctgggcgtgcctgtccctgagggcctagataaaggggacaggccgcacgcctattttggaccagaagcctctgccagtaaattcaagctgctacatccggacttcatcagctacctgacagaaaggttcttgaaatcaaagttgattaacacacattttggagacctatatatgcctagtaccggggctctcatgctgctgacagctttgcatacctgtgaccaggtcagtgcctatggattcatcacaagcaactactggaaattttccgaccactatttcgaacgaaaaatgaagccattgatattttatgcaaaccacgatctgtccctggaagctgccctgtggagggacctgcacaaggccggcatccttcagctgtaccagcgctgaccccaatgcactgagcgctttgcttcttcaagagttgcggccctgatcctctcaagtggccaaaagcttttttaacttttcaatcttcaccttcccttgccaacagagggcactggggtgaattcaagattttcatcgaggtctgttcaatataggacaccccagcttgtccttggctcatccaagaactcttctgtatctaaaacaatacatctcaatcttggccaagggaaaatggactgctttgctggattggcactgagcaactttaggaaatgtcggtggagtgttcagcaagatcagacagcagtccaggtcaaaggcaaacacacacgctccagcccaaatcctcctggtggcacatcctaccccagatgctaaagtgattcaaggactccaggacacctcttaagagcctttctaagaacatgataggcttacttctgctccataataaagtgggagaaaaaagccagaatataacttaagactagataactgcgtacatgatggaccattttttttttttttggctgggtagagaaatcatataaaacgcaggctgtttagcatggagatgactctcagaacactgggagggtctggcacttgatgggggttagttgcttggcagcctgcctgccactgagggaagtcccattagagatgtatcaccaccttgtcaccaacaggatgatgtcaccaacaggatgatgtcaccaggtaataaaccttcatcctcac

SEQ ID NO: 2935 - protein, 374 aa, Homo sapiens
MGLPRGSFFWVLLLLTAACSGLLFALYFSAVQRYPGPAAGARDTTSFEAFFQSKASNSWTGKGQACRHLLHLAIQRHPHFRGLFNLSIPVLLWGDLFTPALWDRLSQHKAPYGWRGLSHQVIASTLSLLNGSESAKLFAPPRDTPPKCIRCAVVGNGGILNGSRQGPNIDAHDYVFRLNGAVIKGFERDVGTKTSFYGFTVNTMKNSLVSYWNLGFTSVPQGQDLQYIFIPSDIRDYVMLRSAILGVPVPEGLDKGDRPHAYFGPEASASKFKLLHPDFISYLTERFLKSKLINTHFGDLYMPSTGALMLLTALHTCDQVSAYGFITSNYWKFSDHYFERKMKPLIFYANHDLSLEAALWRDLHKAGILQLYQR

SEQ ID NO: 2936 - DNA, 2798 bp, Homo sapiens
aggcgggggtgggcgggcgcgccgggcggcaggtgtcggcgtcggcggcattcggcggcgatggagcggccctggggagctgcggacggcctctcgcgctggccccatggcctcggcctcctcctcctcctgcagctgctgccgccgtcgaccctcagccaggaccggctggacgcgccgccgccgcccgctgcgccgctgccgcgctggtctggccccatcggggtgagctgggggctgcgggcggccgcagccgggggcgcgtttccccgcggcggccgttggcgtcgcagcgcgccgggcgaggacgaggagtgcggccgggtccgggacttcgtcgccaagctggccaacaacacgcaccagcatgtgtttgatgatctcagaggctcagtatccttgtcctgggttggagatagcactggggtcattctagtcttgactaccttccatgtaccactggtaattatgacttttggacagtccaagctatatcgaagtgaggattatgggaagaactttaaggatattacagatctcatcaataacacctttattcggactgaatttggcatggctattggtcctgagaactctggaaaggtggtgttaacagcagaggtgtctggaggaagtcgtggaggaagaatcttcagatcatcagattttgcgaagaattttgtgcaaacagatctcccttttcatcctctcactcagatgatgtatagccctcagaattctgattatcttttagctctcagcactgaaaatggcctgtgggtgtccaagaattttgggggaaaatgggaagaaatccacaaagcagtatgtttggccaaatggggatcagacaacaccatcttctttacaacctatgcaaatggctcctgcaaagctgaccttggggctctggaattatggagaacttcagacttgggaaaaagcttcaaaactattggtgtgaaaatctactcatttggtcttgggggacgtttcctttttgcctctgtgatggctgataaggataccacaagaaggatccacgtttcaacagatcaaggggacacatggagcatggcccagctcccctccgtgggacaggaacagttctattctattctggcagcaaatgatgacatggtattcatgcatgtagatgaacctggagacactgggtttggcacaatctttacctcagatgatcgaggcattgtctattccaagtctttggaccgacatctctacactaccacaggcggagagacggactttaccaacgtgacctccctccgcggcgtctacataacaagcgtgctctccgaagataattctatccagaccatgatcacttttgaccaaggaggaaggtggacgcacctgaggaagcctgaaaacagtgaatgtgatgctacagcaaaaaacaagaatgagtgcagccttcatattcatgcttcctacagcatctcccagaaactgaatgttccaatggccccactctcagagccgaatgccgtaggcattgtcattgctcatggtagcgtgggggatgccatctcagtgatggttccagatgtgtacatctcagatgatgggggttactcctggacaaagatgctggaaggaccccactattacaccatcctggattctggaggcatcattgtggccattgagcacagcagccgtcctatcaatgtgattaagttctccacagacgaaggtcaatgctggcaaacctacacgttcaccagggaccccatctatttcactggcctagcttcagaacctggagctaggtccatgaatatcagcatttggggcttcacagaatctttcctgaccagccagtgggtctcctacaccattgattttaaagatatccttgaaaggaactgtgaagagaaggactataccatatggctggcacactccacagaccctgaagattatgaagatggctgcattttgggctacaaagaacagtttctgcggctacgcaagtcatccgtgtgtcagaatggtcgagactatgttgtgaccaagcagccctccatctgcctctgttccctggaggactttctctgtgattttggctactaccgtccagaaaatgactccaagtgtgtggaacagccagaactgaagggccacgacctggagttttgtctgtacggaagagaagaacacctaacaacaaatgggtaccggaaaattccaggggacaaatgccagggtggggtaaatccagttcgagaagtaaaagacttgaaaaagaaatgcacaagcaactttttgagtccggaaaaacagaattccaagtcaaattctgttccaattatcctggccatcgtgggattgatgctggtcacagtcgtagcaggagtgctcattgtgaagaaatatgtctgtgggggaaggttcctggtgcatcgatactctgtgctgcagcagcatgcagaggccaatggtgtggatggtgtggatgctttggacacagcctcccacactaataaaagtggttatcatgatgactcagatgaggacctcttggaatagctcttcagaggagctggacccagcatggatggtggaaccacagtacctcttacactccctgtggctccaacttcaggaaataaatttcccattgcgagggacccagctctgtttctgctgcttccatcaaagccaaaaggacctacactaaagaaatgcagggtgggggtggggaaccctgagcacttttttacaattggctctgagaaaaagggagacattttaaattctttaacttctta

SEQ ID NO: 2937 - protein, 831 aa, Homo sapiens
MERPWGAADGLSRWPHGLGLLLLLQLLPPSTLSQDRLDAPPPPAAPLPRWSGPIGVSWGLRAAAAGGAFPRGGRWRRSAPGEDEECGRVRDFVAKLANNTHQHVFDDLRGSVSLSWVGDSTGVILVLTTFHVPLVIMTFGQSKLYRSEDYGKNFKDITDLINNTFIRTEFGMAIGPENSGKVVLTAEVSGGSRGGRIFRSSDFAKNFVQTDLPFHPLTQMMYSPQNSDYLLALSTENGLWVSKNFGGKWEEIHKAVCLAKWGSDNTIFFTTYANGSCKADLGALELWRTSDLGKSFKTIGVKIYSFGLGGRFLFASVMADKDTTRRIHVSTDQGDTWSMAQLPSVGQEQFYSILAANDDMVFMHVDEPGDTGFGTIFTSDDRGIVYSKSLDRHLYTTTGGETDFTNVTSLRGVYITSVLSEDNSIQTMITFDQGGRWTHLRKPENSECDATAKNKNECSLHIHASYSISQKLNVPMAPLSEPNAVGIVIAHGSVGDAISVMVPDVYISDDGGYSWTKMLEGPHYYTILDSGGIIVAIEHSSRPINVIKFSTDEGQCWQTYTFTRDPIYFTGLASEPGARSMNISIWGFTESFLTSQWVSYTIDFKDILERNCEEKDYTIWLAHSTDPEDYEDGCILGYKEQFLRLRKSSVCQNGRDYVVTKQPSICLCSLEDFLCDFGYYRPENDSKCVEQPELKGHDLEFCLYGREEHLTTNGYRKIPGDKCQGGVNPVREVKDLKKKCTSNFLSPEKQNSKSNSVPIILAIVGLMLVTVVAGVLIVKKYVCGGRFLVHRYSVLQQHAEANGVDGVDALDTASHTNKSGYHDDSDEDLLE

SEQ ID NO: 2938 - DNA, 434 bp, Homo sapiens
tttttttttttttttttggagctgcatgggtatttcattgaaagttcacagacacaagggctctgagcggggtcacatcgtggaggaggcagggtcggggagcacagagtgagtcctcccaacctgggacaattttgcataagcccttcctgctaggtgtcaggtccaaggggccccaggagcctgggaaggggcacgtgagggcagggacacagacgctggaagccagggtgcagcagcgaggggagaagcccccaggccccagacacaggcagggtggaggccaagaggcggagggggtggactgagggccaagctcactgcccccttgctgtactcagcttctgatggccttgctgcccagttcacagctcaagggggccccaggacaagaagccctgccctgccccaacctcatgggattctgcgtttca

SEQ ID NO: 2939 - DNA, 539 bp, Homo sapiens
atctcttctctttcatgatatccttggtgtcctgcagcatcttctccttccaaagatcaaagaagtatgaagggtctgtgtagaatttgagtgcctcttttccatcgtccctgtaaggggtaagattgttgagagggggaggagtatcacaggtattgtatgtttctaagacaggcactgggagagagtttctgtcaaaaagcttctggtcttgaatggcggaacttctgaaggcttttcgggtgttgattccttgcagagacacttcttcttccttgggatccagctgagtgactttaacctgtagtcggtcgaccctctcagcaagggagcttacccgagaggcataggtatttgcctgagtaaagagctctccaaaaatgtcctctgcatatttactcaggctgcccagctgtcggatgacatttgccagggtgatgttggtcacgcattccagctcgcttctaacgctaggcaacgtctgacggcacaggtgccttggctcgatgttcctcgttactaacggcatggtggacctg

SEQ ID NO: 2940 - DNA, 514 bp, Homo sapiens
  misc_feature (505)..(505): n is a, c, g, or t
ttccttttggtgcgagcttgctgtggtttttgctctgggtcctctgggatggcgcctggctgtggccgcgtggtctctcacgcaggggcgccgggcgggggaacgcggccaccctgagtctggtgagtcgactgcggcggcctgtgtccgaagtgtccggggccgtgaacaagggcagcggcctggcctcaggcctgcgttcccacgtttggaaacggggagcttcgtcgatttgtgtttacatcatcgactatgccagggagttctccagataagcctggttttattttcgtcagtgaaaaggccttaccgtataactgactttatgcttgccctgcccccgtataaaataacttaaaagcagcgtgcctggttacagctgtttccacgtgcggtgctcgtcgggagtgatcacctaccctacaggtggaagatggatgcctgaagtgtagactgctgctagctgaataccatctgggagcataaaggtgacctgaaggatgtncttggtgag

SEQ ID NO: 2941 - DNA, 420 bp, Homo sapiens
gcctcctgatccaccaagaccatatggtgtttttcataaaagagagagatcattcccttgactttggacttcgcttattgaacccctggacagaatcaaggttgctaagagaccacctgtgctgaatacactttgttctggcaagagcagaaaactgagaagccgtgttacctaccactacctgggattaattcagggagcgggataattctggatatgactggtaaaaactggatattaatttctactactactcccaaaagtctagaagatgaaattgtgggaagacttctaaaaattttgtttgttatctttgttgacttaatttctattatatatgttgtgataacttcttagaaagctgacttcctttccatgtacatttcaaactgaattacagtgaataaaaatttgtatttt

SEQ ID NO: 2942 - DNA, 1110 bp, Homo sapiens
cctgagaagggtctagcggacgcaggtcaccagctgggcaacattcagaaagttagtcttcctatgctcattttcctgggctgttacagaagaagactggaagaggtaatttccaaggttcttcccagctctgaagttgtgtgtcaaagcgcgcagggaccatgtcggcggagaccgcgagcggccccacagaggaccaggtggaaatcctggagtacaacttcaacaaggtcgacaagcacccggattccaccacgctgtgcctcatcgcggccgaggcaggcctttccgaggaggagacccagaaatggtttaagcagcgcctggcaaagtggcggcgctcagaaggcctgccctcagagtgcagatccgtcacagactaaggagatggcaggcattgacagcttcactccatgaaggccatctctgtttctctcctccgcttaaccaagctgttgtggtttttcagcatagtgttgtatgttccattgctagctgtcctgctgtttaacacagtgttgtattttttttctaaatgtacataattagaaaagaaaataacaataggaagctatgtgtatcttctgtgtaaagcagtggcttcactggaaaaatggtgtggctagcatttccctttgagtcatgatgacagatggtgtgaaaaccatctaagtttgcttttgaccatcacctcccagtagcaatttgctttcataatccatttagcaatccaggcctctgttgaaaagataatatgagggagaagggaacacatttccttctgaacttacttccctaagtcactttccttatgtatcatctaatacaatgatggttgagtgaaaatacagaaggggtgtttgagtattcagatttcataaaacacttccttggaatatagctgcattaacttggaaagaagcctgttgggccagaagacagaaactccaactggcaaaaaagcaagcaatctaagaaaaaaaaccaccaaagttcttgaatttactatatttaaatgcattggttaagtttattttgctaaataaagtgaactgctttttgtctctaaaatgatattctaaataaaaccttaactttttgttgaaaaaa

SEQ ID NO: 2943 - DNA, 414 bp, Homo sapiens
ggcccttccaccttttgtgggcactcaagttcggacctctgggatcggcgattcccctctggccagggctggttttaatgctctccgtgggcgggcttcggttgagtttggtccgcttttcctttctgctcctcaggggagcattgcttccttctctcgcagtgaccatgacgaaattagcgcagtggctttggggactagcgatcctgggctccacctgggtggccctgaccacgggagccttggcctggagctgcccttgtcctgccaggaagtcctgtggccactgcccgcctacttgctggtgtccgccggctgctatgccctgggcactgtgggctatcgtgtggccacttttcatgactgcgaggacgccgcacgcgagctgcagagccagatacaggaggcccgagc

SEQ ID NO: 2944 - DNA, 4700 bp, Homo sapiens
atggccccctcggcctgggccatttgctggctgctagggggcctcctgctccatgggggtagctctggccccagccccggccccagtgtgccccgcctgcggctctcctaccgagacctcctgtctgccaaccgctctgccatctttctgggcccccagggctccctgaacctccaggccatgtacctagatgagtaccgagaccgcctctttctgggtggcctggacgccctctactctctgcggctggaccaggcatggccagatccccgggaggtcctgtggccaccgcagccaggacagagggaggagtgtgttcgaaagggaagagatcctttgacagagtgcgccaacttcgtgcgggtgctacagcctcacaaccggacccacctgctagcctgtggcactggggccttccagcccacctgtgccctcatcacagttggccaccgtggggagcatgtgctccacctggagcctggcagtgtggaaagtggccgggggcggtgccctcacgagcccagccgtccctttgccagcaccttcatagacggggagctgtacacgggtctcactgctgacttcctggggcgagaggccatgatcttccgaagtggaggtcctcggccagctctgcgttccgactctgaccagagtctcttgcacgacccccggtttgtgatggccgcccggatccctgagaactctgaccaggacaatgacaaggtgtacttcttcttctcggagacggtcccctcgcccgatggtggctcgaaccatgtcactgtcagccgcgtgggccgcgtctgcgtgaatgatgctgggggccagcgggtgctggtgaacaaatggagcactttcctcaaggccaggctggtctgctcggtgcccggccctggtggtgccgagacccactttgaccagctagaggatgtgttcctgctgtggcccaaggccgggaagagcctcgaggtgtacgcgctgttcagcaccgtcagtgccgtgttccagggcttcgccgtctgtgtgtaccacatggcagacatctgggaggttttcaacgggccctttgcccaccgagatgggcctcagcaccagtgggggccctatgggggcaaggtgcccttccctcgccctggcgtgtgccccagcaagatgaccgcacagccaggacggccttttggcagcaccaaggactacccagatgaggtgctgcagtttgcccgagcccaccccctcatgttctggcctgtgcggcctcgacatggccgccctgtccttgtcaagacccacctggcccagcagctacaccagatcgtggtggaccgcgtggaggcagaggatgggacctacgatgtcattttcctggggactgactcagggtctgtgctcaaagtcatcgctctccaggcagggggctcagctgaacctgaggaagtggttctggaggagctccaggtgtttaaggtgccaacacctatcaccgaaatggagatctctgtcaaaaggcaaatgctatacgtgggctctcggctgggtgtggcccagctgcggctgcaccaatgtgagacttacggcactgcctgtgcagagtgctgcctggcccgggacccatactgtgcctgggatggtgcctcctgtacccactaccgccccagccttggcaagcgccggttccgccggcaggacatccggcacggcaaccctgccctgcagtgcctgggccagagccaggaagaagaggcagtgggacttgtggcagccaccatggtctacggcacggagcacaatagcaccttcctggagtgcctgcccaagtctccccaggctgctgtgcgctggctcttgcagaggccaggggatgaggggcctgaccaggtgaagacggacgagcgagtcttgcacacggagcgggggctgctgttccgcaggcttagccgtttcgatgcgggcacctacacctgcaccactctggagcatggcttctcccagactgtggtccgcctggctctggtggtgattgtggcctcacagctggacaacctgttccctccggagccaaagccagaggagcccccagcccggggaggcctggcttccaccccacccaaggcctggtacaaggacatcctgcagctcattggcttcgccaacctgccccgggtggatgagtactgtgagcgcgtgtggtgcaggggcaccacggaatgctcaggctgcttccggagccggagccggggcaagcaggccaggggcaagagctgggcagggctggagctaggcaagaagatgaagagccgggtgcatgccgagcacaatcggacgccccgggaggtggaggccacgtagaagggggcagaggaggggtggtcaggatgggctggggggcccactagcagcccccagcatctcccacccacccagctagggcagaggggtcaggatgtctgtttgcctcttagagacaggtgtctctgcccccacaccgctactggggtctaatggaggggctgggttcttgaagcctgttccctgcccttctctgtgctcttagacccagctggagccagcaccctctggctgctggcagccccaagggatctgccatttgttctcagagatggcctggcttccgcaacacatttccgggtgtgcccagaggcaagagggttgggtggttctttcccagcctacagaacaatggccattctgagtgaccctcagagtgggtgtgtgggtgcgtctagggggtatcccggtagggggcctgcagggagccagagggtggaaatggcctctaagctagcaccccgtaagaagagcctacctgaccgacttggggagggaacacagaggtgttgggaaggtggagcaacaatgcacctcccctcctgtcgcgccgtgatatcttggtggctccctgccactgcccaccgcctcttctccatctgagaatcacggagaggtgtagataatctagaggcatagactgctagagcccccagggatctggggtggtcagggctcaggcttcactttgtaaaccaggtgggggcatctcacagcctgacttcccttccccaggccagggttgctgggatgcctgcccctcctgagaggaccccctccccattgtcaggctctccatgtccacgagcggggaggggtgggttctggggcattgttgtcccttgtgtctgtggactagagatagggtgggggagctggggaagggtgcaggcgggaagagtgggctgtctttcccagggtgatgcaagcatgccgcagccctggaggctgggaatgtggaggctctgtgagccctgcagccctcagaatcagggccagggatgcagaagattgagaggatatggagatggatagagggcaggagacccttaggatagattgtgggacccaggcaggaacaggtgtccacaagaactcaggatggcatcagttagctcagaagccacctggaagacccagtgtttccatctctggaatctctgttttatgctaaatggatttaggaagactgtttttcttttaagggggaaacaaggtagagaaaaggacgaagaagtgtaagtcccgctgattctcgggggtaaggctcggatggcaaggacgcgttctgcctgggcatgtaggggaggtgtttttgccatcaccagtttctcaggctggggagcacagaggggaggaggaggactaaatgaaaagttgttcccagcctgcacatgaacacattcatgacacacaaaactggctggaaggagataagagcactgggtttgagattccctccattaaaacaaccaagacaaagaaaggaggggaaaaaaagataaaaagcaagccagggttccctgccctattgaaactcaaacccagactgccttgggttttatctttcccttacccctggcacctccagagaactgggacctgaaatagtccctccgttctcccctttgaccatgtaataaatgaaccagaagcactgagattaacctatcaacgccctgagaagccttccagcctgcggtgctgtctgctgggaggtcagctggtcaaggcagaggaggagaggaggaaaggatgggggctgaagagcagaagggaggggagacagaggggattaaagaggggaggagagagtgcagagctccaggaaagggtatcagagctgcagccagctctgccctctaccctagggaggccagaaagacacaaacagccctccgggcctttacgctggactctggcttggcaggctccaggcagggtcctctgggaagttactctagaaaacgaagggaggaggagcacaagatcctcagcaacgaacacctgcacttagaaaaagtggacagcttctgccaaccacaccctacccatggtactgtatgctattaactcctggaaacgccccgtaaatgcgagttgtttttgtatttgtgtgttgagatgggccttgtggtttctctgtactcagagcacatttcttgtaattactattgttatttttattgtcatgactgcccctgagctctggtgagaaaagctgaatttacaaggaaagggatgaagttaatatttgcatcacataattatatcattactgtgtatctgtgtattgtactaaatggactgatgctgcgcacatgagctgaaaatgaagagccctcccatcc

SEQ ID NO: 2945 - protein, 782 aa, Homo sapiens
MAPSAWAICWLLGGLLLHGGSSGPSPGPSVPRLRLSYRDLLSANRSAIFLGPQGSLNLQAMYLDEYRDRLFLGGLDALYSLRLDQAWPDPREVLWPPQPGQREECVRKGRDPLTECANFVRVLQPHNRTHLLACGTGAFQPTCALITVGHRGEHVLHLEPGSVESGRGRCPHEPSRPFASTFIDGELYTGLTADFLGREAMIFRSGGPRPALRSDSDQSLLHDPRFVMAARIPENSDQDNDKVYFFFSETVPSPDGGSNHVTVSRVGRVCVNDAGGQRVLVNKWSTFLKARLVCSVPGPGGAETHFDQLEDVFLLWPKAGKSLEVYALFSTVSAVFQGFAVCVYHMADIWEVFNGPFAHRDGPQHQWGPYGGKVPFPRPGVCPSKMTAQPGRPFGSTKDYPDEVLQFARAHPLMFWPVRPRHGRPVLVKTHLAQQLHQIVVDRVEAEDGTYDVIFLGTDSGSVLKVIALQAGGSAEPEEVVLEELQVFKVPTPITEMEISVKRQMLYVGSRLGVAQLRLHQCETYGTACAECCLARDPYCAWDGASCTHYRPSLGKRRFRRQDIRHGNPALQCLGQSQEEEAVGLVAATMVYGTEHNSTFLECLPKSPQAAVRWLLQRPGDEGPDQVKTDERVLHTERGLLFRRLSRFDAGTYTCTTLEHGFSQTVVRLALVVIVASQLDNLFPPEPKPEEPPARGGLASTPPKAWYKDILQLIGFANLPRVDEYCERVWCRGTTECSGCFRSRSRGKQARGKSWAGLELGKKMKSRVHAEHNRTPREVEAT

SEQ ID NO: 2946 - DNA, 389 bp, Homo sapiens
tgctgctgggcggccgcggggcagcggagtggcgccggcactccggtccccgccgctccccgtccccgctgctcctatcccctgccgcgtccccggcggagcgggcattgcgccacccgcggcgcctggccgggaccgtgtgggccgtgaggatgaggacggctgggagacgcgaggggaccgcaaggcccggaagcccctggtggagaagaagcggcgcgcgcggatcaacgagagcctgcaggagctgcggctgctgctggcgggcgccgaggtgcaggccaagctggagaacgccgaagtgctggagctgacggtgcggcgggtccagggtgtgctgcggggccgggcgcgcgagcgcgagcagctgcaggcggaagcgagcgatg

SEQ ID NO: 2947 - DNA, 4775 bp, Homo sapiens
cagtcgcgcgcggtgcagtcgggaggtggaggcaccggctgcattgttttcgggatcgaggggtgagggcgctatggcacccggctgcaaaactgagttacgcagcgtgacaaatggtcagtctaaccaaccaagtaatgaaggtgatgccatcaaagtttttgtgcgaattcgtcctcctgcagaaagatctgggtcagctgatggagagcagaacttatgcttatctgtgctgtcctccacgagtctccggctgcactccaaccctgagcccaagaccttcacgtttgatcatgttgcagatgtggataccactcaggaatctgtatttgcaactgtggctaaaagcattgtggagtcttgcatgagcggttataatggtaccatctttgcatatggacagactggctcagggaagacatttactatgatgggaccatctgaatctgataatttttctcataacctgagaggagtaatcccacgaagttttgaatatttgttttccttaattgatcgtgaaaaagaaaaggctggagctggaaagagtttcctttgtaagtgttcctttattgaaatctacaacgagcagatatatgatctactggactctgcatcggctggactgtacttaagggagcatatcaagaagggagtctttgttgttggtgcggtggagcaggtggtaacctcagctgctgaagcctatcaggtgctgtctggaggatggaggaatagacgtgtggcatcaacatcaatgaacagagaatcgtctaggtctcatgccgtctttacaattacaatagagtcaatggagaaaagtaatgagattgtgaatatacggacctccctactcaacctggtggatttagcaggatctgaaaggcaaaaagatacccatgcagaagggatgagattgaaggaagcaggtaacataaatcgatcattgagctgcctgggccaagtgattacagcacttgtcgacgtgggtaatggaaaacagagacatgtttgctacagagactccaaacttaccttcttactacgggattcccttggaggtaatgccaaaacagccataattgcaaatgttcatcctggatccaggtgttttggggaaaccctatcaacacttaactttgctcaaagagccaagctgattaaaaacaaggcagtagtaaatgaagacacccaaggaaatgtgagccagctccaagctgaagtgaagaggctcaaagaacaactggcggagcttgcttcaggacagacaccaccagaaagcttcctgaccagagacaaaaagaagactaactatatggagtatttccaggaagcaatgttattctttaagaaatctgaacaggaaaagaagtctctgatagaaaaagttacccaattagaagacctcaccctcaaaaaggaaaaatttattcaatctaataaaatgattgtgaaattccgagaggatcaaataatacgcttggaaaagctccacaaggaatcccggggaggttttctgcctgaggagcaggatcgtttgctctcagaattaaggaatgagattcaaactctgcgagaacaaatagagcaccaccccagagttgcaaagtatgctatggaaaatcattccctcagggaggagaatagaagactgagattattagagcctgtgaaaagagctcaagaaatggatgcccagaccattgcaaaactagaaaaagctttctctgaaataagtggcatggagaaaagtgacaaaaatcagcaaggattttcacctaaagctcagaaagagccatgtttgtttgcaaacactgagaagttaaaagcacaactcctgcaaattcagacagagctgaataattcaaagcaagaatatgaagaattcaaagaacttactaggaaaaggcagctagaattggaatcagagcttcagtctttgcaaaaagcgaaccttaatcttgaaaaccttttggaagcaacaaaagcctgcaagcggcaagaagtttctcagctgaataaaattcatgctgaaacacttaagattataactacaccaaccaaggcctaccaacttcattcccgaccagtaccaaaattaagccctgaaatgggaagctttggctctctatacactcagaattctagcatattagataatgatatattaaatgagccagttcctcctgagatgaatgaacaagcttttgaggccatttctgaagagcttagaacagtgcaggaacaaatgagtgctcttcaagccaaactggatgaagaagagcataaaaacctaaagcttcagcagcatgttgacaaactggaacatcattctacccaaatgcaggagcttttctcatcagaaagaattgattggaccaaacagcaggaagagcttctctcacagttgaatgtccttgaaaagcagcttcaagagactcaaactaaaaatgactttttgaaaagtgaggtacatgacctgcgagtagtccttcattctgctgacaaggagctttcttcagtgaaattggaatatagttcattcaaaacgaatcaggagaaagaattcaacaaactttctgaaagacacatgcatgtacagcttcaattagataatctcaggttagaaaacgaaaagctgcttgagagcaaagcctgcctacaggattcctatgacaacttacaagaaataatgaaatttgagattgaccaactttcaagaaacctccaaaacttcaaaaaagaaaatgaaactctgaaatctgatctgaataatttgatggagcttcttgaggcagaaaaagaacgcaataacaaattatcattacagtttgaagaagataaagaaaacagttctaaagaaatcttaaaagttcttgaggctgtacgtcaggagaaacagaaagagacggccaagtgtgagcagcagatggcaaaagtacagaaactagaagagagcttgcttgctactgaaaaagtgatcagttccctggaaaagtctagagattctgataagaaagttgtagctgacctcatgaaccagatccaggagctaagaacatcggtctgtgagaaaacagaaactatagacaccctgaaacaagaactgaaggacataaattgcaaatacaactctgctttggttgacagagaagagagcagagtgttgatcaagaagcaggaagtggatattctggatctgaaagaaacccttaggctgagaatactttctgaggacatagagagggatatgctctgtgaggacctggctcatgccactgagcagctgaacatgctcacagaggcctcaaaaaaacactcggggctgctgcagtctgcccaggaagaactgaccaagaaggaagccctgattcaggaacttcagcacaagctaaaccaaaagaaagaggaagtagaacagaagaagaatgaatataacttcaaaatgaggcaactagaacatgtgatggattctgctgctgaggatccccagagtcctaagacaccacctcactttcaaacacatttggcaaaactcctggaaacacaagaacaagagatagaagatggaagagcctctaagacttctttggaacaccttgtaacaaagctaaatgaagacagagaagtcaaaaatgctgaaatcctcagaatgaaggagcagttgcgtgaaatggaaaacctacgcctggaaagtcagcagttaatagagaaaaactggctcctgcaaggtcagctggatgatattaaaagacaaaaggaaaacagtgatcagaatcatccagataatcaacagctgaagaatgaacaagaagaaagtatcaaagaaagacttgcaaaaagtaaaatagttgaagaaatgctgaaaatgaaagcagacctagaagaagtccaaagtgccctttacaacaaagagatggaatgccttagaatgactgatgaagtcgaacgaacccaaactttggagtctaaagcattccaggaaaaagaacaactgagatcaaagctggaagaaatgtatgaagaaagagagagaacatcccaggagatggaaatgttaaggaagcaggtggagtgtcttgctgaggaaaatggaaagttggtaggtcaccaaaatttgcatcagaagattcagtacgtagtgcgactaaagaaggaaaatgtcaggcttgctgaggagacagaaaagttgcgtgccgaaaatgtatttttaaaagaaaagaaaagaagtgaatcttgaggattccggtcagctacctaggcatcaccttgtttgaagatgtttcttctcttttacaagtaagacctactcctggccacttaggagagctgaatttatggaccttaattattaaatgtttataaggtggtggtaaccacctcaagtttctgatgaacattctgcatccatatacaccctgtgacagtcagcagtctgctattaagtggcctacttcaaggctttgaatcaacttaagggaaaaccttttgtctttgtaaaaataaaagcctgtagctaaggtttacagtggacattagccagatcattttcttcttagattatgccataatctcctttgattcttatggaagttctaacaatatatggtggttccaacacctgcagtgagtttaatgactgacttagtagcaggtacaagaagcaaacttgttaatatagattatttttgtattcttactttaggtattttacttgagcattttccatgactgtaaataaagccattttttaagataaaaaaaaaaaaaaaaaa

SEQ ID NO: 2948 - protein, 1388 aa, Homo sapiens
MAPGCKTELRSVTNGQSNQPSNEGDAIKVFVRIRPPAERSGSADGEQNLCLSVLSSTSLRLHSNPEPKTFTFDHVADVDTTQESVFATVAKSIVESCMSGYNGTIFAYGQTGSGKTFTMMGPSESDNFSHNLRGVIPRSFEYLFSLIDREKEKAGAGKSFLCKCSFIEIYNEQIYDLLDSASAGLYLREHIKKGVFVVGAVEQVVTSAAEAYQVLSGGWRNRRVASTSMNRESSRSHAVFTITIESMEKSNEIVNIRTSLLNLVDLAGSERQKDTHAEGMRLKEAGNINRSLSCLGQVITALVDVGNGKQRHVCYRDSKLTFLLRDSLGGNAKTAIIANVHPGSRCFGETLSTLNFAQRAKLIKNKAVVNEDTQGNVSQLQAEVKRLKEQLAELASGQTPPESFLTRDKKKTNYMEYFQEAMLFFKKSEQEKKSLIEKVTQLEDLTLKKEKFIQSNKMIVKFREDQIIRLEKLHKESRGGFLPEEQDRLLSELRNEIQTLREQIEHHPRVAKYAMENHSLREENRRLRLLEPVKRAQEMDAQTIAKLEKAFSEISGMEKSDKNQQGFSPKAQKEPCLFANTEKLKAQLLQIQTELNNSKQEYEEFKELTRKRQLELESELQSLQKANLNLENLLEATKACKRQEVSQLNKIHAETLKIITTPTKAYQLHSRPVPKLSPEMGSFGSLYTQNSSILDNDILNEPVPPEMNEQAFEAISEELRTVQEQMSALQAKLDEEEHKNLKLQQHVDKLEHHSTQMQELFSSERIDWTKQQEELLSQLNVLEKQLQETQTKNDFLKSEVHDLRVVLHSADKELSSVKLEYSSFKTNQEKEFNKLSERHMHVQLQLDNLRLENEKLLESKACLQDSYDNLQEIMKFEIDQLSRNLQNFKKENETLKSDLNNLMELLEAEKERNNKLSLQFEEDKENSSKEILKVLEAVRQEKQKETAKCEQQMAKVQKLEESLLATEKVISSLEKSRDSDKKVVADLMNQIQELRTSVCEKTETIDTLKQELKDINCKYNSALVDREESRVLIKKQEVDILDLKETLRLRILSEDIERDMLCEDLAHATEQLNMLTEASKKHSGLLQSAQEELTKKEALIQELQHKLNQKKEEVEQKKNEYNFKMRQLEHVMDSAAEDPQSPKTPPHFQTHLAKLLETQEQEIEDGRASKTSLEHLVTKLNEDREVKNAEILRMKEQLREMENLRLESQQLIEKNWLLQGQLDDIKRQKENSDQNHPDNQQLKNEQEESIKERLAKSKIVEEMLKMKADLEEVQSALYNKEMECLRMTDEVERTQTLESKAFQEKEQLRSKLEEMYEERERTSQEMEMLRKQVECLAEENGKLVGHQNLHQKIQYVVRLKKENVRLAEETEKLRAENVFLKEKKRSES

SEQ ID NO: 2949 - DNA, 1346 bp, Homo sapiens
cttgatatcgaattcgcggccgcgtcgacggaccaaaggcgaccggtgcaggtgcacgacgccagctcccttctggggggccggggcctgggggttgccatggcccccagccacctgtcagtgcgggagatgagggaagatgagaagcccctggtgctggagatgctgaaggccggcgtgaaggacacggaaaaccgcgtggccctccatgccttgacacggccgccggccctgctcctcctggcggcggccagcagcggcctgcgctttgtcctggcttccttcgccctggccctcctcctgccggtgttcctggctgtggccgccgtgaagctgggcctgcgggcccgatggggctcgctgcctccgccgggtggcctggggggcccctgggtggccgtgcggggctccggtgacgtgtgtggggtcctggctctggcccctggcacaaatgcaggggacggggcccgggtcacccgcctgtctgtctctcgctggcaccgccgccggggcgtgggcaggaggctgctggccttcgcggaggcccgggctcgggcctgggctgggggcatgggggagccccgggcccggctcgtggtccccgtggctgtggccgcctggggggtgggagggatgctggagggctgtggctaccaggtcgaggggggctggggctgcctgggctacacgctggtgagggaattcagcaaagacctgtgaagctacagactgacagccagggcaggggaggagggaggggcgccagcacctgatgatcgcctactgtctgcgggttcttttacctgctctccctcagtgagtcctcaaccaccctgggcccagaaacagaggcctgccgaggggaggagcctggcctctgtccacccgtcagcagtgtgaagtctgttgtgtttgagcttctcagagtggaatgactccttttccttcctggccctcgggggcctctcgaggtcagcctctcccaaccccctacctcagctcctgtctgcactgagaaacctccccgggtgatgtctgcaaagtctgtgctgtccgtgccccaggctgggagagctatctggggagggggagaggaggccgagcagaatacaccccagagttagggtttgcgactccgcctccctgggacctggattgggtcagatgcctgtccttggaggggacaaggttgactgcttaggaggcgcgacgcacagggctgccaggcctggcccctctctgggaaggttgagagctgagacgggcagccctgtcccttcctccagatccgtctggttttttacaccgtttgttaataaagcctgaaaccgcaaaaaaaaaaaaaa

SEQ ID NO: 2950 - protein, 206 aa, Homo sapiens [sequence omitted]

SEQ ID NO: 2951 - DNA, 4815 bp, Homo sapiens
ctcaaatcggggtattgatctccacggaagccccaaaccctcgccatcgagagacccccatggcccggggtgatggctgtggggcttggtgctcccagagagctcagtggctacagaatgggtggggattctgcgtgtctcccggagcctgaacccctttcctggttatggccggtagctgtctccagggctaacgtgggcagcgcaggggggcggaaaccgggttttagccaaatgcctcgacatcgccgcgcctccgcctcctcgtcgctgaaagaaatgtcggggtttcatcagagctagggagcgacagtcgggaacagcgagtctgccgaagccggctgttgtgtgagggtgtgagacggcggggcggtgaggggccaccgcggcttgggggatagtgcgtgtggggttgaccgtgtgtctgcttgagaggctgtgaagatatggggggcagatatgggagaaatgctcgggcctgaagtccccagcccaccgtgctcaagagtagcggacgttttgccaccatccttgtctgtgctactgtctgctgcagcttccgtgccccgttctcctggagcagggcgtaaaagcggcttgcattcaattagcagcgaagctcgcgggcgctggcgggacaggcgcgtgaggccacaacacatgcgtgtatcttgcttgggctatcttccctgctctgccacgccgggtctggagaaggggtttcagccccaggacatttactgagagtcggcgaatattgggagccgcgatgttcccccttcgggccctgtggttggtctgggcgcttctaggagtggccggatcatgcccggagccgtgcgcctgcgtggacaagtacgctcaccagttcgcggactgcgcttacaaagagttgcgtgaggtgccggaaggactgcctgccaacgtgacgacgcttagtctgtccgcgaacaagatcactgtgctgcggcgcggggccttcgccgacgtcacacaggtcacgtcgctgtggctggcgcacaatgaggtgcgcaccgtggagccaggcgcactggccgtgctgagtcagctcaagaacctcgatctgagccacaacttcatatccagctttccgtggagcgacctgcgcaacctgagcgcgctgcagctgctcaaaatgaaccacaaccgcctgggctctctgccccgggacgcactcggtgcgctacccgacctgcgttccctgcgcatcaacaacaaccggctgcgtacgctggcgcctggcaccttcgacgcgcttagcgcgctgtcacacttgcaactctatcacaatcccttccactgcggctgcggccttgtgtggctgcaggcctgggccgcgagcacccgggtgtccttacccgagcccgactccattgcttgtgcctcgcctcccgcgctgcagggggtgccggtgtaccgcctgcccgccctgccctgtgcaccgcccagcgtgcatctgagtgccgagccaccgcttgaagcacccggcaccccactgcgcgcaggactggcgttcgtgttacactgcatcgccgacggccaccctacgcctcgcctgcaatggcaacttcagatccccggtggcaccgtagtcttagagccaccggttctgagcggggaggacgacggggttggggcggaggaaggagagggagaaggagatggggatttgctgacgcagacccaagcccaaacgccgactccagcacccgcttggccggcgcccccagccacaccgcgcttcctggccctcgcaaatggctccctgttggtgcccctcctgagtgccaaggaggcgggcgtctacacttgccgtgcacacaatgagctgggcgccaactctacgtcaatacgcgtggcggtggcagcaaccgggcccccaaaacacgcgcctggcgccgggggagaacccgacggacaggccccgacctctgagcgcaagtccacagccaagggccggggcaacagcgtcctgccttccaaacccgagggcaaaatcaaaggccaaggcctggccaaggtcagcattctcggggagaccgagacggagccggaggaggacacaagtgagggagaggaggccgaagaccagatcctcgcggacccggcggaggagcagcgctgtggcaacggggacccctctcggtacgtttctaaccacgcgttcaaccagagcgcagagctcaagccgcacgtcttcgagctgggcgtcatcgcgctggatgtggcggagcgcgaggcgcgggtgcagctgactccgctggctgcgcgctggggccctgggcccggcggggctggcggagccccgcgacccgggcggcgacccctgcgcctactctatctgtgtccagcggggggcggcgcggcagtgcagtggtcccgcgtagaggaaggcgtcaacgcctactggttccgcggcctgcggccgggtaccaactactccgtgtgcctggcgctggcgggcgaagcctgccacgtgcaagtggtgttttccaccaagaaggagctcccatcgctgctggtcatagtggcagtgagcgtattcctcctggtgctggccacagtgccccttctgggcgccgcctgctgccatctgctggctaaacacccgggcaagccctaccgtctgatcctgcggcctcaggcccctgaccctatggagaagcgcatcgccgcagacttcgacccgcgtgcttcgtacctcgagtccgagaaaagctacccggcaggcggcgaggcgggcggcgaggagccagaggacgtgcagggggagggccttgatgaagacgcggagcagggagacccaagtggggacctgcagagagaggagagcctggcggcctgctcactggtggagtcccagtccaaggccaaccaagaggagttcgaggcgggctctgagtacagcgatcggctgcccctgggcgccgaggcggtcaacatcgcccaggagattaatggcaactacaggcagacggcaggctgaacctccgcccgtccggcccgcccattcccgacctccacctagggtgcctgggagcagcagtctagggctggcaggacttatgtcccccgtccccaaccttcacctactcctcccccttactactccccaaccttgactaccagggacttctattagggagtgggccgatttcaccagtccctgctacccacggctgccattctccctgcgggctgaatccccttccccgccaagcacagtgtttatcttaccccatgcaagactccacccgcagacggtgggcgatatctatgtccctccattcccgtcgcgattatctgcgaaatccaccccgcagcccgccccaccgtgggctctggagccagaggaaacgagcgaagactttggaaacctcgcggtaacgcggtggtttcgggggccagccaaggccagtggagtgctgtggggtcccacctcgacccctcctcctccctttctttctttcctttttttttattttttaattttatttatttatttatttattttttgacggagtcttggtctgtcgccaggctggagtgcagtggcgcgatctcggctcactgcatcttccgcctcccgggttcaagcgattctcctgcctcagcctgcctagtagctgggactacaggcgcgcgccaccacgaccagctaatttcttctatttttagtagagacggggtttcaccatgttggccaggatggtctggatctcttgacctcaggtgatccatctgcctcggcctctcaaagtgctgggattacaggcgtgaggcaccgcgcccggcccctcctccctttcaatccctactcccagaagccgggattcgtggcaacccctagtttttagttccaaagcctcctgccggcagggaaccaaatccttctgtcctcccacccccaccccacttctggccagttggagtccagcccggtgcctggggcgcctttcagctccgcgctcagattttcctgttttcgttgttttcaaagacagcgacatttcgggtctggtgctaacacccccttcccagcctctgggaaaatcgagtgtgtgtgtcggggggtagggagggaatgcgttttctgtcgtctctctcctaacttaaagcgccgcaggaccgcgcgccccttggcggctgagcctgtggacttggtcgcgggccaatttcgttgtccgtgtgttgggctttccggaggtctgtgcgcccaacagcgccgctcccgcggctccacccgacccagaccctagctggaaagcgccggaggcggaggaagctgactgtggcctcccgggccgcggctctctggagggctcgcgccctagttcgcacaaagcctgctcgtgactgtgcgactgtgcgacgggatccggatggagccgagcccctccgtcctcgcgtctcggtcctcgcgtcgccccgccccacccgcccctgcttcggcgggaatcgtgtttgcccggcgtgtagtccctgacaagcgtgccctgtaggagaaaagtctgtgtcctgtgaagtgtgaccgtgtagtgtaggggggcgggcgggggggcggatgggcggggagggagggaaggggaggggcgcggcgcggcgactcggggcggggttcttttttccattttgaaagaaagcgtcggggttggggtggggggagtttcagtcctcgggatcagccctctccgcgaagcgcagcacaagcgcgggcctgggacggagtagccccccggagcccgtgcccttttctaaacgcgtctgtatgcagtcaataaaacaatcgatttg

SEQ ID NO: 2952 - protein, 785 aa, Homo sapiens
GHNTCVYLAWAIFPALPRRVWRRGFSPRTFTESRRILGAAMFPLRALWLVWALLGVAGSCPEPCACVDKYAHQFADCAYKELREVPEGLPANVTTLSLSANKITVLRRGAFADVTQVTSLWLAHNEVRTVEPGALAVLSQLKNLDLSHNFISSFPWSDLRNLSALQLLKMNHNRLGSLPRDALGALPDLRSLRINNNRLRTLAPGTFDALSALSHLQLYHNPFHCGCGLVWLQAWAASTRVSLPEPDSIACASPPALQGVPVYRLPALPCAPPSVHLSAEPPLEAPGTPLRAGLAFVLHCIADGHPTPRLQWQLQIPGGTVVLEPPVLSGEDDGVGAEEGEGEGDGDLLTQTQAQTPTPAPAWPAPPATPRFLALANGSLLVPLLSAKEAGVYTCRAHNELGANSTSIRVAVAATGPPKHAPGAGGEPDGQAPTSERKSTAKGRGNSVLPSKPEGKIKGQGLAKVSILGETETEPEEDTSEGEEAEDQILADPAEEQRCGNGDPSRYVSNHAFNQSAELKPHVFELGVIALDVAEREARVQLTPLAARWGPGPGGAGGAPRPGRRPLRLLYLCPAGGGAAVQWSRVEEGVNAYWFRGLRPGTNYSVCLALAGEACHVQVVFSTKKELPSLLVIVAVSVFLLVLATVPLLGAACCHLLAKHPGKPYRLILRPQAPDPMEKRIAADFDPRASYLESEKSYPAGGEAGGEEPEDVQGEGLDEDAEQGDPSGDLQREESLAACSLVESQSKANQEEFEAGSEYSDRLPLGAEAVNIAQEINGNYRQTAG

SEQ ID NO: 2953 - DNA, 3692 bp, Homo sapiens
cgaggaggaagcagcaggcgccccggcgcgcagcagcctatgtttccgaagagttaaaggctgctgccctggtggacgaaggtttagacccagaggagcatacggcagatggagagccctcggccaagtacatgtgcccggagaaggagctcgccagggcctgccccagctaccagaactccccggccgccgagttttcctgccatgaaatggacagcgagtcacacatcagtgagaccagtgaccgaatggctgactttgaaagcggctccatcaagaacgaagaggagaccaaggaggtcacggtcccactggaagacacgactgtgtcggatagcctggagcagatgaaggccgtgtacaacaacttcctctccaactcctactggtccaacctcaacctcaacctgcaccagccctcctcggagaagaacaacggcagcagcagcagcagcagtagcagcagcagcagctgtggcagcgggagcttcgactggcaccagagcgccatggctaagacgctgcagcaggtgtcacagagccgcatgctcccggagcccagcctcttcagcaccgtgcagctgtaccggcagagcagcaagctctatggctccatcttcacgggggccagcaagttccgctgtaaggactgcagcgctgcctacgacaccctggtggagttgacagtgcacatgaacgagacggggcattaccgcgacgacaaccatgagaccgataacaacaaccccaagcgctggtccaagcctcgcaaacgctccttgctggaaatggaagggaaggaagacgcccagaaggtgctgaagtgcatgtactgtggccactcctttgagtccctgcaggatttgagtgtccatatgatcaaaacaaaacactaccaaaaagtgcctctgaaggaacccgtcactcctgtcgccgccaaaatcatccctgccactcggaagaaagcttccctggagctggagctccccagctccccagattccacaggtggaacccccaaagccaccatctcagacaccaacgatgcacttcagaagaactccaacccttacatcacgccaaataatcggtacggccaccagaatggggccagctatgcatggcactttgaggcccggaagtcgcagatcctgaagtgcatggagtgtgggagctcgcatgacaccctgcaggagctcactgcccacatgatggtcactggccacttcatcaaggtcaccaactctgctatgaaaaaggggaagcccattgtggagacgcctgtcacacctaccatcacaaccctgctggatgagaaggtccagtccgtgcccctggcagccaccaccttcacgtccccctccaatacacctgccagcatctccccaaaactgaatgtggaggtcaagaaggaagtcgacaaggagaaagcggtcactgacgagaaacctaagcaaaaagacaagcctggcgaagaagaggagaagtgtgacatctcttccaaataccattacttgactgaaaatgacttagaagagagtcccaagggggggcttgatatcctcaaatccttggaaaacacagtgacatccgcaatcaacaaggcccagaacggcactcctagctgggggggctatcccagcatccatgccgcctaccaacttcccaacatgatgaagttgtccctgggctcgtcggggaagagcacgcccctgaaacccatgtttggcaacagtgagattgtctccccgacgaaaaaccagaccctggtctctccacccagcagccagacgtcccccatgcccaagacaaactttcatgccatggaggagctggtgaaaaaggtcactgagaaagttgccaaagtggaggagaagatgaaggagccggatgggaagctttccccgcccaagcgggccactccctccccatgtagcagcgaagtcggggaacccatcaagatggaggcatccagcgatgggggcttccgcagccaggagaacagccccagccccccgcgggatgggtgcaaggatgggagccccctcgctgagccggtggagaatggcaaggagctggtgaagcccctagccagcagtttgagtggcagcacggccatcatcaccgaccacccgcctgaacagccttttgttaaccctttgagcgccctgcagtcagtcatgaacattcacctgggcaaggccgccaagccctccctgcctgccctggaccccatgagcatgcttttcaagatgagcaacagcctggcggagaaggccgctgtggccaccccgccgcccctgcagtccaagaaggcagaccacctcgaccgctatttctaccacgtcaacaacgaccagcccatagacttgacaaaagggaagagtgacaaaggctgctccttgggttcagtgcttctgtcacccacgtccacagccccggcaacctcctcatccacggtgacaacggcaaagacatctgccgtcgtatcattcatgtcaaactcgccgctacgcgagaatgccttgtcagatatatccgatatgctgaagaacttgacagagagccacacgtcaaaatcctccactccttccagcatctccgagaagtctgacattgacggggccactctggaggaggctgaggagtcgacgcccgcccagaagaggaagggccgccagtcaaactggaacccccagcacctcctgatcctccaggcccagtttgccgccagcctccggcagacctcagaagggaagtacatcatgtcagacctgagcccccaggagcggatgcatatctccaggttcaccgggctgtccatgaccaccatcagccactggctggccaacgtgaaataccagcttcgaaggacaggtggaacaaagttcctcaaaaacttggacactggccaccccgtcttcttttgtaacgattgtgcgtcccaaatcaggactccttccacgtacatcagtcacctagagtcacacttaggcttccggctacgggacttatccaaactgtccaccgaacagattaacagtcagatagcacaaaccaagtcaccgtcagaaaaaatggtgacgtcctcccccgaggaagacctggggacttcctatcagtgcaaactttgcaatcggacctttgccagcaagcacgctgttaaacttcaccttagcaaaacacacgggaaatctccggaagaccaccttctgtatgtctctgagttagagaagcagtagcatttgcttttgatagaaaggactgcagtttgctttgagggaaactgtggaaggcaccttcaggccccctctgacttgttgttcttggcacatgttcttattttaactgcagagaatcactctgggctggactgttttgtataactgtacagtgtttaatagaggtgcataatcagctgttgttactggtaaaatatgaaggttaaaatgcagtggtaagtgtttggaactttgtgtaaacgggatttagttgtgagcatcctcccgatgcttcaagctgcatgcattaacagacagtttaattaagcatttataacggaatcaggcacaccttttccacgagactcgagtgtgctggcatttctcaccctttcatctttagccctctgagtactttgaagcacttttgcattaatttggttaaaaaataaaataaaataataataatgt

SEQ ID NO: 2954 - protein, 1079 aa, Homo sapiens
RRKQQAPRRAAAYVSEELKAAALVDEGLDPEEHTADGEPSAKYMCPEKELARACPSYQNSPAAEFSCHEMDSESHISETSDRMADFESGSIKNEEETKEVTVPLEDTTVSDSLEQMKAVYNNFLSNSYWSNLNLNLHQPSSEKNNGSSSSSSSSSSSCGSGSFDWHQSAMAKTLQQVSQSRMLPEPSLFSTVQLYRQSSKLYGSIFTGASKFRCKDCSAAYDTLVELTVHMNETGHYRDDNHETDNNNPKRWSKPRKRSLLEMEGKEDAQKVLKCMYCGHSFESLQDLSVHMIKTKHYQKVPLKEPVTPVAAKIIPATRKKASLELELPSSPDSTGGTPKATISDTNDALQKNSNPYITPNNRYGHQNGASYAWHFEARKSQILKCMECGSSHDTLQELTAHMMVTGHFIKVTNSAMKKGKPIVETPVTPTITTLLDEKVQSVPLAATTFTSPSNTPASISPKLNVEVKKEVDKEKAVTDEKPKQKDKPGEEEEKCDISSKYHYLTENDLEESPKGGLDILKSLENTVTSAINKAQNGTPSWGGYPSIHAAYQLPNMMKLSLGSSGKSTPLKPMFGNSEIVSPTKNQTLVSPPSSQTSPMPKTNFHAMEELVKKVTEKVAKVEEKMKEPDGKLSPPKRATPSPCSSEVGEPIKMEASSDGGFRSQENSPSPPRDGCKDGSPLAEPVENGKELVKPLASSLSGSTAIITDHPPEQPFVNPLSALQSVMNIHLGKAAKPSLPALDPMSMLFKMSNSLAEKAAVATPPPLQSKKADHLDRYFYHVNNDQPIDLTKGKSDKGCSLGSVLLSPTSTAPATSSSTVTTAKTSAVVSFMSNSPLRENALSDISDMLKNLTESHTSKSSTPSSISEKSDIDGATLEEAEESTPAQKRKGRQSNWNPQHLLILQAQFAASLRQTSEGKYIMSDLSPQERMHISRFTGLSMTTISHWLANVKYQLRRTGGTKFLKNLDTGHPVFFCNDCASQIRTPSTYISHLESHLGFRLRDLSKLSTEQINSQIAQTKSPSEKMVTSSPEEDLGTSYQCKLCNRTFASKHAVKLHLSKTHGKSPEDHLLYVSELEKQ

SEQ ID NO: 2955 - DNA, 453 bp, Homo sapiens
  misc_feature (280)..(280): n is a, c, g, or t
  misc_feature (377)..(377): n is a, c, g, or t
  misc_feature (406)..(406): n is a, c, g, or t
  misc_feature (422)..(422): n is a, c, g, or t
  misc_feature (442)..(442): n is a, c, g, or t
  misc_feature (447)..(447): n is a, c, g, or t
  misc_feature (452)..(452): n is a, c, g, or t
actgcacgagatgaaataaatgatgccttaataaatcagaagtatgatgaagttatggctacttatattcttctaggtagaaaaccacctgaatttgaaggtggtgaatcgttatccagtggaaacttgtgtcagaggtcccggcccagtagtgacttaaacaacagcactcttcagtcccctgctcacctgaaggtccagagaagtatctcagcaaatcagaagcagcggcgtttcagtgatcatgctggtccatccattcctcctgctgtatcatatnaccaaaagacctcaggctaacagtgtgggaaagtgaacagaaagaggagtgggacaaagatgtgggctcgaaaaacttgggcagcacaacagttggnttcaaaaaggcgagatggattgcaagccnttttgttagggccagnggagggaaaaatttttcaanttttnccaant

SEQ ID NO: 2956 - DNA, 520 bp, Homo sapiens
  misc_feature (506)..(506): n is a, c, g, or t
tttaggtttgtaagggaggcttccttcatgatatgaccgtaggatgctgtcaccctgacccggttcctgatgcgtgatgtttctaagtgctcagtaagtaccaatctactcccacactgcagtatgtgggcgtgtgatgctgaacagagagagcacgatgtgatcatagttaattccctctggtatcaaaaaaataaaaacctatcaaaaaataaaaacgtatgttgctctcgtctgcgtcatcattgttgttcagacttttacataacatgccgaatgagaagactcagaaagccaggcagaatcatgaagaaataactgaatagttctgattccaagaactgtgtgaccttatgacatttaaagagtgaggaagagaaagcaacaggttccaagtattatagcaagcataccagctttacttcaggaaggctcgtggagaagctgtgatcacattgtggttatttagatacttccaaatggaaatggcattgataactattcanctgtgatatgaagg

SEQ ID NO: 2957 - DNA, 580 bp, Homo sapiens
tttttttttaatgttaacattgagagtcattacggctaaagctttgccttcatcacatagctaaaaagaaggttgagctggaacttaggatactttaaagcatttcctgtttaggtattaggctgatagagaatcatgtgtaactggggtcagcattcctataattttttgagccaaagacagaatacacactttaccctgacaggtttcttccagaatttaggacagctgatgaaatgaaaagacacacacccaagccaagagtgcaaaaggatgtagtagcatgattccgccaaccaaatgcctcataccctcagacgtcccaaatccagtggtgagcaggtaaatttttaacaacaatctttctttgtgaggaaaaaagttcctgatttccataatgtaaatactttcactgactggtttgaagccatcaacacgtcaactaacaattggttcctgcatgtctataagctggctttagcacaccactgcaaacctacttattacttatattttcagatacattacagcacttatcaattctaacattgtgaaaaactgctgtgctttaggcatcttg

SEQ ID NO: 2958 - DNA, 3174 bp, Homo sapiens
ggctcaccgacaacttcatcgccgccgtgcgccgccgagacttcgccaacatgaccagcctggtgcacctcactctctcccggaacaccatcggccaggtggcagctggcgccttcgccgacctgcgtgccctccgggccctgcacctggacagcaaccgcctggcggaggtgcgcggcgaccagctccgcggcctgggcaacctccgccacctgatccttggaaacaaccagatccgccgggtggagtcggcggcctttgacgccttcctgtccaccgtggaggacctggatctgtcctacaacaacctggaggccctgccgtgggaggcggtgggccagatggtgaacctaaacaccctcacgctggaccacaacctcatcgaccacatcgcggaggggaccttcgtgcagcttcacaagctggtccgtctggacatgacctccaaccgcctgcataaactcccgcccgacgggctcttcctgaggtcgcagggcaccgggcccaagccgcccaccccgctgaccgtcagcttcggcggcaaccccctgcactgcaactgcgagctgctctggctgcggcggctgacccgcgaggacgacttagagacctgcgccacgcccgaacacctcaccgaccgctacttctggtccatccccgaggaggagttcctgtgtgagcccccgctgatcacacggcaggcggggggccgggccctggtggtggaaggccaggcggtgagcctgcgctgccgagcggtgggtgaccccgagccggtggtgcactgggtggcacctgatgggcggctgctggggaactccagccggacccgggtccggggggacgggacgctggatgtgaccatcaccaccttgagggacagtggcaccttcacttgtatcgcctccaatgctgctggggaagcgacggcgcccgtggaggtgtgcgtggtacctctgcctctgatggcacccccgccggctgccccgccgcctctcaccgagcccggctcctctgacatcgccacgccgggcagaccaggtgccaacgattctgcggctgagcgtcggctcgtggcagccgagctcacctcgaactccgtgctcatccgctggccagcccagaggcctgtgcccggaatacgcatgtaccaggttcagtacaacagttccgttgatgactccctcgtctacaggatgatcccgtccaccagtcagaccttcctggtgaatgacctggcggcgggccgtgcctacgacttgtgcgtgctggcggtctacgacgacggggccacagcgctgccggcaacgcgagtggtgggctgtgtacagttcaccaccgctggggatccggcgccctgccgcccgctgagggcccatttcttgggcggcaccatgatcatcgccatcgggggcgtcatcgtcgcctcggtcctcgtcttcatcgttctgctcatgatccgctataaggtgtatggcgacggggacagccgccgcgtcaagggctccaggtcgctcccgcgggtcagccacgtgtgctcgcagaccaacggcgcaggcacaggcgcggcacaggccccggccctgccggcccaggaccactacgaggcgctgcgcgaggtggagtcccaggctgcccccgccgtcgccgtcgaggccaaggccatggaggccgagacggcatccgcggagccggaggtggtccttggacgttctctgggcggctcggccacctcgctgtgcctgctgccatccgaggaaacttccggggaggagtctcgggccgcggtgggccctcgaaggagccgatccggcgccctggagccaccaacctcggcgccccctactctagctctagttcctgggggagccgcggcccggccgaggccgcagcagcgctattcgttcgacggggactacggggcactattccagagccacagttacccgcgccgcgcccggcggacaaagcgccaccggtccacgccgcacctggacggggctggagggggcgcggccggggaggatggagacctggggctgggctccgccagggcgtgcctggctttcaccagcaccgagtggatgctggagagtaccgtgtgagcggcgggcgggcgccgggacgcctgggtgccgcagaccaaacgcccagccgcacggacgctggggcgggactgggagaaagcgcagcgccaagacattggaccagagtggagacgcgcccttgtccccgggagggggcggggcagcctcgggctgcggctcgaggccacgcccccgtgcccagggcggggttcggggaccggctgccggcctcccttcccctatggactcctcgacccccctcctacccctcccctcgcgcgctcgcggacctcgctggagccggtgccttacacagcgaagcgcggggaggggcagggccccctgacactgcagcactgagacacgagccccctcccccagcccgtcacccggggccggggcgaggggcccatttcttgtatctggctggactagatcctattctgtcccgcggcggcctccaaagcctcccaccccaccccacgcacattcctggtccggtcgggtctggcttggggtccccctttctctgtttccctcgtttgtctctatcccgccctcttgtcgtctctctgtagtgcctgtctttccctatttgcctctcctttctctctgtcctgtcgtctcttgtccctcggccctccctggttttgtctagtctccctgtctctcctgatttcttctctttactcattctcccgggcaggtcccactggaaggaccagactctcccaaataaatccccacacgaacaaaatccaaaaccaaatccccctccctaccggagccgggaccctccgccgcagcagaattaaacttttttctgtgtctgaggccctgctgacctgtgtgtgtgtctgtatgtgtgtccgcgtgtagtgtgtgtgtgtgtgtgtgtgtgtgtgtgtgtgtgtgtgtgtgtgttgggggagggtgacctagattgcagcataaggactctaagtgagactgaaggaagatgggaagatgactaactggggccggaggagactggcagacaggcttttatcctctgagagacttagaggtggggaataatcacaaaaataaaatgatcataatagct

SEQ ID NO: 2959 - protein, 700 aa, Homo sapiens
LTDNFIAAVRRRDFANMTSLVHLTLSRNTIGQVAAGAFADLRALRALHLDSNRLAEVRGDQLRGLGNLRHLILGNNQIRRVESAAFDAFLSTVEDLDLSYNNLEALPWEAVGQMVNLNTLTLDHNLIDHIAEGTFVQLHKLVRLDMTSNRLHKLPPDGLFLRSQGTGPKPPTPLTVSFGGNPLHCNCELLWLRRLTREDDLETCATPEHLTDRYFWSIPEEEFLCEPPLITRQAGGRALVVEGQAVSLRCRAVGDPEPVVHWVAPDGRLLGNSSRTRVRGDGTLDVTITTLRDSGTFTCIASNAAGEATAPVEVCVVPLPLMAPPPAAPPPLTEPGSSDIATPGRPGANDSAAERRLVAAELTSNSVLIRWPAQRPVPGIRMYQVQYNSSVDDSLVYRMIPSTSQTFLVNDLAAGRAYDLCVLAVYDDGATALPATRVVGCVQFTTAGDPAPCRPLRAHFLGGTMIIAIGGVIVASVLVFIVLLMIRYKVYGDGDSRRVKGSRSLPRVSHVCSQTNGAGTGAAQAPALPAQDHYEALREVESQAAPAVAVEAKAMEAETASAEPEVVLGRSLGGSATSLCLLPSEETSGEESRAAVGPRRSRSGALEPPTSAPPTLALVPGGAAARPRPQQRYSFDGDYGALFQSHSYPRRARRTKRHRSTPHLDGAGGGAAGEDGDLGLGSARACLAFTSTEWMLESTV

SEQ ID NO: 2960 - DNA, 402 bp, Homo sapiens
tttttttttttttttttcagtaaaaacaagtaacaagacagttctctaaactcagaaagtgtctgggttctaataaaattttcatatatcagggaaaatctgatttcctgatggctgcatttctataaaagaatagctaacaaaaatcaaagtaatgtttggacagaaaattaggctgaatagtactttaaacattgcaacaaaaaaaggcacgttctacttaatccaggatataaatatttttgattaatacattatttatactaaattcccaaaaggcaaaactaaaatctacattattattaccttatctttggcctcaggcagtgtgatttctctaggttctaaaaatgcaatttctcgaaaaggtgggacacatcttactatatctggtacataatg

SEQ ID NO: 2961 - DNA, 4105 bp, Homo sapiens
agtttgttacagaaagctgcatcatttacaagtaataattttggataacaatccattgcaagtaccaccagcacagatatgtttaaagggtaaggtgcacatatttaagtacttaaatattcaagcatgttgcagaatggataagaaaccagattccctggatcttccatcattgagtaaacgaatgccctcacagcctctcacagacagtatggaagatttttatccaaataaaaatcatggccctgactctggaattggaagtgataatggagagaaacgattatccacaacagaaccatcagatgatgacacagtcagccttcattctcaagtctcagaatcaaatagagagcagacatcaagaaatgacagtcacataataggaagtaagactgattctcagaaagaccaggaggtatatgattttgttgaccccaacacagaagatgtagcagttcctgaacagggaaatgcacatattggatcatttgtatcattctttaagggaaaagaaaaatgttctgaaaaatctcggaaaaatgaagaattaggagatgaaaaaagacttgagaaagaacagttactggcagaggaagaggatgatgatttgaaggaagtaactgatttgaggaaaatagctgctcagttattgcagcaagaacagaagaacaggattcttaatcattcaacttctgtgatgagaaacaagccaaaacaaactgtggaatgtgaaaagagtgtctcagcagatgaagttaattcaccattatcacccctcacctggcagcccttagaaaatcagaaggatcaaatagatgaacaaccgtggccagaatctcaccctataatctggcagagtgaagaaaggaggcggagcaaacagattagaaaagaatatttcaagtataaatcaatgaggaagagttcaagtggcaatgaaaatgatgagcaagacagtgataatgctaatatgtcaacacaatctccagtatcatctgaggaatatgacagaactgatggtttttcacacagtccctttggcttgaagcctagatcagcttttagccgctcatctcgccaagaatatggggcagcagatccaggatttacaatgagaagaaagatggaacatttacgggaagagcgagagcaaatacgacaacttcgcaacaatcttgaatccaggttaaaagtaattttgcctgatgacattggagctgcactgatggatggggttgttctttgccatttagccaatcatataaggccacgttctgttgctagtattcatgtaccatcaccagcagtgcccaaactgagcatggcaaaatgtcgaagaaatgtagaaaattttcttgatgcttgtaaaaagttgggtgtctcacaggaaagactttgtttgcctcatcatattttggaagaacgaggacttgtgaaagttggtgtcacagttcaggcgctccttgaattaccaacaaccaaggcatctcagctttctgtggcttaatataacattttaaaattctaagtgtatagtttcatttatttgaagtgatttcaaatatttcaaattcatgaataagaatattccgtcaaaaatagtttgccttaggtcacgccttaggattttaaaaaaattacattgaaacatcaaacttaaacattgaattgcccgaacttctttgggggaaaactggattaacttaataagagtatttgataaactcaaattctctttttactaagtcagttgataatcttgattatttttcagaaagcagactgatactaaatttaaaatgtagtttcaatttaataatcacattaggtttaatttttttacatcatagcatattagtaaacatctggataaaggtaattttttttagcaatttagagcaattctatatttgagttatttaatacacttctaattctagtttatacacaatttcttcaatctttggtcttagttttctagaaaaaaggagtagaaaaaacaattctggctttatattaaattcttttagtattataggttggtgccaaaatattttcagttgtactgtagattgtttacatgtgaagtgcctgtgtaattgatgactcttacatagtcttaagcatttttgcaattttttaaatgtattaatagagtcaatggaactttaaaatattttagtagattttgtaaagtcagtaatatgtgaggatttaaatgagcctcacattgtgacatttgtggttttttagttagtccattgcagtttcccttaaattggttatttcatgttgtcaaaaataccaatgttaatatgattaatttatgctatttaattttgtgaaacttaatcatcttttaaaatgtattatttgaagagtattttatttctgtattgaaaatgttacacaaagcagtaaagtttttgagaactagtgaagtactaattatcaaggacattttgataaaactgccaaagtttgggtttatatcttccctttgagcagcattctatcagtgctgcctttagctatactcagagagcagcagttgaggaataggtttttactcaaaatctggccatttgtgaatcctgtaaaccttgtgatcttcaattactttgatgttaaattaaacacagactcttctataaatattttcatgagatactgtgttacacaaagtccttgttttaacttaggtatgggtaaatttacattggtggtattgcaggaatttttcaaaaacattactgtaatgaataactgagtttcctatagaagaacctgaataattacttttgtagtaaccaagcaagcatcatatcttaagtatgtgatcatttgcacttgttacctcttaatatggatgcaacttattaaaaatgttggcctgggtatttcaaagggtatatataaaaggtaaaaaactagtgtgccaaatggtataggaacaactgtactttttttgatcagttggcatgaagccatagaattaaattttggctttagaatacagatgtgttcattacattccccaagggtcaaattggagcttttaaagaattaaagcttctatgagtatatggtttaagaattaaattattagtaatttattattttaaatatttgacctcattagttgttaattttttagttggataaaaaaaaaaactcgctgacataatctccctagtgaaaacttgggtaatatatgtaagaaatggcaaataaataccttagttaatgactttttatgtagaaatttgacagcattacaaattaagtgaccattaaaaacacagcaatcattcatactgctttcataggtgttatgatagtctctgattaatcaatctagtatgaattattttacaagtgttgtcctgtttcatatctttgaagtagtagtgaaattgtaggccattttcttataacatttcagttacttttcagttaattattcctttaaaaagaaaatacagcagaacctcactgtagcattctttactgcagagcaaaattcaatttaagatgggcttctctgaggtccacatcatggcagttcatttactcttgtgccaaatggcaacaccacgtctaaagcagtttcacagcatggtcccctacaatgttataccaaggctctgatgtatttcttttagtagtttctaagtgtaaaatttattctaaatgtttttatggctattatctatttcatcagttattgaattaagaatgattttcattacttgagtgggatttgtgatttaatgacagttgaataatcaaaaatattttattaggcccccaaaatttaatagatatctatttctgttacattttattactgtatggcacaagaaagaagtgacattgggtatgttagaaatgaaataaggagtaaaaatgcattaccatttgtttaataattatctttacagaatgctagtttaatgacttttttaactgaattttttgaataaatcagaaatgtttgtattggtcacagatctatcataattgcttttctgatgcatttaaaaataaatggaacacttaaatgtatattaccgatgcaaactgtggataaagttgaaag

SEQ ID NO: 2962 - protein, 502 aa, Homo sapiens
VCYRKLHHLQVIILDNNPLQVPPAQICLKGKVHIFKYLNIQACCRMDKKPDSLDLPSLSKRMPSQPLTDSMEDFYPNKNHGPDSGIGSDNGEKRLSTTEPSDDDTVSLHSQVSESNREQTSRNDSHIIGSKTDSQKDQEVYDFVDPNTEDVAVPEQGNAHIGSFVSFFKGKEKCSEKSRKNEELGDEKRLEKEQLLAEEEDDDLKEVTDLRKIAAQLLQQEQKNRILNHSTSVMRNKPKQTVECEKSVSADEVNSPLSPLTWQPLENQKDQIDEQPWPESHPIIWQSEERRRSKQIRKEYFKYKSMRKSSSGNENDEQDSDNANMSTQSPVSSEEYDRTDGFSHSPFGLKPRSAFSRSSRQEYGAADPGFTMRRKMEHLREEREQIRQLRNNLESRLKVILPDDIGAALMDGVVLCHLANHIRPRSVASIHVPSPAVPKLSMAKCRRNVENFLDACKKLGVSQERLCLPHHILEERGLVKVGVTVQALLELPTTKASQLSVA

SEQ ID NO: 2963 - DNA, 4594 bp, Homo sapiens
aattgtcagcagagaagccaaacttcagtttgcctatcttgaaaattttaaaaccaaaatgaggagtacagtgtctgtgcgtgaaggccagggagttgtgctgctctgcggccccccaccacactctggagaactgtcatatgcttggatcttcaatgaatacccatcgtttgttgaagaagatagtcggagatttgtctcccaggagacagggcacctctacatatctaaggtggagccgtctgatgtgggaaattacacatgtgtggtgacaagtatggtgacaaatgcccgagtgctgggctctccaactcctttggtgctacgttctgatggtgtgatgggtgaatatgaacctaaaatagaagttcagtttccagaaactcttccagcagctaaaggttcgactgtgaaattggaatgttttgcccttggaaatcccatacctcagattaattggagaagaagtgatgggctgccattttccagcaaaattaaattaaggaagttcagtggtgtgcttgaaatccccaacttccaacaggaagatgcaggttcctatgaatgcattgctgagaattcacgaggaaaaaatgttgccagagggcgtctcacttactatgcaaagccccattgggttcaactcataaaggatgtggaaatagccgtggaggacagtctttattgggaatgcagggcaagcggcaagcccaagccttcctaccgatggctgaaaaatggagcagccctggtgctagaggagagaacacagatagaaaatggtgcccttacaatatcaaacctaagtgtgactgattctggcatgttccagtgcatagcagaaaacaaacatggccttgtttattccagtgctgagctcaaagttgttgcttctgctccagatttttcaaagaatccaatgaagaagttggttcaggtgcaggtgggcagcctggtcagcttggattgtaaacccagagcctccccaagggcactctcttcctggaagaagggggatgtgagcgtgcaggagcatgaaagaatttctttgttaaacgatggaggactcaaaatagccaatgtgactaaagctgatgctggaacttacacctgcatggcagaaaaccagtttgggaaagcaaatggcacaacacatttggttgttacggaaccaacaagaataactttggcaccatctaacatggatgtttctgttggtgaaagcgtcatattgccctgccaggtacaacatgacccgctgttagacatcatctttacctggtatttcaatggggcccttgcagattttaagaaagatggatctcactttgagaaagttggtgggagttcatctggtgatttaatgatcagaaacattcagctgaaacacagtgggaaatatgtttgtatggtgcaaacgggggtggacagtgtttcatctgctgctgacctcatagtaagaggttcacctggaccaccagaaaatgtgaaggtagatgaaattacagacacaacagcccaactctcttggaaagaaggtaaagacaaccatagcccagttatatcctattctatccaggctcggacacctttctccgtgggttggcaaaccgtcacaacagtgcctgaggtcatcgatgggaagacgcacacagccactgtagttgagttaaacccatgggtggaatatgaatttcgggttgtagccagtaacaaaattggaggtggagaaccaagtttaccctcagaaaaagtaagaactgaagaggcagttccagaagtgcctccttctgaagtcaatggaggaggcggaagccggtctgaacttgtgataacctgggatccagtccctgaagaactacagaatggtgaaggttttgggtatgttgttgctttccgccctcttggggttaccacctggatccagacagtggtgacatcccctgacaccccaagatatgtctttaggaatgaaagcatcgtgccatattcaccatatgaagttaaagtgggtgtttataataacaaaggtgaaggaccatttagcccagtgacaacagtgttctctgcagaagaagagcctacagtggccccatctcaagtctctgccaatagcctatcttcctcagaaattgaggtttcatggaacaccattccttggaagttgagcaatggacatttactgggctatgaggtgcggtactggaatgggggtggaaaggaggaatcatccagtaagatgaaagtggcaggaaatgagacatcagccagactacggggcctgaagagcaacctggcctattacacggctgtccgggcttacaacagtgccggcgctgggccttttagcgccacagttaatgtaaccaccaagaaaacgcctcccagtcagccaccaggaaatgttgtttggaatgccacagacactaaagtgttacttaattgggagcaagttaaagccatggagaatgagtcagaagtaacaggatataaagttttctataggactagcagtcaaaataacgtacaagtactgaacacaaataaaacttcagctgaacttgtgctgcccattaaagaggactacattattgaagtcaaggccacaacagatggaggggatgggaccagtagtgaacagatcaggattccacgaataaccagtatggatgcaagaggatccacttcagccatctcgaatgtccaccctatgtcaagttatatgcctatagtactgttcttaattgtatatgtcctgtggtgatattaactcctttttattatttattggaaagttatttggttaccaaaaaaagtgctttcatgaaatgcagtgattatgcatgtttttttcaactcttatttttaactttctacttcattataggtaaatatgaatataattaaaaaaacagtaaatccttttaggggaatctgaaatgccttaatattaacttgataaaccaaaggaatttacatattacatacttcagacttttgatataaatgttcttaaactatgagtttaagcactgcctatggataaagactcacacactctcacatgtacacacacacgcatgagaatttctttttacattgaaaaactctttcatttaattcaaatgctattttcccattataatagcattatttggaagacttaaccagtatcaatttgaaatgctgatttaagtccccaaggatgaaaaatacattttaaaaattattttgttggagaggagtggcatgtgattcaaaagagcattgttggaaaatgctactgtggggcttagaagaatgatgtttggtttggtatgctgctaactagttgtaagactttacaaatcactttgccatctgtacctctcaattattcctctataaaatatggagataataatacctatctgatcagactttgccccatgaattagtttttaaaagataaagactgaagtatgaaagtgcttttgtcaccccaaatgcaattgacccatgcaaaatattagcatgaatttatttaatcacataaaagtcatgaagaccagccagattttcaagcttcattctgtttcattcagttatattccaaaattcaaatgatcacattttattctttctcaaaaaaaaaaagtttttttaaattaaaaaaggaattgtttccttcacagctatgaataagctttcaggttttattaaaacctagaggaaaaaatcaggaatgacctgaatctcaacccaaatattaaacaaaatccacataatccctcatttcaatttccaattccattaagggaccctctctttttggatggcagagatggttttttaatgaaatcccaccatctatctgagtgagtctggcaggctttttagttcctgagttaaatttgtaatagaaccaaggcaatgctgctgactttgatatgtatgactcagtctttcaatatgtggttttcaaaaaattgttgaagacgtgacttcatagcaatatatagagaataaattaaaatcagcagattgagttttcaacattgcaaaatcagttttttacctctttcctaccaatttcacattttgcagaaacttgttcacatttccaacaatatcagaattagaaaacagttcagataacaagaaagattaaaaattagggaaattctgatatcaccataaagcactattttacatttagagattacatttaagataaagtcatcatacacaaaaacaataaatatttataactttctctataaggtccgcatatactgtatatattgaaacaatctgaatgactagtagatttcatatgaccattgttatttccactttctccaatacttgtattttatgctacatgtaatgaagttggacctttttattatttagtaattcctatatgttcctatacttttcattttcaagatgattgctctattgtttcatgttgtttctagcaatatatctccatgagatatgcactttgtttcatattgaaaagtataaaatttatctttcaattcctgtgtgtgtatcctatggttatctgtatgtattattttctattctaataaaatttataacaagc

SEQ ID NO: 2964 - protein, 920 aa, Homo sapiens
IVSREAKLQFAYLENFKTKMRSTVSVREGQGVVLLCGPPPHSGELSYAWIFNEYPSFVEEDSRRFVSQETGHLYISKVEPSDVGNYTCVVTSMVTNARVLGSPTPLVLRSDGVMGEYEPKIEVQFPETLPAAKGSTVKLECFALGNPIPQINWRRSDGLPFSSKIKLRKFSGVLEIPNFQQEDAGSYECIAENSRGKNVARGRLTYYAKPHWVQLIKDVEIAVEDSLYWECRASGKPKPSYRWLKNGAALVLEERTQIENGALTISNLSVTDSGMFQCIAENKHGLVYSSAELKVVASAPDFSKNPMKKLVQVQVGSLVSLDCKPRASPRALSSWKKGDVSVQEHERISLLNDGGLKIANVTKADAGTYTCMAENQFGKANGTTHLVVTEPTRITLAPSNMDVSVGESVILPCQVQHDPLLDIIFTWYFNGALADFKKDGSHFEKVGGSSSGDLMIRNIQLKHSGKYVCMVQTGVDSVSSAADLIVRGSPGPPENVKVDEITDTTAQLSWKEGKDNHSPVISYSIQARTPFSVGWQTVTTVPEVIDGKTHTATVVELNPWVEYEFRVVASNKIGGGEPSLPSEKVRTEEAVPEVPPSEVNGGGGSRSELVITWDPVPEELQNGEGFGYVVAFRPLGVTTWIQTVVTSPDTPRYVFRNESIVPYSPYEVKVGVYNNKGEGPFSPVTTVFSAEEEPTVAPSQVSANSLSSSEIEVSWNTIPWKLSNGHLLGYEVRYWNGGGKEESSSKMKVAGNETSARLRGLKSNLAYYTAVRAYNSAGAGPFSATVNVTTKKTPPSQPPGNVVWNATDTKVLLNWEQVKAMENESEVTGYKVFYRTSSQNNVQVLNTNKTSAELVLPIKEDYIIEVKATTDGGDGTSSEQIRIPRITSMDARGSTSAISNVHPMSSYMPIVLFLIVYVLW

SEQ ID NO: 2965 - DNA, 731 bp, Homo sapiens
aaaatgtcttttgtaaagtttcttacacagctttctttttttcccttttttacaggcaacttcgggctcgctggagaacaactaaggggcaccaaaccctctgaggttttactttaaggttcgctgtatgtttgccttggacaaaaaggctacctaccacgtgctatccagtaatatacttaaataagccaatacttagatctactgtaaggcagatgctaattataaggcattaagtaagcaaatagtgccctcagctactgcagaagaaaagtcccactgaggaaaagaaagtcttgtgatttttaaaggcaagttttcaagtgctctcatagttctatcctctaattccattaaatccatactaggagcgtcagtgagggttttcatagcttttggaaatactttggtctctgaactgtaattagcaagaagtaaaaacagaaacgtcaaacgtcaaatgtttgctttgttacctggaggactaaatgtagatgtctttagtatactttgtatgttcttaatattggaagataattttgtgaatctgtagattttattttttcagtcttaccttacaaatttcttttctatgaataatagaggaacttacggcactctgccatttgttaatgaaaggaagtgcagaggatttagaaaagtacatgatccccagaccacaacaaaccaaaacataaactcatgtctgtgtcccatggtcatagtcaaag

SEQ ID NO: 2966 - protein, 200 aa, Homo sapiens
  misc_feature (164)..(164): Xaa can be any naturally occurring amino acid
MEQTEVLKPRTLADLIRILHQLFAGDEVNVEEVQAIMEAYESDPTEWAMYAKFDQYRYTRNLVDQGNGKFNLMILCWGEGHGSSIHDHTNSHCFLKMLQGNLKETLFAWPDKKSNEMVKKSERVLRENQCAYINDSIGLHRVENISHTEPAVSLHLYSPPFDTXHAFDQRTGHKNKVTMTFHSKFGIRTPNATSGSLENN

SEQ ID NO: 2967 - DNA, 499 bp, Homo sapiens
aggcgacactatagaagagctatgacgtcgcatgcacgcgtacgtaagcttggatcctctagagcggccgctctactactactaaattcgcggacgcgtcgactgccactggaaatgttgaaatgaaaaatattcagccgttggtctttgaaatttcctgtgatgtgtttcaatctagatgcaaagaacatggaaaaatcaaagtgctcgagtggtttaaatatgttttgggtattcctgtttatagactataatacttttccaattaaaatcctcagttgtcacgcagaagaaggttaagctgtatttgattgccagttttactgaaaatgcttagtattttacagtatcaccaaatatattttgtttagccaaggtcgacgcggccgcgaatttagtagtagtagtcgacccgggaattccggaccggtacctgcaggcgtaccagctttccctatagtgagtcgtattagagcttggcgtaatcatggtcatagct

SEQ ID NO: 2968 - DNA, 385 bp, Homo sapiens
cagagacgtacaacaacaacaaacaaaaaaccaccctaactgtgacttgaccaccacgttacgtcttttgttgtatttctctcgaggttggtctgctgtcctgtgtagctggcaccagctgcatgtggcagtttaaatgtaaatgcattcaaattaaataaacggggacatttgtgctcctcagctgcacaggccacattgcaggtgctcggaaggctgtcgcattgcacctgttcagaaacgttcctgttgttggagaaagttccatcggacaacgtgggccaagggcagtgggcgtgtgtattttccttgactttggcctcaggacctttggcaggtattatagtagaacaatgaagtgcttgtgcggtgcttaaagacgcat

SEQ ID NO: 2969 - DNA, 379 bp, Homo sapiens
aacaggaggtgccaactcagcacgctacttggcatgcagtaagcgctcaataatagcttttattatcatgttcggctcagaggcagggaggagtggaacgrcatgggagggctgcgggaggcacggcaggggggtcaggggcaagtsgcaggagggcggatggggggcagcggyysggcacsggggcagggcgcgctgacctgtcctggggcccgggttgggggcagaaatgagcctgcccacgctgtcccgccacggcaggcgccacgcatcctcgacacagccgccatggcaggccttcgggctccgtctccgggacaggcggtgcagggcaaattggtatgcagcgtccgccccgtgggccccgggagagctkccc

SEQ ID NO: 2970 - DNA, 394 bp, Homo sapiens
tttttttttttttttttttttttttttttttttttttttttttttttgctgcaaagagcacctttattcacagcaaaaggacgtcaccatagcaacaacacttcaattccctgagaacttttcccttatcattcgctttcctagctatgtctttgcaaagagaaaaacaacaagaaacacagcccacgggacaggtgagccatgctgggcccagcggggaaggtggcagctacacaggaggagggcagggatgggaggttccagatgctggaacgcataaatacacagagtgccagacagtcccacttcagctttaaaaacaaagatgaccccgagtttggcttctgttttttctgatccacagaaaagataagataaaataagaccctccccc

SEQ ID NO: 2971 - DNA, 407 bp, Homo sapiens
tttttttttttttttttactttttgtagagaagggatctagctatgttgcccaggctgttctcaagtagtcctggcctcaaatgatccctccaccttggcttcccagagcactgggattacagtcatgagccaccctcctggctcctttttttttttatttttaataacagaagggtatttcttttgaatgtgaaattttaccacatggtatgaattagtccaagggtttttatactaaatttacataatatacacttttcaagtaagtacaaagaggtataaacactgcttatgaattgaatgttaaaaaataaatctctatgcattacttttgtctttccccataatctcacgtatacacataaaacaaaaaacaaggagacccagttatagttgtggtatctgc

SEQ ID NO: 2972 - DNA, 424 bp, Homo sapiens
tttttttttttttttaacagagttgaaatgtttggatttattgtagcattactatcaggaatacacattgattatggtattgctatcaagaatacatataaatacatgcctgaagctataagtgagataagagatattccagggttagtcaaaagttaatctttgagttccagaagtctggatgaaaatgagatgagactgcaaattttgttgttaggcagtcaccatttatgacccttggcagggagggcaggaatggtggttatattgtgaactgaatgaaaactgagaactaatcagcatcatgtgggcctgaagcatttattgctaccagtgattagttgtaagaccttcggactatgtaactgtaatgaactataatgaacatgagaaaacaactcttttttttttttttttttttttt

SEQ ID NO: 2973 - DNA, 397 bp, Homo sapiens
ttaaccctcactaatgctgggtgaccaaagtctaaatagggctcagtatcccccatcgcttatctctgcctccttcctcctccttcccagtctatcatcaaccttgagtattctacacaatgtgaattcgagtgcctgattaattgaggtggcaacatagtttgagacgagggcagagaacaggaagatacatagctagaagcgacgggtacaaaaagcaatgtgtacaagaagactttcagcaagtatacagagagttcacctctactctgccctcctcatagtcataatgtagcaagtaaagaatgagaatggattctgtacaatacactagaaaccaacataatgtatttctttaaaacctgtgtgaaaaaaaaagatatcactcagcataatg

SEQ ID NO: 2974 - DNA, 483 bp, Homo sapiens
ttttaaaaactaacccaaatatatattttgctcagatacacctgtaaaatgtctagattctccattctttccttatttaaaatagagtagtttgtttaagaagtggattcagttagagatactttcacagaaagatgaccaaaatctgccttatctggaaacacaagttaaagtactgtctatatcccttatgaatcaacaggcagagatttttaaacatctgataaaatactttctgacatacattttcttagaattacaaacacagttctgcatctgttacatgtgcaaacagagacagccaggctttgaatgctctaggtaagagattgtattaacatatattttgtctttcagccattcaaattcaacttaatttcagtgaacagagaagaatatgggttgaaatgtacacttcaggatacagatttgcagaataaaataaaatagtgcaataccaatctcaggataaacactcttctg

SEQ ID NO: 2975 - DNA, 353 bp, Homo sapiens
tttttttttttttttttttttttttttggaaaaaggctttttttattttttattatttttgttcagccctgcttaattaagctaaaaaaggaccccactttttttgacactgggaacccaaaggaggtgaaagaagagttcaaatagcaactcaccatgatcaccacccctgaactgccactgttgcttaaaacctcaaattttggaatatttgcgttctacgtcccattttagcatcccaaatttgaaaattcaaaatccaaaatgctttaacaagcatttcctttgagcaacatgtgggctttcaaaatgctggggatttgagatgcttccaaatgaagggacaatccaca

SEQ ID NO: 2976 - DNA, 436 bp, Homo sapiens
ttttttttttttttttttttttttttgctctacagggggcacacggggtgggagcagagcagccagaggatggcggcacccacaaagaacgtcaggatcaccttccagccggggcggaacgggcggtccgcggccttggtcatggacgccagcacaggaaggccccccacactgatccggagggagtgcatagactcattccattccgggtgctcagacagctgcacgggcatcagcgtgacagacaggcgggactttcattcggcaagacgtgaagtctttccacagcaaaattactccatctcccctgtcccagctggcaacgtgggaagctgagtgaggaaggaagttccatgcaggctggtgctctgtggtccctctgacgttagagtattgtatacagttatcggtttgtttgtttctgtctccacctctg

SEQ ID NO: 2977 - DNA, 314 bp, Homo sapiens
  misc_feature (285)..(286): n is a, c, g, or t
  misc_feature (295)..(295): n is a, c, g, or t
  misc_feature (299)..(299): n is a, c, g, or t
tttaactaaagatcaggtaactctttccaaaaagaaactcagtctaagggggtagaactgttctgattgaacaagtagctgtgtcaatcatttcaaccctagactcctggcgccgagaatttgggggcggcgcaacccgggggcggggcaagcggaggcgaggctcccagtgcgtggcttttctgtctccgccccctgaattttgcattctgcgtttccagggcccctcatgcacttaatccacacccacttgtgatctggtttaaaatgggggaggcggggggnngggaattgnggangggaggaattgcggg

SEQ ID NO: 2978 - DNA, 625 bp, Homo sapiens
  misc_feature (353)..(353): n is a, c, g, or t
  misc_feature (442)..(442): n is a, c, g, or t
gcccgccggagggtgtttatcgcggctagagagatgtcgctgctgcggtcgctgcgcgtgtttctggtcgcgcggaccgggagctacccggctgggtctcttctgcgtcagtcgccccagccaaggcacacattttatgctgggccccgtctgtctgcctcggcctccagcaaggagctcctcatgaagctgcggcggaaaacaggctactcctttgtaaattgcaagaaagctctggagacttgtggcggggacctcaaacaggcagagatctggctccacaaggaggcccagaaggagggctggagcaaagctgccaagctccaagggaggaagaccaaagaaggcctgantgggctgttgcaggaaggaaacacaactgtattagtagaggtaaactgtgagacagattctgtttctagaaatttaaaatttcaactgntggtccagcaagtagcccttggaaccatgatgcattgtcagaccctaaaggatcaaccctctgcatacagtaaaggtttcttgaattcctctgagctttctggacttccagctgggcctgacagagaaggctcactcaaggatcagttggctttagcaatgggaaaactgggagaaaacatga

SEQ ID NO: 2979 - DNA, 385 bp, Homo sapiens
tttttttttttgggttagttatgataaacttttatttgtatattctttgatgtatagtagaaagaactctggaccaggtgtcgggggacctcagttttagtcccagcttgtatcactaaatagtagtgtgtccttgggcagttcaagaaacccctctggacttcagttcctcaccccaaaagaagttttgctgacatggtgtcactgtgctgaagaggctgtttgatgccatagtccctcctttttttttcagatagaacttgtaccctctgttgtaaatactgcttgcagccttaaatgactctgttggtctcggtggctggtagtgacctgcggagattaaccatttaaaaaccagagacttcttgctgtcctcctggagaaa

SEQ ID NO: 2980 - DNA, 1468 bp, Homo sapiens
gacaccgtggggggtaggtttgatgccactcaggcatttgtcggggagctcagccagttcaacatatgggaccgcgtccttcgcgcacaagaaattgtcaacatcgccaactgctccacaaacatgccgggcaacatcatcccgtgggtggacaataacgtcgatgtgttcggaggggcctccaagtggcccgtggagacgtgtgaggaggctctccttgacttgtagccgccttctcctctgtccaggaggccgggatcaggctgttgccatggaagttcagggccatagactgccccacttaaactcttgtcagtctgggctcagggttcccagagctcattccccaggaatctctaagaccagggctggggcagtgtctgtcactggcttgtttgttccctaccaatattctgttgctgtttgaagtagtgccagggtcccctgggaagatgcccccaagacacctgccccaagtgggtggatatctgccttcctgctgcaagtggaggcaggtccagcagcccctcttcagagcccctgtaaatgctatcgcagcctgagtcctgccgccttccagttccttggtgtcccgtgcaccccttctgtctgtcccctttcatgctgtgcagccgtcccgctggagtggccatgtcccttgtgcattgagtgcatccccgctggtgactaagctcgcagcaagcgctacccccgatctgcaaaagggcctctccctttgtgttctatacattgtgaatcttcccgtctgaagaacgcccagcctgcccagacaaagccccgccttccccaaagcagaggggctgtctgtgtctccagaaaggggacatcggggggggaggggggctcagaaaggagaagggctgtgatctccggtcccttcccccatcatccttccttagactgatgctttgactgaatcatcactagctatggcattaaaaggcctctcttctcatctggtgccaaaggttccgttgcagctttttacaaccatccggtgtggtttggaggatttgttttttttttttcccaacagaaaagaacagccattagaagaaggctcccattttctgatgttccgccccactgtgaagagtgtgctcgttttaaattcatgttgattcttgtaagcactggactgtcttcatcaagtatttcccctacagaactcctcaagaaaaacagagatcatttggctagagattgtctgagtgactccaagctactcactgtattggacgggagtagtaatttattttaaagataaagtgactaagtggggaaatttataaagctaaatattatatattttatttttcatacatgtttgaagtgcaaatctgtggatattccatttgtaggaccaagtcgacatgcccatcctgacattgtatgctacgagaactcttctgatgatggaatttcgattaaagtgcactgaaagatg

SEQ ID NO: 2981 - protein, 430 aa, Homo sapiens [sequence omitted]

SEQ ID NO: 2982 - DNA, 329 bp, Homo sapiens
  misc_feature (108)..(108): n is a, c, g, or t
  misc_feature (299)..(299): n is a, c, g, or t
gatccattagcgtataattgaatatcaaagggaattttaccttaaacatatatcaagtctatactcagctaatcgttttgtctaaacacagccttgttagcatttgantttacaaatattcatttgcttatttgcagtgttccttttgcttttagaataaatcataaatatttccccaatactgtcaagatacttcctcaactttgtccctgaaccatcagctttctttagggtccgggtatcctttacacttcaatggggttttcttgtgtgtgtcattgggggtaactccatttganctcagcatttctatctcaagagatggctct

SEQ ID NO: 2983 - DNA, 1985 bp, Homo sapiens
cgccgagctttcggcacctctgccgggtggtaccgagccttcccggcgccccctcctctcctcccaccggcctgcccttccccgcgggactatcgcccccacgtttccctcagcccttttctctcccggccgagccgcggcggcagcagcagcagcagcagcagcaggaggaggagcccggtggcggcggtggccggggagcccatggcgtacagtcaaggaggcggcaaaaaaaaagtctgctactactacgacggtgatattggaaattattattatggacagggtcatcccatgaagcctcatagaatccgcatgacccataacttgctgttaaattatggcttatacagaaaaatggaaatatataggccccataaagccactgccgaagaaatgacaaaatatcacagtgatgagtatatcaaatttctacggtcaataagaccagataacatgtctgagtatagtaagcagatgcatatatttaatgttggagaagattgtccagcgtttgatggactctttgagttttgtcagctctcaactggcggttcagttgctggagctgtgaagttaaaccgacaacagactgatatggctgttaattgggctggaggattacatcatgctaagaaatacgaagcatcaggattctgttacgttaatgatattgtgcttgccatccttgaattactaaagtatcatcagagagtcttatatattgatatagatattcatcatggtgatggtgttgaagaagctttttatacaacagatcgtgtaatgacggtatcattccataaatatggggaatactttcctggcacaggagacttgagggatattggtgctggaaaaggcaaatactatgctgtcaattttccaatgtgtgatggtatagatgatgagtcatatgggcagatatttaagcctattatctcaaaggtgatggagatgtatcaacctagtgctgtggtattacagtgtggtgcagactcattatctggtgatagactgggttgtttcaatctaacagtcaaaggtcatgctaaatgtgtagaagttgtaaaaacttttaacttaccattactgatgcttggaggaggtggctacacaatccgtaatgttgctcgatgttggacatatgagactgcagttgcccttgattgtgagattcccaatgagttgccatataatgattactttgagtattttggaccagacttcaaactgcatattagtccttcaaacatgacaaaccagaacactccagaatatatggaaaagataaaacagcgtttgtttgaaaatttgcgcatgttacctcatgcacctggtgtccagatgcaagctattccagaagatgctgttcatgaagacagtggagatgaagatggagaagatccagacaagagaatttctattcgagcatcagacaagcggatagcttgtgatgaagaattctcagattctgaggatgaaggagaaggaggtcgaagaaatgtggctgatcataagaaaggagcaaagaaagctagaattgaagaagataagaaagaaacagaggacaaaaaaacagacgttaaggaagaagataaatccaaggacaacagtggtgaaaaaacagataccaaaggaaccaaatcagaacagctcagcaacccctgaatttgacagtctcaccaatttcagaaaatcattaaaaagaaaatattgaaaggaaaatgttttctttttgaagacttctggcttcattttatactactttggcatggactgtatttattttcaaatgggactttttcgtttttgtttttctgggcaagttttattgtgagattttctaattatgaagcaaaatttcttttctccaccatgctttatgtgatagtatttaaaattgatgtgagttattatgtcaaaaaaactgatctattaaagaagtaattggcctttctgagctgaaaaaaaaaaaaaaaaag

SEQ ID NO: 2984 - protein, 488 aa, Homo sapiens
MAYSQGGGKKKVCYYYDGDIGNYYYGQGHPMKPHRIRMTHNLLLNYGLYRKMEIYRPHKATAEEMTKYHSDEYIKFLRSIRPDNMSEYSKQMHIFNVGEDCPAFDGLFEFCQLSTGGSVAGAVKLNRQQTDMAVNWAGGLHHAKKYEASGFCYVNDIVLAILELLKYHQRVLYIDIDIHHGDGVEEAFYTTDRVMTVSFHKYGEYFPGTGDLRDIGAGKGKYYAVNFPMCDGIDDESYGQIFKPIISKVMEMYQPSAVVLQCGADSLSGDRLGCFNLTVKGHAKCVEVVKTFNLPLLMLGGGGYTIRNVARCWTYETAVALDCEIPNELPYNDYFEYFGPDFKLHISPSNMTNQNTPEYMEKIKQRLFENLRMLPHAPGVQMQAIPEDAVHEDSGDEDGEDPDKRISIRASDKRIACDEEFSDSEDEGEGGRRNVADHKKGAKKARIEEDKKETEDKKTDVKEEDKSKDNSGEKTDTKGTKSEQLSNP

SEQ ID NO: 2985 - DNA, 320 bp, Homo sapiens
  misc_feature (134)..(134): n is a, c, g, or t
  misc_feature (137)..(137): n is a, c, g, or t
  misc_feature (147)..(147): n is a, c, g, or t
  misc_feature (152)..(152): n is a, c, g, or t
tttttttttaatttataaagaaaggaagtttatttggctcacagttatggaggctgagaagtccaggagcatggtgccagcatttgtatgaggctaacttaatactactttatttattttttttgtgggggggnggnggaggggggncagcntctcaggattaatcctatacaagttcaccacaacaatccatttgtatgaccagttagctggccacagatgcctgatctctagggttttctagatttctttcagtttgccaagtaccaatcttgggattttcaggcatcaagatcccagatctcaagatttttttaaca

SEQ ID NO: 2986 - DNA, 519 bp, Homo sapiens
tttgtttttaaaaaaatgaactttattttttacagcaattttagtctcacagaagattgagtagaaggtacagaaattgctcacacatctcctttccccacacatgtatagcttccctccttagcaacattcaccaccagagtggtacatttgttataactgatgaaaataaggtttttaaagacactcttcattaagttgaagtaattcctatccctaacttgctgagagtttttaattacaaatgaatattggattttatcaaatgctttttctgcattaattgatataatcatcttctttagcctgccaattcttcctcctcatcctgttaatttgggggcttatgatgatgaggcttgctatgaaaattgagtcttggtggaaagccaggtgtcagtcatgaagtattataaatgagattcaaaggaatggattcataatacatagtacaggaattccctactgtacattaaaattgagtggcagtcagtggaattaagtatgaattcttaataa

SEQ ID NO: 2987 - DNA, 370 bp, Homo sapiens
  misc_feature (11)..(11): n is a, c, g, or t
  misc_feature (13)..(13): n is a, c, g, or t
  misc_feature (278)..(278): n is a, c, g, or t
  misc_feature (308)..(308): n is a, c, g, or t
  misc_feature (347)..(347): n is a, c, g, or t
  misc_feature (355)..(355): n is a, c, g, or t
gcgaccgctcngnttaaggctgtccgctctgggctccgcggcctcggcccgctcgcactccacctccgccccctcggactccctcccctctgcttctactcctcctgctccagtgcggatcgtttcgcaactgcttgccactcgtcccgtgcctggctgttttcccatttcccggccccctcttcttgagtactttaccccctgcatttggggacagggactggaaaaggggcgggtggagcgtccagtggagaagaaggaagcgaggcccgcacganggaggaggatcggcggactgtggggagganaccccacgccaccctttctggtcatctcccctcccgccncgcccttnggaaaattccctcgg

SEQ ID NO: 2988 - DNA, 506 bp, Homo sapiens
tttttgacatatttcccttaattattaatacttgctagaaaatggagtttgacattatttacaattataccaatattcacagaggccaactgtcacaggcattaagggcacaccagggccaggagacctcatttcagacttcccaaatatttttatattttagctattaagatcagttaccagagctcaacttgttcttaacaagcagaatttttatgtccattcaaagagtctcttatacctttctgggcctatttacttgcagagaacagtagaaactgtaaccaggctcttcatatcatgcattcacatgtgatgtccaatcttcatatgctgtccaatttctttaagataaatggagtgactcgcagcagggccacgtagatgagaaagttctgtatggagatcatatcctcgtgcatcttccgtttcatctccgtgaggtccagcttccgggcaaggcccccaatccggaagatcagctgcctcgctctgctctccctaat

SEQ ID NO: 2989 - DNA, 523 bp, Homo sapiens
taaaacaaaacattttatttaatgcagaaattctaaggtacaaaaacattttgtaaatgtcagctgtgatctactttcacctagttacagagttatgtacaaatcaagtcattaacattttcaatgtcaaaaatacagcacgctgttaagagttctgtcagtgctcattatcccactagatcccacaaagggcaaactcaaagatgaaacaaaggcaacgccatcaataaccaccatattccacaggctttctcccctaggacgtactaacagggagtttccacagggaaaaattctcttttaaaaaattaacagtaaaaataggagttacttactatctagatgaacacaattggttttcacaaaagcttttgctgctgtctggactcaccatgcttttttcttgagagaaacataccaaactttttgttgttgttgttgagacggagtttcgctcttgttgcccaggctagagtgcaagactccatctcaaaaaaaaaaaaaatgaaattgttcccagcat

SEQ ID NO: 2990 - DNA, 368 bp, Homo sapiens
  misc_feature (294)..(294): n is a, c, g, or t
  misc_feature (352)..(352): n is a, c, g, or t
tttttttttttttgtagttagcaatgcagttcatttttattagttataaataaagtacaaaaaatccaccaaaagtgaatctaagcatttacacaattcctaatgtctccgccttttcattgatgcactattgctttaatattcataataaatattcttctagctttctgctataaaatagtctatgtaggcaaaatgttgcacagcacaacaggaacagaacagcaggagggattacaaaaaaggacaatcaacactgagggataatcctttcacttgccggggcaaccaaanttaccccctcgagggctgggtgcagctgggctccatgggctgaggaaattaggccgcntccgagggccgggggt

SEQ ID NO: 2991 - DNA, 1259 bp, Homo sapiens
cggggctgcccttcttccctgcggagggagggcctgggcggtcgcgttggcgggagggaggttacctttcccagtctcgctctggccgcctgagccaggaggaagcagcggcgaggtctgcgggaggcatggcgggagctccggacgagcgccggcggggccccgcggcaggggagcagctgcagcagcaacacgtctcttgccaggtcttccccgagcgtctggcccaggggaatccccagcaagggttcttctccagcttcttcacctgcaaccagaagtgccagcttaggctcctgaagacgctggagacaaatccatatgtcaaacttctgcttgatgctatgaaacactcaggttgtgctgttaacaaagatagacacttttcttgcgaagactgtaatggaaatgtcagtggaggttttgatgcttcaacatctcagatagttttgtgccagaataatatccataatcaggcccatatgaacagagtggtcacacacgagcttattcatgcatttgatcattgtcgtgcccatgtcgactggttcaccaacatcagacatttggcgtgctcagaggttcgagctgctaaccttagtggagactgctcacttgtcaatgaaatattcaggttacattttggattaaaacaacaccaccagacttgtgtgcgagacagagccactctttctatcctggctgttaggaatatcagcaaagaagtagctaaaaaggctgttgatgaagtttttgaatcttgtttcaatgaccatgaaccttttggaaggatcccacataacaagacttatgcaagatatgctcatagagactttgaaaaccgtgatcggtattattcaaatatatgagcacaatgacatttttatattacagagcttccatcatcatgaagaaaaaaaaatttggttctcaagtgaacaaacatataaaatgtgaaccatccctaccatccagataaaaccagagaagactgtgattttagcatattatcaggaaaagtaactatggccaaaaatgaaactgctttaaactccaaggcagaaattgtatctttatagctaaccatttagtaaataaatacattacatttttgtattttagtcatttgtttttattacatgtgattattttaaaattggattatgaaacctgtgaagtgtgttttccatgatgttgataggtgaccactgttggtatttacattaaatgtaaagaaatgtgtactgaaaaaaaaaaaa

SEQ ID NO: 2992 - protein, 288 aa, Homo sapiens
GLPFFPAEGGPGRSRWREGGYLSQSRSGRLSQEEAAARSAGGMAGAPDERRRGPAAGEQLQQQHVSCQVFPERLAQGNPQQGFFSSFFTCNQKCQLRLLKTLETNPYVKLLLDAMKHSGCAVNKDRHFSCEDCNGNVSGGFDASTSQIVLCQNNIHNQAHMNRVVTHELIHAFDHCRAHVDWFTNIRHLACSEVRAANLSGDCSLVNEIFRLHFGLKQHHQTCVRDRATLSILAVRNISKEVAKKAVDEVFESCFNDHEPFGRIPHNKTYARYAHRDFENRDRYYSNI

SEQ ID NO: 2993 - DNA, 197 bp, Homo sapiens
  misc_feature (33)..(33): n is a, c, g, or t
  misc_feature (70)..(70): n is a, c, g, or t
cgactgtggagggccctggaattgagtgatgtnggggagatggcacagctcagaaggcaccacccgtggnggcgggaagatgtccccctacaccaactgctatgcccagcgctactaccccatgccagaagagcccttctgcacagaactcaacgctgaggagcaggccctgaaggagaaggagaagggaagcttga

SEQ ID NO: 2994 - DNA, 442 bp, Homo sapiens
tttttttttttttttttttgccatttgcatgtcatctgtattgtcacatgaaatgcacatccaaaacgggtgacttggaaacgacctattaggtcacacggagtccggcccctgggggccaaagcctcatcgatgcccacgggcggtggccagcactttcctcgggctgtggcgtgtgcacccggcctccccagcggagagtcagctcacaccccaggccctttagctctctggcagcagctcccaaaacgcacttgaggaaccaataattccttgggggttaatagctgttccccaagaaaagggttctgtggtcaaataagtttagaaaacatgggttaaagaaggtttagcaagaagcttttctatagggcttgtcagagcctttacggcaataacggcctttgtgaatgtccaacttggggacagagtgtgcagcact

SEQ ID NO: 2995 - DNA, 515 bp, Homo sapiens
  misc_feature (454)..(454): n is a, c, g, or t
  misc_feature (482)..(482): n is a, c, g, or t
gcgttgactttttttttttttttttagtagagatggggtgaaactatgttggtcaggctggtctcaaactcctaacctcaggtaatccaaccacctcggcctcccaaagtgctgggattacaggcgtgagcgaccgcgcctggtcgtgcattgcctagactttattggcccttcttgcacagtcacttctgctctggaagcttcttaaagggtccttatgattttggacgctgacattgacattgtctttatcttcattatcttcatcgcggatcgttgattctccaagttgggtcctctagcagtctccctcagaactcactgcttccaacctgatgtcaactgtgctggggaatgaatgaagggtgccaggaaaacacacacacgcacactggcaaacaacaacacaggcatcccagcttgtgaatcagttgtcctactttcacctgcactntgaattcagcatgtcagatgctggctgngctccagtgtcctctcatacaccatggtgcgtg

SEQ ID NO: 2996 - DNA, 384 bp, Homo sapiens
atgaggcccgtcgctcagctcctggggctcctgctgctctggttcccaggttccagatgcgacatccagatgacccagtctccatcttccgtgtctgcatctgtgggagacagagtcaccgtcacttgtcgggcgagtcagggtattagcagttggttagcctggtatcagcagaaaccagggaaagcccctaaactcctgatccatgctgcatccagtttgcaaagtggggtcccatcaaggttcatcggcagtggatctgggacagatttcactctcaccatcaccagcctgcaggctgaagattttgcaacctactattgtcaacaggctgacagtctcccttttactttcggcggagggaccaaggtggacttcaaacga

SEQ ID NO: 2997 - protein, 115 aa, Homo sapiens
MRPVAQLLGLLLLWFPGSRCDIQMTQSPSSVSASVGDRVTVTCRASQGISSWLAWYQQKPGKAPKLLIHAASSLQSGVPSRFIGSGSGTDFTLTITSLQAEDFATYYCQQADSLP

SEQ ID NO: 2998 - DNA, 1366 bp, Homo sapiens
tagtaataccagctgtaatcccagctacttgggaggctgaggcagaagaatcgcttgaacccgggaggcggaggttgagcaactacactgcgctgcatcggactcgacgcccgctggtgacgcacacgctgcgccggaagtgtgaactgtctgcctccaggctttgtcatggcggctgctgctgcacgctggaaccatgtgtgggtcggcaccgagactgggatcttgaaaggggtaaatcttcagcgaaaacaggcggcgaacctcacggccggaggacagccgcggcgcgaggaggcagtgagcgccctgtgttggggcaccggcggcgagacccagatgctggtgggctgcgcggacaggacggtgaagcacttcagcaccgaggatggcatattccagggtcagagacactgcccgggcggggagggcatgttccgtggcctcgcccaggccgacggcaccctcatcacatgtgtggattctgggattctcagagtctggcatgacaaggacaaggacacatcctctgacccactcctggaactgagagtgggccctggggtgtgtaggatgcgccaagacccagcacacccccatgtggttgccacaggtgggaaagagaatgctttgaagatatgggacctgcagggctctgaggaacctgtgttcagggccaagaacgtgcggaatgactggctggacttgcgggttcccatctgggaccaggacatacagtttctcccaggatcacagaagcttgtcacctgcacagggtaccaccaggtccgtgtttatgatccagcatccccccagcgccggccagtcctagagaccacctatggagagtactcactaacagccatgaccctcactccgggaggcaactcagtgattgtgggaaacactcatgggcagctggcagaaattgaccttcggcaagggcgtctactgggctgtctgaaggggctggcaggcagtgtgcgtgggttgcagtgccacccttcaaagcctctactagcctcctgtggcttggacagagtcttgaggatacacgggacccagaatccacggggtctggagcataaggtttatctcaagtctcaattgaactgcctcctcttgtcaggcagggacaactgggaggatgagccccaagagcctcaagaacccaacaaggtgcccctagaagacacagagacagatgaactttgggcatccttggaggcagctgccaagcggaagctctcgggtttggagcagccccaaggagctctccaaacgagacggagaaagaagaagcggcctgggtccaccagcccctgacgcccctgtgcccactttgtaaataaactgctgaacaccc

SEQ ID NO: 2999 - protein, 385 aa, Homo sapiens
MAAAAARWNHVWVGTETGILKGVNLQRKQAANLTAGGQPRREEAVSALCWGTGGETQMLVGCADRTVKHFSTEDGIFQGQRHCPGGEGMFRGLAQADGTLITCVDSGILRVWHDKDKDTSSDPLLELRVGPGVCRMRQDPAHPHVVATGGKENALKIWDLQGSEEPVFRAKNVRNDWLDLRVPIWDQDIQFLPGSQKLVTCTGYHQVRVYDPASPQRRPVLETTYGEYSLTAMTLTPGGNSVIVGNTHGQLAEIDLRQGRLLGCLKGLAGSVRGLQCHPSKPLLASCGLDRVLRIHGTQNPRGLEHKVYLKSQLNCLLLSGRDNWEDEPQEPQEPNKVPLEDTETDELWASLEAAAKRKLSGLEQPQGALQTRRRKKKRPGSTSP

SEQ ID NO: 3000 - DNA, 557 bp, Homo sapiens
tttttttttttttttatgtgaatctcacaatatctgttttattaagatagtaaagaagacttttttactacaatagggttttgcagtagggagagagatctggctcaattccttcacaatgcctttctgagagaagataatcctcaatcccattcttgcccaacaagcatttgttattaagtttttcaacactttcatcacttggtagggaggtctccattcaagatatgtgtcagggaacatatcaaaagcagccattcccctttccccttccccatgtttttcacttaagtataagagatggtgagctctgtgttgtagggatgttcatcttacgtgccagactgacctagcacaggtgtttgtttgtttgtttgtattggagcacaggctgactgtatgcttcttgagggcagagactgtggcttcttcatctctgcatcttcaacacctcatgccaagtctggcacacagctctatatgtgcttgttgaatcagtgaaggagaaaacatgaatgtgggtgaggacaaaaatagtacacgctctagcctcgtgc

SEQ ID NO: 3001 - DNA, 207 bp, Homo sapiens
gagctcggtactggcactctagtcaagctattatcatctttcacctgaactcctgcactaatgtctgctgtccttgcattccactcctgccctcctacaatcactgacggcagccgcagggatctttataaaacgaaaatcagataatgtcacttccctgcttaaagccctttgagtggcttcccattgcacttagaaaaaaaaaag

SEQ ID NO: 3002 - DNA, 482 bp, Homo sapiens
  misc_feature (36)..(36): n is a, c, g, or t
  misc_feature (116)..(116): n is a, c, g, or t
gagggttttttttttttttttcttattttcataatnaaataagctatatttttattagtgggaaggtatttgtatataatttgatggaggttatttgccacaaccattttgtttgntttgtttaagacttttttctgggtccctcaggagtggcatttggcatatgtgcaaaaatatctgtatatcctaaatggtgccctaggactggaattgctaggtcaaaaggtgtgaagtctgttcttttggtaattattgccaaatttcctttgtagagggtgaaccaatttacaaacctatctgtaacttatgagtatacccatgttttttcatcttggtcaatataatatgaaaagataaatatctgaggagagttttaacttggatcttttatgaggaatgaggttgaatattttttaatgtttctaaaaactgtctgttcataccctttgtccatttttatataggttatttttttcttataa

SEQ ID NO: 3003 - DNA, 324 bp, Homo sapiens
ttttttttttttgttttttaattctttattgctttcttctaatctgaattgattagaacacaaattgcagttttagttaaactggggacgggggacaatgcttactaggaaagccaagtttcatgtggaaaatcctccctccccacaagcacacatcaaggatggaggaaatccttcaggagaaacgagatgcatgtctgatgcttagagctgaggatggcagctctaagctagatgtctcagcaggatggcacctacaagctgaggttaagacaccaggacactggctgtgtgatgtctggcaacttacttgtctccataagc

SEQ ID NO: 3004 - DNA, 435 bp, Homo sapiens
ttttttttttttttttttttttttttttttggttttactcaatcatttgttttatttgaaaacatgtctacactgcattgagcaccaacacaggtgtgaccaagaaacccacagtcctgtccccgcaggcactgggtccagtgtatgacttggggtggactgttatttttcacagtgaggggggaagaaaggataggaaagaaaagatggccattatcccaactcctgttcaggaatctgaacaatgaaagttatttaaactcatccagctcttctcattccccttctctcaatcagctggtgttcaaatatggaatctgaggccgagcgcagtggcacacgcctgtaatcccagcactttgggaggccgaggcgggcagatcacgaggtcaagagatagagatcatcctcgccgatacggtgaaaccccatctc

SEQ ID NO: 3005 - DNA, 1733 bp, Homo sapiens
ctctcacgcagccaacatggctccagtggagcacgttgtggcggatgctggggctttcctgcggcatgcggctctgcaggacatcgggaagaacatttacaccatccgggaggtggtcactgagattcgggacaaggccacacgcaggcggctcgctgtcctgccctacgagctgcggttcaaggagcccttaccggaatacgtgcggctggtgactgagttttcaaagaaaacaggagactaccccagcctctctgccacggacatccaagtgcttgcactcacataccagttggaagcagagtttgttggggtgtctcacctaaaacaagaaccacagaaggttaaggtgagctcatcgattcagcacccagaaacacctctgcacatttctggtttccatctgccctacaagcctaaacccccacaagaaacagaaaaaggacactcagcttgtgagcctgagaacctggaatttagttccttcatgttctggagaaaccctttgcccaacatcgatcatgaactgcaggagctgctgattgacagaggtgaggacgttccaagtgaggaggaggaggaggaagaaaacgggtttgaagacagaaaagatgacagcgatgacgacgggggtggctggataacccccagtaacatcaagcagatccagcaggagctggagcagtgtgacgtccccgaggacgtgcgggttggctgcctgaccacagacttcgccatgcagaatgttctgctgcagatggggctgcacgtgctggcggtgaacggcatgctgattcgtgaggcccggagctacatcttgcgctgccatggctgtttcaagacaacgtctgacatgagccgagtgttctgctcacactgtgggaacaagaccctgaagaaagtgtccgtgaccgtcagcgacgacggcaccctgcacatgcacttctcccgcaaccccaaggtgctgaacccccgcggcctccggtactcgcttcccactcccaaagggggcaaatacgccatcaacccccatctcaccgaggatcagcgcttccctcagctgcgactctcccaaaaggccaggcagaaaaccaacgtgttcgcccctgactacatcgccggggtgtcaccctttgtcgagaatgacatctccagccgctcagctaccctgcaggtccgggacagcaccttgggagctgggcggagacgcttaaatcccaacgcttccagaaagaagtttgtgaagaaaaggtgaagagcgagttcccgcaggcaaattggatgggcgtctggccgccgtggagttccggtgacccatttccccagccgtgtcgtctccaggaccacccgatggaaataacaggcgggcttcacggtgcggctctgtccgcccatgccccgctgggtctgcagggaactggactgtcccatggcctgtgagcaccggagcgcctggctgcctgccaaggaagtgcaattgcataaaaacagaaagaacaacgccctggagccaatcttcaagaaaggaatttccaaaggataatatttttctaataaatgcggctgcaacctcctgtgcatttaattaaataggccaaatttttgctgcttaggtcatctcaaggctgatacttgagctgtgtgcccagagatcatgcatttagatttatatttttgccagaaaatacaaggttataataaaactaagaactaccaaaaaaaaaaaaaaaaaa

SEQ ID NO: 3006 - protein, 412 aa, Homo sapiens [sequence omitted]

SEQ ID NO: 3007 - DNA, 436 bp, Homo sapiens
ttttcacaggggtcgaacacataacagtttatttcttacacttaaaaagttgactgcaagtccatcagcactccagtcaggtcccttctaaacagcgacctaaggacccaggttgcatccgtcttgtaagtatgccatttggaacatcttgctttcaggtcaccatgacaggcaaaagaaaactggagggtcatgcaaaactttttacagtccaccatggaaatagaaaatcacttctgtttacaatccctctgcttgaagtagtcaaatggcattgcctaactacaagaggtttggaagtgaacaggagcagatagatacatgatgagctgtaaatgcttttgccatattctacaaataatataagcttataaaaagcattttaatgaacaattctgaaaaactctatatggatacaaaatatcccataaatgta

SEQ ID NO: 3008 - DNA, 344 bp, Homo sapiens
  misc_feature (11)..(11): n is a, c, g, or t
  misc_feature (46)..(46): n is a, c, g, or t
  misc_feature (316)..(316): n is a, c, g, or t
  misc_feature (318)..(319): n is a, c, g, or t
  misc_feature (323)..(327): n is a, c, g, or t
caaagtgctgnggttacagacttgagccactgcacctggccatggngtgggttcttaattagatgtagctgataagaacgctagaccaaataggttctctgccttgccttttcgtttgttttgttttagctattatcagggaaccaaaaactttaaggagctagtactggtcttaatttttaataactagagatagcagagttagaaactaagttcaaagtgagagaacagctgcatttgtctttctgacctcatgcaattcctaggaaactctgtgttctgtgatttagtcaggcaataaaatgctctcactcanannaaannnnnaaaaaaaaaaaaaaaaa

SEQ ID NO: 3009 - DNA, 425 bp, Homo sapiens
aatcttttttttttttttttttcatcaaacaaacaaatatttactctgggcccacatgggtaagcacctgcaggctgctctgccagtggtctgcacatgccactgactgtgggaaatgcaatcccagcgtaaggtcagggctgactttttattcacttaggactagtaaagccatcactcatgctttcaagacaaatcccaacatatgcccattcccagggaaagccagcatctgcacactgttgaaacacacccaccctcggccctcacaacagccctgtgaggtaggctttcaggtgacctatggcttagagaaaaggagattgagggtcaaagaggcaaagggttaattaagtggcccctgggtctgccagatcctaaggctacgcgctgtctaacataaaacacagattcgcatcagacag

SEQ ID NO: 3010 - DNA, 306 bp, Homo sapiens
agtggggacccagttacctgcatattattaggccatttgaagttgcctgactgctcactgatgctttttaaaaatcactttttaagatttttttttctttttgtactttagctagtgtctgttcttgtatcttcaagtttgctaatcttttcttctgcagtttctaatctgctttagttcatccaatgtaattttcatctcaaatgtttttgtctttgaaagtttgatattggcttttcttgtttatctcccatgtctctatttaatgttttgattatatgagatacatgtataaaaacggtttta

SEQ ID NO: 3011 - DNA, 1926 bp, Homo sapiens
aaaaaaagcttctgccaagggtgggggcccacgcggaggcgatccgctcgttcctcccagggccatggggcgacgaggagagccctggcctccccgcgacccgcaccgcgacctgggccagacgcgccaccttccccggtcgcggtttgcttctctttaaaatgaggacagctcctcccttgggggctgtggtgacaggtgaaatgagaacgcactgaagacagctcttggtccaaagccccgcacacagggcatggtctagtggcccagtcaggacgcggaaacactccctggaggttctgacccactccctctcagcctccgcctggtctctgggttggctgttccagctccaaagagaaggaggaaccttttccttctgcagcccctccccaccagccccattccttagctggggtcagacctggggtcctcactgcagctggcctctggcagcgttctcaggctagccctccctgctgaaaagagaaccgtgtgggactcacaggtgtagtcgccgccgccagccgccatgggcaaacagaacagcaagctgcggcccgaggtgctgcaggacctgcgggagaacacggagttcaccgaccacgagctgcaggagtggtacaagggcttcctcaaggactgccccaccggccacctgaccgtggacgagttcaagaagatctacgccaacttcttcccctacggcgacgcttccaagttcgccgagcacgtcttccgcaccttcgacaccaacggcgacggcaccatcgacttccgggagttcatcattgcgctgagcgtgacctcgcggggcaagctggagcagaagctcaagtgggccttcagcatgtacgacctggacggcaacggctacatcagccgcagcgagatgctggagatcgtgcaggccatctacaagatggtgtcgtctgtgatgaagatgccggaggatgagtccaccccggagaagcgcacagacaagatcttcaggcagatggacaccaacaatgacggcaaactgtccttggaagaattcatcagaggtgccaagagcgacccctccatcgtccgcctgctgcagtgcgaccccagcagtgccagtcagttctgagcgagcggcccctggacagttgcagagaaacacaggcttgtcgtgccgtttaagctttgcttgcaagagtggatgccccgcaatcgttcctgctctcccgggccccgggcctggggcatgcgttgcacctgcccggcccggtggctgcgcctccctcctccacctgaccaacgcgacattcctcccctcacgcctggcccggtcccttccagggcaactcccagggatgtggtgacatgcagggttcaagtgttcttggttccaggcacctcccggctcacggggagctcagaggtccatgccgaggagaccaggcaggacctcccgaggctgcgccccggccggcccatgcgttttgtgatcccaagtgactctgtgggaagggtggggacgaggcgtcgggagggtatacagggagcccctcccgtgcatggctgcccccccgttcattttctccaccacagccgcttgcacgtatagatactgtggtcccctttcttttaatatataaattatgtatggtgaagtggagtgtattgtgtaggtcccgtatttaatgcctctgactgcctttgaagcgcagccctctgtggcccgcagccccctgagcctggctgttgtgtggtatttatgctctctttgtctgcctgtttctaaggaaatgcatgtgtgccctgagccgtgatgatcctcccatccgtgttgtgagcacaggcatttgtgtctggtctgtcctccctgttgattggtctggcatttccggtattaaaatgataaaataaatggcattttctgaaaaaaaaaaaaaaaaa

SEQ ID NO: 3012 - DNA, 2194 bp, Homo sapiens
ggggaaggaacactgtaggggatagctgtccacggacgctgtctacaagaccctggagtgagataacgtgcctggtactgtgccctgcatgtgtaagatgcccagttgaccttcgcagcaggagcctggatcaggcacttcctgcctcaggtattgctggacagcccagacacttccctctgtgaccatgaaactctgggtgtctgcattgctgatggcctggtttggtgtcctgagctgtgtgcaggccgaattcttcacctctattgggcacatgactgacctgatttatgcagagaaagagctggtgcagtctctgaaagagtacatccttgtggaggaagccaagctttccaagattaagagctgggccaacaaaatggaagccttgactagcaagtcagctgctgatgctgagggctacctggctcaccctgtgaatgcctacaaactggtgaagcggctaaacacagactggcctgcgctggaggaccttgtcctgcaggactcagctgcaggttttatcgccaacctctctgtgcagcggcagttcttccccactgatgaggacgagataggagctgccaaagccctgatgagacttcaggacacatacaggctggacccaggcacaatttccagaggggaacttccaggaaccaagtaccaggcaatgctgagtgtggatgactgctttgggatgggccgctcggcctacaatgaaggggactattatcatacggtgttgtggatggagcaggtgctaaagcagcttgatgccggggaggaggccaccacaaccaagtcacaggtgctggactacctcagctatgctgtcttccagttgggtgatctgcaccgtgccctggagctcacccgccgcctgctctcccttgacccaagccacgaacgagctggagggaatctgcggtactttgagcagttattggaggaagagagagaaaaaacgttaacaaatcagacagaagctgagctagcaaccccagaaggcatctatgagaggcctgtggactacctgcctgagagggatgtttacgagagcctctgtcgtggggagggtgtcaaactgacaccccgtagacagaagaggcttttctgtaggtaccaccatggcaacagggccccacagctgctcattgcccccttcaaagaggaggacgagtgggacagcccgcacatcgtcaggtactacgatgtcatgtctgatgaggaaatcgagaggatcaaggagatcgcaaaacctaaacttgcacgagccaccgttcgtgatcccaagacaggagtcctcactgtcgccagctaccgggtttccaaaagctcctggctagaggaagatgatgaccctgttgtggcccgagtaaatcgtcggatgcagcatatcacagggttaacagtaaagactgcagaattgttacaggttgcaaattatggagtgggaggacagtatgaaccgcacttcgacttctctaggaatgatgagcgagatactttcaagcatttagggacggggaatcgtgtggctactttcttaaactacatgagtgatgtagaagctggtggtgccaccgtcttccctgatctgggggctgcaatttggcctaagaagggtacagctgtgttctggtacaacctcttgcggagcggggaaggtgactaccgaacaagacatgctgcctgccctgtgcttgtgggctgcaagtgggtctccaataagtggttccatgaacgaggacaggagttcttgagaccttgtggatcaacagaagttgactgacatccttttctgtccttccccttcctggtccttcagcccatgtcaacgtgacagacacctttgtatgttccttgtatgttcctatcaggctgatttttggagaaatgaatgtttgtctggagcagagggagaccatactagggcgactcctgtgtgactgaagtcccagcccttccattcagcctgtgccatccctggccccaaggctaggatcaaagtggctgcagcagagttagctgtctagcgcctagcaaggtgcctttgtacctcaggtgttttaggtgtgagatgtttcagtgaaccaaagttctgataccttgtttacatgtttgtttttatggcatttctatctattgtggctttaccaaaaaataaaatgtccctaccagaagccttaaa

SEQ ID NO: 3013 - protein, 535 aa, Homo sapiens
MKLWVSALLMAWFGVLSCVQAEFFTSIGHMTDLIYAEKELVQSLKEYILVEEAKLSKIKSWANKMEALTSKSAADAEGYLAHPVNAYKLVKRLNTDWPALEDLVLQDSAAGFIANLSVQRQFFPTDEDEIGAAKALMRLQDTYRLDPGTISRGELPGTKYQAMLSVDDCFGMGRSAYNEGDYYHTVLWMEQVLKQLDAGEEATTTKSQVLDYLSYAVFQLGDLHRALELTRRLLSLDPSHERAGGNLRYFEQLLEEEREKTLTNQTEAELATPEGIYERPVDYLPERDVYESLCRGEGVKLTPRRQKRLFCRYHHGNRAPQLLIAPFKEEDEWDSPHIVRYYDVMSDEEIERIKEIAKPKLARATVRDPKTGVLTVASYRVSKSSWLEEDDDPVVARVNRRMQHITGLTVKTAELLQVANYGVGGQYEPHFDFSRNDERDTFKHLGTGNRVATFLNYMSDVEAGGATVFPDLGAAIWPKKGTAVFWYNLLRSGEGDYRTRHAACPVLVGCKWVSNKWFHERGQEFLRPCGSTEVD

SEQ ID NO: 3014 - DNA, 474 bp, Homo sapiens
ctctccttcgctgttcacgttcctgctgccttctagcttcccgctctctcctttgttgctcttctagccgtcgcctctgttctttctgctgctcaatccgcttctgtctctctgccagcagttgccttttatattcttcctgctcccggagctgttgctcctgtagtaactgttgtctccgaagagcctcggaacgttccttgttctcctgctgcagtctcaggaaatctcggcgaagagtagactcaccaggcacgttcacaatggaacttggctctccttcctgttcaggcacttcctcctcttcttcctcactcccactgtactcatactcagtttcatctttctcgcctctcttcttcctggtacgatctatatgatccttaagctggattctaacttgcctttcatttggctgatccccctataaaggatgtttcaaagctgctctgtagaggcccgctgcatgtattc

SEQ ID NO: 3015 - DNA, 690 bp, Homo sapiens
  misc_feature (9)..(10): n is a, c, g, or t
  misc_feature (31)..(31): n is a, c, g, or t
  misc_feature (54)..(54): n is a, c, g, or t
  misc_feature (70)..(70): n is a, c, g, or t
  misc_feature (244)..(244): n is a, c, g, or t
  misc_feature (257)..(257): n is a, c, g, or t
  misc_feature (298)..(298): n is a, c, g, or t
  misc_feature (301)..(302): n is a, c, g, or t
  misc_feature (319)..(319): n is a, c, g, or t
  misc_feature (332)..(332): n is a, c, g, or t
  misc_feature (339)..(339): n is a, c, g, or t
  misc_feature (356)..(356): n is a, c, g, or t
  misc_feature (363)..(363): n is a, c, g, or t
  misc_feature (372)..(372): n is a, c, g, or t
  misc_feature (383)..(383): n is a, c, g, or t
  misc_feature (394)..(394): n is a, c, g, or t
  misc_feature (397)..(398): n is a, c, g, or t
  misc_feature (402)..(402): n is a, c, g, or t
  misc_feature (409)..(409): n is a, c, g, or t
  misc_feature (424)..(424): n is a, c, g, or t
  misc_feature (433)..(433): n is a, c, g, or t
  misc_feature (441)..(442): n is a, c, g, or t
  misc_feature (448)..(448): n is a, c, g, or t
  misc_feature (451)..(451): n is a, c, g, or t
  misc_feature (454)..(454): n is a, c, g, or t
  misc_feature (460)..(460): n is a, c, g, or t
  misc_feature (462)..(462): n is a, c, g, or t
  misc_feature (465)..(465): n is a, c, g, or t
  misc_feature (471)..(471): n is a, c, g, or t
  misc_feature (480)..(480): n is a, c, g, or t
  misc_feature (493)..(493): n is a, c, g, or t
  misc_feature (503)..(503): n is a, c, g, or t
  misc_feature (506)..(507): n is a, c, g, or t
  misc_feature (509)..(510): n is a, c, g, or t
  misc_feature (519)..(519): n is a, c, g, or t
  misc_feature (524)..(525): n is a, c, g, or t
  misc_feature (528)..(528): n is a, c, g, or t
  misc_feature (534)..(534): n is a, c, g, or t
  misc_feature (538)..(538): n is a, c, g, or t
  misc_feature (542)..(542): n is a, c, g, or t
  misc_feature (552)..(553): n is a, c, g, or t
  misc_feature (559)..(560): n is a, c, g, or t
  misc_feature (563)..(563): n is a, c, g, or t
  misc_feature (569)..(569): n is a, c, g, or t
  misc_feature (572)..(572): n is a, c, g, or t
  misc_feature (575)..(575): n is a, c, g, or t
  misc_feature (584)..(584): n is a, c, g, or t
  misc_feature (600)..(600): n is a, c, g, or t
  misc_feature (605)..(605): n is a, c, g, or t
  misc_feature (611)..(611): n is a, c, g, or t
  misc_feature (613)..(613): n is a, c, g, or t
  misc_feature (618)..(618): n is a, c, g, or t
  misc_feature (625)..(625): n is a, c, g, or t
  misc_feature (639)..(639): n is a, c, g, or t
  misc_feature (642)..(642): n is a, c, g, or t
  misc_feature (647)..(648): n is a, c, g, or t
  misc_feature (652)..(652): n is a, c, g, or t
  misc_feature (656)..(656): n is a, c, g, or t
  misc_feature (661)..(661): n is a, c, g, or t
  misc_feature (664)..(664): n is a, c, g, or t
  misc_feature (666)..(666): n is a, c, g, or t
  misc_feature (672)..(672): n is a, c, g, or t
  misc_feature (675)..(675): n is a, c, g, or t
  misc_feature (680)..(681): n is a, c, g, or t
  misc_feature (686)..(686): n is a, c, g, or t
  misc_feature (688)..(688): n is a, c, g, or t
gcatggatnnggacgaggtgcacgtgggagnttgaaaccgtttatggccgatgnttgcttgcaaggtcanaaggaccggcccatcttactacctccaagagtgcttttctctctaataagaaaacatctactttgaaacatctactgggcgagaccaggagtgatggctcagcctgtaattctggaatttcgggaggccgaggcaggaagattccttgagcacaggagttccagaccagcctgnggcaatgtagcangacgctgtctctatttatacaataaaatttttttaaaaaanaanncaaaaaactcgaggggngggcccggtaccnaaatttngccctataggtgagtcngtatttnaatttcacntgggccggtcngtttttcaacngtnngtgnccttggngaaaaccccttgggnggttacccnaacctttnnactccngcnttnataagnanaantccccncctttttgngccaagcattggngtaaattagncgnntnntgggcccgnaaccnnatnaggccntttnccanacaaattttnntggacnnttnaccatnggnggnattggcaanatttgttacaggggtnaattntttttntnaaaantttcggnggtaaaattttttngtnaacannaacngctnatttnttntntccaanttnggctnnagatntngg

SEQ ID NO: 3016 - DNA, 374 bp, Homo sapiens
tttttttttttaaatgaatttaatctctctctagaaacagtgcactgattttacaaatgtccacatttggttttcagtttaccaagatgatgccagtatagctagtgagatgcagcaccccatcctcagccccctcgcctctggaagagacaccagactgcaaagggcaccgcgtacagaagctaacggaacttgaatgacaagacaaaaagagcagaatcagttagtgtgacacaacattctaacatgcctgattcttacatcaaatatggtaactttggggttggtagggggagacaaacaaggagaatccacttgggaacaatttgatgaagtttgcaaatcagcactttacccccaaattaacaacagct

SEQ ID NO: 3017 - DNA, 822 bp, Homo sapiens
  misc_feature (766)..(766): n is a, c, g, or t
tggcacgagggagaaaatcaaatcaatgtgccattcttccaggcgcgaggcagcagcggctgcagttcaacatgaaaggaggcttcctccctgcctgctaattacctgctcttcccgatctcatcgtttctgcctttgcaaagtgctactgagaagcgggaagaaacgtccgccacccatcccccttgctgcctgggggttcagacttgattgtgaaaccccattggcttcattggctccttgatttaaaccacgcccggctttctgccctctttgctgctgctgggccaggttgcccagccatatcccagccccgtctgcagggagccggaggctgctgctgctgctattgtgtggatgccgcgcgtgtcttctcttctttccagagatggctaacaggggcccgagctatggcttaagccgagaggtgcaggagaagatcgagcagaagtatgatgcggacctggagaacaagctggtggactggatcatcctgcagtgcgccgaggacatagagcacccgccccccggcagggcccattttcagaaatggttaatggacgggacggtcctgtgcaagctgataaatagtttatacccaccaggacaagagcccatacccaagatctcagagtcaaagatggcttttaagcagatggagcaaatctcccagttcctaaaagctgcggagacctatggtgtcagaaccaccgacatttttcaaacggtggatctatgggaagggaaggacatggcagctgtgcanaggacccctgatggcttaggcaccgtgcaatcaccaaggatgatggctgctttcgg

SEQ ID NO: 3018 - DNA, 650 bp, Homo sapiens
gcggccgcgtcgactacggctgcgagaagacgacagaaggggagcgaggcaagatggagttagtgcaggtcctgaaacgcgggctgcagcagatcaccggccacggcggtctccgaggctatctacgggtttttttcaggacaaatgatgcgaaggttggtacattagtgggggaagacaaatatggaaacaaatactatgaagacaacaagcaattttttggccgtcaccgatgggttgtatatactactgaaatgaatggcaaaaacacattctgggatgtggatggaagcatggtgcctcctgaatggcatcgttggcttcacagtatgactgatgatcctccaacaacaaaaccacttactgctcgtaaattcatttggacgaaccataaattcaacgtgactggcaccccagaacaatatgtaccttattctaccactagaaagaagattcaggagtggatcccaccttcaacaccttacaagtaaagacaatgaagaacagttgaaacatgcaaaatatggagcttttcatgtaattactcttttactggttaccattcactataattcacaattaaaattgtgtgactaaaaaaaaaaaaaaaaaaaaaaaaaaaaaaaaaaaaaaaaaaaaaaaaaaaaaaa

SEQ ID NO: 3019 - protein, 145 aa, Homo sapiens
MELVQVLKRGLQQITGHGGLRGYLRVFFRTNDAKVGTLVGEDKYGNKYYEDNKQFFGRHRWVVYTTEMNGKNTFWDVDGSMVPPEWHRWLHSMTDDPPTTKPLTARKFIWTNHKFNVTGTPEQYVPYSTTRKKIQEWIPPSTPYK

SEQ ID NO: 3020 - DNA, 341 bp, Homo sapiens
tttttttttttttttttaactttttaaactttttggttaaaaactaagacacaaacacacattagcctaaacccgcacagggtcaggaccatcagtgtcgctgtcttccacgtccgcatcctgtcccactgcaaggtcttcaggtggaataaccggcacagagctgtcgtctcctacgacgacgacggcttgttctagaataaccggcacatagctgtcgtctcctacgacgacgacggcttcttctagaataaccggcacagagctgtcgtctcctacgacgacgacggcttgttctagaataaccggcacatagctgtcgtctcctacgacgacgacgg

SEQ ID NO: 3021 - DNA, 549 bp, Homo sapiens
atccttaattaaattaatcccccccccccccggtcttgtcggctcctgtgtgtaggagggatttcggcctgagagcgggccgaggagattggcgacggtgtcgcccgtgttttcgttggcgggtgcctgggctggtgggaacagccgcccgaaggaagcaccatgatttcggccgcgcagttgttggatgagttaatgggccgggaccgaaacctagccccggacgagaagcgcagcaacgtgcggtgggaccacgagagcgtttgtaaatattatctctgtggtttttgtcctgcggaattgttcacaaatacacgttctgatcttggtccgtgtgaaaaaattcatgatgaaaatctacgaaaacagtatgagaagagctctcgtttcatgaaagttggctatgagagagattttttgcgatacttacagagcttacttgcagaagtagaacgtaggatcagacgaggccatgctcgtttggcattatctcaaaaccagcagtcttctggggccgctggcccaacaggcaaaaatgaagaaaaaaat

SEQ ID NO: 3022 - DNA, 661 bp, Homo sapiens
tggcacgaggagctgccgttgttctgggtactacagcagaagggtatgcggaagcgagcaccccagtctgagatggctcctgccggtgtgagcctgagggccaccatcctctgcctcctggcctgggctggcctggctgcaggtgaccgggtgtacatacaccccttccacctcgtcatccacaatgagagtacctgtgagcagctggcaaaggccaatgccgggaagcccaaagaccccaccttcatacctgctccaattcaggccaagacatcccctgtggatgaaaaggccctacaggaccagctggtgctagtcgctgcaaaacttgacaccgaagacaagttgagggccgcaatggtcgggatgctggccaacttcttgggcttccgtatatatggcatgcacagtgagctatggggcgtggtccatggggccaccgtcctctccccaacggctgtctttggcaccctggcctctctctatctgggagccttggaccacacagctgacaggctacaggcaatcctgggtgttccttggaaggacaagaactgcacctcccggctggaagcgcacaaggtcctgtctgccctgcaggctgtacagggcctggtagtggcccagggcagggctgatagccagggccaagctgctgctt
